United States Patent Application Publication US 2005/0208558 A1 - sequence listing, part 20

SEQ ID NO: 19588 - DNA, 8993 bp, DROSOPHILA
aaatgcggaaaagaccatggaaatatgtacacacgcgtcggcggcaaatggaaatgttggataaatatataaagagatatttttattcgcatatttatgggtattgtgtgaggaaataaaagagcgccaaagatttcaaggtgttgaagtgccagaatggcgatgagcacttgacggacgcctaagcccaggaaccttatccgcatccttgtagctgttgccttttatttttcccgccatcgcatccttcgacaacaatagaaacatcatccacttggctgccgagcaaagtgattaattcatttggacaagtttcccaaagcaaagtgcggggaatctagaaagagccaccaacaaaagtaacttttcagttgacagctcgcagtctgttgtggatgcctcctcgcatgtgtgtgagtgattgttgttgggctttcccccttccggttttccgctttcccgctttcccgcttttccgttcttccgctcttcctaactgtgcaatttatctttcgtatagttcgtacagtgggttactgcaccgcagacaataaaataaactgtgtcgagcggcggagaggagacccttgtgaagccctcagcatttaaattattccagccaaaagcaattgtcaccacggaccacatggcggatgagtgatgcagcggagaagccagcaaaaatctcaacacgccaaagagatctggctactctccgctcgttttattgcctttcgccataagtaaatccttattttatgaaaacaaatgaattttatggtcccacggaggagcaggctgctggcatcctaagtgggagccccataaaccaccatcgacatgtggagcaaattgaatttgattaacattttcggctcggaaacgacgtgggtggggcttacggacctaaaggtagccatgggttagatggacccttcaaagggaggagcgcaactctgatggttattattatggtgtggcaggtagaataatagcctgtatggatgaatatacaaagaaaggtgagagtctgtgattcgattcgactcacttgttgaacatccaaaaagggaaaccccatccagatgatgtcccaatgggtctagaatttaaaatccacaccttaagttaagttgccctaactttctcacaatcaaacatttaaatccatccatatttaacactggaacatctgcttgaatcggcaatggaaactaattgattgagttcccaaacacaactaggacaacattttcctgagtcatcgattcactcggtttccggccaacgatttgcggtcttcgcagaattttgatttgtctttgtcgcagcacaactacatgtactttaacccattttgcctgtgggtgatgggtggtggcagaccgacctatcccgaaccaccacccacttgccacccgcttgccactatttcgaactaaacgaaaatcaatagaaaaacaaataagtcaagacggaattgaaatagaagggatttcggaggggcatggggtatgcaggatgtttgcatgctggattttctgccgcatttatcccggggatttgcagttcactcaacctcaagacggatactcacttttttcccgctcttctcatcattcctctccattttttgcagttgacagtcgtcacctgaaggagtccatcgaacgagccgagttttcgctgcagttggagctctggttcggggagcagaacgggtcgagcagcctgaacggcaatggaggcggcagtgggatgggcagcttctccggacccgccagctctgccctgacactggcctccaccaggaacctgcagctgaactttcatccgggacgtggccttcactaccatctgcctgtgctgttcgactacttccatctggcggccatcagtgtgggcatccacgccagcctcgtggcccttcatcagccgtatatcaagtgagtagtggtgtgctcgaggtgcaccggaaaaaaagatgggatattaacataaaacatggaactactaaaagtaataaaagtgatgggtagatttactgatgttttctttaaacagttcttaatcactttcggttgctcacagatgcacatacttaagttaaaacttcaaaggattgaaaggcaatgatttttcgcagtgtagtcatgggttcaagtgtcattcgttgcaggagatgcaaagtgaagatgacaacatgatctctaatgtcaccgttgatacagtcatatttttcacagtaaattgaacccgccgcatgggcggcacgggtcagtgggcgtggcagttccccctttttttatcgtgtcctgttgcgtggggactgcagcatcagcttgagcagaaggatagaggggcgtgggagcttcgtaggcaactggcggccagttacccgcacaaatcatttccaactcattaaaattgcacacagactccgcaggacgcagtgcctcattttccgcccactgttcacacaaaagggagaggatacaaaaaatgtcgaggcataaattttaatgactctcgcaatgcaattgtcctttggctcctgtcccagtccgggaaaagttgctgggaaaaagtacacaacacgaaacttgcgcggctaacaagatgcggaggcgtggcacaatccgagggggcgtggccgcatccctggcggagtgcaacggcggagtcaatttttacgccgtttgattcggcaaaagttgtatccgtgcgccatgtgccatccgccagtatttccctcttattatccttgacaaagtttgccttcttttcagtgagtaattccttaatctgttttatattgctaaaagttgtcggcaattttcgagtgcaaatcctctgctatttttccaaccaggagcaccattttgaggtcctcgctcgaaacgaatcctttggcaaacacaatatgaaacggaatttgaaatttgctcaggcggcgtagtgcctccatctatctctcgtatgaataaaatatcatctcattcgactctggaattccttgttgaccttggcctttgccccgatgcggcatactcatcctgattaccaccagtcgccgccactcccccagccttcgtcctcgtgagcagcgccgtaaattgcctgattatctcgacaagctgaggtccaatcatgcccacagtcggattggcttaccagcggattttcggcggcgaaactttaaagagcttgggattaaattcttcgaagtagtggtgttattacaattttaagctcttgaactaaggattaaatcttagaattatttcccattcgtccaattctatttttttatttccttggcttccattgattacatacaatggaatttagatagatgtttattattatttcacaatttgatttcattaaatgtatgtatgccctctttttgcactctatagctagttgatttattctttcgttactatatttgtatatattgtacaaactaataagatatcaacgcaggttgtgtggcgaacatccttgttttcctgacaataagttgcagttgtaattgaaccgtttatcattttctataacctgcgatccatttatctcatttatgtgcgtcaacgatatcgaaataaacccaaacacataatccataccaatatcacctaaaaaaaaaaaacggatcaaaacccgaccaatacgacaatgaaaactgcggttgcggttgcaggaaaagcgtgttctcgtacatgaaattctggtaagagcccatcataactccatcacaactagatctccgtaattgtgtaaattccgtacttcaatccgctcggatcacgtagttggtgtagtttctgtggccagaagagcctgctttatgtatccgtatccgtccgtccgtccctgtccacatctcttcttttatgtgtactcttatatggtagatatgaagttgatgttgcgaaggaagtgaaggatttgatcgaggtcttttatggccttttcattattttttagtgcccctcgcagttcgaagccgtggagtgcgggcaaactgagctgcaggggaaacacttcgccaggacccttggaggcggtgttcttcggaccccagatcggtgggacgaccaagtgcagcggaggtcctgcgggcaggctgctccagtccagagccattcatcgcgagatctgcagcttgctgttaggtatggattctacttaagtccgcaaattaagtcaagtcacatctctcatcttccaggtgccattgagcaactgaaggccacccttaacgagttcagcacagtgctacctccgagcataaactcccagattggatcaccgcctctgagggagaatgacacgggagaacgactgcaactgctactggatcaggccaagcagctcgaggcggaggaggacttcgccattcgggccaactccgacatagcccaactgtgcgcggagagcattttctggtggagaagggtcctcctggcctccagatcctcgacggcagtgcacaccctgctggcgaggaaacaccacatactccgggtgcgtaggttcgccgagggcttctttgtgctggagcaaccgcggcatgcggcagcagctggttgtccggaccaaaccaatgggtcaccctcacccggccattgccagggatacgtggccatagcggagctggccaggaggagtcgctatctgcaatccctgccgccgcttccagttcattgcacccccatcgatggtgacgcctcgtccctgccgctgatcttcgaagatcgctacgtgaccacaaacagcacctatgccaggaggagatcaggcagtgatcctcagctggaggacgcagtctcggtggttggcgttcagaagaaaaaggtggacaagacccactcaagcagcagcttaaatggcatcaaagactgtttggcctgccactttgattacgattacccgcagaccaatggctcgggcccggctcatccgcacgccaagtgtgtgatcactccgagattcgctttgggcggggaagtgctccaggcgagtctcaccattgctcccagcaaggaagcagctccggaagccgtcgccccacccacactgcggcacaatctgtcccgacactcggtgaccggtttgctggaggatctcgatctggattccagtttgccagcacgtcacagcaagtccctggaccaactcgatggctgcgagggactagccacaaatccagtcagcacgaccaacaaccacactctaccccgactccaggcggacgatctgatgaggaacatatgtgagtttcgacagcggtatggaaaattcgactaccttcatgagatcaagctgctgaatcctcccaagcaacagcagcaggcggtgcctcagcagcagcaacagtgcaacaatggttacaactccctgcccaagtcgatggttccgccgaggaactcctatccacctcctcctccgagtcagcataccaccatgccgaggagcagttcctcgcagatacctcgagccgtggagatcgcccgggtgagggtttccgatatcaaggagatgttgaggcagggtcaactgcggaaggagtccagcagctcagagagcgacatgatgcagaagctccagatgctgagctcgaacagtgttcccttccgcttggaaggaaccagcaacaacaacaccaccagcagtgatcccaacaccagtggtttcagtgaatccctgccgaacttggctccgccaccggaattcgattcggactcgcagttgaggcggcaaaggagcaactccacttcgtcgctgagcgaggagagtggctgggtaagcagccggaggagctctctggcgatttccagtccggataccatcaccagtacgggtatgaccaatcggcaaaggcacacccagctcaacttggggatgggcatggctatggagacccgccttaatggcgagcagctgaggttacgcctacaaaaggtcctggaacagcagcagcttcagcagcagcacccccacaagaaccgaaaaaggcaggcagggacctccagtcaaagcaggactcctgcccgccaacagactgaggtacacaagaagatctcctcggtgacggtgaatatcaaacgggagcgctcccgttaccagctcgatagactacgacatctgcccaacggggagtccacggaggtggaggaaatggaaccacctccgaggaggaatcgccacaagactgcctgcgagaagtccaagtcggatttcgatataacaagtctgaaggacatgcaaccgttggatgcagtgtgcttgccacctccccagcagttccaggatcaagagcaggagttggcgctagtcctggccccgccgccacccgatgagttccgtgatccgccaccggagccagctccagcagcacccatagctccagttcctcctcctgctgctgcacttcccccaacgggaaagaccaagattgtcgcttgccatctgccaccacccctaaaggaacgccagcccattggagccattgataatccagtgtatcacatctacgagtcactgcgtcccatctccacgccggccattttcagcaacaagcctgtgctcaagtcccacagcttggcggagttgaagaggccccaaaaccttcctaatcactcgattaaccaccattgcaagacccacgccataaatgctaatggtaatgttctggagaatggtctggatcacgaacaggacgagatcaaggagaactccaatggccaggtgaggacgaacaagcagggccacggttccaataccaactccaagcacaagcgcaagggccaattggcctccgccgtgcaggaggctcctcccagcatctccctgctggagttcgagaagtaccgcgaggagttccgcaagcagatcaagtaccagggcagcatatattccgactacgtgcagctggcctccgaactgccatacttctacatcagcgacgagtaccgcgcattctcgcctaacggcatgcatctggtcatctgcgtccacgggctggatggcaactcagcggatctgcgactggtgcgcacctatctggagctggggttgcccggtgtcaatctggagttcctcatgtcggagagaaaccagggagacaccttttcggactttgacaccatgactgatcggtaagcaaaatacacttcgaagtcaatataaatttgatgtcattgtttaaatcatttaggctggttaccgagatactctaccatatcgatagctgcgcccttaatcccgctcgcatttccttcgtcgcccattcgctgggaacgataattgtgcggagtgctctggctaggccacaaatgaggcctttgctcccgcgactgcacaccttcctctcgctctccggaccccacctgggaacactctataatacgagtgggctggtgaacatgggtgagtctatacccattcttatacatttaagcgtggtgattaacccagggttgggcctcctttcgcaggaatgtggtttatgcagaagtggaagaagtccggatcactgctgcagctctgcatgcgagataccaccgatatgcggaacagtttcctgtaccggctgagccagaggagcaccctgcaccatttcaagaacatcctgctctgtggttctagccaggatcgctatgttccggcgcactcggcacgcttggagctttgcaaggctgccatgagggatagctcctcgttgggtaccatttacaggttcgattggaatggctccttgttaaaatcgtgactataaagattccttttcagggaaatggtgcacaacataatagctccgattttggccaggcccgaactgactttggcccgattcgatgtccaccatgccctgccccacacggccaacactttgatcggtcgagcggcgcacattgctgtcctggactcggagttgtttattgagaagtttatgctgatcgcaggactgaagtacttcagttaaccagggcactgaagaaatgtctgaaatgtctttagaagagtcctagcgaattaatcaagtactaaacacagtcggaagattcaactaccaatttgataaaattaaaaaaaaaaaagattattttcttataagtatttaattacagcatgtttgtatagtttaaaagtcatatgtttcattttgtttcttcgttttgtcaagagttttgtttgtataactgtatatatggaaagttaagacatattctttttgaaacttacaatttctaacttgctgtactttctgttttatacgccgaacttttgaatacacagggtactcatacataattcgaagacaaaataagaaccacagtcatcagatcagccaaataattccaattgatcagcgattggaacaaggaatttattgaagcaaatcgttagacttgaattttttacaaatgcaactcttttgtagcgaattgaatacactcagatacgaacaaatcaaaaaccaaagaatgtttaatcaaaaacctataaccaaaaccaaagtcagcataatgttgaaacacacgcgttaaagataattacattgttagctgtaagagttgaacgcatacaaagcaaaaacaaaagccaaagacatcataagtagtgttaaattccagttcaaaactatacacgagactttttcgaaacggttgaattgcaaatgggaagtgaacgaaaacaagaacgatcatgttaagtatacgtaaactatcgatagtagttgagcacggcaaggcaaggttgcattttgatgacagtagcgaaatagtattagcaatttttaagactaatcaaaacacaaacagagacaaaatggttttttccaaatctttttactgctagacgagagaacaaatttagaagaactagagataaagtagaggtagtgttgaactagtcgagttgttagtagttgagtgcattattggatcgtcaattacgaggagagctggacgatgcaaagg

SEQ ID NO: 19589 - DNA, 4092 bp, DROSOPHILA
atggatgaatatacaaagaaagttgacagtcgtcacctgaaggagtccatcgaacgagccgagttttcgctgcagttggagctctggttcggggagcagaacgggtcgagcagcctgaacggcaatggaggcggcagtgggatgggcagcttctccggacccgccagctctgccctgacactggcctccaccaggaacctgcagctgaactttcatccgggacgtggccttcactaccatctgcctgtgctgttcgactacttccatctggcggccatcagtgtgggcatccacgccagcctcgtggcccttcatcagccgtatatcaatgcccctcgcagttcgaagccgtggagtgcgggcaaactgagctgcaggggaaacacttcgccaggacccttggaggcggtgttcttcggaccccagatcggtgggacgaccaagtgcagcggaggtcctgcgggcaggctgctccagtccagagccattcatcgcgagatctgcagcttgctgttaggtgccattgagcaactgaaggccacccttaacgagttcagcacagtgctacctccgagcataaactcccagattggatcaccgcctctgagggagaatgacacgggagaacgactgcaactgctactggatcaggccaagcagctcgaggcggaggaggacttcgccattcgggccaactccgacatagcccaactgtgcgcggagagcattttctggtggagaagggtcctcctggcctccagatcctcgacggcagtgcacaccctgctggcgaggaaacaccacatactccgggtgcgtaggttcgccgagggcttctttgtgctggagcaaccgcggcatgcggcagcagctggttgtccggaccaaaccaatgggtcaccctcacccggccattgccagggatacgtggccatagcggagctggccaggaggagtcgctatctgcaatccctgccgccgcttccagttcattgcacccccatcgatggtgacgcctcgtccctgccgctgatcttcgaagatcgctacgtgaccacaaacagcacctatgccaggaggagatcaggcagtgatcctcagctggaggacgcagtctcggtggttggcgttcagaagaaaaaggtggacaagacccactcaagcagcagcttaaatggcatcaaagactgtttggcctgccactttgattacgattacccgcagaccaatggctcgggcccggctcatccgcacgccaagtgtgtgatcactccgagattcgctttgggcggggaagtgctccaggcgagtctcaccattgctcccagcaaggaagcagctccggaagccgtcgccccacccacactgcggcacaatctgtcccgacactcggtgaccggtttgctggaggatctcgatctggattccagtttgccagcacgtcacagcaagtccctggaccaactcgatggctgcgagggactagccacaaatccagtcagcacgaccaacaaccacactctaccccgactccaggcggacgatctgatgaggaacatatgtgagtttcgacagcggtatggaaaattcgactaccttcatgagatcaagctgctgaatcctcccaagcaacagcagcaggcggtgcctcagcagcagcaacagtgcaacaatggttacaactccctgcccaagtcgatggttccgccgaggaactcctatccacctcctcctccgagtcagcataccaccatgccgaggagcagttcctcgcagatacctcgagccgtggagatcgcccgggtgagggtttccgatatcaaggagatgttgaggcagggtcaactgcggaaggagtccagcagctcagagagcgacatgatgcagaagctccagatgctgagctcgaacagtgttcccttccgcttggaaggaaccagcaacaacaacaccaccagcagtgatcccaacaccagtggtttcagtgaatccctgccgaacttggctccgccaccggaattcgattcggactcgcagttgaggcggcaaaggagcaactccacttcgtcgctgagcgaggagagtggctgggtaagcagccggaggagctctctggcgatttccagtccggataccatcaccagtacgggtatgaccaatcggcaaaggcacacccagctcaacttggggatgggcatggctatggagacccgccttaatggcgagcagctgaggttacgcctacaaaaggtcctggaacagcagcagcttcagcagcagcacccccacaagaaccgaaaaaggcaggcagggacctccagtcaaagcaggactcctgcccgccaacagactgaggtacacaagaagatctcctcggtgacggtgaatatcaaacgggagcgctcccgttaccagctcgatagactacgacatctgcccaacggggagtccacggaggtggaggaaatggaaccacctccgaggaggaatcgccacaagactgcctgcgagaagtccaagtcggatttcgatataacaagtctgaaggacatgcaaccgttggatgcagtgtgcttgccacctccccagcagttccaggatcaagagcaggagttggcgctagtcctggccccgccgccacccgatgagttccgtgatccgccaccggagccagctccagcagcacccatagctccagttcctcctcctgctgctgcacttcccccaacgggaaagaccaagattgtcgcttgccatctgccaccacccctaaaggaacgccagcccattggagccattgataatccagtgtatcacatctacgagtcactgcgtcccatctccacgccggccattttcagcaacaagcctgtgctcaagtcccacagcttggcggagttgaagaggccccaaaaccttcctaatcactcgattaaccaccattgcaagacccacgccataaatgctaatggtaatgttctggagaatggtctggatcacgaacaggacgagatcaaggagaactccaatggccaggtgaggacgaacaagcagggccacggttccaataccaactccaagcacaagcgcaagggccaattggcctccgccgtgcaggaggctcctcccagcatctccctgctggagttcgagaagtaccgcgaggagttccgcaagcagatcaagtaccagggcagcatatattccgactacgtgcagctggcctccgaactgccatacttctacatcagcgacgagtaccgcgcattctcgcctaacggcatgcatctggtcatctgcgtccacgggctggatggcaactcagcggatctgcgactggtgcgcacctatctggagctggggttgcccggtgtcaatctggagttcctcatgtcggagagaaaccagggagacaccttttcggactttgacaccatgactgatcggctggttaccgagatactctaccatatcgatagctgcgcccttaatcccgctcgcatttccttcgtcgcccattcgctgggaacgataattgtgcggagtgctctggctaggccacaaatgaggcctttgctcccgcgactgcacaccttcctctcgctctccggaccccacctgggaacactctataatacgagtgggctggtgaacatgggaatgtggtttatgcagaagtggaagaagtccggatcactgctgcagctctgcatgcgagataccaccgatatgcggaacagtttcctgtaccggctgagccagaggagcaccctgcaccatttcaagaacatcctgctctgtggttctagccaggatcgctatgttccggcgcactcggcacgcttggagctttgcaaggctgccatgagggatagctcctcgttgggtaccatttacagggaaatggtgcacaacataatagctccgattttggccaggcccgaactgactttggcccgattcgatgtccaccatgccctgccccacacggccaacactttgatcggtcgagcggcgcacattgctgtcctggactcggagttgtttattgagaagtttatgctgatcgcaggactgaagtacttcagttaa

SEQ ID NO: 19590 - protein, 1363 aa, DROSOPHILA
MDEYTKKVDSRHLKESIERAEFSLQLELWFGEQNGSSSLNGNGGGSGMGSFSGPASSALTLASTRNLQLNFHPGRGLHYHLPVLFDYFHLAAISVGIHASLVALHQPYINAPRSSKPWSAGKLSCRGNTSPGPLEAVFFGPQIGGTTKCSGGPAGRLLQSRAIHREICSLLLGAIEQLKATLNEFSTVLPPSINSQIGSPPLRENDTGERLQLLLDQAKQLEAEEDFAIRANSDIAQLCAESIFWWRRVLLASRSSTAVHTLLARKHHILRVRRFAEGFFVLEQPRHAAAAGCPDQTNGSPSPGHCQGYVAIAELARRSRYLQSLPPLPVHCTPIDGDASSLPLIFEDRYVTTNSTYARRRSGSDPQLEDAVSVVGVQKKKVDKTHSSSSLNGIKDCLACHFDYDYPQTNGSGPAHPHAKCVITPRFALGGEVLQASLTIAPSKEAAPEAVAPPTLRHNLSRHSVTGLLEDLDLDSSLPARHSKSLDQLDGCEGLATNPVSTTNNHTLPRLQADDLMRNICEFRQRYGKFDYLHEIKLLNPPKQQQQAVPQQQQQCNNGYNSLPKSMVPPRNSYPPPPPSQHTTMPRSSSSQIPRAVEIARVRVSDIKEMLRQGQLRKESSSSESDMMQKLQMLSSNSVPFRLEGTSNNNTTSSDPNTSGFSESLPNLAPPPEFDSDSQLRRQRSNSTSSLSEESGWVSSRRSSLAISSPDTITSTGMTNRQRHTQLNLGMGMAMETRLNGEQLRLRLQKVLEQQQLQQQHPHKNRKRQAGTSSQSRTPARQQTEVHKKISSVTVNIKRERSRYQLDRLRHLPNGESTEVEEMEPPPRRNRHKTACEKSKSDFDITSLKDMQPLDAVCLPPPQQFQDQEQELALVLAPPPPDEFRDPPPEPAPAAPIAPVPPPAAALPPTGKTKIVACHLPPPLKERQPIGAIDNPVYHIYESLRPISTPAIFSNKPVLKSHSLAELKRPQNLPNHSINHHCKTHAINANGNVLENGLDHEQDEIKENSNGQVRTNKQGHGSNTNSKHKRKGQLASAVQEAPPSISLLEFEKYREEFRKQIKYQGSIYSDYVQLASELPYFYISDEYRAFSPNGMHLVICVHGLDGNSADLRLVRTYLELGLPGVNLEFLMSERNQGDTFSDFDTMTDRLVTEILYHIDSCALNPARISFVAHSLGTIIVRSALARPQMRPLLPRLHTFLSLSGPHLGTLYNTSGLVNMGMWFMQKWKKSGSLLQLCMRDTTDMRNSFLYRLSQRSTLHHFKNILLCGSSQDRYVPAHSARLELCKAAMRDSSSLGTIYREMVHNIIAPILARPELTLARFDVHHALPHTANTLIGRAAHIAVLDSELFIEKFMLIAGLKYFS

SEQ ID NO: 19591 - DNA, 4373 bp, DROSOPHILA
ggcaatggcatgatccttacgaaacaagctaatgacactgttagaaaactggtttatggttaggtggcgtttatttaccaatctgcggctttgttaacaaattaaatcgcacaattgcagccattttcgggacaactgactgacagctgaaatgtgacgtttgtacgcagcgctgccagatggtccgaataattaatagtgcagattaatcaggggctttcgagcacgtaatcagctgtaattaataaattgtttcattttaaacaatgaattaaaaatgtcttacttattaaacacaacggaaaccattaaaaccattttaaaatgttttgagccaatgtgatgtttctttcacaactaagcagccctggtgtaaacggggctcaagttcaaagccaaaatcaaagcaacagtaaatacgtccacactgtatactctactatttgtttagttagaaaaatggcccataagcagagcacgaacaatgagacatccaatggctcgacaactgaaataattgacgaaaccgatgcccgtgctcaattggaatcgggccggaccacacccactcttctgttgcgcctcgaacatccgcggaatgaacgccgggtggcctttcacgctgggatcatcgacaacgagcatttgaatcgcaagaagtccaaatgtaagcattgattgtttcatcgaaggaccagactgatttcctcccatttcaggctgctgcatttacaaaaaacctctcgcgttcggcgagagctcctctgaggatgacgaagactgtgagcactgctttggacatccggaaaagcgtcagagaaacgcaaaacacaatcacaatcacggggacaaaccatgcacggaggcgtcgcatccggaaggaccttcgacatcaacgcaggccgcgcacatcagtcaaccgccagccgagcctgttgaatcgaagaccgatccaaaaccacctaccccaggtgttgactttgagcagacgggcagctcgtagaatgtatatatataattataaacgttaacaacatggaaccaactagcaagcactcagatctacaaagacggtgtttttaggcagtaagaaccacttggggatttgaaatcgtatgcagtcattagtttttcggcttcaactcaaaggattcgctgacgttaatggggatattgaactcctttgcctttgctcgtgatcgccagacctaaggaaacatggatgcttaaaactgcaagattggagaagtcttacatcataccttaattgtgtagtcgtcgctggtggtgaccagcatctccgagtcgcgaggattgaaggccacactgttaaccacatccgagtgcttaaactttgctaggctgatgccgtagtacctatcccacaggtaggcatgttgatcttccgctccactggccacgtactcctcgcaaacatcaaggaagataaagaagcactccgcgctgggagtgtaggccttgtgggcgcgcagcatgttgcccacccgcttgagagtcattaggtcaattacgtggatgtcaatctcttgagcaattggtggcggctccagagggttggtgatcacgtagttctttggccagggacgtgtgttgacgtacaagtagcggtggtccgggctcagtgccatgccaataatatgtccgtgcaagtcaattaccttgtccaccttgtcgaatctatccttgactgactcataatcccaccagtctggatcagtccgcggggtctgctgctgttgctgttcggcagcgcgctttgcagctattctttctttaagacttggcccaggatcaagctttttgggaaagaacacgttgcgtatgcgcttgaatccaatttggtgaggcgtgaaggtggtggagcccgttgaaaaaattagatatttgggtatactgttctccatttcgtcgtattcctcttgtacgtccatagagtcgtactcctcgtcgtcgtcatcgttcgattcattagtggtggccactgctgtcctgtattcatctaagtagtgaatggtggcatcgccgagtctcgctctagaacggcgctcactgatgtccggcaagtagttttcttcgggtgttgagcttcttgtgcgtagtatgctggcagcgtgggacactggattgccactggcctgcgaggtagatccctgatctccagtgggtggcgagagcactgagctgtgactttcttggtcggcagtagtggccaggggatcgttactctcgtccagccatggacacctggccaccattatagctcgaaccgaactagcatttcggttgtaaaacttatatagctggctcatgatcggcacatgctccgagtcaatttcttggttggccttgttcagccacagaaccgaggtgctcaccaagtgcgccagccagtgcaggtcgcctgagatcagatattggtcactgaaccaggtgccaaagatgtcatacggacgatttaccacccggcagcgtaggtgtgactctgttgctcccaaatagaatacagcaatctccccggaagtggattggggcgaaccaaagtgaacaccggagacgagaagcaaggtgtcgctttgattgaactgcgagtattgggagtacttccagctgaactgcttcatgttgtgcgcatacttctccgaacacggatgctgggcgttccagatctgcaaagagaagttattagtatcgttccgttaaggcaccagggtgcactcactatcacatatccgtccttggagcaggtggcaaacatttccccgttgtgggcaaagcttacatgcagcacttggtgcgtgtggccgtggttgttctccacagtgggctccagtcgctgtgcctggacaaagggtatgtgcatggacaggcgcttgtactccgctcgccagctttcggaccccggcttgagcggaatgctcggagaggctttgaagtgctcctggaacttgtggcgccacaataagtcgtccttggcgatgctgtgccaccgcacacagcagcgactcgccctcagcagatcgggcacactcaggcgctcaaagatcatcaagagcgctggctccggcagggcccaccacccaaacaaatcttggccagaggagccctcatcgcgttcctcctcctccgattgttccaccagtctctcctttcccagtcgggccttcttgaaggtcacttccatggggatagagaagctagatcttcgtctttttcgagcaagttacggccaaactgatgtttcgccgtcagtgtgcccttgggtaataactggtttagcttgccttgtttccgcggcttcgcgattaaagataactttcccccttattgttattgtttgcggaggccaacggaacagctgttgcaagaactcgaccactctcactcgcttggttatcgatatcaggcaaatgttatcgaaaagcaagtggtcttgcaatcaaattgaaaactcgattcgaagattcccagtagtaagttggctcaaaatttatctttggcagttgcagtagttcaaaaattaagttaacaatataatcagattgagtactgttaccaagatatcgaaataaaaaattttaaatatatgtatcgtcaatatacccttgtttttaagcagtgctgagtatgcatgttatgtagacgcgacaatgaaatatgtaaggttcttaaaatattctacccacagaactaaaaatgccggcatgtctgcgctcacttagcccccgatggtgagtttactcatatactaagatgatcatggccaccacgcttctgattccttcagcttccagcagctacttcgcccactgggtcgacatctgggctcgtacagcaaggcggtggttattgcggctgccgttaggacaccgagtgctccctttcgggcggaggagcagcgactggcgggcctggtggtggatgaactagtcaaacgcaccagcgtgccgcgcgaggagtacaacaaacttattgtttgctcctccctcaagacgcccgctccagagtgcagggagcggctttccagcgtggcccaagagttgggcctcaagtgtgagaccctcgccctgcaggacgacgtctgctccatcagcggtctgcagatgacgctggactgcctggagcgcggcgaagaccagtgcatcattacgggcgacactcgctgtcaggttgttcagccggagcacggcgttctgtccaacgagcttatgaccgtgcagcagccccaaactcgcaagcgagctggaactgaactggccaccgagccagagttgacgcccacgctaggtgccgctgctttggcctggactactatgcagacagcacagcgtctgaacctgcaaccgctcgccctg

SEQ ID NO: 19592 - DNA, 2179 bp, DROSOPHILA
ttccgttggcctccgcaaacaataacaataagggggaaagttatctttaatcgcgaagccgcggaaacaaggcaagctaaaccagttattacccaagggcacactgacggcgaaacatcagtttggccgtaacttgctcgaaaaagacgaagatctagcttctctatccccatggaagtgaccttcaagaaggcccgactgggaaaggagagactggtggaacaatcggaggaggaggaacgcgatgagggctcctctggccaagatttgtttgggtggtgggccctgccggagccagcgctcttgatgatctttgagcgcctgagtgtgcccgatctgctgagggcgagtcgctgctgtgtgcggtggcacagcatcgccaaggacgacttattgtggcgccacaagttccaggagcacttcaaagcctctccgagcattccgctcaagccggggtccgaaagctggcgagcggagtacaagcgcctgtccatgcacataccctttgtccaggcacagcgactggagcccactgtggagaacaaccacggccacacgcaccaagtgctgcatgtaagctttgcccacaacggggaaatgtttgccacctgctccaaggacggatatgtgataatctggaacgcccagcatccgtgttcggagaagtatgcgcacaacatgaagcagttcagctggaagtactcccaatactcgcagttcaatcaaagcgacaccttgcttctcgtctccggtgttcactttggttcgccccaatccacttccggggagattgctgtattctatttgggagcaacagagtcacacctacgctgccgggtggtaaatcgtccgtatgacatctttggcacctggttcagtgaccaatatctgatctcaggcgacctgcactggctggcgcacttggtgagcacctcggttctttcggttcgagctataatggtggccaggtgtccatggctggacgagagtaacgatcccctggccactactgccgaccaagaaagtcacagctcagtgctctcgccacccactggagatcagggatctacctcgcaggccagtggcaatccagtgtcccacgctgccagcatactacgcacaagaagctcaacacccgaagaaaactacttgccggacatcagtgagcgccgttctagagcgagactcggcgatgccaccattcactacttagatgaatacaggacagcagtggccaccactaatgaatcgaacgatgacgacgacgaggagtacgactctatggacgtacaagaggaatacgacgaaatggagaacagtatacccaaatatctaattttttcaacgggctccaccaccttcacgcctcaccaaattggattcaagcgcatacgcaacgtgttctttcccaaaaagcttgatcctgggccaagtcttaaagaaagaatagctgcaaagcgcgctgccgaacagcaacagcagcagaccccgcggactgatccagactggtgggattatgagtcagtcaaggatagattcgacaaggtggacaaggtaattgacttgcacggacatattattggcatggcactgagcccggaccaccgctacttgtacgtcaacacacgtccctggccaaagaactacgtgatcaccaaccctctggagccgccaccaattgctcaagagattgacatccacgtaattgacctaatgactctcaagcgggtgggcaacatgctgcgcgcccacaaggcctacactcccagcgcggagtgcttctttatcttccttgatgtttgcgaggagtacgtggccagtggagcggaagatcaacatgcctacctgtgggataggtactacggcatcagcctagcaaagtttaagcactcggatgtggttaacagtgtggccttcaatcctcgcgactcggagatgctggtcaccaccagcgacgactacacaattaaggtctggcgatcacgagcaaaggcaaaggagttcaatatccccattaacgtcagcgaatcctttgagttgaagccgaaaaactaatgactgcatacgatttcaaatccccaagtggttcttactgcctaaaaacaccgtctttgtagatctgagtgcttgctagttggttccatgttgttaacgtttataattatatatatacattcta

SEQ ID NO: 19593 - protein, 627 aa, DROSOPHILA
MEVTFKKARLGKERLVEQSEEEERDEGSSGQDLFGWWALPEPALLMIFERLSVPDLLRASRCCVRWHSIAKDDLLWRHKFQEHFKASPSIPLKPGSESWRAEYKRLSMHIPFVQAQRLEPTVENNHGHTHQVLHVSFAHNGEMFATCSKDGYVIIWNAQHPCSEKYAHNMKQFSWKYSQYSQFNQSDTLLLVSGVHFGSPQSTSGEIAVFYLGATESHLRCRVVNRPYDIFGTWFSDQYLISGDLHWLAHLVSTSVLSVRAIMVARCPWLDESNDPLATTADQESHSSVLSPPTGDQGSTSQASGNPVSHAASILRTRSSTPEENYLPDISERRSRARLGDATIHYLDEYRTAVATTNESNDDDDEEYDSMDVQEEYDEMENSIPKYLIFSTGSTTFTPHQIGFKRIRNVFFPKKLDPGPSLKERIAAKRAAEQQQQQTPRTDPDWWDYESVKDRFDKVDKVIDLHGHIIGMALSPDHRYLYVNTRPWPKNYVITNPLEPPPIAQEIDIHVIDLMTLKRVGNMLRAHKAYTPSAECFFIFLDVCEEYVASGAEDQHAYLWDRYYGISLAKFKHSDVVNSVAFNPRDSEMLVTTSDDYTIKVWRSRAKAKEFNIPINVSESFELKPKN

SEQ ID NO: 19594 - DNA, 5575 bp, DROSOPHILA
cgtatttcggctttaaataacattataacattttccgaaaataaaaactaagaaataaatgattatttccgtttgcatacagcatttgaaagtcctgaaagtaggatttttagagatacgcgctactcatttatatggatatacaactagattgcattcaaatgtttttagaactttatacgtatactatttaagtgagtagaaggtatctcatgttaagggaaagtcttaacgactttaaagataaaatcttgttgatatttgaatatatatcctttgcttcttctctttttgtacgactgcgagagtataaaaaaagcttatttcaaagttacctcccgctggagtgaaggcaggcagggaagtttataggtaacgaaattaataactagaattagtagtcgaaaatgcatcgtaaggtcggagaaaaacttgaaaagataagtaataaatgtaacaaattgaaattattgccaaacttgagtgtgatttaatggagggtttcaaataatttttttttttaacgtgtcctaacctacagttctttattgcaaattaatattagtttttttttaaatggcttaccctgtcgaaatgacaaatcaccgacctgacctgactaccattgtcatacaagtaacaaaactgaattgcacccaattattcaattgtgagtttgccaacgtcattaaaccaggcgatactgaccttgttcaacaacacatagttggattggaaaagagccctgcttgaatcgattccaacataataggatagtatcgaatacttgatatcataacagtaggtagtttatagctttggctttactgtaacttcagattcaagcagagccctagtactgaggatcttaggatagaatagtttggattcgcttagaccagctccattcgatatggatttcaacattatgttcacaagtctcttccagctctggcgcaaggtgagatacaagcatctgaagctgaactcaacaccatagtcacttcttaccatatggggtttctttcttctccatcttgatggtgttttccggcgtgggcagtgcttcggttggcagtgctgttgtgagcagcacgacagaactgcagtcgttgccgccccatcccatgtcgcagaaacagcgattcgtattggtgcagacctggaatgcgtagatgggaagcaaagtgtagtcggggtaatgctacaatatcacacagttaaccttcatgcatgcgcccaaaattaatgactacatataagagtagagtagagtatgacactgttttgtgaacttacgccatgttctgagcactctagaccctgtgaattggccgggcatttggtctgatccacgtggggaaagagactgacgcacgtctggttgaggcaaattagattatcaccgcacggagttccgtccttaaccaggccgtgctccggataactgttggaacccacttgaccgctggtcgccctgtgaatactcaaacgattgtgagactatctctatgcgaacatcacctgctctcctccagccagctggccaattgctacgcacttgcattcaaattcctggcccttgatcgaaatgatggttctcgagtagagctgatcgatgccatcgttgactggctgccgttccccatccttgcactgcagggttccacactggacgttcctgtgggaaaggaatcacctttagatattttgactgcacaaggggatttttcttgatttgtatcaaactagattctacgagtatacttggaatactctatgcacttactctggttcgcacttaatgtagtgctcattggcatctcgaccgcaatgcccgttaattgagcctttagaattgaattgctcataacactgacgatccgcagctgagccaccataaccccaaattgcctcacattgcagactcagcgtggggcaatagccttgaaagcagtaacctagaaacaaaaagtacatatagtcacatatatgtactatttatagctctctctaacctgagatgccagtcttgcttagaccgcatggtgagccgttcttcttgaagacatccgacggacattgtccaatctcgccgtcgcagtactcgggcagatcgcactcgttattggagtcacggcaaatgtaatcctttggccgcaactgaaatgggggcaaatataacgatgagattggttggttacaaatcgaagaaacaatcgacaacttacgcgacattggtcacagcaggcaccactggcacactgggcctccgactttaacttgcacgttatgccatcacagcactgatccagagcgcactcctcgaaagttccacagtcgcactcctcgtcctcctcgaccaccttgttgccgcaatttcgtcgtaactcaatctatacacaatgattgatagaaacaaagggaattgagcataagaagaagtttctataattcccaacgggttgcgagttgaaccattttccgctgaatcctcacctcatttggcttgttgagcaaacacagtccgtggccagtccgcaatgcgtcaatgtaatcttttttactgcactcggaaaatttgtatggctggacattctcctggccgacaattgactgggccatgatgcaaccgtgccagtcgcggcaaaagcactcctcgcctacggcaaaaaatggtataaatggtatcaatggtaaaaatggcaaaaaaggcaaaagaggcaaaataaggcgaaaatggcgagaaagaaggtggaagaaaatgaggttctgtttggtggggagcagcgagatattgatgagataattcttacgtccgtcgtcgtgtcccatgccgatgttatggccaatcatgtgggccattgtgccggccaaaagatgcggctcatacacattcacatccacgctgatgcccacagcacggggcgtacaaacagtttcgggaacagccatgccagcctcaccgccagcgaatgtttcgccactgaaagagatagtatatatagtatatatgtaatatgtgagtcgatctatctatatcttgcaaatgcaatcttacgtcagcagctgtgtggtatctcgttcgatttggaacagatttcgtgaggtgtagtcattaaagttggatattgccttgctgatatccttgctgccatcgataaccgcctggtttttgccccaagtctcaatgtagacaaccgagacgcgggtgttcaacgtgcgaaagtactgcaaatatatgttaaattgttgaccaatggctattaatagcaacgcgtgatggttaccaaccagatcggctatgttggccacctgaatggcatcgtggatgacctcggcacgagtgctgccattgcgcttatcgaacattgccttgtcaacgatgatggccgtctcaatgtatttggtggcctcgcgcacatcccgcttgttgcggccaactcccgcctggaggatctcctccacgacgccagcaacaccggcggacaagtgcttggtgcggcgggatagacgccatgagtccagattgcctgagttggcgcaacctttgttcgcctttgtgcgagcctcgaagatgacatgtggatgtttctggagcgaaaattgagaaaataattgcatttgccacatgctccaactgggtgcaacttttcatttgtggtctacttacggacagatctccgccgtagaagggatggataacaaaggtctcgttaccgatgtgaatgacgccacttacaccgttgcaggtatggaatgctgcactggctccgggataatcctttacggtgccatgatagtagcagtgctcgatatcctgcaaagagtttagttttttaaatggtgccagagagatgtatatatagaggtagtgtaacggtcgtacaaaaacacacaaaatgagaaatatattccctacaaagttgtaattgttgaaaccttaactcacatgtcgatttccatccacaagatatccacccacgtggtagtgtttctgttgtatgtttggcgaaagaagttgtctgtgaagcacaatgcaagcacattaatgcattgaatgtaaattaaattaatcttatataagagagcttacgaattgagctccaagtccaagcgaaatttgtggttaaatgctttaatcagcaacgatgtgcgatgaaagtgtttctataagtagcaacataaatgcaggccaattagttacagagtttatgtaagtttataatccctttttaatacctttgttcttcccctgttgaatccactgtcgtcgtgcggtcgaggtctttgtcccggctggaaatatcgaaaggttaatcatgtacatatgtattggtattgtagttcacttgaagagaggtagttaaacttgagtggtgacgaaacgcaccacagggtcgttcttaccttcgggagactgacttcgcgcgtggatatgcccatcttctcgtgatggcgcagctgtactggatatataatttggtaatagtgaccaccaattcgacggacaagctcttgattttgcctgtactccttaagtaaacgttccacttctcctgaaatgcggcacatatttaaaataggaatttaatcggctagttgaactaaagatgaactcaccaacaggactttcttcattccaaaatgaatcatctagtgtgtaatctgcttctgcaaaaaggtaattttcatatatttagctctttgattgattcgctaagttaattaaggtatctaaagtgaattggaaataaagtgaaaattatttgctgccttgtttgaataaacacgatctatctagcagatatttccattaatttatgcgacaaaaaggccggaaatgtgccccctcttattttgcacaggaaagcaagcaatcaacttggtgatgccgtaaagcacttaaaacttcattaatgcaataattgccttaacctattagtgtttgtattgtttttttttaacatgataatggatcggtagggtttcagaatccaaacgctttgccgaatttcgtatgccacggtaaagcgtaggaattctaaaactctacagcaaccacaatttaatattgccatagatttaattaataatcgcttgcgcaattacaacaaattagttttaattaatgaatcaatgaatattctgcataaaatgaaattgcatttcagttgtgcaacaattatcgcttgtgaattgtgcagcaaaagcaatttgtaaaatgtcatgttcaacttgatgtcaatttttttttatttttgcgcagcaaataatttcgtttgaaatgaatgaaataatgttgcaatgatttaattaatctgctcaaacattgttttatcgcagcggccagaggaccagagagagagttttgcatgatttaaatacttatgcggttgattggtaaatctatttcacttatgtatatatgtatgtatgtattggacactcggattccataaagttgttatgattaattcaataatttactcaccccctgcagatgtgacgaaaacgcacagctgagcaatgatgaggattaaattggcgatatttatccacatgacggcggctg

SEQ ID NO: 19595 - DNA, 2058 bp, DROSOPHILA
atgtgccgcatttcaggagaagtggaacgtttacttaaggagtacaggcaaaatcaagagcttgtccgtcgaattggtggtcactattaccaaattatatatccagtacagctgcgccatcacgagaagatgggcatatccacgcgcgaagtcagtctcccgaaggatatcgagcactgctactatcatggcaccgtaaaggattatcccggagccagtgcagcattccatacctgcaacggtgtaagtggcgtcattcacatcggtaacgagacctttgttatccatcccttctacggcggagatctgtccaaacatccacatgtcatcttcgaggctcgcacaaaggcgaacaaaggttgcgccaactcaggcaatctggactcatggcgtctatcccgccgcaccaagcacttgtccgccggtgttgctggcgtcgtggaggagatcctccaggcgggagttggccgcaacaagcgggatgtgcgcgaggccaccaaatacattgagacggccatcatcgttgacaaggcaatgttcgataagcgcaatggcagcactcgtgccgaggtcatccacgatgccattcaggtggccaacatagccgatctgtactttcgcacgttgaacacccgcgtctcggttgtctacattgagacttggggcaaaaaccaggcggttatcgatggcagcaaggatatcagcaaggcaatatccaactttaatgactacacctcacgaaatctgttccaaatcgaacgagataccacacagctgctgactggcgaaacattcgctggcggtgaggctggcatggctgttcccgaaactgtttgtacgccccgtgctgtgggcatcagcgtggatgtgaatgtgtatgagccgcatcttttggccggcacaatggcccacatgattggccataacatcggcatgggacacgacgacggacgcgaggagtgcttttgccgcgactggcacggttgcatcatggcccagtcaattgtcggccaggagaatgtccagccatacaaattttccgagtgcagtaaaaaagattacattgacgcattgcggactggccacggactgtgtttgctcaacaagccaaatgagattgagttacgacgaaattgcggcaacaaggtggtcgaggaggacgaggagtgcgactgtggaactttcgaggagtgcgctctggatcagtgctgtgatggcataacgtgcaagttaaagtcggaggcccagtgtgccagtggtgcctgctgtgaccaatgtcgcttgcggccaaaggattacatttgccgtgactccaataacgagtgcgatctgcccgagtactgcgacggcgagattggacaatgtccgtcggatgtcttcaagaagaacggctcaccatgcggtctaagcaagactggcatctcaggttactgctttcaaggctattgccccacgctgagtctgcaatgtgaggcaatttggggttatggtggctcagctgcggatcgtcagtgttatgagcaattcaattctaaaggctcaattaacgggcattgcggtcgagatgccaatgagcactacattaagtgcgaaccagagaacgtccagtgtggaaccctgcagtgcaaggatggggaacggcagccagtcaacgatggcatcgatcagctctactcgagaaccatcatttcgatcaagggccaggaatttgaatgcaaggcgaccagcggtcaagtgggttccaacagttatccggagcacggcctggttaaggacggaactccgtgcggtgataatctaatttgcctcaaccagacgtgcgtcagtctctttccccacgtggatcagaccaaatgcccggccaattcacagggtctagagtgctcagaacatggcgtctgcaccaatacgaatcgctgtttctgcgacatgggatggggcggcaacgactgcagttctgtcgtgctgctcacaacagcactgccaaccgaagcactgcccacgccggaaaacaccatcaagatggagaagaaagaaaccccatatggtaagaagtga

SEQ ID NO: 19596 - protein, 685 aa, DROSOPHILA
MCRISGEVERLLKEYRQNQELVRRIGGHYYQIIYPVQLRHHEKMGISTREVSLPKDIEHCYYHGTVKDYPGASAAFHTCNGVSGVIHIGNETFVIHPFYGGDLSKHPHVIFEARTKANKGCANSGNLDSWRLSRRTKHLSAGVAGVVEEILQAGVGRNKRDVREATKYIETAIIVDKAMFDKRNGSTRAEVIHDAIQVANIADLYFRTLNTRVSVVYIETWGKNQAVIDGSKDISKAISNFNDYTSRNLFQIERDTTQLLTGETFAGGEAGMAVPETVCTPRAVGISVDVNVYEPHLLAGTMAHMIGHNIGMGHDDGREECFCRDWHGCIMAQSIVGQENVQPYKFSECSKKDYIDALRTGHGLCLLNKPNEIELRRNCGNKVVEEDEECDCGTFEECALDQCCDGITCKLKSEAQCASGACCDQCRLRPKDYICRDSNNECDLPEYCDGEIGQCPSDVFKKNGSPCGLSKTGISGYCFQGYCPTLSLQCEAIWGYGGSAADRQCYEQFNSKGSINGHCGRDANEHYIKCEPENVQCGTLQCKDGERQPVNDGIDQLYSRTIISIKGQEFECKATSGQVGSNSYPEHGLVKDGTPCGDNLICLNQTCVSLFPHVDQTKCPANSQGLECSEHGVCTNTNRCFCDMGWGGNDCSSVVLLTTALPTEALPTPENTIKMEKKETPYGKK

SEQ ID NO: 19597 - DNA, 3351 bp, DROSOPHILA
ccgttaaggcaccagggtgcactcactatcacatatccgtccttggagcaggtggcaaacatttccccgttgtgggcaaagcttacatgcagcacttggtgcgtgtggccgtggttgttctccacagtgggctccagtcgctgtgcctggacaaagggtatgtgcatggacaggcgcttgtactccgctcgccagctttcggaccccggcttgagcggaatgctcggagaggctttgaagtgctcctggaacttgtggcgccacaataagtcgtccttggcgatgctgtgccaccgcacacagcagcgactcgccctcagcagatcgggcacactcaggcgctcaaagatcatcaagagcgctggctccggcagggcccaccacccaaacaaatcttggccagaggagccctcatcgcgttcctcctcctccgattgttccaccagtctctcctttcccagtcgggccttcttgaaggtcacttccatggggatagagaagctagatcttcgtctttttcgagcaagttacggccaaactgatgtttcgccgtcagtgtgcccttgggtaataactggtttagcttgccttgtttccgcggcttcgcgattaaagataactttcccccttattgttattgtttgcggaggccaacggaacagctgttgcaagaactcgaccactctcactcgcttggttatcgatatcaggcaaatgttatcgaaaagcaagtggtcttgcaatcaaattgaaaactcgattcgaagattcccagtagtaagttggctcaaaatttatctttggcagttgcagtagttcaaaaattaagttaacaatataatcagattgagtactgttaccaagatatcgaaataaaaaattttaaatatatgtatcgtcaatatacccttgtttttaagcagtgctgagtatgcatgttatgtagacgcgacaatgaaatatgtaaggttcttaaaatattctacccacagaactaaaaatgccggcatgtctgcgctcacttagcccccgatggtgagtttactcatatactaagatgatcatggccaccacgcttctgattccttcagcttccagcagctacttcgcccactgggtcgacatctgggctcgtacagcaaggcggtggttattgcggctgccgttaggacaccgagtgctccctttcgggcggaggagcagcgactggcgggcctggtggtggatgaactagtcaaacgcaccagcgtgccgcgcgaggagtacaacaaacttattgtttgctcctccctcaagacgcccgctccagagtgcagggagcggctttccagcgtggcccaagagttgggcctcaagtgtgagaccctcgccctgcaggacgacgtctgctccatcagcggtctgcagatgacgctggactgcctggagcgcggcgaagaccagtgcatcattacgggcgacactcgctgtcaggttgttcagccggagcacggcgttctgtccaacgagcttatgaccgtgcagcagccccaaactcgcaagcgagctggaactgaactggccaccgagccagagttgacgcccacgctaggtgccgctgctttggcctggactactatgcagacagcacagcgtctgaacctgcaaccgctcgccctgctacgagagttcgctgtagagcaggatcacgagcaggctatgttccgtctggatggtagggaacccgtgacgcccagtgatatctacacctggaacatggtcacaggcacacaaaagggtatacctgaaagcatacttggcgatctacatgccaaccgcctgtgcacgcatgacttcaaacaaatcacagccagccacctgctaacgcatctagtccattcccttcctgcaggcggactgggttgcgcttttatgggcacgacggatggccgttccatggccatggtacttgagaagctgtgagttttgatctcggttatgcctgcttctactaacacaaatcatcttgcagggtgccaagcattgatcaggtggagggccttccgttgctcactttgtataccagggagccctgtccactgtgcgacgaccttgtagagcagttggaacagggctttgcaggtcaataccgtctggagaaggtttacatcgaccgaaaggaaaacgttaggttcctccgcctcttcaggcacgacattcccgttctgttcttcaacggccagttcctatgcatgcaccggctaaacgaggaagcactaagagagcggctggaggcgctaaactagtccgataatcgttggaaaaatcgtaaacaaacaaaattcaattcagttcaagaaaattcataactcaagctctactctacttgtttatgattaatatggggcatgcatattgcgcagagtttttattaagtacagtgtgtttttcatactataatccttgaaatttatattttgctctgcatggctattataaccggaagaagtttaaaacatttcgcccatgggtttgatagtgatttcatgtacctgaaggtggttagttaaattggtcataagttaatacataatagtgattatgctcacctgaacatgaggcggagttcgcagagcatacatcactgcgtccgcaatgttcgctggttcgagtctggccatgtctttgacgtaaaaatggatctcttccgggaagatgttcgtgttcaccgcaccaggacagatgccagtaacccggattttgttcgagtgcagctgaaattcctgccgatatgtctctgtgatggcggtgatggcaaacttggtggccggatatatattgaacgatggcaaaacgtcgatgaagttgagcacctgatgtccggctatgctgttgatgatgagaacgtgaccttcgccacctcgccgtttcatgttattgaacgcctcgcgggtacaccaaatcacgcccattacgttggtgtctatgacctccttaagcttctgcgtattgctcggggtgaccagttccgtctcgcgagtaatgccagcattgttcagcagcacgtcggcgccctccagctcccgttcgatccagtcaaaagagctctgcacctgatcttccttggagacgtcgcagcgccgcggtatgaagttcgcctgcagctcccggggcagactctccctgagctctttcaacttggcctcccgacgtgccaggcccaccacccgtagtccagcgccgatcatggcccgagcacaagcggcgcctatgcctccgctggctcctgttaccacagccagtttgttctgccaccgctccatgccgtcttgtgaatgaggagctgatgcaagtaagaagcccgcatcggaa

SEQ ID NO: 19598 - DNA, 1242 bp, DROSOPHILA
atgccggcatgtctgcgctcacttagcccccgatgcttccagcagctacttcgcccactgggtcgacatctgggctcgtacagcaaggcggtggttattgcggctgccgttaggacaccgagtgctccctttcgggcggaggagcagcgactggcgggcctggtggtggatgaactagtcaaacgcaccagcgtgccgcgcgaggagtacaacaaacttattgtttgctcctccctcaagacgcccgctccagagtgcagggagcggctttccagcgtggcccaagagttgggcctcaagtgtgagaccctcgccctgcaggacgacgtctgctccatcagcggtctgcagatgacgctggactgcctggagcgcggcgaagaccagtgcatcattacgggcgacactcgctgtcaggttgttcagccggagcacggcgttctgtccaacgagcttatgaccgtgcagcagccccaaactcgcaagcgagctggaactgaactggccaccgagccagagttgacgcccacgctaggtgccgctgctttggcctggactactatgcagacagcacagcgtctgaacctgcaaccgctcgccctgctacgagagttcgctgtagagcaggatcacgagcaggctatgttccgtctggatggtagggaacccgtgacgcccagtgatatctacacctggaacatggtcacaggcacacaaaagggtatacctgaaagcatacttggcgatctacatgccaaccgcctgtgcacgcatgacttcaaacaaatcacagccagccacctgctaacgcatctagtccattcccttcctgcaggcggactgggttgcgcttttatgggcacgacggatggccgttccatggccatggtacttgagaagctggtgccaagcattgatcaggtggagggccttccgttgctcactttgtataccagggagccctgtccactgtgcgacgaccttgtagagcagttggaacagggctttgcaggtcaataccgtctggagaaggtttacatcgaccgaaaggaaaacgttaggttcctccgcctcttcaggcacgacattcccgttctgttcttcaacggccagttcctatgcatgcaccggctaaacgaggaagcactaagagagcggctggaggcgctaaactagtccgataatcgttggaaaaatcgtaaacaaacaaaattcaattcagttcaagaaaattcataactc

SEQ ID NO: 19599 - protein, 391 aa, DROSOPHILA
MPACLRSLSPRCFQQLLRPLGRHLGSYSKAVVIAAAVRTPSAPFRAEEQRLAGLVVDELVKRTSVPREEYNKLIVCSSLKTPAPECRERLSSVAQELGLKCETLALQDDVCSISGLQMTLDCLERGEDQCIITGDTRCQVVQPEHGVLSNELMTVQQPQTRKRAGTELATEPELTPTLGAAALAWTTMQTAQRLNLQPLALLREFAVEQDHEQAMFRLDGREPVTPSDIYTWNMVTGTQKGIPESILGDLHANRLCTHDFKQITASHLLTHLVHSLPAGGLGCAFMGTTDGRSMAMVLEKLVPSIDQVEGLPLLTLYTREPCPLCDDLVEQLEQGFAGQYRLEKVYIDRKENVRFLRLFRHDIPVLFFNGQFLCMHRLNEEALRERLEALN

SEQ ID NO: 19600 - DNA, 3633 bp, DROSOPHILA
cttgctcaaatttttctcttcgacttgggtcgtcaacttcatgatttattaacaaatttgcgaagaacatttatttatttgccgtttgttgataaacatgtgactttgttttctttttggtctcccttacgctctaccgccatctcgctcccaccctttgtatttcattgcccactttcttttctgattgtttacgcgctaatgacctcattatatatataatgtaatttgttgttgccacactgggttccttttctctattgttttttttttcatcttgttttgacataataaagcgtttttggcgcaatttgttgtatctttgtctctgtttttttgtttgtcgtctgtctgccagctcgctccctctctcttacgcccccatatcgcccactcattttacgtgtgcatgtgtgcatgtgtgtgcgtgtgctttgttaatttttaagcattgttaatataatatggcggtgacttctgtcaccgaacacgaacagatggaggtgaatctctttttcagggggatcacccacttttcactccgccggaattcgtagcacacttttcagggcttccacatttgggaaaggtgcttaaattaagagttggataaactagctgacaagattaattaggaaatcgaaaaaaaacaacaattagatgaaaacacttgaaattttaaatgtaagtttatttttgtaaaagtcgcatatggcgttattttgcattagctaagcataagctctgcgttcaaatctcagtgaacttacacatatcatacaatatgcaagaattggctagtggatacctctgaagacagttaggatccatggaggtatacgttgtagttgagccatttccctcgatccggttgactagagatgtatgtggatattatgatttcgaaccgatttcgtgtaggatattgtgaatgagtcgcgtgccgcgtgttacaatatataagaataaatctagaagcgtctacagatctcgctgtcctctacttcttgcgcttctcgacaggcttcaggatttggaaggagcacatgagtgtattgtccacggacatcatggcaccagcattgtcgaattcaccgcaatagttgggggcggaaaacaaagtgaccaattggcgcttggcaaagaactcgtaaccatcctcgacgacttgatgggcacgacagatcagatccagatcgtgcttttggaggaacttgaccacaacttcggcgccaaaggtgaaactaacgccacggtcgttctcgccccacccaatggtgtccttgtccggatcggaccacagcaggtcacagagtagtccctgatcgggaacatcggtgggacgcataatacgacggatctgctccatcgaggtaagatccggactcagtccgccgtggcagcaaaagatcttctcatccacaatggccacaactggcagacagttgaagcagtccgtgaatgtcttccacaacttgatggtatatctgcgcttgcactcgtcgtagaatccatagattctattaatgctggcgcactcgtgattgccgcgcaacaaaaagaagttctccgaatacttgatcttgtacgccaacagcaggcagatggtctccagcgactgcttgcccctgtccacgtaatcgcccaagaaaagatagttagcctccggcggatagccgccgtactcgaacagacgcaacagatcatagtactggccatggatatcgccgcagatcttgagcggcgcctccagctctaagagtatgggctgtgccagcagtatttcgcgcgacttgaggcacaggccccgtatctcaccctccgacagctggacattcttgccaggccgtgcgccacgcacctccaacagacgggaaattatgctctccaaattgagaacctccgccatggcctcggtcttgggggccgcggctgcgttgtccgggctggataggacaatcgtctgggacgccgttggggctgcttgtcagggactcaccctgagatcgcggctgtctggagaatgggactggatcctcggcggagctggtctatttgggtcacaaacttagcttcttgggtgcagcaaaatgtatgtcctgatgacgtgcactttttgtgatgatttgtgaatttttcgatttactcaataccaggtgctcaataccagaacataaccgaatggaattgcttcttctcgatatgtggcggtgaattgtttagcgttcagctttttttttcttttgattctttcacaaaatgcctaataaaaatgtaggacaaattctcgcttctagaaaaagtgaaaagaaaaaggtttgacagcttgattagctatatcgattgaaatcgattaccctaccttctctaagttccttctagtggtgtgcaaagtccagctgttgtaatctaaattctagaatctagacatttgacctctgcgtgctgtactagcagtcgtctttagatcgtgttttttttttttcgatttcgcttctccggaagttaatgaaaattgaggatctgatcggatacacatgtgctgttcactaaaacgcactttaatactctacattcgcgcttttgcggtatcttaaaaattttaaaaaaaattttgattccggaacggtgacctttatacttttcaaagactaaacgaatgacaaatcgacgacagacaagtcagtgactacatcgcattgttccagttcgtgtttcatggaaatgtgatggtatagtgatttctcagaaacttttacaatagaaaatatatatattatataaacgcatttatttgtattttcttcgcatgttctaggttttaaactaaaataaacgataccttaaccatccttataagctgtcttacatcccgcgtttgcagtactagaaaggtattatttaagttggtcacccctggaaaagtgtgccgaccctcgtctgaccctcgcccatttgttcatattatctctgattgagtggaaaacttgaagttgccgagtgccatttgctgtgcaccccggttttggtatattgtatatgagcttatttcgtcggatttcccggctagtgtggccactaattagctgcaatttgttggcgcaacttgaaaaatggcagtgtaaacagggtattttccagtgtcccaataatgaggcaataaccccgcatttttcacatacataccatatatataccatatatatatgtacacataagtatattacataaatagcgagctgttcgagctgattgaactgctttgtcggctgttggcgaagggctccactgtacagtgtgtatcgtgtgctggcgcaccgcaaagcaaacattcaaacattcaaacagcagcggcatcgtttattttggggaaacaaaggacctcattttcccccatttgtttgaccagcaaggcagcaaggacaacaaggacaacagggaccaacaacaagcggccaagttttataaatggcttggccattgttgtgcgcccgccgctgtttgttgaaattaattggtgttacacaaatgagtaattttcaatgtacataaatatttgcacaaattgcaatttgtgttgtgcggcgggggattgtcggtgagagggggagtaagggggcgcactcactttcg

SEQ ID NO: 19601 - DNA, 1564 bp, DROSOPHILA
gtcaccgttccggaatcaaaattttttttaaaatttttaagataccgcaaaagcgcgaatgtagagtattaaagtgcgttttagtgaacagcacatgtgtatccgatcagatcctcaattttcattaacttccggagaagcgaaatcgaaaaaaaaaaaacacgatctaaagacgactgctagtacagcacgcagaggtcaaatgtctagattctagaatttagattacaacagctggactttgcacaccactagaaggaacttagagaagaagcgagaatttgtcctacatttttattaggcattttgtgaaagaatcaaaagaaaaaaaaagctgaacgctaaacaattcaccgccacatatcgagaagaagcaattccattcggttatgttctggtattgagcacctggtattgagtaaatcgaaaaattcacaaatcatcacaaaaagtgcacgtcatcaggacatacattttgctgcacccaagaagctaagtttgtgacccaaatagaccagctccgccgaggatccagtcccattctccagacagccgcgatctcagggtgagtccctgacaagcagccccaacggcgtcccagacgattgtcctatccagcccggacaacgcagccgcggcccccaagaccgaggccatggcggaggttctcaatttggagagcataatttcccgtctgttggaggtgcgtggcgcacggcctggcaagaatgtccagctgtcggagggtgagatacggggcctgtgcctcaagtcgcgcgaaatactgctggcacagcccatactcttagagctggaggcgccgctcaagatctgcggcgatatccatggccagtactatgatctgttgcgtctgttcgagtacggcggctatccgccggaggctaactatcttttcttgggcgattacgtggacaggggcaagcagtcgctggagaccatctgcctgctgttggcgtacaagatcaagtattcggagaacttctttttgttgcgcggcaatcacgagtgcgccagcattaatagaatctatggattctacgacgagtgcaagcgcagatataccatcaagttgtggaagacattcacggactgcttcaactgtctgccagttgtggccattgtggatgagaagatcttttgctgccacggcggactgagtccggatcttacctcgatggagcagatccgtcgtattatgcgtcccaccgatgttcccgatcagggactactctgtgacctgctgtggtccgatccggacaaggacaccattgggtggggcgagaacgaccgtggcgttagtttcacctttggcgccgaagttgtggtcaagttcctccaaaagcacgatctggatctgatctgtcgtgcccatcaagtcgtcgaggatggttacgagttctttgccaagcgccaattggtcactttgttttccgcccccaactattgcggtgaattcgacaatgctggtgccatgatgtccgtggacaatacactcatgtgctccttccaaatcctgaagcctgtcgagaagcgcaagaagtag

SEQ ID NO: 19602 - protein, 302 aa, DROSOPHILA
MAEVLNLESIISRLLEVRGARPGKNVQLSEGEIRGLCLKSREILLAQPILLELEAPLKICGDIHGQYYDLLRLFEYGGYPPEANYLFLGDYVDRGKQSLETICLLLAYKIKYSENFFLLRGNHECASINRIYGFYDECKRRYTIKLWKTFTDCFNCLPVVAIVDEKIFCCHGGLSPDLTSMEQIRRIMRPTDVPDQGLLCDLLWSDPDKDTIGWGENDRGVSFTFGAEVVVKFLQKHDLDLICRAHQVVEDGYEFFAKRQLVTLFSAPNYCGEFDNAGAMMSVDNTLMCSFQILKPVEKRKK

SEQ ID NO: 19603 - DNA, 7106 bp, DROSOPHILA
gaacttaacgttaagcctagaactaaatgcaatttatagtacagttttgcttgctttgcatatgtgtatatcatataggtactacatagatattttatttaaatgtatatttttaatagctacattaatcatatttacattgtttttgtttagttctcgtttgaatgtagcttatatatatatttttacactgtatttatgatatgcgtgcaattttgagagatttttttttctttttatcatattttcattgtataatgattatggtttttagaagcattttcgtgtaattttcatttgtgatatgaagagcgcgttattttggtacaaagcaacagattctctgtaatttttttgataggtgcgcgcaaagaacaacccataaagtgacttaaggtaaaattaaaacaaaacaaacgtaaattttctcaagtacaattctagctaggaatgtcatgtgcttgggttttgaagaagaggaggaggatttggattacattatgctctgctatgacacacttgtggcaattgcttggcctgcaattgcgggcgctcaatttatgtactttaaaattataattctgtgaagcacaaaacgtcagttaaatgccaatttattggtacttggtcgaagctaatgtaaatatacattacaattacatagtatacctaggtaaatcgtagaattgcctgcctatataaacacatatacatgcacatcatgtaaacagatctatacattcacacacgcgcatcaagattttgggaagacatcctgctgccgaaggactcctccggccgcctacacacattcacgcacacaaagatagagagagagagagggatattgaatccgcttgaacttaggctacataaacgtcgaaaacaggagccggctaggattaaacataaattggaagttctcagtatagttagtaggatccgttgagttgagttgtatttagttgttgtcgggcgttccggcgtcgttgccatccagctagtgagcctgccacttgaacttggactccattagccactgctggccctttccgtagctgcagggacgcagcagcggcgtattggcatcgtcccgcgtggcacgctgtaagcactgacccgtgttcgtgtgccgaatccacttctcctgcaggataaatgtaagcataagtaagcaaaatccaaaggatatatttaacaagaacgcacctccgcatcgtaaacccactcctgattgccgcccatgttgtggcatcgcaccatgttgaccgggccattggagctggatgcgtccaggcacagatcgtcggacatgatctgctggcgcttggtgtaggcgaacacctgattgccgcccaggccgtggcaatagctaatgcccaccttctcgttgtacttcctgcccatcgtgtccaggcaggtttccgtttccgcatttcggatctattaaagaatttcagttataccagtttcaaatagccagttttaactagagtttctaagttacctcgcccagatagtagtaatccaagggcattaaactctcgggataaacgttctccagataccagcggaaactcttgcatttgaggcgatctcgcagagctttacgatcgctcacatcgccagccgatgcctttcgagctcctaaagtaaattcataaatcgcgaaagaagcaaataaaaaatacgcaagttaattaagattattaccacattggaatataaaacatatatgctggcgagtgttttgtgttttacgaactaagtgtatgtgtttgttagaaagcggattaaaaatgccttattttttttttacaaacgaatttgtgcgtgtgatgaaagatgaaacatagttagtatgccaaaaacatgcaaattaaccatctaagcagcccaacaattacaagcacatcaaattacgtattatataagcagtgccagttatagtatttacaagattcccaaacattcaaacataaactagttttgctaattaagttctaaaacaaatatccattaccaaaacaaagtgcatagttggcagtagaaaaataaatatatatataaggtgggttttaagcaaaaggactttataattaagtttctaataaccgctcccactaaatttgagtttctctgaacctgtgtgtttttattccttgcaaaaagatgttttttttttgggttttcaaatttggggacacaatggggacaaagacaaaaggcagcaggtgtgtgtttattgggcgtaagtggaacaatactcgtaccagaacggaactaaaaaatggcacaagaacacagagagaaataaatgggagacgggaaccaattgtacaaaaaaaacattcgaaaatcataggtggagaggtgagaaaagaaagatattattgcgtgattgaattcagttgattgatcgatcggtggtggtgggtttctatatattttcttgtatacttattgcggatcggattttggacacggccatgccataaatcataaatatcgatataaatatttattgtgtattgtgtatatagacattgcataatgcagggcgtgctgcttgctcgagatatacatatattgttgtcatgtatgcagagatatacatatttacggaacaaaacactatttaagagacagacaatagaaattagacagtggagaaagaacgtgagcatgagatagaaagtggaggagcattctgttggttttgtatttttaagatttttgtttttttttttttggtagtttgttaacctggataaaaactgtagtagaactctttccagtcgtccagccaaacctcgaccagacgggcattattgtgattgactatctccgtggtgccgccggggaaggtgtacggcgtagatttgcggaacacgtgacccacacgggagcagggcgcgatctcgagcacgccgccgcacatccacacctggacatatttcgtatcgggtttcgttttcggggattatgtgtgtgtgtgttcatatattttgacaatcgggcagtacaatcgagcatttggtggtggtcaaagagtggacgagaaagatatacacaaagatatacaataaatagaagcttttgttatagagcagttttagccaagcctagctcaatgtactttcaggcctaggatcctcaagcgattgggaaatgtggatcggaaaagatggcttcaaaactgggccatattcgagattaaacaagaaacagcggcgcctagaactctattagttagtttgaggcatttttatgcactttgcagtactttgtgcaaagtgcttatcaaaccacacccaaccctcaaggaaaccagaaaacacaaaaaaaaaaaaatgtttcaactaaaaactaaagattagttacaacttagggggtaattaacgaatcatcaaatcgaattgccaattgttcagatacttaaagcataattaataagcaacaaattacgtgtacgttatgcttagcctaaggtttcaactggattataactggttacgttaatacctatgcaaacgaagtaatcaacattagtgtttagtattgggaacaagatgatattatatcttggttagcttggtagcttcgtcctttgatggacagtcatgagagagcgagaggtagcatgagcatgagcaaaaggagaactgagaaactgagaaacaggataacttagaagaattgtgagaacatcgagaagaatttcagttgaggaaatcataaggggaaacacactaattaggtaatgccagtgcgttagttatacgaaagaaagtttgatgtgttctgccataaattcgggagctctctcagttacatgacatgtttaagaaggatagctaaagttatagaatgtcgatcggagagggggtatcgtatatatagaagtcggtggttacacaaaatcattagctatacattagttttatgctcaaaaacatattagcttgattcgaatgtggtgtgtgtatgtgtgttagtgttttagttggaggcaccgtttttgaaaaaaaagtgtacgtttcgttttttatctctgtctgttagcgatttaaagccaattacaaatagataacgagtaattcttaaagttaggagttagatgcacgcaatttaaaatcgacttgtggttggaatgttatttgactgtttgttgttgttgttggttatgcgaacctgtgctcatcgaataatagaaatcacgccactcgtccagccaaacttcggccacccgggccgcattgtgcagcacaattttggccacgccgccggggaaggtgtacggcgatttgtcacggaacacgtggccaacgtgggagcagggtattatttctaaaatgccgccgcactgccaaatctgcgggtttatcatcgtcgacgattgcgtttgttgtatgggtttgtggtgtttgtgtgtgagtagaaataaatttgtttcgttgttttaggtcaaattgaaatacttaaattaaatgcttcaaaatcaaaatagaaggtaaatcctaaagtaaattgcaagaaactgaatttgttttgcggcttggcttggcacagctaaggaaaaacgtttgaaccgaacaaaaagagagaagggaaagaagagctatctgcaaaatgctttgatattgccttacacggaacgacatctccagattttcgccgccccaaatgtccatgccctcgtcgtaggagccaatctcatagaagtaatccttatcgatggagaacagaccaccggccatggtcggagttcgcaacggagcagtcctatcgttattccggcgcgccatttcccgcgatggcactcggtacctaaagcggattaaggaggcattttaaagggattacgctaaccaggaaacttttcgctcaccatcggaagttgagcttccagttgaagccgccccacgtggaatccgaggccgtaatgtactcgaatgtctcatcggaaatcacatcaataatcgggcacacaaccgttcgacgattctgcacaatccgcgcgagcagaggctccagccagccctctgtgcactcacaatgggcgtccaggaaggtgatgacctcaccgctcacatgctcggcacccaggagacgtgctcggatcagtcccgaacgcttctctgtacgcagcacaaatgtcttaactggcaatttggccacatactcctccaactgcttgcccagaaagtctgtaagatgagatgcgatgcgatgtgttgttgatatcttttcacataataataagcctcttaatgaaagctgcagtttaagttaatttcacattttcaaggctccccttgagcagcacgttttgtgtattcgcaactcaccccgttcgctggcatcgtccaccaggataatctccttgaggagggcgcgcggcgagcgattaataacactccagactgttcgcaacagggttgtccaggcttcgttatggaaaactatcacaatggaagtggtgggcagcttggaggcatagtgcttgcggcggcaactgaaaaggggataatgctaaaaaaaaccagtttaagcatatttatgaaaccagctcatacccttcgtgtcgcacatcagtcagcgagcgattcaacgaaatcatgtcactggccagcagattgaactggttctccttgaacttctccttcatgagatccttcatatcggcgggtattttaaccggcttgcccatctcgcccggtttgcccttggcttcctgcacgcttggcgccaggaaccacttcttaagcaccacactgggataggtcatcgagatgccgcccgaggcaaagccttggcccatgatcagagcaccacccgattcgccatcgagtgacttttccgtatttatctcattatcgtccaccagctgattgtcgtccaccagacgctcggcattgggcagctccacgtcgtattccccggaacgcttgcatcgccagccatccttgccgatgcagtccgagtagcgggcgatgagcacgaagtcaaagatcacccaaacgagcgaggtgagcaggacgatgcggcaggtgttggagcgcatgcgcccgcgcattttgcgtgtgaatgtcgagaaggtcatgattgcttcgatctttgttaactatcgtttgtggctatagtccttggttaactgcgtattttggcgcttttggggggtgggggtttatgttgattatcctctgttgtggtgaaactaatgctatgtgctagtgtggagcgatcatattagtaccctgttgtttatgctttcttgattttataaggatatgttgatgtgactcgtcttatgtgtaaaacgttgatgttgctgtgctgtagctagtttaatttgttatcaaccgtatcagacttttatcgctccctcaagcgtgaaatgttaatagttttgtagcaattgttgttggcacatatgggagctccactcgtctcgtctccctctctctggctgtctgtctgtgtgtctcccttgcactctcgctcatgctagcccgccgtttgacctttgactccgacgcagacttctcctaggaaagatcgctagtcctcggcgacggtttccaggtccagtttcgcctcggaaaactcattcctggaccactttcttgatatctttctctatcagttccctctggctatgaaaaattacgaccttcgctattattaaactgcaaagagagagagagagagagaggaaaaacaacaataaacaccatgataaatcacttcgctataatgaataacagcgaaaaaaatgaaagttatgattacatattgctgccgtgatatatttttatatgttaataatcaaacaagcgttttttttttgtattaaaatatacaaatgtacggataattgcgctcgaattattgttgagctatgaattcactcgcctcttatttgcccagcaatttattaccaattttttttgcaattgggacagatataaatcaattgagatcatattaattaaagctatccgttatcaaagtggatacatttatatatttcgtaaagaaattttacgtttattagcgtgaaggaagaagaggtaataacactttatcttatacatatgttt

SEQ ID NO: 19604 - DNA, 1893 bp, DROSOPHILA
atgaccttctcgacattcacacgcaaaatgcgcgggcgcatgcgctccaacacctgccgcatcgtcctgctcacctcgctcgtttgggtgatctttgacttcgtgctcatcgcccgctactcggactgcatcggcaaggatggctggcgatgcaagcgttccggggaatacgacgtggagctgcccaatgccgagcgtctggtggacgacaatcagctggtggacgataatgagataaatacggaaaagtcactcgatggcgaatcgggtggtgctctgatcatgggccaaggctttgcctcgggcggcatctcgatgacctatcccagtgtggtgcttaagaagtggttcctggcgccaagcgtgcaggaagccaagggcaaaccgggcgagatgggcaagccggttaaaatacccgccgatatgaaggatctcatgaaggagaagttcaaggagaaccagttcaatctgctggccagtgacatgatttcgttgaatcgctcgctgactgatgtgcgacacgaaggttgccgccgcaagcactatgcctccaagctgcccaccacttccattgtgatagttttccataacgaagcctggacaaccctgttgcgaacagtctggagtgttattaatcgctcgccgcgcgccctcctcaaggagattatcctggtggacgatgccagcgaacgggactttctgggcaagcagttggaggagtatgtggccaaattgccagttaagacatttgtgctgcgtacagagaagcgttcgggactgatccgagcacgtctcctgggtgccgagcatgtgagcggtgaggtcatcaccttcctggacgcccattgtgagtgcacagagggctggctggagcctctgctcgcgcggattgtgcagaatcgtcgaacggttgtgtgcccgattattgatgtgatttccgatgagacattcgagtacattacggcctcggattccacgtggggcggcttcaactggaagctcaacttccgatggtaccgagtgccatcgcgggaaatggcgcgccggaataacgataggactgctccgttgcgaactccgaccatggccggtggtctgttctccatcgataaggattacttctatgagattggctcctacgacgagggcatggacatttggggcggcgaaaatctggagatgtcgttccgtgtgtggatgtgcggcggcgtgctcgagatcgcgccctgctcccgtgtgggtcacgtgttccgcaaatctacgccgtacaccttccccggcggcaccacggagatagtcaatcacaataatgcccgtctggtcgaggtttggctggacgactggaaagagttctactacagtttttatccaggagctcgaaaggcatcggctggcgatgtgagcgatcgtaaagctctgcgagatcgcctcaaatgcaagagtttccgctggtatctggagaacgtttatcccgagagtttaatgcccttggattactactatctgggcgagatccgaaatgcggaaacggaaacctgcctggacacgatgggcaggaagtacaacgagaaggtgggcattagctattgccacggcctgggcggcaatcaggtgttcgcctacaccaagcgccagcagatcatgtccgacgatctgtgcctggacgcatccagctccaatggcccggtcaacatggtgcgatgccacaacatgggcggcaatcaggagtgggtttacgatgcggaggagaagtggattcggcacacgaacacgggtcagtgcttacagcgtgccacgcgggacgatgccaatacgccgctgctgcgtccctgcagctacggaaagggccagcagtggctaatggagtccaagttcaagtggcaggctcactag

SEQ ID NO: 19605 - protein, 630 aa, DROSOPHILA
MTFSTFTRKMRGRMRSNTCRIVLLTSLVWVIFDFVLIARYSDCIGKDGWRCKRSGEYDVELPNAERLVDDNQLVDDNEINTEKSLDGESGGALIMGQGFASGGISMTYPSVVLKKWFLAPSVQEAKGKPGEMGKPVKIPADMKDLMKEKFKENQFNLLASDMISLNRSLTDVRHEGCRRKHYASKLPTTSIVIVFHNEAWTTLLRTVWSVINRSPRALLKEIILVDDASERDFLGKQLEEYVAKLPVKTFVLRTEKRSGLIRARLLGAEHVSGEVITFLDAHCECTEGWLEPLLARIVQNRRTVVCPIIDVISDETFEYITASDSTWGGFNWKLNFRWYRVPSREMARRNNDRTAPLRTPTMAGGLFSIDKDYFYEIGSYDEGMDIWGGENLEMSFRVWMCGGVLEIAPCSRVGHVFRKSTPYTFPGGTTEIVNHNNARLVEVWLDDWKEFYYSFYPGARKASAGDVSDRKALRDRLKCKSFRWYLENVYPESLMPLDYYYLGEIRNAETETCLDTMGRKYNEKVGISYCHGLGGNQVFAYTKRQQIMSDDLCLDASSSNGPVNMVRCHNMGGNQEWVYDAEEKWIRHTNTGQCLQRATRDDANTPLLRPCSYGKGQQWLMESKFKWQAH

SEQ ID NO: 19606 - DNA, 2741 bp, DROSOPHILA
ccaccgagccagagttgacgcccacgctaggtgccgctgctttggcctggactactatgcagacagcacagcgtctgaacctgcaaccgctcgccctgctacgagagttcgctgtagagcaggatcacgagcaggctatgttccgtctggatggtagggaacccgtgacgcccagtgatatctacacctggaacatggtcacaggcacacaaaagggtatacctgaaagcatacttggcgatctacatgccaaccgcctgtgcacgcatgacttcaaacaaatcacagccagccacctgctaacgcatctagtccattcccttcctgcaggcggactgggttgcgcttttatgggcacgacggatggccgttccatggccatggtacttgagaagctgtgagttttgatctcggttatgcctgcttctactaacacaaatcatcttgcagggtgccaagcattgatcaggtggagggccttccgttgctcactttgtataccagggagccctgtccactgtgcgacgaccttgtagagcagttggaacagggctttgcaggtcaataccgtctggagaaggtttacatcgaccgaaaggaaaacgttaggttcctccgcctcttcaggcacgacattcccgttctgttcttcaacggccagttcctatgcatgcaccggctaaacgaggaagcactaagagagcggctggaggcgctaaactagtccgataatcgttggaaaaatcgtaaacaaacaaaattcaattcagttcaagaaaattcataactcaagctctactctacttgtttatgattaatatggggcatgcatattgcgcagagtttttattaagtacagtgtgtttttcatactataatccttgaaatttatattttgctctgcatggctattataaccggaagaagtttaaaacatttcgcccatgggtttgatagtgatttcatgtacctgaaggtggttagttaaattggtcataagttaatacataatagtgattatgctcacctgaacatgaggcggagttcgcagagcatacatcactgcgtccgcaatgttcgctggttcgagtctggccatgtctttgacgtaaaaatggatctcttccgggaagatgttcgtgttcaccgcaccaggacagatgccagtaacccggattttgttcgagtgcagctgaaattcctgccgatatgtctctgtgatggcggtgatggcaaacttggtggccggatatatattgaacgatggcaaaacgtcgatgaagttgagcacctgatgtccggctatgctgttgatgatgagaacgtgaccttcgccacctcgccgtttcatgttattgaacgcctcgcgggtacaccaaatcacgcccattacgttggtgtctatgacctccttaagcttctgcgtattgctcggggtgaccagttccgtctcgcgagtaatgccagcattgttcagcagcacgtcggcgccctccagctcccgttcgatccagtcaaaagagctctgcacctgatcttccttggagacgtcgcagcgccgcggtatgaagttcgcctgcagctcccggggcagactctccctgagctctttcaacttggcctcccgacgtgccaggcccaccacccgtagtccagcgccgatcatggcccgagcacaagcggcgcctatgcctccgctggctcctgttaccacagccagtttgttctgccaccgctccatgccgtcttgtgaatgaggagctgatgcaagtaagaagcccgcatcggaaactcgggagcagtttcatggcttcttggttcgcaattgaggttaatctccaacggtcaaatgttgttgtcaggttgtagatatatatattaaaagaagattcaacaatttgggtcaggattatacgcacttaaggttaggctatccttttattcttaaattgacctaaagaaaatgtattaaggaactgcgagactttaaatataaaataaaatagctcaaatgtatatatttttttaagattgtgtactttttaaatttgaataaaaattttataagcgataacataaaaattaatatttgtacttggtagtgaccagtgaccacattttaaagaaaaattcaatttgcatatttattcaaagtcttgaaatcggtttgaatttacacttgccggcaaattggttatcgatagtgcagggcgtactcatcgatattttcaggccagcaggagtcagatataactgccatcactaataaagtagaaaaaaaaaaccataagcttaccgcaggtgttgcaattttcagtgaattcgcagcaaagccaagcaatttgcattcaatcatctgtgaaggaaaagctatcacacaaaatggcacaaatggacatcgaattgaagaaggtgagcggaaggcaagttgccaaaaaggccgactgccgacggagagcgcgtgctcttccaaagaacttagtcatagacgattccttttgcacgcaggccttcaccgagatgcagatcaataagctggagacgaccaagaagatccacatgatcgacatgaagtgcgacatggtcaagacaggcaaacaaaagtaccagctgacagaaaagggcaccagcagcttggccgacgacacaaggtacataactagaatcacaattaatcatctccaggtgttcaggtggctaattgaactgtttccctatagagtttaccagtccgtgggtcg

SEQ ID NO: 19607 - DNA, 741 bp, DROSOPHILA
atggagcggtggcagaacaaactggctgtggtaacaggagccagcggaggcataggcgccgcttgtgctcgggccatgatcggcgctggactacgggtggtgggcctggcacgtcgggaggccaagttgaaagagctcagggagagtctgccccgggagctgcaggcgaacttcataccgcggcgctgcgacgtctccaaggaagatcaggtgcagagctcttttgactggatcgaacgggagctggagggcgccgacgtgctgctgaacaatgctggcattactcgcgagacggaactggtcaccccgagcaatacgcagaagcttaaggaggtcatagacaccaacgtaatgggcgtgatttggtgtacccgcgaggcgttcaataacatgaaacggcgaggtggcgaaggtcacgttctcatcatcaacagcatagccggacatcaggtgctcaacttcatcgacgttttgccatcgttcaatatatatccggccaccaagtttgccatcaccgccatcacagagacatatcggcaggaatttcagctgcactcgaacaaaatccgggttactggcatctgtcctggtgcggtgaacacgaacatcttcccggaagagatccatttttacgtcaaagacatggccagactcgaaccagcgaacattgcggacgcagtgatgtatgctctgcgaactccgcctcatgttcaggtgagcataatcactattatgtattaa

SEQ ID NO: 19608 - protein, 246 aa, DROSOPHILA
MERWQNKLAVVTGASGGIGAACARAMIGAGLRVVGLARREAKLKELRESLPRELQANFIPRRCDVSKEDQVQSSFDWIERELEGADVLLNNAGITRETELVTPSNTQKLKEVIDTNVMGVIWCTREAFNNMKRRGGEGHVLIINSIAGHQVLNFIDVLPSFNIYPATKFAITAITETYRQEFQLHSNKIRVTGICPGAVNTNIFPEEIHFYVKDMARLEPANIADAVMYALRTPPHVQVSIITIMY

SEQ ID NO: 19609 - DNA, 2826 bp, DROSOPHILA
tgacctaaagaaaatgtattaaggaactgcgagactttaaatataaaataaaatagctcaaatgtatatatttttttaagattgtgtactttttaaatttgaataaaaattttataagcgataacataaaaattaatatttgtacttggtagtgaccagtgaccacattttaaagaaaaattcaatttgcatatttattcaaagtcttgaaatcggtttgaatttacacttgccggcaaattggttatcgatagtgcagggcgtactcatcgatattttcaggccagcaggagtcagatataactgccatcactaataaagtagaaaaaaaaaaccataagcttaccgcaggtgttgcaattttcagtgaattcgcagcaaagccaagcaatttgcattcaatcatctgtgaaggaaaagctatcacacaaaatggcacaaatggacatcgaattgaagaaggtgagcggaaggcaagttgccaaaaaggccgactgccgacggagagcgcgtgctcttccaaagaacttagtcatagacgattccttttgcacgcaggccttcaccgagatgcagatcaataagctggagacgaccaagaagatccacatgatcgacatgaagtgcgacatggtcaagacaggcaaacaaaagtaccagctgacagaaaagggcaccagcagcttggccgacgacacaaggtacataactagaatcacaattaatcatctccaggtgttcaggtggctaattgaactgtttccctatagagtttaccagtccgtgggtcgcatgttcctgcttaccgatgtacagaatatgcgcgaggacctgaaggctaggcaggagaaatgcgacaaagcgatagaactgctggagaagaagaaggagttcttgcagaagtcccttaagagccaggaagacggtctgcgcgagttggtgcagcagcgcaaggaagccgatcagactgcgaaatagactacaactccaaactggcatttatccctcaacgcaattgcttatttattttcaatatactcgtctaaattgaagttggcgtagctgacaaacttgttgcccagattgcgttcgtgttccgggcggaagctgcacttgaggacgggcaggcgagcggttagccagggctccaccacctcaccggagcacaggattaccttgctctccttctggtttcgttgcagcctagtgattatttcacacgttttggcgatgcactcctgggacaggaagggcgggtcggccacgatgaggtcatattgctggtggtgctctttgaggtagtccgggttgctccctacgcagttcaagtcgtagtgcacaaaatctgtgccataggcctcgaaacgcttgtcgaactcgaatatgtgcactacaagatagaatgatgacaattcattcataatcgtttcacatgtccacttacctgtgtcatgtatctccctgatgtccttgtagagcgatgggcaggagagcagtgctatactaaagtcacccgaatcctccgtgcgctccgccagaagcttacgcacaacatcacgcaatgcgtgcttggtttccgtgctgtaccagaactgactcaattgctgcaagcgaagagagtttcaccataagtttctaaggtatgtgcaggtgctcttgcccaatcctcctcgaactgggcatccttgccggtcttgttggcgatttgattctcctcctcggcttcgcgttttgatctctccaacagaaattcgtttaaaatggccaaagtgtcggcgggcagcgagatgtcgtcgtccataattaattatttgccactaaatgaatcttagagcattcaaatcaaaataaaccaaaatgtgcgtttgaagattagaggtgcgaaattagcgatacaaatgagaacttattggggggattccaggccttggcgctgttttcaaattgtaaattattagaaacttaggccaactgcgatattgaaattatactttcaaaataatatgcactttaaccgtatgcaaatcgattaccaattttaatttattttaagttattttattaatacaactagctccagaaacctgtatcgtaacttttatttgacaacacattttcaaactgtactgaatatttaggcgtttaatcgacaactaaaacagcaactttcaagtacgtggtctttaaatttcgtaagatcgagaaagcagtgcgatacaaatcggtggcagccctgtgtcagttcgtttttatcgaactagatcaactttgcccgtccatctctagttcgcacgggagccccgaccaaactgatacgtattaatttacgagaaaaacttgcgtttaattcgaagtcacatcatatcgcaggctggaacgtacctgctgctaagtaagaggtaagtgaatggccaacgtgaattaggaaaaatcagtgccttgccggaaacgaaatccatgtgattaaaggctaactttcttcgcttgacgtcgttcccaaatcggataaaagtgtgctgctggcccagtaattacactggtgaattatgcaggtcggcatttggactcgctccgcgacttccgtgcgggggaggaagcatccaatccccaagcgcaaccgtttcgaatttctacagcgcggcgcgaagagccctgcactttgatttcgttgccgttcattgtggagttcagtcgggtcaatcagcctcaatttgcgagacttaccttctgaatctctgacgtgtacctaccaaccaaactgtccactatgtgacatcatataattgggcttccgactccggactattgcatgaataatgtgcgcgc

SEQ ID NO: 19610 - DNA, 716 bp, DROSOPHILA
ttcatttagtggcaaataattaattatggacgacgacatctcgctgcccgccgacactttggccattttaaacgaatttctgttggagagatcaaaacgcgaagccgaggaggagaatcaaatcgccaacaagaccggcaaggatgcccagttcgaggaggattggcaattgagtcagttctggtacagcacggaaaccaagcacgcattgcgtgatgttgtgcgtaagcttctggcggagcgcacggaggattcgggtgactttagtatagcactgctctcctgcccatcgctctacaaggacatcagggagatacatgacacagtgcacatattcgagttcgacaagcgtttcgaggcctatggcacagattttgtgcactacgacttgaactgcgtagggagcaacccggactacctcaaagagcaccaccagcaatatgacctcatcgtggccgacccgcccttcctgtcccaggagtgcatcgccaaaacgtgtgaaataatcactaggctgcaacgaaaccagaaggagagcaaggtaatcctgtgctccggtgaggtggtggagccctggctaaccgctcgcctgcccgtcctcaagtgcagcttccgcccggaacacgaacgcaatctgggcaacaagtttgtcagctacgccaacttcaatttagacgagtatattgaaaataaataagcaattgcgttgagggata

SEQ ID NO: 19611 - protein, 223 aa, DROSOPHILA
MDDDISLPADTLAILNEFLLERSKREAEEENQIANKTGKDAQFEEDWQLSQFWYSTETKHALRDVVRKLLAERTEDSGDFSIALLSCPSLYKDIREIHDTVHIFEFDKRFEAYGTDFVHYDLNCVGSNPDYLKEHHQQYDLIVADPPFLSQECIAKTCEIITRLQRNQKESKVILCSGEVVEPWLTARLPVLKCSFRPEHERNLGNKFVSYANFNLDEYIENK

SEQ ID NO: 19612 - DNA, 4430 bp, DROSOPHILA
aacagcaacagcagcaacaaaaaacaaccaacagaggcaaaaacaaaatacaaacggcggcgactggtttgacgagcttttttcaatgggctcgcgaccaaaaccgaaaaaaaaattacgaaaataataaaaaaactattaaaaaaaacagccctacacttggcttgaactctcctctggccagatctttagccagcttcgtcccgggttcaaatccgattccaattccgactccaagtggttataaaaattcgcgcttggcgtttcttatattgccaaaactaaaaaaaaaggcgaaggaggaatgttagacttggagatgctctaagcacgcaagccccaaaaaaaaaaaaaaataaaaaaaatcaacacacgaaagacaaacggatatatagtggtcgccaaatatcaaagaaattcaagctcaaattttgaggcagacgaggggagacaattgtgtaagattgatgggaaagctgaggtcattcatcatgcgattcccgtcttgattggacagttcacaaggcttgatagacgaaggtttccaaatacatttgccaccacacatatatttattatcgaggattatcttataaacgtgcaaaaagggcaacggaaggctcgaattcgataggttgctgggcacacagtagcagatttccaatcaagctttaatcgtgctcaaaagcatctaaggaatccataagccatgtactttataatatagaaaacatacatatgatatgctatatcacaaagcgattttctgggaaatctacgtcttataaggatatttaaggattcagcacaaggaactggcttgttgagttattagcaccttttttcaaatgttctaaatagtaagaaagtatttgaaaatactttaaagaggggtcaaagctcacagcgtttgtgctgcaaacgtccagcacttgacttcccaaattcgagggactctaggttcacccaattttacgactgcagggtattttaaatgcaagactttaagtgcgactcacctttaagagggactggcattggtattggtgtgcgagtgtctggctgccagcggcattggtatgcgtgtgtatctgtgagtgctgctgctgctgctgttgctgcatctaaaatctagatgatgacgatggaagcgatgctgcacatcctggcggccatcttttcgactggctaaattaactttttgagccgcctctcacatgttgttttctccggcgttgttgctgttgttgtttgtcgattaacacttcgtctgcatggttatatgtatatatggatatatatgtaggaataaattcgtttagacgtttttttttttcaaacggttttacgagcgatttaatattgttaaattgatttactgctggccgtgcgcacaaatcaagtttttttggctttatgattcgtcgaatacggaataaataaataaataaagccaaaactaatcgacggaagccccgaaaaaaagcttttgaaagtggcccacgcaggcggcaaatagcaatagttgagaaatgagataaataatggcaaaaaatccaaattaaagtgtaataaaaaaaagaggtctaaccactttttatttttttttttttgccttccaccagccgaacagctgaaaaaacacaaaactgtcgacgaaccttttggccatttgcagccggtttgcaggggcagaaccaattaaaaaataaaaccaaaaataatacaaaaatagtaaagaaaactttacaaatcaaaagtaagtaggggtagcgcagagaaaattaaggaaaatccgaaccagttgcaaagcgccagcagctgatccaccggaaaaactgaaaagcgcgtctacacaacctgagcaaaggacctgcagccgggcactgaaattccaggagcagaccgcctgccacggacgtcaacttatgtaaagccgactgccgactgccgactgcgaacttcggcccacatcgcgctgttcaccgcccgccctcctccaccatcgattcacattcacattttcccattttccggcattactgccgaagtaagtgcgtgcgagcgagacgccagcaatgcaattttgcgggccaaagtcaggcagttaaccagcaggctggtccgctttttcctcctctgctgctcctgctgtttcttcttcttcttctgcctgcttcctgctgcctgtggctggcacatctgtgtgtgtgtgtgtgtggcgcctgcgcactgagcgcacagctgacggcggtagggaccaggaccgaagtccttcaacatcggggaggggcaaaaagctaatctcggaagtttcaagtaaggtatcataaaaaatcaagctctttagcgtttttggacttttactattttgttttattcatcttctggttaagagaatattctgctataagaactttcaaaaaatttaaaaacaatgcaaactataagatattcaaccacaattgtataagccacgtgattttaacaatcacataatgcctagacacacaagtaaccaaacttgaggttgacaaactttcagccaccttatgtaacgtgttgctccccgagattttgaccgcccaagcgtgaaccgtccctgtagtcagaggtttaacctctgttgctaggcgcccgacgcagtccctccactgccgacgccggcagagctgcgccgactgccgagccagctgatttttgtggcagagccgaggtgccgtggaatggggattttcccgaaaagtaacggctctttcgggaaaaaccgttttccgtattgatttcggggggcgctgcatgtgagcttcccataaaccaaatatgcattctaaaacgcccgatgaaaggagtagttagctgcagttggaacgaaggagtggggaggggaatcgaatgaaaagaagaagaaaacaagttctgggcgcacagtggggcaagcttagaactgtagtgaccactgtgcggcagcagttgagcttctagtttgcagtaaacgcttcggtctctctctctctctctctcgctcacgcaggaaacctgttttcgagaatcgttttttatagcttttgccacttgccaccagaccaggccaaaataaaaaaaaaataaacaaaaagtatttcacaagttttgtttgcttgcttctttgctgtttgtgttgttgtggttgttgctgcgcttgctagttgtttcgcttctgtttatcatttactgttgttgccaccgtttggcgtttaccttttgcacaatcttcgtttacatgaaagcggcgacgacacgcgaccaaaggcacacacacattcgcacctacacccacacacggacggggaacgcggacagacacacggatacgtgaacgcagacacgaggtaacggtaacggacagagaaagcgagcacgtccacccgcagcaacactcgatgagcatctgacgaagtgttgccaggtgacacaactcagagcgtcttaacgagtttatcactaaaaaatccgagcatgttaataatgagcgcgcgattcaaaatggttgtattttaacgtatactcaaattatcacagtaagcgataggcaaatttaaatcagtagataaccatagcaaatggccctatccagcttattagcatagcaacaaaacaagcttctgatgtaaacagcttatttgttaaatatatcaaatttctaatagttttcattataaatctaaaatatcaaatgtggcaacactggttccatatgataaaggttgccaccaggcgtaaaaatattttcgttgaagtggacgagggctgcaaaataaagtaattttggcgccttttttgaatttaagtgttcaaaaaaaaatttatgtaaatgaacgaagaagtacacaagctcacaaaacaaaatgattttaattttaattcaattaaacaaattctctttagagtttaaaatattattttgcaatagcttaatttaaataacataaataacatttgtatttgctgtataccttatgcgtaagtatcaataatgtttaaatatgtttaattagctgaaaagtaagtgctgttgcctaaataagttttatttaatgaatctaactattattaatatactatagtgaatacgatgagtcattgtatcatctctcgtcaatatcagtattaacgcacacgaaaactaacgcattagaaagattatctctttttatgatactggtcactctaagactgaagtacatttgtatatgtggtgagaaatcgggtagtttaaaaaaaaccaccaagcgagttggacgcgtaactctttgtaacggatctcggaacgccgtgggagtcggaaaatcgctggacgcgtgttcgtgcgtttgcatgtgtgcgtgcgttcgtgtgtgtgtgtgtgctaatgtgcgagcgggtgagcgaataaaaataaatatatatcg

SEQ ID NO: 19613 - DNA, 460 bp, DROSOPHILA
atgctcatcgagtgttgctgcgggtggacgtgctcgctttctctgtccgttaccgttacctcgtgtctgcgttcacgtatccgtgtgtctgtccgcgttccccgtccgtgtgtgggtgtaggtgcgaatgtgtgtgtgcctttggtcgcgtgtcgtcgccgctttcatgtaaacgaagattgtgcaaaagacgaagtgttaatcgacaaacaacaacagcaacaacgccggagaaaacaacatgtgagaggcggctcaaaaagttaatttagccagtcgaaaagatggccgccaggatgtgcagcatcgcttccatcgtcatcatctagattttagatgcagcaacagcagcagcagcagcactcacagatacacacgcataccaatgccgctggcagccagacactcgcacaccaataccaatgccagtccctcttaaaggtgagtcgcacttaaagtc

SEQ ID NO: 19614 - protein, 88 aa, DROSOPHILA
MLIECCCGWTCSLSLSVTVTSCLRSRIRVSVRVPRPCVGVGANVCVPLVACRRRFHVNEDCAKDEVLIDKQQQQQRRRKQHVRGGSKS

SEQ ID NO: 19615 - DNA, 2902 bp, DROSOPHILA
gaatttttagccagactgattttaaatgacagaaatggtagaaaataaatttaactcacactcatgattttcacacgaaaaacatattgaatcacaaaggcaaggagcgactagaagaactctacatgcttagttcaaaaagtgacacttctggagacgatatctctataactgcacaagcagaaaaaagagtggatgatagcatcagagcgccatctattggctggaatgctgagcacaaagatgttcagattccaagggaccaactaacccacaggcagatcagcaagtgcaatttgtttgaggaatacatcaagctcccaaagagtgaatatggacaaacaagccgcatgaagcgattccgatccgaagagttagctattaagcaaggtaagataaatgtataattccgttcttattgaagggctaacagcctttgatatcttaacagaagatcaaatcgtggagcatagatcatcgagtctttcgcggctatcggatgtcacaatcaagcccacctgcgaggtgagtagtcagacttcgtggacagcagcggacgagagtaatatgaatagcaaggatttggaggcgaagctggcggctgtacgcggcggtggtatcgatctcgaaacggacaagcccagcaagatccagcagcacacgatccacatcgaggtggagtcggtgacatcggccacggctatgcaaagacccccactgcaccaaaggatgtggcaggtccttgtgcagacggcggatacgattgtcgcattcgcctctataatcggcgagaatttaacagtggcactcttcattgtcctgtgcctgtggtgcctttacctcttactaagccacttttatggcaacttgcagaccaatgtcggcatgccgtccaaataattgtaataagaatgattcgttttgcacgtgattgtatgagtaaaaatgcagtaaacagaattagcagaacagagttccaaccagcattgcgcattctaatttatctcaacatattgggtgtgcaacaacacatgatggcgagactacaatatagtgccgaagcgaaatcggttagcatatagcaaaaacgatcggccagcggtggtcgacctagtgcatttggaatctgcatggaaacggcatcgatgaatatcgtgtgacgtgtcgattcgcagggtgccaaagccggggcaaagtccacaggacaaactctaatgcgccggcgcggctgttccgtctgcacgccgatcgagtggatgtccttgagcacatcgctatccttcttcctgaagatctcaacatcgtcttccgaattttctgcgggttgatacagttatagtaactatactaaataaatgcgggtgacatctggtttcaccaaaatgaaactgtttatggatttatgacagtagtgttatttttcagagttttcaaggacaactccaagagacagttcctatcttttttttatagattggtttatgcattattttgatattttttaccttccgccaatgccttggacatccatccgtaccaattccgtttgtttgctccgcctagattcgattttgaattggtgcgtacggtgatcgagctgtgtgttgcagccggatcactatcttccaaatcctcaaaacattcgtcggcttgaaagcccaaaatatcgaagagccgctggcaggtgttcttctgctcggacagtttgcggggctcgttaacggcatcctgaaccaaatcgccaattagcaagttaatgacgatcgcagtctgcggtggctccctgcacgccattaagtttacagcgtccacagatcaaatttggaaaagtatcgaaaaatgtcttacaagctactgaagtcaacataatttcggcatatacaaaacgatgttgacaactatcacaccggaactgaatttatcactcaaattttgtattagctggtcaaaaaaattcccagttttcaacacaacgcaatggataatcatatggataagaacgatgaggacaagaggtcgtcatccccggattctcaacgtcaagttataatatatatgccacccgccgttgaacatggtcatgttgtgtatctaaaagatgcgaatttaggcgccacagagacggaggcttctgcacaactcgacccacaggagcatctttcgaatgcggatcggttggagaacaatcgggtgatttcagagctggatgatgagccgagcacgagtgctcagtccgcagttaagggtcagaaatcagaagatgatcagggtcaccagaccaagacaggtatttcaaaaatgccaggatctcctaagcagttgcacaatgtattggaagtaatctgtcgcttctcacgcgagattcctgatgcaatggagggccgggagcaactccagccggcagtgattgtccaaattccaaaatatcgcgaactgggaacccagaccgctgagttgccatcgcagtcgcagcgattgcgtttggatctgaccgacctgagaccagatccgaatccaccgccctgcgaacgcacgctgcacacattcacgattagtggcaacaatctgccgggcaatcctcgccagcttcgtcaaacgatctgcgcgcgaattggacgctccatctgtgattttgtggcagccttttgtctttgtctgcaagtgaacaaggattgtgtcttctgtctgggtttttttgtggcctttgtgatcagtgccagcttcctgactgccttcttctaccgcactcttaccttctcctcgtcgccggtgcgagtggtggccaatccggtgagcggcaccatgcgctatgaacttgccacactgcgattcaacggagggtactactacatctataatagcagccaacaaaagcttctctaatctaattggaacttgagtt

SEQ ID NO: 19616 - DNA, 714 bp, DROSOPHILA
atagttgtcaacatcgttttgtatatgccgaaattatgttgacttcagtagcttgtaagacatttttcgatacttttccaaatttgatctgtggacgctgtaaacttaatggcgtgcagggagccaccgcagactgcgatcgtcattaacttgctaattggcgatttggttcaggatgccgttaacgagccccgcaaactgtccgagcagaagaacacctgccagcggctcttcgatattttgggctttcaagccgacgaatgttttgaggatttggaagatagtgatccggctgcaacacacagctcgatcaccgtacgcaccaattcaaaatcgaatctaggcggagcaaacaaacggaattggtacggatggatgtccaaggcattggcggaagaaaattcggaagacgatgttgagatcttcaggaagaaggatagcgatgtgctcaaggacatccactcgatcggcgtgcagacggaacagccgcgccggcgcattagagtttgtcctgtggactttgccccggctttggcaccctgcgaatcgacacgtcacacgatattcatcgatgccgtttccatgcagattccaaatgcactaggtcgaccaccgctggccgatcgtttttgctatatgctaaccgatttcgcttcggcactatattgtagtctcgccatcatgtgttgttgcacacccaatatgttgagataa

SEQ ID NO: 19617 - protein, 201 aa, DROSOPHILA
MACREPPQTAIVINLLIGDLVQDAVNEPRKLSEQKNTCQRLFDILGFQADECFEDLEDSDPAATHSSITVRTNSKSNLGGANKRNWYGWMSKALAEENSEDDVEIFRKKDSDVLKDIHSIGVQTEQPRRRIRVCPVDFAPALAPCESTRHTIFIDAVSMQIPNALGRPPLADRFCYMLTDFASALYCSLAIMCCCTPNMLR

SEQ ID NO: 19618 - DNA, 4460 bp, DROSOPHILA
ttcacacgttttggcgatgcactcctgggacaggaagggcgggtcggccacgatgaggtcatattgctggtggtgctctttgaggtagtccgggttgctccctacgcagttcaagtcgtagtgcacaaaatctgtgccataggcctcgaaacgcttgtcgaactcgaatatgtgcactacaagatagaatgatgacaattcattcataatcgtttcacatgtccacttacctgtgtcatgtatctccctgatgtccttgtagagcgatgggcaggagagcagtgctatactaaagtcacccgaatcctccgtgcgctccgccagaagcttacgcacaacatcacgcaatgcgtgcttggtttccgtgctgtaccagaactgactcaattgctgcaagcgaagagagtttcaccataagtttctaaggtatgtgcaggtgctcttgcccaatcctcctcgaactgggcatccttgccggtcttgttggcgatttgattctcctcctcggcttcgcgttttgatctctccaacagaaattcgtttaaaatggccaaagtgtcggcgggcagcgagatgtcgtcgtccataattaattatttgccactaaatgaatcttagagcattcaaatcaaaataaaccaaaatgtgcgtttgaagattagaggtgcgaaattagcgatacaaatgagaacttattggggggattccaggccttggcgctgttttcaaattgtaaattattagaaacttaggccaactgcgatattgaaattatactttcaaaataatatgcactttaaccgtatgcaaatcgattaccaattttaatttattttaagttattttattaatacaactagctccagaaacctgtatcgtaacttttatttgacaacacattttcaaactgtactgaatatttaggcgtttaatcgacaactaaaacagcaactttcaagtacgtggtctttaaatttcgtaagatcgagaaagcagtgcgatacaaatcggtggcagccctgtgtcagttcgtttttatcgaactagatcaactttgcccgtccatctctagttcgcacgggagccccgaccaaactgatacgtattaatttacgagaaaaacttgcgtttaattcgaagtcacatcatatcgcaggctggaacgtacctgctgctaagtaagaggtaagtgaatggccaacgtgaattaggaaaaatcagtgccttgccggaaacgaaatccatgtgattaaaggctaactttcttcgcttgacgtcgttcccaaatcggataaaagtgtgctgctggcccagtaattacactggtgaattatgcaggtcggcatttggactcgctccgcgacttccgtgcgggggaggaagcatccaatccccaagcgcaaccgtttcgaatttctacagcgcggcgcgaagagccctgcactttgatttcgttgccgttcattgtggagttcagtcgggtcaatcagcctcaatttgcgagacttaccttctgaatctctgacgtgtacctaccaaccaaactgtccactatgtgacatcatataattgggcttccgactccggactattgcatgaataatgtgcgcgcgggttgacaggtgctaccttaaattgactaggtgacccacttccgttgaaggaccctccgtccacagatcccaatcgatacggctgccccactgccagtctcattactcgacatgtaaatcgaaagtacacgtaggatggaccccctcggttgggtttacttaatcgctcagaccagcccactccccctcccatgtttcacctgttgccacctgtttgtgtttcaatattttgacgtgtatttcgtaacaacatgcacattgtgcgctgtcttgcagttttctcttcgagcttcgtaacgaaatctttgcgtttagtgcgctaggcatcataaaccgcatactcgagaaatataattgccaaaccgtaagagtacatgatactttagcgatggcttggctgttttctttttttggttgcctcatgcaaagcactgtccgtaatggtgggcaagtcatcttggctaaagcgaacattaacacgacttttgggccagcccgttctcgttttaagtgcgtttgccagccactttccatttgactggtttaacagttggccctgactttcaattaagacgtaaagcgcttggcactgagaagcgtagtgcagtctaatcctggagtcatagagggcagatcttgcgggctattcattaggttggaaccctcacacatcagatagcgccgcagttacttagccaaggttctcttatcgctgcctatgcctaagatagcagccaaattcccgccgataaggccgaaagtagaaaccttatactgattttcataactgccttgcagactgaatactgaacggaaagcgagcacgaaagctacttcatcatgagcgcacccaccgaccaaccaccgcgctccgagggcgctcagaccaacagctccgagagatcctcacagcagcaggagcaaccgcagcaatctcaatcacagaacgtaccggccaagctcctgcagcattttcagacaaatcgcatagattccgcgctatgggcactacgtctgctggtcatcttcttcaccgtcagctacgtgctgcccatctttacgtgagtacacgcgttttccacattgacctactctaattttcacttacttctccacagctcacaacagagcgcattcagcaaggttatgctggctaatgccgccatctctgccttgcgtttgcaccagagattgcccgcgttcgcgttcagtcgggagttccttgctcgactgtttgccgaggactcgtgtcattacatgatgtactccctgatcttcttcaacatccgcccatcgctgctggttctgattcccgtgctgctgtactcagttctgcacgcctcaagctactcgcttaagctgctggatgtaaggaaagcaatatttcacatttggcacttgtctaataagaaatgtacttacagctgattggccagaactcgtggtggggtgcccgtttcatcatctccattgtagagtttcaggcggcgaatatcctgaaggcaactgcattctgcgagatcttcatcatgccttacgccattgtgctggccttcatgtgagttttaacacatatctttcgaggggaatgcactccaatgcagaatactttcaattttaggaaccacgctggattgatgacgcccgttatttactaccactatctggtgatgcgctacagctcgcgacgaaatccctatccgcgcaacgctttcgctgagctgcgtataaccttcgaggcgctggccgcccgctcaccgcccgcctttgccaagatcatccgtggaggcattgggttcgtcaaccgcttggcgccgcagctacagccggctgcagcgcaagagtagacacgacaagcagctaacggaaaacaacaatcaaatgacatatgaataaggctatttaaataccagttcacttgcatagatgttcacacaggagattggggttcatccgttttatttgttagccgaaattcgttgcaccttttcgaagcgaaactagttgttttacaccagattgtttcggcatttaagtttaaatttatctatatattattgtagttttttttgagtacatcatcatgcttttttcaacaacacacaatgtggcaacgcacgaattccgccatggaggatcaacggcgcgtattactatatttatatcccaaaaacaaattatttcaatttgttttgctttaacttatatgttcaaaatactgatcaaacgaaaaacatggacagctaacgctgttagtaattatttacatatattttgtatgagtgtgtaaagattcgaagaaccaaacaaagtaaagtaaagttaaataaaacattttgagaaggtactagaatttggactacaattttttctggttgattggctttaaatcttctgctactgtattaagtggtttgcacttaacttgtttcttctcaagccaattaaaaaatgatatcaatcgtaataattttcgtatcatccttaaagtatgcaataccttaatttctccacttttggtcagcgggctcaaacaggtgaatggaagcgttccccaacatactccagatcaggatcactagtcgatttggccatgttccagtcggacacgaatagtagcaatctaagcacttttgtacagcgccgaagcatcaacccacaacgaaactaatgaaatgatttctgggtgtgaggctagggcgttggtagcttgtcgttggctctggacttcttccgaatttccaccaagttcaatgaacttcttgcgcagcgccaaaaaaaaaaaatgttcgtccaaatgagggtgaaggcacccgagctttgttgtgttgtgtaggtgaaacgact

SEQ ID NO: 19619 - DNA, 1058 bp, DROSOPHILA
atacaaatcggtggcagccctgtgtcagttcgtttttatcgaactagatcaactttgcccgtccatctctagttcgcacgggagccccgaccaaactgatacgtattaatttacgagaaaaacttgcgtttaattcgaagtcacatcatatcgcaggctggaacgtacctgctgctaagtaagagactgaatactgaacggaaagcgagcacgaaagctacttcatcatgagcgcacccaccgaccaaccaccgcgctccgagggcgctcagaccaacagctccgagagatcctcacagcagcaggagcaaccgcagcaatctcaatcacagaacgtaccggccaagctcctgcagcattttcagacaaatcgcatagattccgcgctatgggcactacgtctgctggtcatcttcttcaccgtcagctacgtgctgcccatctttacctcacaacagagcgcattcagcaaggttatgctggctaatgccgccatctctgccttgcgtttgcaccagagattgcccgcgttcgcgttcagtcgggagttccttgctcgactgtttgccgaggactcgtgtcattacatgatgtactccctgatcttcttcaacatccgcccatcgctgctggttctgattcccgtgctgctgtactcagttctgcacgcctcaagctactcgcttaagctgctggatctgattggccagaactcgtggtggggtgcccgtttcatcatctccattgtagagtttcaggcggcgaatatcctgaaggcaactgcattctgcgagatcttcatcatgccttacgccattgtgctggccttcatgaaccacgctggattgatgacgcccgttatttactaccactatctggtgatgcgctacagctcgcgacgaaatccctatccgcgcaacgctttcgctgagctgcgtataaccttcgaggcgctggccgcccgctcaccgcccgcctttgccaagatcatccgtggaggcattgggttcgtcaaccgcttggcgccgcagctacagccggctgcagcgcaagagtag

SEQ ID NO: 19620 - protein, 276 aa, DROSOPHILA
MSAPTDQPPRSEGAQTNSSERSSQQQEQPQQSQSQNVPAKLLQHFQTNRIDSALWALRLLVIFFTVSYVLPIFTSQQSAFSKVMLANAAISALRLHQRLPAFAFSREFLARLFAEDSCHYMMYSLIFFNIRPSLLVLIPVLLYSVLHASSYSLKLLDLIGQNSWWGARFIISIVEFQAANILKATAFCEIFIMPYAIVLAFMNHAGLMTPVIYYHYLVMRYSSRRNPYPRNAFAELRITFEALAARSPPAFAKIIRGGIGFVNRLAPQLQPAAAQE

SEQ ID NO: 19621 - DNA, 2592 bp, DROSOPHILA
gcgttttttttaatatatataaaaaaatatcccggactgtccgcaagctcttctggtgcgcttcgtcactacgtgggcgtcagtccgcagtgataatcaaactagtataaccgtgtaatatgtgtaatgcattatcgcatagcctattacatttaaggtcattatactgattgcatattcaaatagcgcaattacgcaaagttactaatataattctaagaaattgttatttaagcgttttttgttgtagttgtaagtacccaaactacacattcataaatcgtaatttatgaaatccttaaaacaagtttatatctttagcttcgtataacttacaaaaaatatcaagttggttatatgacaaaacgcgttacgttggtgtatttattcattaaatattaattcttatcgtttgcactttgattacccgtttacgtgttgacgagattattacaagagtttttttataacgcgatgtaaaacggtaatgtgaatgtgtttaaatataaattatatgttcgaatttcagttatctacctatacacactttcgcacaaaaaaacccacatatcgcatacatttgttttaatgatatactgacctttattttgccattctgagtacatagattttctaataatattcctgctattcatagcaaagttagctgatatcactaactaattttcgggcaacccagcaaagcgaatatcttatcaactatttcgcaaatactgtcgaaagtcacaataaattaaggtgagtgtttatggcatattaggatattgatttttgcgtaacggacacgttctccccatctataaacattgcaaatattgcagctccggaactacagtgagtaaaatctgtaaaattcaccgaaatgtgcgcacagttttcgtaatgcccgttgcactaatagatcgtgtcatcataaataatagaaaatattgcacttttgcatttacgttcggcacattgcatttttcacctgcgacgtttacgttcgcctaagcggcgcgtgtgctcgtaaaagccgatcgtcaagtgggtgacggcggttggaggtggaggtgggtccgtccgtttggcccattgaagcagtgaagtcaatgcccggctgagattggccttgtggaatggtcaaggttgcctattggcaatacttccgcattccgtatacattgtaagcgaaattttaaaaaccttattatgctaattagtaaattagactaaactacaggcagatttcattaaagaagtggatacattacaagaacttcaatcttcttcagtcctctgaactcttattcgtcaactgcaatttgccttgagataggaactatatgaagaagaagagagcacacactcattcactcactcacgcacacacacaagtgcaggccacgcgcagcagaaaggcaaacagcggaaaatcgaaaaatcaggcggcaagaccgcaacaactgcagagaagcatggatgcagagaggcggagtgccgggaagtgctgtctagctattataagccgttctatagttgggcgacggagtgtgagcgagcgaagtggtgtgggggaggggtgcagccagcatgtgcaggcgataaatgcaacgtgtaatgtggggaggcagtgcacgggttttcgacatccgatgtccattgcaaatggaagaggacgtgcaatggtttgcgatgcacgtgttggcggtcaatgaaccgaatgggcgagatagagagagcgagcgagaaaagcagaaatgcaggggcagatatgtaagtagtgtaagtgcagggagagcaaagatacgaagagagtaagggcgagagcgcactgccgtttaatgcagttattattgacgcagtctgtctacgtgcagaatgtcaatgccgcttacccttcacacacccctcccacatttcaagccacctgttatcgatacaagttatcgatcattgagtacagtggagctacattgtatgctgcactgaatatggttaacaaactgcatgcctaatggaaccgacaattccccagcgataatttagccaagaaacgaatggcgcctgcggtttaaggccaattgcattatgaatgtacatatgcatggattagtcggaaaaacaaatgaaaacaactgcgaaatgtgttttgtaatcttttctttttcgcgtgcagcctgttttcgcaatttgtcaagttacgttcctccttatgtaaataccaactgcaaaaaaaaaaaaaaaaacagtttgagcttcagtaaaccatgtttttcagacacttggtactgcattaattcgtcttacataaaattgcaatggcatacggtacgtatgtgtaatttcaatgatctggtaatttaaaagaggttttaaaggtatttaaaggatttgaaaagtatgagaacctatattaacttcatatttcttcgtaggcctgggttagctatttacaataacctccaactctacgtcatttggcattggcaatgaatacgcgatgcactcattcacatacatgtattcactatgtttgtcgatgtgtgaagtgttaggaactataaacatgcaaattagacagagagcgtg

SEQ ID NO: 19622 - DNA, 547 bp, DROSOPHILA
ttacgttcgcctaagcggcgcgtgtgctcgtaaaagccgatcgtcaagtgggtgacggcggttggaggtggaggtgggtccgtccgtttggcccattgaagcagtgaagtcaatgcccggctgagattggccttgtggaatggtcaaggttgcctattggcaatacttccgcattccgtatacattactaaactacaggcagatttcattaaagaagtggatacattacaagaacttcaatcttcttcagtcctctgaactcttattcgtcaactgcaatttgccttgagataggaactatatgaagaagaagagagcacacactcattcactcactcacgcacacacacaagtgcaggccacgcgcagcagaaaggcaaacagcggaaaatcgaaaaatcaggcggcaagaccgcaacaactgcagagaagcatggatgcagagaggcggagtgccgggaagtgctgtctagctattataagccgttctatagttgggcgacggagtgtgagcgagcgaagtggtgtgggggaggggtgcagccag

SEQ ID NO: 19623 - protein, 49 aa, DROSOPHILA
MVKVAYWQYFRIPYTLLNYRQISLKKWIHYKNFNLLQSSELLFVNCNLP

SEQ ID NO: 19624 - DNA, 33961 bp, DROSOPHILA
tcacgcctgccaaccacatcctgcccgaggcagaggatgcgccatatggaggccacaccaacggtggccagacggacgccgaacgttcggcgagcaaaaggagacgagggcgacgtagtatactgccgcactcgggcaagatcacaatggcaatagtggaggcgctgcgcaaggagaacagtttgctcgagcagcagaacgacgcctgtctgcagtcgctcgtgcgcaaggagaagcagttcctggacatgaaacataactttctggcgtatatggagcggcaggaggcagtgctggcgttaataaagcaaacgaccatcaagctggaaccatgatcccgactactagcaccacgtggtaaggacattgtatgacagctttagctttaagttgggaatagagtcgcggcgctcgaccctgtgtatgtttttcaattcgttcctttctcagacacagatgtctaattcactcgacgtacaaagcagcagcatagcgaaccgaagatattataatttctcaaacgttctttttctagcgtcataagtgtaatgtgtatgaacaatcgtctgtgcaaaagatcaatctatacggtctttagtcttaaattaaaaacattgtcttgaggcgaacttgtatggtagctacatttttaaaaaaaaaactaaaactaaacaactggctaaaaaataaattagatgaaagactattatactatatatatatactatactatatagactatactattatttctattgttacagaatatcttgttgatataatagtaacgaaatcaaacataaattcaaatgaaatcagtgtgaatagcctattaagttttgcatttcgatcaacttagcgtgtgcaacaaccgccggttatttgttcatcaacccctgctgcagcagtgtggccgtagccggaatgtgaaaatatccgcaaacaccgcatgcggacctctcttagtcgctctcttagcgcacaatgcgctctctgccaaccgaaatgccacagactttttgtaggcttttccactttttcgatttcgagacttcgagcgaaacggtcgtgtttttcgcgtgtgtgcgggtggcggacgcgcgtgccaatcggaaaaggcctttaaatcaaatgagtggctcgccaaaggagcgcatcaaggtgtgtgcgattgtatcgagtgtgtgtgcttgtgcggtgcggagaaagccagccagccgccagtctgggataaaaataaagattaagattgggataaaacaaacgaacggcagcgaagtgcacaaattgccgtggaatcggggctaaagaaggaaaaacaagtgtgcagcacacacggattgaaatgtttgccaatgtgtgcgagcgtcacctaaataaacaacaaaaaattcgatttgcagcaaagagagcgagcgagtgagagagcgcgagagtgggaggctgttattgttgttgctgctgttgccgccgctgcatgtggcatgcccgaaaatcccaatcacaatcagctgagccctgccgcgcctctccctacctcaccccccgcacccatacgccttctcacactgtttgttggccagtgtaaaagtttctcgttctgttttgcgtgtctcctccgtttctctttctccagggccacaacactgggctacaaactatgtgaaaacccgtttcgttacatttccgctttgccccgcctaacccccccccccccctcccatcattaattcggtttttttctctgctgtcgcgtcacgcctctcacgtcttttttttactgttttgttgcagttgttgcttttgcccagcgcctctttcattcatagaaaacggtcagcaaagcaaagcatagcgaggcgacagcaacaacaaacagcaggtagagcagaaatattagcgcgatttcttttcgtttcgcccaaaagagcagccaaaaaatcaacaaaatacgaaacacaaagccaaatcaaaagaaatcaaatttcaaattcgtgcggccaccagcaaatatcgaaataaagaaattatctaaatcatcatcagcagcagcacaaaaatcgaaaatctcctcgctgtgtgtgtgatgtaagtgcgataataatatttaacaattgtaaaagtttattttatacatcatgcctaactggcgctattgttcgcccctttttttttcgtcttccgcctttttttttatgaaatttgctactcatatcagaccaacttcgtaactacatcaagtacaatttttaaggtttataatgttaccataatttgtttaaaatttcccatgattgtcgtcatttatggggttttccttgagcgctaatcatgcggttctataccacttgaatgataagattgataacattcttggcaatcattatcgaatctatgggaaaatcataacaagttccattttattcgcaggcagagaactgaaattaatcgttttggttaattgccaatttgatgagttccattttccaatcgcgatttaattttcacattaacaacacatttgttagcccattaaaaatttgtttggcatttgttttctttaaaaacagctcattaaatcgccggagtccacataaatcttctcgtcgtttgtggctaaatattgtcacttagcaaacactcgaaaatatataacttaatttatgcgcacgactattaaaaaagaacttggaggtgtcgaaaaaagctaaatataggaggaagtgtattaggtaattgtgtattccacattgttataagcactactgtctttttattgttatctgacaattctatgcaatttattaagtacatggatcttaagttgtataaaaatagacatgagctgtacataaaaaatcaacatttcgctgcgaagtggttcgaacgggcaatttaacacgatctacttaacttgttgtgttgctgtttattaataaaatatttgccaattatacgacagtttgcgcgtttagttccatgtgtttcgccctattattaaatatttatacttgataaacacgtgcttatttacaccattagtatgattcgatcattttctgggtaatcaaacgataactgaactaaacaaatgtttttctcaataattgcgaatatttgtatagtaaaacaagcagagcagttttctgcatcacagagctcagtatctggtatctgatgtcgcatattgtagataagaaactatagtaagggacttggtaaatttaaggcgataccaacgcattgcggtgttgggattacgtagaacataggaccttggatgcgattagctcggaaagatgtctggtttttagataaatagcgagagaaacaatctaatacacaagattcaagcggaagtttataatcgttgccaagaaaattccagaaggctgatttctgcctatgcacttcaaagcttttcgataaataaacagtgtaaaatagtttttcccagattaaaaatgctttttaggatgaataagttctggtgaatttctctttgctagaaataccctcttgtgcattttaagttttttaacataaattgaaattattatttctttaatttttcctctgccccttttgacctgaaaaatccatacgtcgcttggtgacttctgaaatacaaatgacacccccagggggtcacccacctacaagtgacgtaacttcaaagctcacatatgcatttacacaaattttgtttgtcatggagacaactgaatcatcttgagcaacagcatttattacactggttgacaagaaacccgtttttaaacgtgtaaccaaatctacgctatatacacttttagtttctttatttactttaacatatataaattccaatatttaaatatttttatataaataagtaatttagtttctatcaaatttatataagaaaaggcgtgaggttttgtagtccacttgggttagcaagttcgtaagccttttcctggattccttatcggtattgaattgccgtgttgtggttaaccgcaaataagcagttttgttcatttggttttggtttacgttttacactttccaagacccagaccttagaaatcagtcagttgtaacgtacatcttatgttaagagaaaaagatatctatcatgatatctaaaaaagtttggtttaagaacaaaacttaaattaaaattttaggattttttttttcgttccttaactgaactttctctgtcacgcattgaagttcaaagttattcaaaacttccactaattggcattaatatcttttgctttcctattttactacattttgttaatgtgctcatcatgcgctgtgttgtgttgccagtttctcttgtttaggccaaatatgaaatggggcagtcagctttgtcatgacaactgtagggcaacaaaatgtttatccaacttcctttaacaattgggcacgcaaaaccgtcagttccgtcagtcatggccaggggtatgccgtcgggcaggggaagggcggtgaatagggattgggttcggaattgggattggaagcgggagctggacaggtgcgccccgtgtgcggtgttctgacacctttctccacggccaggggccatgtcatcgtcagcatgacaagcgctgggttgcccggtcggttgcttaatggttgattgaattgaaacgagggaaactgggttgtttaaagggctgtagttgagcttgtgggtcctaacccctagatgagggttcaacgaaagtcagtttactggggaaaagcgttaaaacggaggttaggcaactctggttccttgctttttatgttgcgcttataaacgaactttgggataatattaaccagatatatttgtttatataaacaacttgtgaatagatccattagtttgatcttttagtgcatttcattttagcaggctaatgcaatttcttacacctagttaacaaatttgttttggtctaacgccaaatgtgttctgaaatgagttttactaaaaagatgcattacttttttgcttttatggatatttaactttcaagggtatctaaatttattcattttcttaaaaattgcagatgcatctagagttgctgacaaataaggatactagatgacacaattagaatggcataatttcattaggacgaattgcctgaattcaagcgcctggcaatatttatgcagtactttcctcacaagcgtcgcttttcatgcacgagcagcaaaagtttagttgtaattattatgcaaatgtatacagttcaagcgacgagagaaaatgtttgtcggctaaaaaagtgaagaacttgaaggcgacgtcaaaggcatttgcacaaatcattggttggctctgccagtgttgcctaattgttatgcaaaagggttgctcactaaagacagactgttgctattgttgtttattgctttattattgtttgttttgactgggattcttctaaactcgattgagcctttaaaacagtccatagttcacttcaaaacataatacataacagcatagatatcaaattgaaatgcaagcttagtattggattttaatatttatatgccaacaatggtaagcgactaagaggtggcacttcagtggggaaaagaacgaaatttaattaaaattcgtttgcctttacccccatcacttatgctcttcgtctttgcagcttgtgtgtagtttttggcaggctgccaagtggaaaagccgcctgtgttgtcagtttccttatacgtggagaaaaattgtggcaaatttcggtatttcaagccgcagatgttaaacattttcttaaaaacttacagttactagagtagattcgtgttggcccaggaaagttctttctcgatattgtcaaatgctcaaaaggtgtttaatggatcgtttttctaagtgcaggcggttgagacgacttagagataagactaggaggatggaccatgggtgatggagtgtggcagccactcaaacttgacatagacttgggccacgggcttttgttcgtgaatgtgcttctgaggttgtgtgtgcctgagtgtacaaggacgtgagcactatgtgaccactgtggcacccaggccatggacgggaagtccttagtggaaaccaatttcatcacttattgtccccagctaagctggcaaagaatccgactcgtgagcgcccggcaccacctttgatgggatttgaacactgtgccttaactcggcttggattcctgttaagtgaattagtgaaaaacacattttagttttgaactgcattcttcttgggttcttgattacttaaaagcttttcctcacgcacagactggcacaggcaaagaacaagggcgcttgtggcttttaaatcaatagtgtggcagagtggtaaaggaggctgaatggataggcatagaatggaccttcggctggcgatctgttcatttgattgaactgagtggtcggaaacctattcaatttaataagcgccattgaaaattgaatgagcggtaaggacataacgattagtatggcaaaatgttcggaacgctataaacggatttgcaacaatgcagactgaaccactgtgtaatttattaaaagtaaaattcttttataattacctttttcttaacgcgtttgaaatggctggtttgcttttcgtttgcagagggagtttacaaagtatgttggggtttttaaataattgcgtactcaacgtgcacgaaatattttcctttgtttcattgccttttcagttgtctctctttttttgcctgtgaaaaatatggcaacgtacttaagtttcttgatgcgcatacaaaaactgacaaattgccttcatgaactacccacccactttatttttgcctttgagtactcattaaaaccgggtaagaataaatctttacaaatttcaacgttcgctgcgggaagtctgtttaaaaatgggacaatgtgcatattctctaagtaatttagtgagccaaaatcacattttccttgttaccaaaacatacgggttcgaaaaaagataccagaatagagtttgtgtaaaactctggcgaaaaactgattatttgttggtgcatttttactgtcagtcatttaaagattcatattttcccctactagttttagtggtacttgtttaattattttcttttggtcacttgctgttgtagtggcctttttaatgtgtttccctgagagctttattttaactggttagcatgggagaactgcgagctggttaaaaggataagcgttgcatgaaatatgaaaatgtccttgaccaaaatgctgcctgttttgaaaatcctaattaaacaagcttatttgtacaaaaataattcactattcttgtgataagatttaactatcatttccactttaacttaaataaatggtaaactgctcattcaaaatgcttatcgaatgccttttaaatagtagtttatcataagcttgctgagtttacccctcgatagctacactcctttattggcccactgaagcatccatccagccggtaaatcaatatgccacctcgagaggagtcatccataacgacctgcttgccaaatattcgtgcgcagttaagaggcgaaaaaatcatgacagcagctgggtgtcgacaatggatccttgtgcaggcaccaggatcgcggccccaaaggcgggtaatgtcattaacaacaaattgagcacattaataaatatgaattatgattgttaataaaaaacgtatggccaaaagcgacggaagtggaagtgtggcgtagtttcggcgaatttgcacgcccagtggcaggaagctgacacctatccagtgccacgcccacttagaaggggcgcaataaacggagttgcgggtaaaccaaatggtaattcaccctgtgggccacaagctgatgttgcataactttcagcgctccatggaatgcgagtgtgtggcagacatcataaatcaattttggtcacgggaagaggcagccgagtttccgtagttgaataaaaatagtctattttatttcggccagattcaatggggagtcaaagctccaaatggtcagcatatagatagaaggaatgaaaagccactgccagttcatcgaaaattcccatcgaaacaagtttaagtatcgactggaaagtttatttagtcgtaacctattccctacttttaagtacactaagctagctgctgtcaaacgtggccatacttttaccttaaaatgcactttaaaagccatttacaacctaaatcctcgtaaaccgcgcccgagcccgcaaacgattcatcataatggtggccacagccattttagccaagttacagctcatccgcagaacggttgccattttgttctttattattcaagatacgggtcggaggcgcttaactggggccacaaattgggtactacctagatatttgttggcattaaaaatgcctttggtatattcgattttatattgaactcaagtgcgctttcagtgtgttttattgataacgtcagcttgtcacgtttttttttcttcgtcccgctcgacgcgaaaagtgacagccgtgaattaggaaaacgaaaagttttccctcaaaaaatgtgttcctgtgtatttgtaatgctatctgtgtaatttggacccaacatttgcccaaacataaggggcgtcctgtttttgcttctttcacgactgacacttgtattcgaactttttccgtacacgagttttcggtttgttatttacagcatgccacatcactttcgtcatgatgataatgatgattcctttatctttgcagcaccttgcacattcatcgcatttccttttgccagtgaagtttcttggctctaatgtaatgtgaaatgctacaattaagtgctagacgagattatctactaggttgcgtgtcaaagaccatcttttgtcatcacagcctcctccattttgaaacgtaactgaaacttcacacacaatggacttgaaaattagatgatgccttgcaagattgattgcgatagtgcttaattaaacaaaacctgcccagttcaccgtgtaatgtgatttggttaattggaaaatatttggtcttaaccatcatgattaggcggccattgagaaagtttcacaatccacttggtttcggtgtgaaaccgtagcttgactaacaaataacaaaaataacttcatttaaaaatcgtttatttccgtaatcgaaagcttacaaaaagggcaatcatctctttagggcgaatattcgtttttaaaatgctcgaaattaacaggcagatgtgtcatatggaaagagaaatatatgcaaatcgaatcagaatcttaaatgtttgtggggttttttgtgtttttttttattttttattatttgccttgggctgtgcatgcgtttgtcatatgtatttttaaggccccactgcttttggccatctttaaggttggctggttgttgttgtttttttttttgactgattgccgccttgggcacgagtgcgtgtgtaatacttatcagtccattcaatttacatacaaagtgctaagtataattgaaattcgcagtaatttcctactgagctccgtaaactgtcagtgaattatttactttcatttcatgagttttttatattgcaaggaaatatttgtaaaattcatgcactgtaattttctttctcaggatgactaatctatattcttcttcacttttcaacgcctttgtttaatgatttgataagcactattataattaaatttctagctatgtaggtaacgcctttttaatctaatcttttggcctacgacaaccttcaaatcacttgatatcaattctattaaatttccaggcacccgccctaatgagcgataaaatgggtcttttaaactttttatactctattcaatcattaatttgtttgtatttataagcaaacccctttgttattaaatgcaataatccgtttatactctatgcagcctataaaagaaccaataaataattttgcaaaacagtttacgcggatttttttttaaagtgcaattaattctgaagagctcttgactggctttaggaattaaaagcaatttgctgttagaagtttaatgcactctttaattggtcttttatcgtgccacttaaaaatcgtctgtttttggtacaatgtcaaagcacgattctgatttgttcgaattccaagatagcttatctaacaaattggtagccaaattcaattgctgcagaaaccaaatgtacgacatggtttgttttacaagtgattggaaaatgccgtcttatcaacgaaagggtaaccaactcagttactaataactcttgttgtatacacgcatgtataccagcaaaaaatatcgttttcaattagctatagaatgttcaacccattttcaggatagttatcttttattgaagaccaattatttggcagagtgttggctgttgggaactcaaccctttgccaaaatgaagctgattatgtctgcagactgcgctgctggaaattcaattaattttgaatgcaattttaagtgcacttgtgtaaagcattctacttagcagacgctttaccttctgcctgcaactaaattcactcggacattttcgttttaagttttgctaggggttgtggtactttttcggtgttttctgttaaaaaaagagtttatgaaatacgctaatttaaattagcttccgaccagagactcagtttcaccacccagagctattcgacaaatccaatttcgcttttatttctctaccccgcccatcagatcgggtaaacaattttgttttgggtctggttggcggtatctttatgtgagtccctagtttatatatttatatagtatatatattgcctgtcgtcccaatgtattccattagccaagcgaatgcttccccggggaaacgcacagtttatttgctttgttaattaaaattacgagcgtcagacaaatttgtctgcaatgtacatgcaatgggatcattagaggtggtttgatttgttggtctatggttcatttgcagctaatttaattaacagtttgagcagcactttggggctatgctactcttttagtatatttttttaagagcattgtccaatttgatcggaatcgccgagaaagccttttttatgccacggtgtgccaggcacacttgcttaatcttcggctattcaagtacaaacctgggccgtttggtttttattattggttcaaaccatgcaaggacctattcatagtcctcaccacagatgcagcggaaaatacagagttcccaaaagtgtgtaaaatgccgcggaaatcgacttgcctgcagttgttgcttttcctggctccaaataccaaaccatttctgaacacacttactaaaatgtaaatattaacaaaatcgggtttgcttgtgcatttgtagttctgttccagcttttaattaagatagcagtaaaaacgaaaatattaatcatattccagttccgaatattgattggttatttttgtaatcttcatttgcagtagcatagctggatttcttttccaattctagggcatctctctttctctctctctgagtttccactttgctatccttcggttttcccttgccaaacctaataaattttgcattgtgcgcggcgtttggttgagcgtcgcagttacctgaattcagatattgccttccggacatacaagttggcagaagctgaggctgtggtcctttttgcccaacccgctattcgaatccttaatattcccttgttggctgaccctgcgaaagtgccatatggcatgctaaatattttaaaacacgaagtgcatgctgtgcagcttgttttgtgttttaaagtgatatcataagccaactacatgatgtttggattttggaaagtgtgagcgactgttaaaatttgtagctaggtactgaaacttggtcctttgtcctttaagatgtttggaaagagttatgtgcacatttgtgcggccctccttcacaaattttccgagttactggctgtaagttatttgcaacagttaacatgcaatataactgtggaaattgtaaagaaaatattacttttgcttatgtctacccagaatttagaattcgagtgagttttgggaagacaattttatagcctaatctaaaagtcccaacatcatttgatttctattaatattgtagtgtatttccctaacttcagtattataagagcacttttaaagtttccactccaaggaactttagaaaaatcttattattcaactacagtgctcttgacctatggcttccactcggcctcggtgcatctaactcctccatgtctcaagacaaaacagataaatgactttatttgttgagtttgctctggctgcaacatccccaaccgtaatcctatcaccactcgagaagtcaagtggcgaggaccaactgctgagctgggatgagcccttctatggattcaatgggtgagcaaggaggttcagtcaagcggcttttaagaaaaccatcttacatcataaaagtataaaattgctgcacaatgtgtgaccacgaattacttatttcaaataacatgaaacggaacaaatttgcatttgtttttttaagctatcatctttgcaaaaatgggtgaaaagcatttgcaaacttacaacctaaacctcttaggtacaaaaaagcgttgaattgctttgttttcctttcagccagctccggctactcctctcaagaagtccgaagtacacacctgctaacacgggcaacaatcttggggcagggagtcctggctgcactgcatccccagggcaccgtttattcagcagacgatgacggggaaaatgtgctgtgcagaaaggcagtttgctttactctacagcgtctttgtgttccttggcgcatcaatttttaaacagaccaaatgcagctgaattgcattttaaagcagaccttaacggttcgtctgcaatgcgtagaaattggccggaggcctattttagatacattgtgtagctaacccaaaatccattgtttgcattgcattctagcttgctttaggctaaaatacgaaattgaaaatctatttaaaaactagttacctaacttaaatgtgagtttaagattgcacaacatatgaaatacatagaatatgaccaattgactaattacatctattacatatgactaatttttcatattctctgtcttttcagtaactagcaaaataaattaggtaagtgtttgccattttctcttactcaacttgaagttcagttttctgccacaatcgcttaggttttgaattggctaaaatgaatctactgtaaacatctgtttcaagtaaaaaactaatattttactgagattagggtctgttttgagatgtaggttgatggtaaggggggcctaatttatgttgaacagaagtacgtgccaaatttcaaaaaactaaagtcgaaaactttttacgccgacaccagagaaacaaaaaggtctatgctaatttcgctggttcgggcaaggtaataccaatatttggattatccggcagtaaacataaagacttccaatttagttagctgtgtcctcgttaatcaccgccgtctgtttgttgtcatgctttattttgttgagcccggcttgtcgttttcattaaccttaattagcgtgtgccgttgacattcgtcactatccacataaatgcaattgccttactacacccgtcactattccccgccgcacagccatgattatcagcagcaacatcatcgccaaatgagagtgatattttgtgtcacacgttttccacgtcgctcctccgcattatatgtatgtatgtgcttgccagcttttctggactggcccgaagacctcttcgttggcgtctgatattgaccatggctggcatttgtggccaaccacccatctccgccagccagccagttgctcattgcaactgacttggatgactgccatcgccgtttgtgtcagctgcaaatgagtttctgggccataaacgtgaagtggaatagtggcaatgtggatgcctgggccaccgagttttgaatggtctaggttcagaggtcttgaatatttaggatatcattttagtatagtgtagtatagtaatcttagaaactatacgtttatactatacgtttcatatgccaattagagtgttaaataatataccaaccagcactaattacgacgcccatgccttaagtcgttttcctccccaacttggcttataagcccccagttgcgatgtcgcttttgctccatttacttgccaatgacagtgagttcgaaaagtatgtcgacctatcgcttacttcattcactgcccccacatggggaactagtttttttgtattggaatcgcattgcacgcggccggatcgtgtgactttgaactcaataagtgtggattggtccggtcgatttttatgacaagtagcgaaaccgaacaatattaaactggattaaaaaatgaaccaaaatgagcccgccagttgtaaaaactttcacgtacttcatttgccagatgaaaaaaaaaaaaaacaagctatttgtgcctttttccatctgactgtttgtcacgtttgaagtttgtttggcgttttgttcgcagtttttgcttcctacacacgggttttcttgggatcttgagatctttgggtcgcggtctgggtttttttttatgatggttcttcgaatgcctggcagcttgaggactgcttgtcaataaagttcttgacaccttttcttcatttgcacagatttctctcgcaatgactttcggtttgctttcgaatgtattgttttatactcattcgcacacattccatgtaaattcaattgcttttttcgcttagcaaaataaagatactcgaacggaagctaatgaatataagataagcacgaatacattaaaagtttatggtagagagttcgttaaacttgccaacagctctttatgacctagataattgagctttaaaacaacaaatgaatagttggaaatgggatgctaaaaaatcctgaactataaagtagtaattgtaccaaaaaaaaaagtaattgttctgctctggattttcatctatttactttgcttgcctacaaatgctttatcattcataatttgtatactgccgaatgagaatggcataacgaaaacaatagctaacccactaaatcgcaataaatggcatttgcattcaatttgttgcatcaaatgcttaatgaccgagtgaacaaaggcggcagcgacctttggcaaatacacgcacaaagatatgaatatttctccttcccgaatttaattgtccaaacaaaagctacccatctccacctccaaactcagtgccccggactactactggtcacctgcctgacctcggagttaagtttgtgtgtggcttaattgcttgtgacttgttgttgcttccttgtcttggcttgttgaactctcaaggtaacaagaagtagcaagctggccccttccgcggctgctatttaatttccacgaaatgaagagggaagaagcggcaaataaaatgtctaagattgcgattatctttttaataacatctcgaggaaggcgaacattaccacaaaaaaaggcgggaaactggcaatgaaaagaaactacaaaaatcacgaatttaattaccacgcaccccagatagcgcctcaaatgaagcaataaaatcccagttgcctgggagtattggacattgcaaaagtatctaagtagaaacattgaccgaatagtaaatacaatatattcagtttttcctacatgatttgtttagtttttttccgcatgcctgcatctcaaaaagcatagctgacacaggtctttcatatcaaaagcgcccccttaatcgtttcagagttttgctctaaatgttttcagggtccccccaaaaaatatgtggcagttatttattttaaatctcattcgtttgtaaacgccgcttcacaagaaagccaacagactgctaagaatagccaacaaatatctacataaaatcaaatttatctcattttacacaacccttgccaggccaacaaatgaataaaatgtcattgctgaaattctgtgagtggcattcatgcgcaaaaatcatttcaagtaaattataacttttcctcttcactggttctaaaacacagacattgttatttatgcgatttccttgtaaaaataaacattcattacaagtggtcaatttgacttggttatttgaagtatcgaaatattttgttcgaagttcaataccaaatgcgccaagtaactataaagcaatatactttaatgaataatcaggtggataaactgaaagcactgagtaattgaactataatatagatatttaaggccaaattgaaaagctcttcctgagagttgccccgatttcatcagccctccgccgtatgaacgtgaggcactggctcctgaccctgctgctgatgcagttgttgcggaggattgttctgaatactggggtgctgatggactgtcggctcctgctccttatcttccatttccatctgctcctgtggctcgagcggcgtctgcggctgctgggtttcctcggaggactcggcattagggggatccggatcaccatcactgctgaccagcgagtagttcgggggcttcttaagcaggtagcgtgtgttcgggttctgtctcgtttcgagctccaggcgatcgatcagccagccctgtttctggttgtttgaggcccagaaatagacggtccccctgtccttgggaccctggacatggaactgcagctgggccttgtcctcgtcacagcgattcttctcgttggacagattaaagcccgactccttgatgggctcgcccagcagaccgaccgctccactgtgctggcgtagctgctggatggccaactgatagaactccgtctggcgtacacggtcctcaagtcgccagcgcatgtaggccaggcccgagatggaggcgagtgctccgcagatgcatatgctgcccatcgttcgcttcgagggcagaccgatacgcaactttaaggttggcatggcggcctcttagtcggcaagaaatcacttttagaattttgtgtgtgtgtgtgtggaggtgtcagaggcctacaaatacttgaaatgcgaaacaactcgatgacaatgatctcaaagatttcgaactcgtagcgccgttcccacaagcaccgatgtatcactagatggcacttaccaccgagccttgaaatcactgccgctgcctgggatcggcgggcgttgcctccgcataattgcgctgcaacttcctccttggcctggccaacttaatgctgcctgctggcgagcagagagaaccggcggcctggctcaatttcatagtcaccacccaaaaggcggggaccgcaaaacgacgtagaagaatccacagatagaacacagaactcgttttgtttctctggctagctgtacatactagtttttttttttggtttgtaggccaaatgagcggcgccattaatgacagcccgaaaagtgagccgtccagtggagatggttcactaccttgcatccttgtggcccttgatcgtgggagggtatccaacaagtagaataacgaacccgagagcacgcgaattcttcagactgggagttctctgaattttacataataacttataaagcgagatgtttttttaatatttggttctgataggtatttcatagtcagctcaaccgcgtccatcgatatttttttgtttatctcattacagcagttatatttttactggtcagggccagtggagtcgcgaatagaagcagacgagagaccaatgagtatccaattagggagcacatagttatttaaaaatagttttccaagaacgcagggtatgcgatgagaaatgcccccatagcgcgtcggtaatcgatactcttgcaacgcctgtcacggatgggaacggaatattgcatctgatactggccagagtgcggttaatctatcaatgcatcttcaagtttgaatttctgctgcggcgagcctgatgttacatttctggcctaagtggcctctggtgtggcggtcctccttatcgagggggggggggggggttggaggatcatgagttactcagttagttactctgtctgtctgcgtgcccgtccttctgccccccactccgctggccgggaaatgtgacaatttctgtgttcgttttttagcctcattaagacctctctaaacactgccacttaaagaccattttggtgtgcttatctttatggccaagacatctagtgcctgccccctccaccatccaccgagacatgtatgtatcttcgacggcaagtacgcctcatacatatgcttaacatgactttgatgtactcagcgtggtggtcagagtaagatctttaataaatcaaattgccttggtattcgggaagggggtatggggtacttaaagcttaatctctctgcttaagtatttcccagaaagtaattctatgagttttatagtcgttcgggaagccacgggttttgcaggtgttcatcgtacgtatactgaaatctgggtattaactctttagcgcgattggccataaaagctaagttgaatgcaaaaattggttaataagtgagtcatttccgatcaaaaattacaaccaattgtaatgtacaggaggaacttgttatcagaaattacaaacagtttcgaatgattatctttacatagtaagctttttcaagccgttttagcagtgagtaattttagcatttgatgatttcatattctttacaacataagttacaagttaagctgtaaagattaattaatcccccgtatcaaatttaacattttctctggtagacactgacgcacaatccgagaaaaggcaatttatcaactttttaatgacatatgtgctttttgttaagtttttataagcaagcgtcaaggctttttaattagttttatgctgaaaacgagtaaatgatgctcagcataaattaattgtgagtagggtcggatccgagttgaatcataaaactggttgcttgtcttcccaaagatgaaatatgcaattgagcacaacagtgccgcaaataagtaattgccgactagtctgcctacgatgttcttcgttgttgattatgtattttgtttatttaaatgatttagtcaatcctagtcgctgcccatcgattcctataccttcattagctcaaatggccttcaaggctcaccggcaaaattatccatttgcttaaaatcttaaaagaccataaattatgaaagactactgaagatgccaagcagaagaggacagcgcagttgttcgttcaatcaggcacttcttcagtcagccatttgagcgttcactcactcagctattattttcaataaaaacaaaataaatatggcaaattgttgggaccagcccgcctcggcagccagcggcaaaaagtaaaaatcaaactacaagtccaagcaaaactacagaaaacgctgtgcgcctgcgcagcacgcaacgccaaaagaaaagccgctggccaagtcaaaggcagaggcaaaggcaaaagctgcttctcggatgcggcttagttggagccaaagtcgtagccaaagccaaagccaaggtttctgcctttgtaattgcttgtctccgctcggcttcaagtacgggcagcagaaaaaaaaaaacaaatatccagcgacatgcgtctgagtaatgttagcgccataaataggcaagacagacagaaagagacgagttcgccataatggagtgcctcgactaccacatacctgttactcaactaagagaagtgcgagatttatgttggattcatgggcgcagcatacttgtcaaagcgtccagcataccctttgctcgtagggtaaccaacatgctgatcgaacctcgacggtcaaaccttggtcccaacttgtgtgtttaattgccagttgtaaaaatcttttagggtggagctaatcaccaagctacaaatgcaaaaataaaacttccctataagtgagttgaaggccaactcggctttattcttaactgaaagttcagtaagattaaattccttatcctttaatttgttcaataaattaaacatcttaaatgcaagccgaatggtaattctttgcccatttttaagccctacttaaattttttatcttgctgtggaagcttggccactccctttttttaagcaaatggaagccgcattgattagagcagcacatggcacacatatgtttggacatgccaccatgtggaccatggaactggatacagcaaaatcagacctcgaactactcttccgcctgaactatgggatattatcttatatgcctgctgctggttatatgccgctgtttcggttgctgatacttttgctgctgtgtaggagctcggtttccatctgggaaatgggtgaacaatggtcactgataaagtccagcgaaagagagctatttcgaagcactcgtctgtaaagtaaagtagccgacacaaaacaccagcgaagctagcagctcgatgtgggatctgtgcctggggatttctttcttttatcatcggctgtcaggcaatcgaaactacattcaagaattttctattaagaaaatgtaaccataacatttcctgcaaagggagcggtcggcttttgttttgttgtgcaacttatggcaacaagttaattgtttcttttatgttcgtgtaattgccggcgaaagccagcgctcactttacacttttttctacttcaagaacaaactagaatagctcttttagttttgcaatataatatatcaaacgagcttcaaggggtcccaagaaaaaatttttttttttaagtgctataaataaaatgggtgtagggtcttttaatctctctatatacatttcgctacccatttcttgccttctttcagcaatttgaacttatacattttggatagataacatttcaatttaaaaacacactacactggcaaaataaataaggcaaatagctctttgttcggcttggtcttttctgaaagtgcactgcggtggaggtaggagtgggaagtcttggcacagcctcctcgagctctccaagatgcagtcgcggattagatgacagattagttaaatgcgcatgaaatgaggatccgttcgcgccgttgcctgctggtcggtagaatcccagaacccgtggctgccttcagaacgcttcctacttggccttatgaccatgcggtgcctccttcgcccccggcacacgttcctctaatgtcttcattcgttaatcaggcgtcgggccaagcacgcgtaaatcgcctctattaacaggcgttgtaattgccggttgcatgcaggtgattagctgaagtccgctccatagcggaattagcaccgaaagatgcgtagttgagatacttttcgattcccacaggaactcttacatttattagtcgccggcgcatttaatttaaacgcgtctgcttgtgacatcactgccattaatgagctcatgatgtaacgcacttaagggtcgtaaaagttgaacattataactaagcccacaggctttttttattcctctagggctcgaataaacaataatttaaatttagctaatgaacctaatgacctcaggctgcccttgaacgagttgaccgtaatttatataagtggaacagccatataccgccgcacaatcaggcaatcattcccacaaaataatttcctaatcgacttccttctggtggtagttcatatttttaaccgcaagtatccgagaaaccattggtagtccgctgaaatagccaccatttttacagcccacgtggctatgcgattgtatttccaattgcattttagcagatccgatttgaggcaatcagcgatttatgccccattacgtctcgtttactaataacccataaatgtgcattctatcacatttgccagcatttcacactaagatctattgctataaactatgcgagtgggttctcatatttgtttggtttccacttcattgagttttcctttgctatcggttggccatcctgtctaatgtgctttgttggctaaaatcgcttctgataggattaataacacaccattcgcataacaaagcatcggtattgcacatcaacaaagcttgtaagaaaataagaggaaacaataaataatgctgagtcgactggaacgaatatttagatacactgaattgcttggtgaaggattgctgattacaatgaatattaattgttctgttaaatatttagctaaaagttacaaaggttgtgaatgggtttacataaatcctatacattttttgtaaacacgaactgaaagtatcattcactttaaaactttggcttttaaacgaggtacttatattttaattttaaagcagtactatgtattttaagatcgatttaaagcctcaacaaaaatcgctgttgcaataaccatcctcaaatgctcctgcctgtagctgttttgttgtaatgacaagggtacaaaagaacctgccacacccgaaaacttttccctcgctccttgcaactcgatgtggaagaaatgtgcgcaaaaaccaacaagtgatattaaatgttgctgtaaaaggggggaagctgctcagccctctcaatatattaataccggctacttgtagattaaaggggtatacaagactacttcacaaatatgcaaatgtgcttcacaaatatgcagtagtattacaatctttttaaggactaacaatattcatctacaatccaaacattttttaaaaatttggtgtccaattaaggtatactcctctagtggaactgttgctcaaagtgcgagcaatgagtatctgatagtcgagccactagtctcatatcttgctcgttcgcatttttcgtgcggttcagcgagaagaagaagacggctggcatacggaaaagctgtatacgtatacggcgaaaatgttgaacgcaattgtgctcgcactgctgtcacttttccatttggttgccgtccgcataaataaataaaagtctgcgagtgtgtccgcatcctggttgccggcttttagcgccgttgtagcttgttgccagctttaaggcgctttagggtccttacactttccgcgactcacgatgattcacctcaccattcacgtcctgcgttcgttgtcatcatgactttgttctgcaaacgcactcaccttctactcgtaccgtattcatggcgcgtgtgatgaaaattcgttttcactccttgcgacggctgggcgaagtaatgaacccgtgctcacgtaaaacgctttcagttcgctagaagaatattctgttttttcttctgctccacaaagtacctgctaattagctctcaccgagtggtaatcatgtaagtcaacaattgaacgagaaatttcattagggcagccaacaataacagcgcgagtatctcaagtacctggtccgctgtttggctcctaactctccgacctcacgattgcgtcactttccgcacaccgcgtcctctctgaccaatccattagtcggggaaaatcacataatgcatgtaaacgataatgaaaatgacattagtccaggccgcacgagaagcggcaaagccaacaacagcagattgaacatcaaattcagatgttttcgcattcccaaggggaggcaacaaaatatttgcacagagatgaacttgtgaatgccctttgaaatacttttttttaaaaattaagcaattagcaacattttaactttgccaaaccgaatgcaatatgcccttagatgcacattgtagcataataatgtaatcacaatcaaatgagttaaccaattgagaacagggtcttgcttaatctgcaataccctgtagaaatgcacaacccagcgaacgggaaagcgaaattaatgaaattaagctaacaaactgggaccaaacctctgagtgtgtgtgtgtgtgggaaaatgtatctatgtggattggtttacgtggttcgcccacgcgtatagcattaagttttccagctcctttttttgtcgaagctacaatcttcgcccctcctcgtccccgccccacggaagtgataatcgattcgcacctgtcctgatgtgggcgtgtgctctcctgttgccaacttttcccttaccgccaactgtcgctcattatacgaattaatgtcatgcattcgcgttcgatattttccatcttatatttagcatttgtccaggggaaaacaaaaccgttgacatcagccagtggacattgggtgcaattgactacgacataatggcatgcaatgacatattattggcagttaagagactgttgacctttagctctgctgcaatcaataatccccgggacggaattcgtgttaaacaataaatatttacctaataatatctttgtgatcagcaagtcagtcgatatagaggataatgtcccaaaaatgtatctgaaattcttactttatatggatattattccctttagccatattcccttatcttcacggatttcaacacaatttcctttgcattttcttctctctgttaacatttgtactatagaaactttgtttgctcgtttgctacttacttactatctgggtgttgcggcaatttattgggtttttgcttcataacttcagtttttgtacattttgatcgcgtgatagttggcgtcgctaaataggcaaaaactggctggcgatatacataaacccgtacaaggttctgtctcgaccgaaatcggtggtccgtggcagcacctaccctctaattcgtggcttgtttgtttgcctttcgctttcgccgcgtctttccttggacgctctcttttggccaaaagcttcattagtgccaatgcacccatcatcgcagtatttgtcgctgccagttggcagcaaaaagggagctccgaattgtgttacgcgtccatgaggtcaaaaccaatcgattttctcgactttttcggtcgccttttttttatatgtgatactcctgttttgttctttgcatttgagaattttgttttctatggcacacgctgcgtatgagcaatgtatttggataggtttgaacttataacttccacgaaactttatacacagcaaagatatcaagtgaattttttgaatgggctaaacaaggtaatattaaactaactacgggtgaaacaatctattccatataaaaataaaaaagatggcttgatttgatatttccgtgacggttgtaattattgttgagtatggacacaataatttgttgtattcctttgtgtgagtaacattgcacggctatgacaaataattgtagcattaggtgaaacgacattatttttagtgaattagtggggtcccgccaaccaataggctaagtaatgtgaatccaatatcgatcggtgcgaaagtgtttttacgacatgcatctagactttatgtctaattttctcaaattagttatatgaaatcatccctggctatcacataaaccaattttatagttgttagacctgaagtataatgtgactaatcaagattcaagaaaacgttagttttttatatgtattttttatattcgagatctctttatttctagccatcgattggcaatgctaatgaagttagtacgcaagtgccattggttggcttgggatctcctagaattttacgaggtggcgtaaatcttcttccgcatggaaccattggaatcgcccgacgaactgcgtggccacaccctcagcgaaatggttataactcaattctgtcgtttccgatgtcaaaacaaatgaactaatataaattgaagactttatgagtgtttctatgagcgcgtcctgtcccaagccatagtgttcctttctttccgagtataaatatgccaatggcaaacatggtgcgacaggtatttgggcattcatcaacttgtgtatgacagcatgttgttggaactgctcgtaccataggttccactccctctctggtgtagagaattcgatattgaccatcaggccatcattaagtggccataaaactctttgttaatttattaatgcgtaattatcgataattacagccatatctattgactatgggttggcagttttttgtttgtgttgcctgcccggcaattatgtcatgcattgtgttgaatttcctggcaaattgctaatttaattaaactttattgaacactatcactattgattttcagccaagcaggcgaagcgaacatgaactgattaataaataaattcgccactatttttacttatctaatagtttgaactgtgcggaaaatgaaccatagatttctacccccgatcaagtgggtttcttcgatcagctctacgatcctccccccattgacccccgcgcccaatcactttataagctagctatccaaaaataatcagcataggcagaaacacagaggcgaagcaaacaatgttttcataaacgattttcgcctgtgaccgcgtcgcagaaatttctgagagaggcgcaaaaggcgaaaacgagaaataatgaggcattccattcggcagagcctcccaaccatctggaaatgcccaacaaggggccagcgcaatctaattagacataataaggcaggcaggcaggcagttggagggggaggggaggcaccatcgggttgagggcaccactggtcatataccaaagagtttgtcagctcgcagcggatcgactgttgccaggcgaaggttagtttcgctatagccaaccagccacctccatccactccagccgctccgacaactcttggaactgaccaaacgacccagccggcgaggccccaaacagcctcacgagaattggcgatcgcagtgcggagtttttccggccatgctctgtgctattaaaatatattacagcagcaatttcagtcgactttatttttgcgctcagttgcggctgtggatgtccgcagtccgcagtctgtggtccgtagtccgcgaaccgctgttcgccgcttataacttcattttttatggtcatgaaagtcaattgcagtttggcatttcttcgatggattttccctcgttcgcccgtggaaatgccagcatcatcgcttggctgcgacttgggatctgtattgcggagaagaagtcgtaacttggcgtagaaaactattattcactttgcaatggaaaacataaacctattttaattgcactgcccactaggcaaatgtgtaaattttttttggcaatatatattttctaacctttgtacctatcttaaagaattttggttcttgatgttcatcttgagataaccggtttaatcaatatgagaagtttattaaccttcagtcttatcgatgactaatgaagtatgcaaatctatatattataacaaaccaaggatacaaaaaatggagatttttctatacagaacagattgagcacaacatacccttgaactctagggtgcttttttttttttgtagcaacccacattcattgttgcaaaacaaacgtgtgtcgcacttcacgttgccgtttttgggggcacaacttcagttggcaaattgaaaactcataataattctcacgtttcgctccaaattttttaagtcatacaactttggggttttgcataatcaccatatatcacaacgagtcacacacgccgcagccaaaacaaagtgacgaagaacagccgcaaagtgtgtgtacgtgtgaaaaggaacctgaaaaatcatataaacatataaatagtttgggtatcgaatgattataatgccaaatgtgatcgttagggtggcaactaaagctccagacgtgttgccaagccgacttcctctggttctgggattaagtttctctcttcaatcaaacttttatcggaactcaaattgtttgtgtacttggctcggtttcctgtgaagtgaagtgcggattgaccgactcctactatgcaaattcatcatccgacaatgccccagaaacacacaaaaccggtggcactttaagtgccctccaggaggcccacgcgtccgcctaccaaccaaattaacgatggagcaatgaactcaaaacacgacggtccatacggtctaatagttttgaatttcggaactcgtgtggacctctgatggacccccaaggcaagtccgctaatgaatgtttttgtcttctccagaagccgcgattgatttgtattcatctggccaacacaccttgccaattgttgtttttttttttttggcaaagaaaatatactttgtgcctggaaaataatatttttatatgcgatattcaggtgtaaggtcaggtgtttcttatggcagttcgcacagaacaaagggcagtagatgagcaaggtttcaatagtgtgctctaggcaatcccatacaaaccagttgtttttctaagcatttactgggtacttttttgcttataaagaattatccagcctaaaaaaacttagcgagtttggataagaactatctgaactcgaagcggaagttaagggcacgcttaaatgacgtaaaatgtttaacaattgaatgcagcttttatattgtatattgtattttaaatatgtatactatttagccaaagtcgttgcacccgtgaatgaatatttaatttcggtggcatccctcagatttattgtgaatcacaaagttgccgtgcgcacattttgtatgcacaagacctgaactgctttcaaagtggcattgagatctttaaacaagtcgacacccgcatcttggagcagagaagagtgcttggcaaacggagacccacgtaagcacttcctgtgcgacattttgtttggttaaccacgctgaatgataagcaatcattcagttaattgataacgagctcaaacaatacgctagctgaaaagggaagcatgtacgatacgtgggttggagaaaactgtgccaattagacaggaatgcagcagtttcatttcaagagtctgcggcttcagtctatttgctaccaaatggagcccaataaaaggcaagcaaaactacatatattcagtttcaaccgaatgtttttaatatttatcaattaccggtctaagaaatagcagcagttgacttatcacattttctaatagaaatattttgaaattccgtataaaagcttacatttgaaaatgtacaaggaaattaaaaagcaattctactgctttttattatttaattaaaaataaattcgagtgaacattaacaattgatttaaagagtgtacaaatttttaatgcaataacctacctatttcaagtgaacaaaaaacatataaaaagtaaaacaacttatgagttaagtttatagatttctttctgtgctggtatcattatttaattaagattgacattttaaagctgttgagatttccaagagtaatacgcgttaaaatatgacgtcttctctatcaaacttaatcttgtgattactcgtttattgtgtattttataattaaaatgctatcaatgaagacgtctgatcaataaaaaaaaaaacatgttacactcaattgttaaacacagcctgcaattttcaattaaaactacacgcttcggataagcgttgcttatataagaaataaacttttatattttttacttttctaagtacacaataaatctgtgcgagtttattcataaaaaatataaatagtttaatttaaattctgttatcacggctcaattttctagcataaggccagcaatgactttcaaacttatgaattctcaaacctttgaataacgccatctaccgtaaagggtgtttcttttaaatctgtgagagggcgctgctgtagaactacatgttttctacatggatatctacatgctagcatggacatgattttagtttcgcgcatctgttgtttttcaaatcatgttttacaaatgaacatatattttaatgttaatttttttttgcagctacaacatgcgttttgagcctctgggccagaaaatgttcacccgccgcaattggttgttgcgctgcagcatccttatcaatgtggcggtgatcctgtacattggcagtcaattgatgatcggcggcggcaacaacttctcgaacggcggtggcttcctgctgcaggagcagcaacaggtgtcaatgatgcaagtgggctccgcctcatcagcggcccaggtgcagcagcaacagcagcccactcccaagaaccagaacgtaagatacatctagataatgctcaagcgaactttggaactaacgcctcgtttcctctttagcaggtggccgagatcttcgagtccgaggaaaagcagctggtcaatgccaacgcagatcctccagcagcagcggctcaggtggctgatggcggtgctggagccccgcagttggcgaacgatagtggtgccggggcggctgctctgggcgatccctcccaggtgataggaaacattgggcccggcggtgtcgccgaggtgaacaatagccagtctgacggcggctacatagtcacaggcgatgagaaggagctggaggagcgtgtgcgatcgttgatcaactgcttcgaccacgactaccaccaacagaccttgcagcgtggcgacttctgggtgctgcagaactacgtgcgggcggagcatggcgacatcaagtgccatgagtcgatcacctacaccacgcacgcggactacacgttcctggacaacctggtgccgctgttggagcgctggaacgccccggtgagcattgccatgcacgcgcccggcacggacttccagcccactctggactcgatccggtatctgcgagagtgtctgcccggcagtcacctggtgcgcgcctataccaccttccacatctacttcggaaccaagcacattcctaagtctgtgcccaagcctcacgaagtcttcaagacgggatacaactgcacacttccacctccgtacttcaacgtcagctccgggcacctgtacaaggcgcaaaagaagttgctgtatccggtgaacgttggtcgtaacattgcccgcgactcggcactcacccactttattctggcttcagacatcgagctgtatccgaacccgggtctggtcaagaagtttctcgagatgattgctcgcaacgaacagtacttgagacgcaaggcacccaggtgagttgccttcagttccttgacagaaagaccttgtgattgagatctaacatctattgcacattacagagtatttccattggccatcttcgaggtggaagagaactccccagtgccacacgacaagacagagctacaggagttccttcgcacgggcaaagccataccattccacaaacgagtgtgcgccagctgccacggggtgcccaagtccaaggagtggatgtccgccaacgagacagatgaactaagtgtgtttcacataggtaatgaattataattatatctttgttgcatttagattaatttcttatgttgccattgcaggaaaacgaacgggttactatgtgcactgggagcccatatatattggaactcatgccgatccccattacgatgaacggctcagctgggagggtaaaagcgacaagatgcctcaggtgagtcattccgcattattgcaaagcagcagtaaacttaataatattatttattcacagggctatgcgctttgcgtaatggactacgagttccacatattggacaacgcattcctggtgcacaagccgggcatcaaggtgctgaaaaaggacaaccgacgagcgatgttgtccggcaagacaaaccagctgatacggaagatcatctatccagaactcaaaataatgtatggcatgcgcaagggatgtgcgatatagtaactaatactgaagccaagctgaggtcagtcccgattgaacgggaaggaggaaaaggcgaaaagactacaaccaacttcactattactatttgcaatgctatagatcggttgtgttgactaccggttcccattccctctatagcattgaatgcgcacttcaagtgcgtgttttacaattagctagagacttagccctagaactatagagcattatgtagttaggcttagctataggtcaggacgtgtaacgccatgggggcctattgggttttaccgcgttctgggttatctttttctactctgcaaagccttgagagcatggcttacatagacttaacgtagttaaatgtggcttttaggtatcatggtgtattccatttagctggccattcttaagttggaactagacgtcaagtaagcagtcggcccttttgatagagcgtgcttaagaatacacgcccaaaattgattcacttccaagaaatttctgtaaataataacacactaggacctttcatttcttctgttctctggacataagcggccagagacctgggttatgcggtgtccaccactcataggcagtcattatcagttacttttagtctaggccataaacttaagttgaacgttatttagttgaattttccatatacattcattaacgagttaaaaatagtttttattggatattcttttcaaaatactcaaaaagagaaattgagagcaacattattttcgtataccggggcgagtttcctagacatcagcaaaacaaacagtcttaccacttttttgtgttttatatatttccgcattaaaggcatagattaaacaatgttttttgggcaatgtagacttactgcaaagaccaaaatttagattagaccgataccgggccaaaacaattccaacgttaaatatttgacttgattagcagagtaggaatcattgaattgaaacgtattaaatagactttgagagttaaagcgtaatagtaataatgataaagacaagtttcaaacaaaaaaaaacacaattactattaaaatttatacaagaaacacacacattgagaattgatttgtttacttaccgcactgaatggtaggcagagcaattaatgcgattgaagattacatttcaataagcataaatgcgaaccgtgatatttgtactagtaaagcgatttggagatgttaaacctatttgataagaaatgagtgggcgacgatcaaaaggaaagatcagagacccatatgcattaaacttaatctaaatttagttttgtatatgtttttaattagtgttgaacattaagtcaaacttgtgcacatataaatgttaaaaaacaacattgcgaaatcgagtccgcgattagatttcgagtgaaatgctgaaggtttttgttgcgtaggccttaacacaataaagaaatgtaattgtaactaagctatcggttttagagagtttaaaaaagattagtacttagctgaaaaacagcaaattttacgtatgttgttggaaattgaatgatgtacgttttcgatgtgacttgggaacaacatacaacaattggtgtttgtataattacataagccttgattccgctgatatcatgtttgcaaatcaagtcttcgctcaaaaattgatttaattgcatattttccattcgtaagactaaaatatcactaaacataataaaaatgttgaaaatgtagctaagagcagaattaaaatataattagaatacaacaatttgaattaaagaatatatttgtatgatgtaaagaaaagtgtaaaagtgccttagacaaaacgataaacataaattatttgtaagtccattaatcaagcagctgaatactatttagtttgcaattaaattggcaacgctgtgtgttcatgcatacagcatatttttgtatgtatataaataaaaccgaagggcaatgtattaaactataatgtttactatatatcgaaatagattattttttataacttgagtctatgtcacaattcctattgaatgagtcttcttgatgattcacagcctgccaattatt

SEQ ID NO: 19625 - DNA, 2784 bp, DROSOPHILA
ccgaaatgccacagactttttgtaggcttttccactttttcgatttcgagacttcgagcgaaacggtcgtgtttttcgcgtgtgtgcgggtggcggacgcgcgtgccaatcggaaaaggcctttaaatcaaatgagtggctcgccaaaggagcgcatcaagagcagccaaaaaatcaacaaaatacgaaacacaaagccaaatcaaaagaaatcaaatttcaaattcgtgcggccaccagcaaatatcgaaataaagaaattatctaaatcatcatcagcagcagcacaaaaatcgaaaatctcctcgctgtgtgtctacaacatgcgttttgagcctctgggccagaaaatgttcacccgccgcaattggttgttgcgctgcagcatccttatcaatgtggcggtgatcctgtacattggcagtcaattgatgatcggcggcggcaacaacttctcgaacggcggtggcttcctgctgcaggagcagcaacaggtgtcaatgatgcaagtgggctccgcctcatcagcggcccaggtgcagcagcaacagcagcccactcccaagaaccagaaccaggtggccgagatcttcgagtccgaggaaaagcagctggtcaatgccaacgcagatcctccagcagcagcggctcaggtggctgatggcggtgctggagccccgcagttggcgaacgatagtggtgccggggcggctgctctgggcgatccctcccaggtgataggaaacattgggcccggcggtgtcgccgaggtgaacaatagccagtctgacggcggctacatagtcacaggcgatgagaaggagctggaggagcgtgtgcgatcgttgatcaactgcttcgaccacgactaccaccaacagaccttgcagcgtggcgacttctgggtgctgcagaactacgtgcgggcggagcatggcgacatcaagtgccatgagtcgatcacctacaccacgcacgcggactacacgttcctggacaacctggtgccgctgttggagcgctggaacgccccggtgagcattgccatgcacgcgcccggcacggacttccagcccactctggactcgatccggtatctgcgagagtgtctgcccggcagtcacctggtgcgcgcctataccaccttccacatctacttcggaaccaagcacattcctaagtctgtgcccaagcctcacgaagtcttcaagacgggatacaactgcacacttccacctccgtacttcaacgtcagctccgggcacctgtacaaggcgcaaaagaagttgctgtatccggtgaacgttggtcgtaacattgcccgcgactcggcactcacccactttattctggcttcagacatcgagctgtatccgaacccgggtctggtcaagaagtttctcgagatgattgctcgcaacgaacagtacttgagacgcaaggcacccagagtatttccattggccatcttcgaggtggaagagaactccccagtgccacacgacaagacagagctacaggagttccttcgcacgggcaaagccataccattccacaaacgagtgtgcgccagctgccacggggtgcccaagtccaaggagtggatgtccgccaacgagacagatgaactaagtgtgtttcacataggaaaacgaacgggttactatgtgcactgggagcccatatatattggaactcatgccgatccccattacgatgaacggctcagctgggagggtaaaagcgacaagatgcctcagggctatgcgctttgcgtaatggactacgagttccacatattggacaacgcattcctggtgcacaagccgggcatcaaggtgctgaaaaaggacaaccgacgagcgatgttgtccggcaagacaaaccagctgatacggaagatcatctatccagaactcaaaataatgtatggcatgcgcaagggatgtgcgatatagtgtaacgccatgggggcctattgggttttaccgcgttctgggttatctttttctactctgcaaagccttgagagcatggcttacatagacttaacgtagttaaatgtggcttttaggtatcatggtgtattccatttagctggccattcttaagttggaactagacgtcaagtaagcagtcggcccttttgatagagcgtgcttaagaatacacgcccaaaattgattcacttccaagaaatttctgtaaataataacacactaggacctttcatttcttctgttctctggacataagcggccagagacctgggttatgcggtgtccaccactcataggcagtcattatcagttacttttagtctaggccataaacttaagttgaacgttatttagttgaattttccatatacattcattaacgagttaaaaatagtttttattggatattcttttcaaaatactcaaaaagagaaattgagagcaacattattttcgtataccggggcgagtttcctagacatcagcaaaacaaacagtcttaccacttttttgtgttttatatatttccgcattaaaggcatagattaaacaatgttttttgggcaatgtagacttactgcaaagaccaaaatttagattagaccgataccgggccaaaacaattccaacgttaaatatttgacttgattagcagagtaggaatcattgaattgaaacgtattaaatagactttgagagttaaagcgtaatagtaataatgataaagacaagtttcaaacaaaaaaaaacacaattactattaaaatttatacaagaaacacac

SEQ ID NO: 19626 - protein, 608 aa, DROSOPHILA
MSGSPKERIKSSQKINKIRNTKPNQKKSNFKFVRPPANIEIKKLSKSSSAAAQKSKISSLCVYNMRFEPLGQKMFTRRNWLLRCSILINVAVILYIGSQLMIGGGNNFSNGGGFLLQEQQQVSMMQVGSASSAAQVQQQQQPTPKNQNQVAEIFESEEKQLVNANADPPAAAAQVADGGAGAPQLANDSGAGAAALGDPSQVIGNIGPGGVAEVNNSQSDGGYIVTGDEKELEERVRSLINCFDHDYHQQTLQRGDFWVLQNYVRAEHGDIKCHESITYTTHADYTFLDNLVPLLERWNAPVSIAMHAPGTDFQPTLDSIRYLRECLPGSHLVRAYTTFHIYFGTKHIPKSVPKPHEVFKTGYNCTLPPPYFNVSSGHLYKAQKKLLYPVNVGRNIARDSALTHFILASDIELYPNPGLVKKFLEMIARNEQYLRRKAPRVFPLAIFEVEENSPVPHDKTELQEFLRTGKAIPFHKRVCASCHGVPKSKEWMSANETDELSVFHIGKRTGYYVHWEPIYIGTHADPHYDERLSWEGKSDKMPQGYALCVMDYEFHILDNAFLVHKPGIKVLKKDNRRAMLSGKTNQLIRKIIYPELKIMYGMRKGCAI

SEQ ID NO: 19627 - DNA, 3337 bp, DROSOPHILA
gtttttcaatcaaaatttcgtcctcctggcgccatctgtgggtcattcttaattgttaaacgcgaacactgaaaggattttacgtatccttgcagcttataaaagcttttaaggactctacgcgaaaagcttataaaagaagacaaggagatgaaagttcaaaaaatatataattcaagtttttttatatttcaaaacttttccaaatgcagccaggacacacgaaaagctatttaaagcccatttaaaatccaacccagaaaatgacaaacttaaatttttggtttttttttttaaatccacttcattgtttctcattcgatttgtttggtttggttttcgtttttgtacaattatctaataggctccgttgttaatatttcacaagttattgtagagtcgtgtataaaactttttacaaggatattctaatatgggacctcaacgtgaccaaaggataagttgcggatgagttgagctttggtgagcgatgaagcacaacatggcctataatgaatttcataaattcgatcaggaatcataataccttgttgtatagcctataccaaatacgtacacacgagtacgtacatatatcaacctaaagttatgcgtctctataaaataccatatctaatgtttgaacataacaaatttgaactaatgcgccaagcgagcagcaaacgattgggaacgatctggttggaaaaacgggactacatgctggggcattactacctatgtatgtatgtatgtatgtatgtgtttgctgacccccagtgagatctatggtcctacgagtcgtgatgattttggggatgatttgaatactcggttgcaattccttttgctttgtgcctcgttgtcgttgcaattgtgcttttcagtttttctctgctttcaattagttccttttggtggtacgaattcgatatcccttctcgttgcccatagttcttatagataaatgtagatatagatagataatcctatgcatattctacggctcctgacgccccagcaatccgtacacgatgcgccgtcgattctgcacctccgctctcatggattccgtatagggatcgaaagataacagacgtttcttccgccggaagatgccctccttccgcataatggcgcaccgcatcagttgctcgttgatggggaactgcaggaagtccagaatggagcgcagctcccgctccgtatggtggaccaggtcgtcgtagaacaccaccttgatgctgcccgtgaagttgcgcgcccagctgaggttcatcatctcccagcccttgagcttgttgctcacgaattgctgccagtctgtaatgaaaaccaaagcagttagcaatatattaaagctctcagtcgcaaagcctaacaataataataagccgaacaatgcataactgtcttaattggacttaattggtttgtgcccccatatgcaaaacatacattttcccttggtgcgcttgtagcgatccggtgatgcgaatccgatgtgaccgccactctggcgattgaactccgcgatgatcgctttctccggatcgcggacgagaagaattgctttcgagaagggcgcccacgctttgctgccccactcgtgggtcttcaccaataatactgaactgttgcagacgttctccgccggaaagccggtcttcagcaggccgtagtccttgtagatgctgcccgtcaggatgccggtggcctgctggagcaagtaccttagccacgtgttaccgctgccaggaaaactggccagggcggtcaacgctggcagcgattgcagggcagcactgacgtcactgggcagggccgctaaagatggttacagaatggttacagaaaggtcaaacttcagtgggtcagcactcactgtagaagtcggacttgtaatccgcgtagattggaagatctcgatttatgtacttgaggtcgcgacaccagcgtatcgtcatcttgcggctgggcatcggaaaccgaggactatgaaagctgggaaactgtgaatacaaattgaaagaaatgttacattaaatgggtataaacatacatatttcatccctcgcatcctgcgaccggagtgcgtgctatttttgtacatttcgttccttggaatgtcacatgtcagtcggaaaattgccaagcggaaaatgggaaagctgtcagcttgttgtgccactcgtgactcacctcggcgaaacgttcgatgcgcggtcttttgggatgcgatccgggtatgttgttcatggagaggaacaggacgccgccgatgtagatgatgatggttgccgagacaccgaaaaagcgccagccttgtagtgccatatcgccgtctttgcattactgaaattgggattaccatcgggcttattattagctgcggattgccgctggcatcgttgagcgttgctcgtttatgtaaaaataattcaaatgaacatgttcgcattaatgaagccaattatctgtgtattttggccaggaacaggagcgacaaggaagcgtggaattaattttttttttctttcttttctgtttattttgttatgacaacgaaacaaaaaacagcagaccaggtggcggggcggtgcggtgcggctagcagaagccgcttggctaacatgactgacttggccgaaatgggaccatttgcccaccttccccgcccagaatggaatcggtaaccccgacaactcgcaagtccgtcagtcagacagttggcggcggaaatggggcgcacttcagtttgggttgcaaatgaaaattgcgaaaagaaaagccaccaaaaggcaagttattccagaccagcgtagcacaagaatagcgtactctcatttaatttttggggtcgtcctcgaatgattgataacttgtcattcgcgttgataaaggtcttcgatgactaaacaccaatcatcatcattcagtccaaaatcattaggcgtgtagctcttcatccaatattaaaattaggaaaatatcagattactatagaattgttactattaatatttctagacctctatttagtacttataaataatgcattaggatggcaagtacccttttagacaatgataagagataatctagacctgttgagataagaaccgacttattctgcacaaagccttaaataccccttcaaaaaaagggcattcgagggggggaatgagaataagagaataaaagccttgtcatgccttcaacggaattccttgagctgcataaaacgctcacgaaatccgcaaaaggacaccccatcacacacacacacatgttaggcccacatacgcacacacacacacacacacacaaacacatg

SEQ ID NO: 19628 - DNA, 954 bp, DROSOPHILA
atggcactacaaggctggcgctttttcggtgtctcggcaaccatcatcatctacatcggcggcgtcctgttcctctccatgaacaacatacccggatcgcatcccaaaagaccgcgcatcgaacgtttcgccgagtttcccagctttcatagtcctcggtttccgatgcccagccgcaagatgacgatacgctggtgtcgcgacctcaagtacataaatcgagatcttccaatctacgcggattacaagtccgacttctacacggccctgcccagtgacgtcagtgctgccctgcaatcgctgccagcgttgaccgccctggccagttttcctggcagcggtaacacgtggctaaggtacttgctccagcaggccaccggcatcctgacgggcagcatctacaaggactacggcctgctgaagaccggctttccggcggagaacgtctgcaacagttcagtattattggtgaagacccacgagtggggcagcaaagcgtgggcgcccttctcgaaagcaattcttctcgtccgcgatccggagaaagcgatcatcgcggagttcaatcgccagagtggcggtcacatcggattcgcatcaccggatcgctacaagcgcaccaagggaaaatactggcagcaattcgtgagcaacaagctcaagggctgggagatgatgaacctcagctgggcgcgcaacttcacgggcagcatcaaggtggtgttctacgacgacctggtccaccatacggagcgggagctgcgctccattctggacttcctgcagttccccatcaacgagcaactgatgcggtgcgccattatgcggaaggagggcatcttccggcggaagaaacgtctgttatctttcgatccctatacggaatccatgagagcggaggtgcagaatcgacggcgcatcgtgtacggattgctggggcgtcaggagccgtag

SEQ ID NO: 19629 - protein, 317 aa, DROSOPHILA
MALQGWRFFGVSATIIIYIGGVLFLSMNNIPGSHPKRPRIERFAEFPSFHSPRFPMPSRKMTIRWCRDLKYINRDLPIYADYKSDFYTALPSDVSAALQSLPALTALASFPGSGNTWLRYLLQQATGILTGSIYKDYGLLKTGFPAENVCNSSVLLVKTHEWGSKAWAPFSKAILLVRDPEKAIIAEFNRQSGGHIGFASPDRYKRTKGKYWQQFVSNKLKGWEMMNLSWARNFTGSIKVVFYDDLVHHTERELRSILDFLQFPINEQLMRCAIMRKEGIFRRKKRLLSFDPYTESMRAEVQNRRRIVYGLLGRQEP

SEQ ID NO: 19630 - DNA, 7079 bp, DROSOPHILA
ttcccattctagctgccccccgttttgggaagcaactcataagagataattgtgtctttccccctcaaaaaatattgtgtcgttcataccttcagaaactttttggtcgggcaacccaaaagagcacgagcgcacgaatcgggggatcgggggatcggtgatcattctctgccctccaacaacaccgcactcactcaaaaatagtttttgtgtcgaatgttaatgaacttttgcgctagtttaacgcacagccagccgaataaacattcagacacaataacaacgaaagccgataaagttttttgaacctgccttcaccgaaacttttgtatttcaacatttgcttctcgtgctcattctgttttttgggagggtttcttataaatgttcgcttgttgaaggtggaaactggtcgttggctttctatagatggactgctcaaaatatatccctgagattttgtagcctctaaacgtatagttgccgcaattgttagttaattggtatgctaagtgtggcaagcaagttggactttggtactttaaagaataataactataagactgcgataagaactatcagaacttattgcctaattcgttgcatttatgactcaaatgctagaatcttatcaatgaaaacccaactaattacatcacttaaatgaaatcacttcagagttcaaagtttattcaatgcttgtatatgtacatattttcaattagtctgaaataataaacgtcgcagataacttagataccaatgaaatttccctgagctcggggaaattttggtgctccataaaagagaatgtcatcggaaaagtccgaaaccactcaaactcaaaaaaaaaagaaacactcgaaaatttcccttgtcatcgcactcaaacattttccaattgagggaaatttcagatccaatgggaccattcttgttggtggtggttgatttttccgtgacagggtttgaggcagatttttcgggaactcacccaccagtctccgttacaccatcgaaccgaaaacctcgggagcggcgatgtgaacataatctgaatcccattctactccgttaagtgttgtttgtacgggtgttgtgcgtgtgcgtgtgcttgtgtgtgtgtgtgtgtgtgtggtccacacctcgaaaatgaccgacttttcaatgaacgatattttgagatcattcagaaaaatgcgtatgaacaagggctcgggccagggcggtcagcaccaccaataccgcaatcatcagcaccaacagcagcctccgcaaaatatgcaacactaccaacacacctatcccgtgcaacagtcgaaggacttgaagaaaatcatcaaaatcatcaagaagaacctgatcaaggagaaaatcacgcgtcaaatgaaaatccttgtctaaaaatgtcatgagacgagctaaatgaatgaataaatcttaagactgctgatatacaaatcgagggactgatactgaaaaactgacacgagttcagcgctaaagtctgattttgtaaactcaaatcaatgaataaatttacaagtatacacattgaataagaaaagatctcttcaaacttataaactatattataaattagacttgcttacaattgaatgatttgacttgaacaatcaaaaagtattattaggaggaaaacctgtatggagcagtagcaagatgactgaaagcaagaatgatacaaaatcttgggcacccaaacaaatttggattaaggatgttctcaagaaatcgggcacggaactgctcgatatatccaagagtcccgcaaaggctgttgccgtcaaaaaatcgccggcgaaaggtaattgagatgcttttcctaaaaattcagaccgaaaaagttccctcacgacgccattttgttttggtatacgcaatttttgttttgggggaagttgtggggttcgttcatactatcataacaaaaaaaaaaaaaaatacaacagcgcgactgatacagaaagtgcgagcgagcaggatggcaacgggaaatgccggttggaaaccgtacgattcgtaatgctatctcccaaatatcccaagtgggacattttcgaggcagggttctcaatgaaatttttcccatttcctctggctctcactctcctgcgccttcgcttttcctccccccataagctctcgctaggttttccttattttggaaaaccccggccggcaataacagaaagtgcgtagcacaaattcacggggtgggttttcccctttacgcccttttttcctttggctcttacgagacttttcctaaccacccgtattgcactttctatctgcttccgtgtttttcctgagacgcagattgtgaattgatggggggcaaaggagttagaccttatactatggttaagctggctttgtagaaccacaaaaaccaaacaataggttgctaatataactaataagcagtatctaatttataatttcttgtattattacttaagtctatttagaaccaactattttggtcaggtatcaaactagttaactatggtcaaaaatctaatgcggctccttctttttcgccctcttccagattcagccacaaccaaaatggtttactattccgccaaccagctgcttataaaaacggaacaatctagtcaggcgcagttctgcctccaggttccgcctccactaacagcgacgaccacgagcgtgggcctaggagttccgccatccggcggccaacaggagcacttcgagctgctgcagacgccgcagcagcgacaaatgcaactgcagctacaggaccagcaccagcaggagcagcagcagtttgtcagctaccaactggccatccagcagcatcagaagcagcaacaacagcagcaacatgaaagtattacgaacgcagcacccacagcagctccatcagcccagcggatcaagacagagcccgtcggcggattcccagcgtcggcagccgtggtgtcgcaggtgcgcaagcccagcgccagcaaaccgcaattcaagtgcgaccagtgtggcatgacctttggcagcaagtccgcccacacctcacacaccaagtcgcactcgaagaaccaagatctgtcgcttaatggcgcctctggagccggcgttgctgcgcccgtctcaaccgcggccatcgagctcaatgatgccggtctgccggtgggcattcccaagagccccaccatcaagccgctggccaacgtggccgccggagcagatccctatcagtgcaatgtttgccagaaaacattcgccgtacccgccaggctggtaagtgtcacgaaaacagagatttgaaatatttggaccaccatatcagtgatattaataagtaatatatctccttcgcttttagatccgccactaccgcacccacactggtgaacggccattcgagtgcgagttctgccacaagctgttcagcgtgaaggagaacctccaggtgcaccggcgcatccacacgaaggagcgtccgtacaagtgtgacgtctgtggacgggcattcgaacactccgggaagctgcaccgccacatgcgcattcacaccggcgagcggccacacaagtgctccgtgtgcgagaagacattcatccagtccggccagctggtgatccatatgcgcacgcacaccggcgagaagccgtacaagtgcccggagccgggatgcggcaaaggtttcacctgctccaagcagctcaaggtgcactcgcgaacgcacacgggcgagaagccctaccactgtgacatctgcttccgggactttggctacaatcatgtgctgaaactgcatcgcgtccagcactacggctccaagtgctacaagtgcaccatctgcgacgagacgttcaagaacaagaaggagatggaggcccacatcaagggccatgccaacgaagtacccgacgacgaagcggaggcggcggctgcgtcggcagcagcatcaacgtccgcaggctcctccgccggatcgccgtccttgcaaggagtcagcagcaactccgagagcagcaaccactcgccgcccagctcgccaccggccacaaagaaacctcgccaggctcgccagccgcgcgtttccaaaaccgttgcagccaccctttccatccctacctcctcgccgctctcgcccagctcactcagctccacatactcgccatcggccagcagcatggcctcgccaccacccacatcggcccactacctgcccgtccagatggaggcggatgccttgagccgggacagcggcgtgtccagcgcccagcccgcccacagcacctatgcagacgaggagcccacagatttgagcatgcaacaggtccagggtcagctgccagaaagcactgtggactactaccaggcaccgccaagtctactcgaactgcagccacaacccgctggtctaaccatcaatcctgccctgcttgaagcggccagcattgcgcgtcgccatgacgacaacgatgaccaggtgcaggatgaggatgtgcacgcagccgcctggcaaatgatgcagttgtgccgcggccacggctccttacccccaacggagcagccggcgccaagccaccagccacaggtgcccactctgcacgtcagcgatctagcggctaactacgatgacacccatgaagccaccgtgctgatcgagcacttcaagcgtggtgatctcgctcgccacgggctgcacaagggctatgcaccagtgcccaaatatgagtgagtattttggtcccccaagccggatgcttgtgtttttgtctaagagtataactaaatcgaattgcttactattcccatcagatccgctctacccaatccggacgttgtgcgacgcgtggaggcggccatcggcctgcgttccagcacggagtcgccggaacgtagctcctcgccggagagcgactccctgatgatggccgaccggaacgtgatgacgctgccgttgcgcaagcgcaagcactacatgaacaagggcgacgacggtcaggtggattcggagaaggctagcggagatggcacctccgccgccggtggtgccgcttccgttggcgccggggatggacccgggtccaaggtgatgcgaatgagctcggtcattcagttcgccaaggcctcctaggggtccaaggccgatccccaatcagcattaagactgtccaaacaaattctaactgaaattagcctaagttttttctctgaggttcggggttaggcctggaaaaagaaagcatagaaacgtatggatatggcagtgagatagttttccagcagcgaaaatgaaaatgccaaaagtattaaaaaagggaaaaatttgttttaaaattaatattacctcctattacgttttattggcttgatccgagttttgttgaatgtttgatttgaaaatagtttcacccatattgcaaaatttcattttagtttggcatatacaatgtaggtatagtttgttttcctgtgttgtccacttagtcaaattgcagcaattggcattatgcgtattaagcattagcatataactaagttaattatatataaaagatcacttaacgacgcccaaacccaaacccaaacccaaatccaaaccgtacacaataataagttacgcgcataactacatatatacacatattaatgagaacgaaaaaccatggccatattggcgcttaatatttataaaatacatataatacttatttattatgaactctgctcgccaaacttcttccttcccctccacgattagtgtcaacggcatctttgacatcatgtacccatcattttatatgcattttatacactaaataagggaaaactgaggaaaaaggatcggtaactttaattttacacacggagaatattgaactgataaacaagaagaaagcaagcataactacgtttatatacattttcaaaccagaagataacaaatataattaagagcgtcagcatagtttttgtaaacgcagagttaatacatagatttaaattctaaaatcaaatattgcatgaaaaaacgcaaatgaaatctgaaaatcaataaacaagcgtgaaataaaccaattcggtgtatgtgtattttaatggggcgttttaatttaaaaaacttacccatttcgcttgagaaatcgcagatgaagtaactcgatccaattcggtgatgaaaatgtagatgcaccaatgttggaggttaataaccctcgttggaatattttaccatgtttgccacctcattgaatgcgaataaaacatcgaaatttcattactgaatgcatttttatatatcattcacttgtgactatacgaatggtgtgctaaacccaccacagttcgattagctaacattttgattataaaaatggttttacaattcatttgactgcttcaactagacgcagtcagttttcctgtctgcctttgtataaatgaaatattaattaaattttaaaaatcatgtacaacgggcaaagctgccaaacgagcaaggcttcgtttgcggtggctagagagataaacaaattatgatacaactaagcaaacattgcaattagtataagagataaggcagccggcacaaactatgcacttaaactaattaacatgatggaggaggggtgggacgacgctgggagtgctgggggggggaggagttgtggcttattgcagaaaactaaaccctgtttacaaactaataatgcaaatcgaataactctcttctggccattgagcatcagatgccaatgtaggagcacagcacgaacacggcgaaaatcatgacaatcagaaagacgatggcaatccaggcggggattgtacctaaaaagaagttggcagtgagataatttccaattttacaccaattttattgcttacgtctttgggacagactgtggatgcagactttgttgtccaccgaaatggacagaacggctgcctccgtgtcgctggaaatgggcggtccctcctcgttggtaataggcaggaactggaggccagttacgaacatggagtgtgcatggggaatgtggagcacgcgctgcaaaacgtaagcaaagaat

SEQ ID NO: 19631 - DNA, 4160 bp, DROSOPHILA
gtctccgttacaccatcgaaccgaaaacctcgggagcggcgatgtgaacataatctgaatcccattctactccgttaagtgttgtttgtacgggtgttgtgcgtgtgcgtgtgcttgtgtgtgtgtgtgtgtgtgtggtccacacctcgaaaatgaccgacttttcaatgaacgatattttgagatcattcagaaaaatgcgtatgaacaagggctcgggccagggcggtcagcaccaccaataccgcaatcatcagcaccaacagcagcctccgcaaaatatgcaacactaccaacacacctatcccgtgcaacagtcgaaggacttgaagaaaatcatcaaaatcatcaagaagaacctgatcaaggagaaaatcacgcgtcaaatgaaaatccttgtctaaaaatgtcatgagacgagctaaatgaatgaataaatcttaagactgctgatatacaaatcgagggactgatactgaaaaactgacacgagttcagcgctaaagtctgattttgtaaactcaaatcaatgaataaatttacaagtatacacattgaataagaaaagatctcttcaaacttataaactatattataaattagacttgcttacaattgaatgatttgacttgaacaatcaaaaagtattattaggaggaaaacctgtatggagcagtagcaagatgactgaaagcaagaatgatacaaaatcttgggcacccaaacaaatttggattaaggatgttctcaagaaatcgggcacggaactgctcgatatatccaagagtcccgcaaaggctgttgccgtcaaaaaatcgccggcgaaagattcagccacaaccaaaatggtttactattccgccaaccagctgcttataaaaacggaacaatctagtcaggcgcagttctgcctccaggttccgcctccactaacagcgacgaccacgagcgtgggcctaggagttccgccatccggcggccaacaggagcacttcgagctgctgcagacgccgcagcagcgacaaatgcaactgcagctacaggaccagcaccagcaggagcagcagcagtttgtcagctaccaactggccatccagcagcatcagaagcagcaacaacagcagcaacatgaaagtattacgaacgcagcacccacagcagctccatcagcccagcggatcaagacagagcccgtcggcggattcccagcgtcggcagccgtggtgtcgcaggtgcgcaagcccagcgccagcaaaccgcaattcaagtgcgaccagtgtggcatgacctttggcagcaagtccgcccacacctcacacaccaagtcgcactcgaagaaccaagatctgtcgcttaatggcgcctctggagccggcgttgctgcgcccgtctcaaccgcggccatcgagctcaatgatgccggtctgccggtgggcattcccaagagccccaccatcaagccgctggccaacgtggccgccggagcagatccctatcagtgcaatgtttgccagaaaacattcgccgtacccgccaggctgatccgccactaccgcacccacactggtgaacggccattcgagtgcgagttctgccacaagctgttcagcgtgaaggagaacctccaggtgcaccggcgcatccacacgaaggagcgtccgtacaagtgtgacgtctgtggacgggcattcgaacactccgggaagctgcaccgccacatgcgcattcacaccggcgagcggccacacaagtgctccgtgtgcgagaagacattcatccagtccggccagctggtgatccatatgcgcacgcacaccggcgagaagccgtacaagtgcccggagccgggatgcggcaaaggtttcacctgctccaagcagctcaaggtgcactcgcgaacgcacacgggcgagaagccctaccactgtgacatctgcttccgggactttggctacaatcatgtgctgaaactgcatcgcgtccagcactacggctccaagtgctacaagtgcaccatctgcgacgagacgttcaagaacaagaaggagatggaggcccacatcaagggccatgccaacgaagtacccgacgacgaagcggaggcggcggctgcgtcggcagcagcatcaacgtccgcaggctcctccgccggatcgccgtccttgcaaggagtcagcagcaactccgagagcagcaaccactcgccgcccagctcgccaccggccacaaagaaacctcgccaggctcgccagccgcgcgtttccaaaaccgttgcagccaccctttccatccctacctcctcgccgctctcgcccagctcactcagctccacatactcgccatcggccagcagcatggcctcgccaccacccacatcggcccactacctgcccgtccagatggaggcggatgccttgagccgggacagcggcgtgtccagcgcccagcccgcccacagcacctatgcagacgaggagcccacagatttgagcatgcaacaggtccagggtcagctgccagaaagcactgtggactactaccaggcaccgccaagtctactcgaactgcagccacaacccgctggtctaaccatcaatcctgccctgcttgaagcggccagcattgcgcgtcgccatgacgacaacgatgaccaggtgcaggatgaggatgtgcacgcagccgcctggcaaatgatgcagttgtgccgcggccacggctccttacccccaacggagcagccggcgccaagccaccagccacaggtgcccactctgcacgtcagcgatctagcggctaactacgatgacacccatgaagccaccgtgctgatcgagcacttcaagcgtggtgatctcgctcgccacgggctgcacaagggctatgcaccagtgcccaaatatgaatccgctctacccaatccggacgttgtgcgacgcgtggaggcggccatcggcctgcgttccagcacggagtcgccggaacgtagctcctcgccggagagcgactccctgatgatggccgaccggaacgtgatgacgctgccgttgcgcaagcgcaagcactacatgaacaagggcgacgacggtcaggtggattcggagaaggctagcggagatggcacctccgccgccggtggtgccgcttccgttggcgccggggatggacccgggtccaaggtgatgcgaatgagctcggtcattcagttcgccaaggcctcctaggggtccaaggccgatccccaatcagcattaagactgtccaaacaaattctaactgaaattagcctaagttttttctctgaggttcggggttaggcctggaaaaagaaagcatagaaacgtatggatatggcagtgagatagttttccagcagcgaaaatgaaaatgccaaaagtattaaaaaagggaaaaatttgttttaaaattaatattacctcctattacgttttattggcttgatccgagttttgttgaatgtttgatttgaaaatagtttcacccatattgcaaaatttcattttagtttggcatatacaatgtaggtatagtttgttttcctgtgttgtccacttagtcaaattgcagcaattggcattatgcgtattaagcattagcatataactaagttaattatatataaaagatcacttaacgacgcccaaacccaaacccaaacccaaatccaaaccgtacacaataataagttacgcgcataactacatatatacacatattaatgagaacgaaaaaccatggccatattggcgcttaatatttataaaatacatataatacttatttattatgaactctgctcgccaaacttcttccttcccctccacgattagtgtcaacggcatctttgacatcatgtacccatcattttatatgcattttatacactaaataagggaaaactgaggaaaaaggatcggtaactttaattttacacacggagaatattgaactgataaacaagaagaaagcaagcataactacgtttatatacattttcaaaccagaagataacaaatataattaagagcgtcagcatagtttttgtaaacgcagagttaatacatagatttaaattctaaaatcaaatattgcatgaaaaaacgcaaatgaaatctgaaaatcaataaacaagcgtgaaataa

SEQ ID NO: 19632 - protein, 845 aa, DROSOPHILA
MTESKNDTKSWAPKQIWIKDVLKKSGTELLDISKSPAKAVAVKKSPAKDSATTKMVYYSANQLLIKTEQSSQAQFCLQVPPPLTATTTSVGLGVPPSGGQQEHFELLQTPQQRQMQLQLQDQHQQEQQQFVSYQLAIQQHQKQQQQQQHESITNAAPTAAPSAQRIKTEPVGGFPASAAVVSQVRKPSASKPQFKCDQCGMTFGSKSAHTSHTKSHSKNQDLSLNGASGAGVAAPVSTAAIELNDAGLPVGIPKSPTIKPLANVAAGADPYQCNVCQKTFAVPARLIRHYRTHTGERPFECEFCHKLFSVKENLQVHRRIHTKERPYKCDVCGRAFEHSGKLHRHMRIHTGERPHKCSVCEKTFIQSGQLVIHMRTHTGEKPYKCPEPGCGKGFTCSKQLKVHSRTHTGEKPYHCDICFRDFGYNHVLKLHRVQHYGSKCYKCTICDETFKNKKEMEAHIKGHANEVPDDEAEAAAASAAASTSAGSSAGSPSLQGVSSNSESSNHSPPSSPPATKKPRQARQPRVSKTVAATLSIPTSSPLSPSSLSSTYSPSASSMASPPPTSAHYLPVQMEADALSRDSGVSSAQPAHSTYADEEPTDLSMQQVQGQLPESTVDYYQAPPSLLELQPQPAGLTINPALLEAASIARRHDDNDDQVQDEDVHAAAWQMMQLCRGHGSLPPTEQPAPSHQPQVPTLHVSDLAANYDDTHEATVLIEHFKRGDLARHGLHKGYAPVPKYESALPNPDVVRRVEAAIGLRSSTESPERSSSPESDSLMMADRNVMTLPLRKRKHYMNKGDDGQVDSEKASGDGTSAAGGAASVGAGDGPGSKVMRMSSVIQFAKAS

SEQ ID NO: 19633 - DNA, 6557 bp, DROSOPHILA
gccggccaagaaattacacgaatccgactgagcgccaagcgagacgccttcaattctacaatttccttttaaagttaagatttttggcacaggtgatctacaccttggtagccgtggtaattgggacacttaaaacataaaaatttatttaatatgttccaaaaaattctatacatactcattgaaatatttttttttttttttttttttgaccattctaagctttctgtaatccatgtaaaatagcgtacaaaacgggacagggctgcgacccgcgctgattgtttggactgcgatgtgctgtattacttggctgccgtggctccttgagggactgatcaactatttgtttaaatgatggacgccatggcgttagacatatatttttcaaaattttccctaacatgtagctattcctgaaatgtagcaaataaagcactgttctgcttcgtacattctcaattcttcacgatgaaggtgtgtgaactttttgcgacgactgtatactctcttcagcattctaactcgatttcgtgcatttattttgcaaaaaatgccaaaatttggccaaaaattaatttcacaaagcctgtcaaaaagtgatatgggttcttagtattggtaattcgtattaaaaaataactgtacttcttttggccattatagccatttttagtcaagttataaccaaaaaacccatcttaaatattgcattttttgccaaaaatcaaaaatgggctaaaaatttaaattttcaaaatttattaaaaagagatacagagctgcacaaaaacttaattcaatttgactaaaaactgctaaaaacgatatacaatttatttgattcttaagaattcgcgactattcccaaaagtagatttaaaaggccaggcaaatattttcttatttttaatgaatttctcagacaaacataagatcacaaatagtaactattaatatttttgtaattaaaatatgcactaccccacacatccttgatctagatatcgttcttgcgcgccgagcttccagcagtagtcgtagtattgataatagatgcactgccgctgttcaaagaagcactaacctctccaccgccaccaccaccaccaccgccacctgctccacctgctccaccgcccaccacagtctgtcccgatggaatgccgtgctgaacgagaaaatcgtgctcattcttcgcttgccgcagccagttgcgcagatcccgtgtgcgctccaccaggcaagtggtgtagttgacggcccgtggactctgggacacaatggtgttggccgtgagaatggcggcgcccatggagctttgcatcctgccggcggctagctggcgataggtctccaatcgatcggccagcgtgggaatcgaatggggaatatgcacggctccaccgccctcgatgtcatccgatagagagaagttctgagtgccagagtgctgatgcttgagcacctgtgaccatccgaggtcacgtggcgataggatcggtatgcccgatgcggtttgatcatgttgctgttggtattgcttttgcccgaatatatcgagaatttcccggatctcggcattgagtatttccaaattttcaatacactcgttcgactcctgctggtagtagtccttcttcttgtggaaatccgcggcactggccaaatcggtgctactgaagccagaactggagtgcgacgatagatcgctaagtgtggccgcatcgtccatggtgcccaggtccaggatcgatttctccttctcgtagatcctcagcagactctgttccaaatgtcgcagtcgtattattttctcgcccagcagggaacgagtgcgatggagattcacctccatctcggtcagttccttctcctcctggattagctgatcaatggaatgtttcggcgatagggcggttatcttccgctgctggccgatctcccgctgtctaaggcggaaatttgtgcgctgtgtccttagcgattccttggcccgacgcaccgaatcccgctccagatggatgcgatgcttgaagaactccaactccgagcccacaccattcggcttgatggagatgtcggtgaaggggtatcgcagatgataaggtgcatccagggtattctcgggaaactgatcctccagcgcctcgagtttctggagctgatgacgcaaattctccaccggagtgcagggtcgttcgcccttatagctggtatccgagttcaagcgcgacgtggatgccgatttggtgcgcgagaagacgatcctattgattccggtcgactccttgatctggttactattgttgttcctctcgaggttcgattgtgtggccaccgcagccaccactccatccctcgaagagttgccattatcactggccgttctggcggagagtactccgctggcggacttcagaaatggtccataacgaccattattataggtattcgatagggtcgtatccgattgacttatggaagtattatcatcctgcagctgcaactgccgtatgttgtacgacttggtcagttgactcttgtgcggaactggacatggtttgacaatggcctcgccggcaattgcctgatccgagtagctgagcgagcgattatcgctatttccggattgcggtttgtaataccgctccatggagcgttccatttcggtgccactattggtggacttggtgctgttggtgtggttatgctggggcgccatctgcgcctcccgccggcgatttcttcgctccagcgacagcttcacgtccgtcttaaggcgcacgtacttctccttgaggcacctgtacttatcctccagcaggcgcttctcgcacctgaccttctcgtacagccgctcctcgcccttctcccggaatcgctgcttctccgcgtccagctcgcgtgcgaacttctcgcgcatctgggacagcctggagctgtgctcccgccgcagcagctcctcctcgccgtgcaattcccgctcgagatcgcgtaggatctcttcgtgattggcctgcagggcgtccattcggctcttgtgctcggtggccatcaaggtgcgcttgctctgcagctgccgctccaattgcactcggtatttctccatttgcagctcgaatgcctcctccaatttgtgctgatgcgatgtgagccggagatcgtactcgtgacggaatctcttgagtttcgcttcgtgatctcgtcgaatggcctcaaagtcggtctgcaactgggcctccttgtccgcaatgttggccctaaaggctgaagtactgcatattgacttgtccgatgcaggtgcttgggccgatttgagctgcaattgttccagctcgtagctgtgctttcgtcctagttcctccaaatcgaaggcattatttccgaccagaagtgatgagtcctgttccgatttattaataataaagctacgcaccgaactgcccttcgaatcggaatctgtgtcgtcgtaaaataattttggtgcatcagtgtccttagttttatccgagactgtatctcctgatcctgatattttcactacttccggtatagtctttggtatagtcttattcgcgtctgataagaagggattacgattgtatatggcctcgtcattatcgggccaaggattaagtgctccttccctatcatctttatctacgtcctcatcttcaatcacatcattatcctcatcatcatcctcatcatcatcgtcgccttgaaccaccacatcctcatcatcatcctccgactgtgagtgctcattttgcttataggcttgcgtcatcttgatggattgagtctcctcgggggagctcttccctcgctgcccctgatccaaattaaatcgcacgctcttcttatcctccccctcaaccgtgggctccagtcgatctagcctacgacttatatcggttatgctcgaatcgcgtagaatacccttgacaccggacggcgaggtatatccatcgctttcgaactgtctatgtgccttttgaaacatcgatactgtacccgaaggtttcgtacctccttcgttctcctctgacctatcggtttttccattcatttgactagtgggcgcgggtttattcgctatttgtggctttgacttggtcacctcgaagccaagctgatgcaatcgacccatatccttggatccagattccaaaaatcgactcttggcactactaaataagctggccttgctggccaccgaccatttccgggccaaactgttcaggggcagtggacccggcgatggaatatcatcgataccctgcatgctgcgtattccggagtccagttgcgacagatcatcgttatcccccaccgaacccgtgtccaaaggcttctggcgcgcctgattaaccaaatcgcgatatatggcatctagtggatggtcccattgggactctttggtgcgcgtattatggtagtaatggccattcttctcctccgagtagctgccatgaagtcatccaaaatataattacttttgcatgcattttcagtcatcttgcaatccttaccatatcttccagtctgttggcaatgcggccatcaatccttccttggccagatagagcaaatgcggttccttctgaggatcgattccaatcagggaggcatactcattgatttctgtgcaggaaaaaatggtatatacatatttaaataaaaatttgttgcacaacttttaacaattaataatgaaatatgctctcaatatattgttttagcatagtgaaggagatgaaaatgtgtttggtaatttttacaggctataaaaaaaagacgataaaaactagtatataaccctattttatatacatatatatttttttgtaaaattttaaatttctattcttttgattttcttctttattttcaacttgaatatataatatataataaaattgatttttgcaggataaaaaatgtctttcattgatgtatatatatgtatatacctaagaacatatgtatatgctccaaatggtcaacacgcctacctcaatcgttatacacatgtaagaaatcactttttattggattcgaggcaaacgaattgcttgccaaacgtgaattttcaccggaaaagccgatattacatactctcacccacaattggggtaactagtcaacggaacttaccctccgatgaggggaaacacgcctcgtcgaaaacctcctcgcagatgacggacgacgagccctgggatgatgatgatggtgtggctgggagggatttggttaactcagcggacgccgtgctcgaggagatcctcttgcacacgctggtcgtcgtcataatgggtactttaactggatttcactaaccgaagaaactcgagcggagctagcgttttcgttgctccgggagttatccgtactcgaagtgtcgttcaatatatttgcatatattgttatacttttcggatttgacattcatagttctccatactattccttagcgagtcctgccgacagcggagcaaatgccagaataatcggatgcagtttgacctaaaaatgaaaatacaaatacctactgagtcatcgctataccactcagtatgtgcgtgtgtccatgtcggagcatgctccgaacgtgggttgctggccaattatctggttggcaacaggatattgcagcgagtttgcgtgtccgcgcagcccgacgactcccaggttccaggtccctgtcctttccaccacgaaagcagacgaacagagcctcaaaaggaaaataccatggttttaatactgtcgttatactatcgcaggaaaacacctgagaaataagggtgtggtgtgtccttatttcgggcaaattccacttatgctcgttttacatgaaaattgattccttcgtttagattcccttaccttttcgttagcgtttcaagggttttctttagaaaactatgttgttttatgcacaattaccaaaaatgatatttcaggatcctgattaacaagcttaatatgccctctttttaagcatatttaataaattaaggtattctattggttttaaagcgtttttaataaattaaggtattcaatttgctttgaagcatttttaataaattaaggtattcaattttcttttcaggagagctaaagtataaaaattcatggaattgactgtaatatttaaaaaaatgaacataaggtattgtacaaaatgggtggcatatgatttgattaggagtattataaaggtttcgtttaaaatacattgtagcgacattaaaaaggatttattactcaaacagctgttcttaatgagcggtattactcaagtattggggtttttaattctatgcgggtttaaaagagtttactaatttaatatagtttaattcccaatttcatactgcatgtttaatttttatgcacaatataaaaacaactgattcataaattcatatttttcaaacatatatccaaacatatagataatgcttaactaggagtgtgaaaataatgatttcacttattttgataagatgtgacgctgtggaaacgcaccgaaagcttta

SEQ ID NO: 19634 - DNA, 3978 bp, DROSOPHILA
gtatttgtattttcatttttaggtcaaactgcatccgattattctggcatttgctccgctgtcggcaggactcgctaaggaatagtatggagaactatgaatgtcaaatccgaaaagtataacaatatatgcaaatatattgaacgacacttcgagtacggataactcccggagcaacgaaaacgctagctccgctcgagtttcttcggttagtgaaatccagttaaagtacccattatgacgacgaccagcgtgtgcaagaggatctcctcgagcacggcgtccgctgagttaaccaaatccctcccagccacaccatcatcatcatcccagggctcgtcgtccgtcatctgcgaggaggttttcgacgaggcgtgtttcccctcatcggaggaaatcaatgagtatgcctccctgattggaatcgatcctcagaaggaaccgcatttgctctatctggccaaggaaggattgatggccgcattgccaacagactggaagatatgctactcggaggagaagaatggccattactaccataatacgcgcaccaaagagtcccaatgggaccatccactagatgccatatatcgcgatttggttaatcaggcgcgccagaagcctttggacacgggttcggtgggggataacgatgatctgtcgcaactggactccggaatacgcagcatgcagggtatcgatgatattccatcgccgggtccactgcccctgaacagtttggcccggaaatggtcggtggccagcaaggccagcttatttagtagtgccaagagtcgatttttggaatctggatccaaggatatgggtcgattgcatcagcttggcttcgaggtgaccaagtcaaagccacaaatagcgaataaacccgcgcccactagtcaaatgaatggaaaaaccgataggtcagaggagaacgaaggaggtacgaaaccttcgggtacagtatcgatgtttcaaaaggcacatagacagttcgaaagcgatggatatacctcgccgtccggtgtcaagggtattctacgcgattcgagcataaccgatataagtcgtaggctagatcgactggagcccacggttgagggggaggataagaagagcgtgcgatttaatttggatcaggggcagcgagggaagagctcccccgaggagactcaatccatcaagatgacgcaagcctataagcaaaatgagcactcacagtcggaggatgatgatgaggatgtggtggttcaaggcgacgatgatgatgaggatgatgatgaggataatgatgtgattgaagatgaggacgtagataaagatgatagggaaggagcacttaatccttggcccgataatgacgaggccatatacaatcgtaatcccttcttatcagacgcgaataagactataccaaagactataccggaagtagtgaaaatatcaggatcaggagatacagtctcggataaaactaaggacactgatgcaccaaaattattttacgacgacacagattccgattcgaagggcagttcggtgcgtagctttattattaataaatcggaacaggactcatcacttctggtcggaaataatgccttcgatttggaggaactaggacgaaagcacagctacgagctggaacaattgcagctcaaatcggcccaagcacctgcatcggacaagtcaatatgcagtacttcagcctttagggccaacattgcggacaaggaggcccagttgcagaccgactttgaggccattcgacgagatcacgaagcgaaactcaagagattccgtcacgagtacgatctccggctcacatcgcatcagcacaaattggaggaggcattcgagctgcaaatggagaaataccgagtgcaattggagcggcagctgcagagcaagcgcaccttgatggccaccgagcacaagagccgaatggacgccctgcaggccaatcacgaagagatcctacgcgatctcgagcgggaattgcacggcgaggaggagctgctgcggcgggagcacagctccaggctgtcccagatgcgcgagaagttcgcacgcgagctggacgcggagaagcagcgattccgggagaagggcgaggagcggctgtacgagaaggtcaggtgcgagaagcgcctgctggaggataagtacaggtgcctcaaggagaagtacgtgcgccttaagacggacgtgaagctgtcgctggagcgaagaaatcgccggcgggaggcgcagatggcgccccagcataaccacaccaacagcaccaagtccaccaatagtggcaccgaaatggaacgctccatggagcggtattacaaaccgcaatccggaaatagcgataatcgctcgctcagctactcggatcaggcaattgccggcgaggccattgtcaaaccatgtccagttccgcacaagagtcaactgaccaagtcgtacaacatacggcagttgcagctgcaggatgataatacttccataagtcaatcggatacgaccctatcgaatacctataataatggtcgttatggaccatttctgaagtccgccagcggagtactctccgccagaacggccagtgataatggcaactcttcgagggatggagtggtggctgcggtggccacacaatcgaacctcgagaggaacaacaatagtaaccagatcaaggagtcgaccggaatcaataggatcgtcttctcgcgcaccaaatcggcatccacgtcgcgcttgaactcggataccagctataagggcgaacgaccctgcactccggtggagaatttgcgtcatcagctccagaaactcgaggcgctggaggatcagtttcccgagaataccctggatgcaccttatcatctgcgataccccttcaccgacatctccatcaagccgaatggtgtgggctcggagttggagttcttcaagcatcgcatccatctggagcgggattcggtgcgtcgggccaaggaatcgctaaggacacagcgcacaaatttccgccttagacagcgggagatcggccagcagcggaagataaccgccctatcgccgaaacattccattgatcagctaatccaggaggagaaggaactgaccgagatggaggtgaatctccatcgcactcgttccctgctgggcgagaaaataatacgactgcgacatttggaacagagtctgctgaggatctacgagaaggagaaatcgatcctggacctgggcaccatggacgatgcggccacacttagcgatctatcgtcgcactccagttctggcttcagtagcaccgatttggccagtgccgcggatttccacaagaagaaggactactaccagcaggagtcgaacgagtgtattgaaaatttggaaatactcaatgccgagatccgggaaattctcgatatattcgggcaaaagcaataccaacagcaacatgatcaaaccgcatcgggcataccgatcctatcgccacgtgacctcggatggtcacaggtgctcaagcatcagcactctggcactcagaacttctctctatcggatgacatcgagggcggtggagccgtgcatattccccattcgattcccacgctggccgatcgattggagacctatcgccagctagccgccggcaggatgcaaagctccatgggcgccgccattctcacggccaacaccattgtgtcccagagtccacgggccgtcaactacaccacttgcctggtggagcgcacacgggatctgcgcaactggctgcggcaagcgaagaatgagcacgattttctcgttcagcacggcattccatcgggacagactgtggtgggcggtggagcaggtggagcaggtggcggtggtggtggtggtggcggtggagaggttagtgcttctttgaacagcggcagtgcatctattatcaatactacgactactgctggaagctcggcgcgcaagaacgatatctag

SEQ ID NO: 19635 - protein, 1246 aa, DROSOPHILA
MTTTSVCKRISSSTASAELTKSLPATPSSSSQGSSSVICEEVFDEACFPSSEEINEYASLIGIDPQKEPHLLYLAKEGLMAALPTDWKICYSEEKNGHYYHNTRTKESQWDHPLDAIYRDLVNQARQKPLDTGSVGDNDDLSQLDSGIRSMQGIDDIPSPGPLPLNSLARKWSVASKASLFSSAKSRFLESGSKDMGRLHQLGFEVTKSKPQIANKPAPTSQMNGKTDRSEENEGGTKPSGTVSMFQKAHRQFESDGYTSPSGVKGILRDSSITDISRRLDRLEPTVEGEDKKSVRFNLDQGQRGKSSPEETQSIKMTQAYKQNEHSQSEDDDEDVVVQGDDDDEDDDEDNDVIEDEDVDKDDREGALNPWPDNDEAIYNRNPFLSDANKTIPKTIPEVVKISGSGDTVSDKTKDTDAPKLFYDDTDSDSKGSSVRSFIINKSEQDSSLLVGNNAFDLEELGRKHSYELEQLQLKSAQAPASDKSICSTSAFRANIADKEAQLQTDFEAIRRDHEAKLKRFRHEYDLRLTSHQHKLEEAFELQMEKYRVQLERQLQSKRTLMATEHKSRMDALQANHEEILRDLERELHGEEELLRREHSSRLSQMREKFARELDAEKQRFREKGEERLYEKVRCEKRLLEDKYRCLKEKYVRLKTDVKLSLERRNRRREAQMAPQHNHTNSTKSTNSGTEMERSMERYYKPQSGNSDNRSLSYSDQAIAGEAIVKPCPVPHKSQLTKSYNIRQLQLQDDNTSISQSDTTLSNTYNNGRYGPFLKSASGVLSARTASDNGNSSRDGVVAAVATQSNLERNNNSNQIKESTGINRIVFSRTKSASTSRLNSDTSYKGERPCTPVENLRHQLQKLEALEDQFPENTLDAPYHLRYPFTDISIKPNGVGSELEFFKHRIHLERDSVRRAKESLRTQRTNFRLRQREIGQQRKITALSPKHSIDQLIQEEKELTEMEVNLHRTRSLLGEKIIRLRHLEQSLLRIYEKEKSILDLGTMDDAATLSDLSSHSSSGFSSTDLASAADFHKKKDYYQQESNECIENLEILNAEIREILDIFGQKQYQQQHDQTASGIPILSPRDLGWSQVLKHQHSGTQNFSLSDDIEGGGAVHIPHSIPTLADRLETYRQLAAGRMQSSMGAAILTANTIVSQSPRAVNYTTCLVERTRDLRNWLRQAKNEHDFLVQHGIPSGQTVVGGGAGGAGGGGGGGGGGEVSASLNSGSASIINTTTTAGSSARKNDI

SEQ ID NO: 19636 - DNA, 12770 bp, DROSOPHILA
tccacaaactaaacgagcaactaatcaatataccgatttgggttcggatcgagacaattgggatgctgatacaaatggcgattttcattttttttttttttttgcggtttcagatacagatacatacaaaatgaactaacatgcgcatcgtggcatggacgtttttcaggacggtttaatgtgggaattattttctacgcacatacattctctcacagggtcacacaaatttggaaaatttattaaaatgaaatttaagaaataatcggcagacccttaagtacacttgcataatgatagagcgactgaataagacgaacaattaatgtaaaatataataaatagtaaacgaagaaaacatgagatcaaacctagaaacgttgctttgtaagaatttcctggctaaaaagtatttatatgtaagagtatttttgtaaggaaaggaaagacctttgtaaatatcatgcacttaaaacggaatcacagttctctttaagaaaaaaaaagaatacctagtgttaaactattatcattttgcaagcacaaacaatcgggataaagattacaattcaagaaagcgaaacgaatagtaattggaaccggggtggtaacactctctggctatttgtgtgtttgtttccggtttttagtagttgttgtttccgttaaatctatatgttttatatatatatatatatgtgtgtatatatatatatctcaatcggtctttactttatatgtgtatatctgtatatatcgattctcttgctggggggtttcgttagggctaaacatatatagaatatagatctatatgtcctgacatcttcttagttttgtatatcatatacatatacctagttcttgtaccatggtaatactgtccaaattccattgcttattggttgtctgctgatgaaatcgcttctggttgcgattgggatgggaatcggaattcggaaagggattgggaccaggatcgggatcgttttagatttggtcgtgattatagttctcaaagcttgtctttatcacgatcgatgctcattgctttaaagattccgcgcccgatgccgtagcgcagattgaactgatccagactggaggccctcggtcgctggctgccgctctgatgtccagcggatgtggagccaccggctccagagctagatggtgccgatccgcttggctccatcgggccgctgcccgatctggccaactgctcctccatgtccgtctcactaaattccgtttccgtgtcgctgaacttccggcgtcgccgcagaaacgtgctgcagtgcttcagttcgcccagattgtcggatagggagtgaccacgcttccgttcctgccgttccatctcggcggccagcatctgcacctcccagtcgttgtggctcgccaaaccaccttcgccatcgtctatgtcctcctcgtttcgagcatcccgcaccctcggatcctcctcctcctcgtcgtcatccacttcggccatgttgatcttgctggacgaggagctcgaactggaactctcgccaatgtcgaggatcacgctgtccgacaggcgggccagattgcccgtgacatcggccaccatgaccgcgccgctcgatccactcccactgaccaggtgtccgctctccgctgcgccgctccactcgcgatatccactgctgcgcccgctgttccgtccatttccctggccggaatagaagctggggtggctctgggcgtggcgtgagctcagggatccgggtcctccgtagtagctgctcggacagttcagggcgttagccgaggccgcatgatgacgactaggacccggcgatgtgctgcgcctgcccccttgaatgggcggcgatgaggtgaacaccgtgtccagggagtcacctcgctttaaaaatgaaaggtaccagattaattccgaatatattatatgttttaaaaaccaacaaacccaccataaacaaaagttccgccgaagaacccgaactgctgttgtcctcctcctccggcggctcatcgtcgtccaccgacagctggggcatcttcttctggcgccggctgatgggcagaaccagtgcggaggaggatgaggatgtcggtgccgccgaggacttgccctctatggagcgcagcttgagctgcagctgggcaatgatagcgtcgcgtcgtcgcacctcaccagccatgctggagaattgcgtctcgaacttggagtgcatctcgttcatgtgcgtcttgatcacgtgattgatgccgttcaggatctgattgaagtagtcctgtgcctccgggaagcctttaaatttaagatcatacatcgttgtgagaacgttgaacatttgatgtggatgaaattatgggaatgggtactttgtgtctggcaaaggtgagttttcatttgcattttcagtgagaggacattcacaataatattttccagagttttactacatcaaattaggctgtgtgttaaagcgttgttagcactacatacttaggctatagtacttcgattcaattacgtgtcagccttaactatcaatcacagttgacttcgtgtcacgaagctctgtataccaatgcagatgttcaggttttaggtgaaaggttgttcatacataataaataacagacaaagtacggatcagaaatatacatggtgcatcatctgcattggcgtcaatacatacgtacatcgtcgacaattatttacaaacgtcaggcattctcattcccattaccatacaaatgttgcaccggctccgtcaaacaagcttagctgaaatctctatatggtagtcctatatacatatatatgtatatatatacaggatcgtgttctttggtggtttttttttttttaatatatacaaaagcaaaggtcgggtgagactttgtgtgttctgtgctgttttatttagttacatgctcctaagaacttaagcatccatcatggcggctgtttcattccatttcgttcccaatgcgtgcgtgactgtacctccgcccatcggctgaaaagtttcttcgttctatgcacatgtcgtgttttaagctatgattaccattatttaattatcaggacttgagctctatctttatatatttcggtaaaaccctgagaaggtaagggttaaaaatgctggtacaaacaggtaactctttaggagagttataggaagaattgaaggaatagctaaagaatgaagcaatttaatatttaagtgtaatgggcaagttgttcgttatagcagttagaagcagttactattcgaaagtaaaaacgatatactatttctttaaggaaatctatatcaaaaactttaggtatagaaaaacggtgtacaaaatccaagaaatttaaaagtgattttacaattgtataatagttaagttagcctttttcgaaagccttttacacttaatgttatcatgcaaagatttattaggattatatcaaaagcgatgacgcaaatagatggttagacgtgtgtaagggggtggggaaggggggagaaagcagggcaaagcgagagaaagttcttattgtgcgagtatgagcggctcgcatacatgcgcaagtgtcagtgtatatagaagtatgctcaaatagagagagagaaagagatagagttacatagcgtgtttcttatactcaaatatatctttacaatctgggaagtgacaagcgttgcatggcattgctcttgttctggatcgtggatctataatggccgatctgaaacagatatatttaccttcaatccgttgcgctggacccggtccgcccatcgaactggtcgtgttctgcctgagctgcaaattcaaattcaaatcagtggtggactgggcatggaggatttgattcgacgacgctgagcactcgacgacatacgaggcggacgtggacgtggatgcggatgcggatgcacttgctcccgctcccgctggcaacatcgacgctgaggcgctgccaacgccaccaacgagtccgcgcccggttccgtgtccgcccaactccccctgcagttgggcaggaaacgcgaagctctcctgcggcgaattcgtgggcgttaccaacgtcaacgtcggcgaccagacattcgacactccgggctccaatggtagtggaactgagccggatgctggtgcaatgggtaccggaaacggaaaagccactgacggtggaggaggacacgtatacgcactgttgccgttattgctcggatgcgaactcgaattagcactgctatcgtttaccgtaccgctaccgttaccgttaccactaacgctaccgttaccgttaccgttaccgcaagcattattcaccgaaccgatcgccgcagcaccgccgaagggagattcctcctccttggcactggcgggcgggctggaaagagtggaatggaaggttacactcttcaagagcttactgtgcctagccacgtacccttccaaggtcggctccgccggcaggccctgccccttttggctggcactggagttgacctttgaccccgttcccattaccgctcccgctcccgttcccgtgcccggccccgcctcctcctgctgaccaccgcccatctggagtttcttgagtatgctcttcagcttgcgccgctccatggtctcattcgattcgggactgagtggcaggggtacgtattgcaattgcctggagttgctatccgatgcggatgcggatgcggaggcggatgccgatgcagaggcggaagtattggtggatatcgaggtggagctggtggttgattcgtacgtgctgaggaactgcgagtagatgccggaagtgtcgctataacatcgatacaaggactccgttatgggcaccttgctatccggcccggacttggagcagtcgaggctaaagctacgggtttgcaatgcccgctccagttccgcaagcttctggcgctcattgaggatcttcaatcgcttgacaaacggcagtccgcagtattccggcgacagatcgaacacgctttggtagagcttcctccgtccattgccgcccagttcggtcagttcgccgtcgggcaagtgctgttccggcttctggagacgcaagcaatcacgctttgcactcgccgtcacctggttcacctggctggtcgtggagccgttggtgcacgtggagcttggcccctgaagctgtccgtgctggtggtggccatgatgatggtgatggtggtgtccatgacgcggtgatctcgaactacttctggcgctatggtgacgtggtcgcgtatgcgactccatctgctgcggtatgttgctcagcgagtagttcttcagcggtgaggccagatcatccggcgaacagttggttaagctcgtgtagctggaggacatcagggtggccagtttcagcttggaccacggtttgatgggcgtgccatcggtgtcggtgtcggattgcagcggcgtagccatccgatggctttgaggtttgactaccctcttcgatatggtggcaatgccggaactagaaccagatcccaaacccaatccggctgcggcgacgggatcctcggatgtagcgtgcttggccaccagagccagtgacttgggtggctccttcttggctatggctcccgtgcttggacccggtgaactgctggctcctccgccgccaccctgcatctgctggatcttctgcttgaaggacaccttcatgatgggcttgatctgggccaccgtcagcgattgtcccggcgccgagatgccgatggctccgccatttgggccaggatgcgatgcacctgcctggctggcagcgaaatgcgaatcaattttgctgctaatgttgggcggtgtgttgacctaagtgatttcatcgggttaggtgcacgtttagggaaagagagatgtttgggcatattaatagaataggtacagggtcaatcaatgatgcttactctcatgctcctgttactgaaacatatgtttcaactaacaggagcatgagaaacttaacgtgaaacttaaccggcactgtaaccttaacatataattggctttttgttatttcatatgaactggttgatgaccattcgtcgtactcagatctgagttgtataagaaatctaaggattcttctgattctaactgtacatgagcttaacaggagtttaatttttaacgctgcggttaaagtctaacttttaaaggctaagcatgaagtgagttctttaagacatattgcctcaatgtaggtaggaaaaagtgaaggacttgcttctttagcgatgctttctagatctataggttctgtatgctatatctggttatatatattttttgtatttttatgtctttatttttattaattttttttttttttttgctttaccatgacgacgccgggttcggcggcgtttgcctgcggctcattcttaattttcaactgctggagtcgctggatcaggggaaagccttcgctgaactcgcgttcgggctcctcctggatcgattcctgcggcgataacgtacacgttacatgtgagtgaggtggagatttctgtggtggtgtggacttaacagctcgctcttcgcgatcctagtgcaagacacataaagacacatacaaaactactgtttaggagctggggataattacatacaacacgaatttatctggatcgggcgttaatcatttcgaaagctaaaccaaaatcaaatgataaatgcaaacgaactcatgacttaagtgggcaatgtcagcgatggtgtatctttgatttttattatttttttattctctgtatttgcttgtttgtttcatctgtaaatcaaaagtatatatgtacttgtttactaagcgaaagcagggggactattgaaagcatctagataagctctcgagttgtttttacaaagatttacagagcacaggcgacctttgtagactattctagaatatcttttcgtaaaaattagagattagtggtaaaaatttatttttttttacttcaaagtttgccaattcatttggaaattatttaaatacggaccacttttcaaagtgtaagtatttattattttcttaaatttcctaaaaattggaaattagattgtcctgctccagttttatataatgtgatctgtatagtagcttgctattagatatatatttagcacgaattgcgttacgtgctcgattgcattaattaagatctttgaaactagcacatttatcttgggtggatttatctgaaggtgcactaacaacttgtacaaactgcattacattatggagtcgaaacattgtacacatatgcaagtgtgggtggttgggtgattgggtggcttgtgggtggtggtgggactataagtaatcggtatctcagatacaacaggcttcagaccgttttccattaggctgtttgtgtttttgtgggcgtgttggtttgtttttccatttgtcaagctcttcattcaacgctctgtttgtctgcttgtggcgaaaaaccatttaaagccttgtgggtggcatgtgggtgtgggagtgggctggtgtgggcgtgggcgtggtgactcttggtgactctggatgggtgtggaaaaccaagtcgagcaaaaggtgaagtgggtgagtgaatgaaatgaaagtgaaacgaaaaataacaaaaaaccaaaagagctgtgtggtttccggtgactcggtggttgtaactgtggctgtggctgtgtggcttctggccgcaggtgggtggcgatgtcgatgcgactggaatggcttccaatccctggcctggccaactcacctgcttctccttgaggagccggaggcgctgcagcaatggcagtcccgccccaatcggactgggcgtcttgtcgtgcaactcgtccttggcctcggcgctatccgcatccttttcgtccgatcgaacgcgtgacatgcgcttcagcaggatcttgctgccgcgcggcgaggtgttgtgcagtggctgcatctccaaggattcatcgcttttgcgcgaagtcctgggggagaataatgcataatttccatttgaaatttaagcattgcgaacattttcccacactttaagccaatttaaaagtactcttgtacttacctggacttcttcagcacgttgcggaatcccttgacgtcgtgcttcagcttgtccacgatcttcttggaggcactgttctcgctgctgtcgctctggtgcacctgaccctggtgatggctctgatggtggtgcggatgagctgccgcataggcggccgcctccttgtcactctgcgccttggcgtactttttgttcacgcaacgcacctccattagccgcttgcggcccagggtctgcagaatctcctgggcatcggggtagtccttcatggccgccaggacatcctcgcgggacagagagaagagctccgagtagcccacggagcgcacatccgctgtgcgtctgcaaaagtacgcaatgaataagtaaaactcttgcttctactgcaactcagtaagttagttaggcattgggtatgcttttttttccccccatttcaaggtcctcccgcccccactcacttgttaagcccgtccagattgaggatgccgatttcgccaaaaaaatcgccagccttcatggtggttaggaccttgcccgtctcgctcagcacctccagaatgccatcggcaatgatgaacatctcgcgggccacctcgcccttacggcaaatggagtcgcccggcgtaaagatgtaggccttcatcttgagcacgagatcgtgaaggaactcgggctggcactcttggaatatggtcaccttcttcagaacgctcaggttgacatgtaaggccaattcggttttcagcttgtcgggcaggaggcccagtgcggtattgatgtcaccgccaccctgtatcctgccgcgggaccagctatagtcgtaccatcgcagcacgcgccgcttcatccctccgggcacctaaagggattggcccggatcaggcggcacattagttggactgacgatggtgatggcgacaaactcaccttgtggtgccgcatataggtcttggccccatccagaaggcgctcgaactccaggcgattcgcatttcggttcgttatcacattgcccacttggcccacaatggtggcgaagataaaaacaccaatcaaatagctaacgatcgtaaaaatatatctgcgaaggagcaattcagggagtggcaatcaattagcagggcacatataatccaaactcgtggcggagagaaagagggtggctcaatgaatttagctttataatagtattaaaaagtttcatgccactcattttcactttgccgtgaagaagcactttttagcaagctcaatcaaagttttcgaaagcttgagattatgttaaataaactatttgaaattgcagataaatttggtagacaaatatcaatggaactgttcaaggctgtcgcacgctttcgaaaactttgatgcccaatgctcatttcgtggcaatatgcaacagatatatttaaatattagaaaattataaacaccaaggcagacgaatcggtggacagcccccaaacaagttgcatgatattcgctgaatttgattgaccttgcttgctaatgtatcaaagttgaatattgataatgatcgtacccatagctagagccaaattgaagtaggcgcgatttaatgccacgacgcggaattgatcgtgggccgtccaccgaaaagttcggtctgattggtgaaatcgttagttgaaagtaagaacagaaacccaaccaatttgccatattcatttcgatatttgcacatatatatactatgtctttagtaattcctactcactctgcattcgtttcgggtgtgggcaggtccccaatggtcgtcagtgtcagggtcgaccagtacaggctgcccagatactttcgcgttagggtggcatagtccccgggtcgatacggatacacccagtcgccctaagatatatgtttcaggataaatcaaggatatttatgattcacaagttcattcattcaattcgttcaaagttgagtagtgcaaatatttaaatttacaaaacaattatataatttattttgtttagttattttataacttttgtacgcacctgaaagccctccgcctcggagagtaaaaaatagaaacaaccgaaccagtgtgccagtattaacaggatatgaattaggttaacaacacgccataaatttggccaaactgttctactttctacgatgtaataaaatctcacagatcgataaacctgcaaaagccagtcaaattagtacgcacattaataatgctcaacatcgacgattaactgactttaaaaaagcgcgtaaaacgcaagagcggatgtgtgcccatcttgagctgcagcaaatccaatggtatcagcgctatcatatcgaagataaagtcgcgcgagtgaacgtagtgacaggccagcttcctgtcgtcgtatacctagaatgcatgcagatgatcatttaaatgcttccaagtctcaagatttcaaggtttcaagatgccaagattccaaggctccaaggttccaaggctccgatcatcgggatactcaccattaggccctgctccagatagcctgtgcgtaattgaactattatatctaggataaatacaacatctgtcatcgaatcgcagatgagccaaaacgtgggcacagattgctagccaaaaatatttgcagcagcaagtacacagagcaaaatggcgagttagttacacatggttcttaagtctatgtatatcactaaggttatacaaatcaacagagtaaataaaaatagctacgagccctcgaaacttttgtaagctaaaaccaatgttggttgttaaactggtaattgatctatgatctaatttgaagccatcaaaatagctcggagccacgaaacttttgcaaaataaaatcaatactagtagttacgctgcaattgttttctgtgcataacacagtagaaagtcgcattaagtgcaaaagggccattctacgggccgtctgtgcgcctatttttatggccaggtcaagggcaattaaaatggggaatgcagttgacaattgcaaatgtgcgggcttaaaacaggatgaggttttgtggccgggttaaaggtcaacatagtcgacttttgtttgcccgaccgtagccagttctaatctgatgacaaacaccagctaactgggccataaacaaacatttgcataagccaaactgcgtgtcttataattgagccattacaaggcaaagaacgggagcaaacagataaaaaggtggataagtatttttttcggacaagttaccgatacacagatgctctttccccctctcattttaccactttgctttcccaggcaacgtgcctcgtccgaagtggcggtcattatatgcgccacggatacccaacttccattacaaccaactcttttgggtataatgacaaaagggtgtcgcctaacacaaaggacgaacaaaggcctatccgcagtcttttcaagggcaaatgggaagtggtaaacggaaagtgacaggtgtacacacccaagataaacagaaaagaaaaaaaaaaatagagaaaacgagagaataataaagaaaactaggtggggaaaactcacctgcagttcaggaaagctctgcctcacaattagggtccatagattatatagaacacatacagttaacatcattaaccaatagaagtaaaaattttcatctggattaacaacggatcgtcgtttctgcagatagcgtcgccgtcgtttaacactcttgtcgacgtcaccagaggcactttctgaacccgtatcttcaacagtttcctattattgataataaagtatacatattgttattaatatatcagaattatatccataaacaatgcccaaaaaaatgttgtgcaaattgattttccgactacatacattttgttgcatccttttaaacagtttcataataaatttcaaagccctagcattatttttctttacattttgcctatgaatagtgacaaatatataaattacctgtgtttcgggtatctgtctagtcgagaaacgcttcaggaaggagtcttcgcgcttgagcggtggtttcttctgtatcgccgatgagatctgcacggtggtgcgtagcttcatccagcgttggttcgatcgtgtcctgttttttttttgtttgtttttttttttggcacatggaagatggaaatcaattagttgcggatattcagagaacctatttcgcaaagggattgtctcacacaacgaactacggtagctaaagtagactaaagtttggggggacttaaggaggttttaaggggagcgcaactaaaaagatcattccagtaaagcgtgcgctcacgttactcgggtgctatttatttatttatttatttcatttcatagaacgtaatcgcttacgcaacacgaaagatcaaacacttacgctagttggtgatgacggagaagtatggctacgggttactggttacgggttacgggttacatagtacggattacggctatggttacgcatacttagtggcaaggcaaacattcatgggagaacccaaaagaccgtaacgcaaacgcacgcaacggtaacggtaacgctaatattaaggtggaacggaaacggaaacgcacaacgaaacacgagggaaatagagagagagagataaatagatgaggtctctttgtgcatgcaaaatacatatac

SEQ ID NO: 19637 - DNA, 5133 bp, DROSOPHILA
gttaatccagatgaaaatttttacttctattggttaatgatgttaactgtatgtgttctatataatctatggaccctaattgtgaggcagagctttcctgaactgcagcaatctgtgcccacgttttggctcatctgcgattcgatgacagatgttgtatttatcctagatataatagttcaattacgcacaggctatctggagcagggcctaatggtatacgacgacaggaagctggcctgtcactacgttcactcgcgcgactttatcttcgatatgatagcgctgataccattggatttgctgcagctcaagatgggcacacatccgctcttgcgttttacgcgcgtttatcgatctgtgagattttattacatcgtagaaagtagaacagtttggccaaatttatggcgtgttgttaacctaattcatatcctgttaatactggcacactggttcggttgtttctattttttactctccgaggcggagggctttcagggcgactgggtgtatccgtatcgacccggggactatgccaccctaacgcgaaagtatctgggcagcctgtactggtcgaccctgacactgacgaccattggggacctgcccacacccgaaacgaatgcagaatatatttttacgatcgttagctatttgattggtgtttttatcttcgccaccattgtgggccaagtgggcaatgtgataacgaaccgaaatgcgaatcgcctggagttcgagcgccttctggatggggccaagacctatatgcggcaccacaaggtgcccggagggatgaagcggcgcgtgctgcgatggtacgactatagctggtcccgcggcaggatacagggtggcggtgacatcaataccgcactgggcctcctgcccgacaagctgaaaaccgaattggccttacatgtcaacctgagcgttctgaagaaggtgaccatattccaagagtgccagcccgagttccttcacgatctcgtgctcaagatgaaggcctacatctttacgccgggcgactccatttgccgtaagggcgaggtggcccgcgagatgttcatcattgccgatggcattctggaggtgctgagcgagacgggcaaggtcctaaccaccatgaaggctggcgatttttttggcgaaatcggcatcctcaatctggacgggcttaacaaacgcacagcggatgtgcgctccgtgggctactcggagctcttctctctgtcccgcgaggatgtcctggcggccatgaaggactaccccgatgcccaggagattctgcagaccctgggccgcaagcggctaatggaggtgcgttgcgtgaacaaaaagtacgccaaggcgcagagtgacaaggaggcggccgcctatgcggcagctcatccgcaccaccatcagagccatcaccagggtcaggtgcaccagagcgacagcagcgagaacagtgcctccaagaagatcgtggacaagctgaagcacgacgtcaagggattccgcaacgtgctgaagaagtccaggacttcgcgcaaaagcgatgaatccttggagatgcagccactgcacaacacctcgccgcgcggcagcaagatcctgctgaagcgcatgtcacgcgttcgatcggacgaaaaggatgcggatagcgccgaggccaaggacgagttgcacgacaagacgcccagtccgattggggcgggactgccattgctgcagcgcctccggctcctcaaggagaagcaggaatcgatccaggaggagcccgaacgcgagttcagcgaaggctttcccctgatccagcgactccagcagttgaaaattaagaatgagccgcaggcaaacgccgccgaacccggcgtcgtcatggtcaacacaccgcccaacattagcagcaaaattgattcgcatttcgctgccagccaggcaggtgcatcgcatcctggcccaaatggcggagccatcggcatctcggcgccgggacaatcgctgacggtggcccagatcaagcccatcatgaaggtgtccttcaagcagaagatccagcagatgcagggtggcggcggaggagccagcagttcaccgggtccaagcacgggagccatagccaagaaggagccacccaagtcactggctctggtggccaagcacgctacatccgaggatcccgtcgccgcagccggattgggtttgggatctggttctagttccggcattgccaccatatcgaagagggtagtcaaacctcaaagccatcggatggctacgccgctgcaatccgacaccgacaccgatggcacgcccatcaaaccgtggtccaagctgaaactggccaccctgatgtcctccagctacacgagcttaaccaactgttcgccggatgatctggcctcaccgctgaagaactactcgctgagcaacataccgcagcagatggagtcgcatacgcgaccacgtcaccatagcgccagaagtagttcgagatcaccgcgtcatggacaccaccatcaccatcatcatggccaccaccagcacggacagcttcaggggccaagctccacgtgcaccaacggctccacgaccagccaggtgaaccaggtgacggcgagtgcaaagcgtgattgcttgcgtctccagaagccggaacagcacttgcccgacggcgaactgaccgaactgggcggcaatggacggaggaagctctaccaaagcgtgttcgatctgtcgccggaatactgcggactgccgtttgtcaagcgattgaagatcctcaatgagcgccagaagcttgcggaactggagcgggcattgcaaacccgtagctttagcctcgactgctccaagtccgggccggatagcaaggtgcccataacggagtccttgtatcgatgttatagcgacacttccggcatctactcgcagttcctcagcacgtacgaatcaaccaccagctccacctcgatatccaccaatacttccgcctctgcatcggcatccgcctccgcatccgcatccgcatcggatagcaactccaggcaattgcaatacgtacccctgccactcagtcccgaatcgaatgagaccatggagcggcgcaagctgaagagcatactcaagaaactccagatgggcggtggtcagcaggaggaggcggggccgggcacgggaacgggagcgggagcggtaatgggaacggggtcaaaggtcaactccagtgccagccaaaaggggcagggcctgccggcggagccgaccttggaaggcccgcccgccagtgccaaggaggaggaatctcccttcggcggtgctgcggcgatcggttcggtgaataatgcttgcggtaacggtaacggtaacggtagcgttagtggtaacggtaacggtagcggtacggtaaacgatagcagtgctaattcgagttcgcatccgagcaataacggcaacagtgcgtatacgtgtcctcctccaccgtcagtggcttttccgtttccggtacccattgcaccagcatccggctcagttccactaccattggagcccggagtgtcgaatgtctggtcgccgacgttgacgttggtaacgcccacgaattcgccgcaggagagcttcgcgtttcctgcccaactgcagggggagttgggcggacacggaaccgggcgcggactcgttggtggcgttggcagcgcctcagcgtcgatgttgccagcgggagcgggagcaagtgcatccgcatccgcatccacgtccacgtccgcctcgtatgtcgtcgagtgctcagcgtcgtcgaatcaaatcctccatgcccagtccaccactgatttgaatttgaatttgcagctcaggcagaacacgaccagttcgatgggcggaccgggtccagcgcaacggattgaaggcttcccggaggcacaggactacttcaatcagatcctgaacggcatcaatcacgtgatcaagacgcacatgaacgagatgcactccaagttcgagacgcaattctccagcatggctggtgaggtgcgacgacgcgacgctatcattgcccagctgcagctcaagctgcgctccatagagggcaagtcctcggcggcaccgacatcctcatcctcctccgcactggttctgcccatcagccggcgccagaagaagatgccccagctgtcggtggacgacgatgagccgccggaggaggaggacaacagcagttcgggttcttcggcggaacttttgtttatgcgaggtgactccctggacacggtgttcacctcatcgccgcccattcaagggggcaggcgcagcacatcgccgggtcctagtcgtcatcatgcggcctcggctaacgccctgaactgtccgagcagctactacggaggacccggatccctgagctcacgccacgcccagagccaccccagcttctattccggccagggaaatggacggaacagcgggcgcagcagtggatatcgcgagtggagcggcgcagcggagagcggacacctggtcagtgggagtggatcgagcggcgcggtcatggtggccgatgtcacgggcaatctggcccgcctgtcggacagcgtgatcctcgacattggcgagagttccagttcgagctcctcgtccagcaagatcaacatggccgaagtggatgacgacgaggaggaggaggatccgagggtgcgggatgctcgaaacgaggaggacatagacgatggcgaaggtggtttggcgagccacaacgactgggaggtgcagatgctggccgccgagatggaacggcaggaacggaagcgtggtcactccctatccgacaatctgggcgaactgaagcactgcagcacgtttctgcggcgacgccggaagttcagcgacacggaaacggaatttagtgagacggacatggaggagcagttggccagatcgggcagcggcccgatggagccaagcggatcggcaccatctagctctggagccggtggctccacatccgctggacatcagagcggcagccagcgaccgagggcctccagtctggatcagttcaatctgcgctacggcatcgggcgcggaatctttaaagcaatgagcatcgatcgtgataaagacaagctttgagaactataatcacga

SEQ ID NO: 19638 - protein, 1693 aa, DROSOPHILA
MMLTVCVLYNLWTLIVRQSFPELQQSVPTFWLICDSMTDVVFILDIIVQLRTGYLEQGLMVYDDRKLACHYVHSRDFIFDMIALIPLDLLQLKMGTHPLLRFTRVYRSVRFYYIVESRTVWPNLWRVVNLIHILLILAHWFGCFYFLLSEAEGFQGDWVYPYRPGDYATLTRKYLGSLYWSTLTLTTIGDLPTPETNAEYIFTIVSYLIGVFIFATIVGQVGNVITNRNANRLEFERLLDGAKTYMRHHKVPGGMKRRVLRWYDYSWSRGRIQGGGDINTALGLLPDKLKTELALHVNLSVLKKVTIFQECQPEFLHDLVLKMKAYIFTPGDSICRKGEVAREMFIIADGILEVLSETGKVLTTMKAGDFFGEIGILNLDGLNKRTADVRSVGYSELFSLSREDVLAAMKDYPDAQEILQTLGRKRLMEVRCVNKKYAKAQSDKEAAAYAAAHPHHHQSHHQGQVHQSDSSENSASKKIVDKLKHDVKGFRNVLKKSRTSRKSDESLEMQPLHNTSPRGSKILLKRMSRVRSDEKDADSAEAKDELHDKTPSPIGAGLPLLQRLRLLKEKQESIQEEPEREFSEGFPLIQRLQQLKIKNEPQANAAEPGVVMVNTPPNISSKIDSHFAASQAGASHPGPNGGAIGISAPGQSLTVAQIKPIMKVSFKQKIQQMQGGGGGASSSPGPSTGAIAKKEPPKSLALVAKHATSEDPVAAAGLGLGSGSSSGIATISKRVVKPQSHRMATPLQSDTDTDGTPIKPWSKLKLATLMSSSYTSLTNCSPDDLASPLKNYSLSNIPQQMESHTRPRHHSARSSSRSPRHGHHHHHHHGHHQHGQLQGPSSTCTNGSTTSQVNQVTASAKRDCLRLQKPEQHLPDGELTELGGNGRRKLYQSVFDLSPEYCGLPFVKRLKILNERQKLAELERALQTRSFSLDCSKSGPDSKVPITESLYRCYSDTSGIYSQFLSTYESTTSSTSISTNTSASASASASASASASDSNSRQLQYVPLPLSPESNETMERRKLKSILKKLQMGGGQQEEAGPGTGTGAGAVMGTGSKVNSSASQKGQGLPAEPTLEGPPASAKEEESPFGGAAAIGSVNNACGNGNGNGSVSGNGNGSGTVNDSSANSSSHPSNNGNSAYTCPPPPSVAFPFPVPIAPASGSVPLPLEPGVSNVWSPTLTLVTPTNSPQESFAFPAQLQGELGGHGTGRGLVGGVGSASASMLPAGAGASASASASTSTSASYVVECSASSNQILHAQSTTDLNLNLQLRQNTTSSMGGPGPAQRIEGFPEAQDYFNQILNGINHVIKTHMNEMHSKFETQFSSMAGEVRRRDAIIAQLQLKLRSIEGKSSAAPTSSSSSALVLPISRRQKKMPQLSVDDDEPPEEEDNSSSGSSAELLFMRGDSLDTVFTSSPPIQGGRRSTSPGPSRHHAASANALNCPSSYYGGPGSLSSRHAQSHPSFYSGQGNGRNSGRSSGYREWSGAAESGHLVSGSGSSGAVMVADVTGNLARLSDSVILDIGESSSSSSSSSKINMAEVDDDEEEEDPRVRDARNEEDIDDGEGGLASHNDWEVQMLAAEMERQERKRGHSLSDNLGELKHCSTFLRRRRKFSDTETEFSETDMEEQLARSGSGPMEPSGSAPSSSGAGGSTSAGHQSGSQRPRASSLDQFNLRYGIGRGIFKAMSIDRDKDKL

SEQ ID NO: 19639 - DNA, 4050 bp, DROSOPHILA
gctggcaatgaaaggctaaaggcgaagagaatgccactcgtcaaaggaaactcttgcgtaagagattactcctaaaatcctatgtatagaagatattccacaacagcaaaatgttcgtttcaagtatagttgcacctttgacaatcggcagctacctccttcccaatcgctcggcagtaaatcatcgcagcaaggacacttcaattaggccatagcgccgcctgagcagctcctttgtgccgttttctcgtttccaccgcgttccaatcgcaattagcaattagcacaacattagtgcggctgacctttgacctcgctgccactcccgctgcgcccgtcattgtccctgtccttgtgcgcgaatgtctcctgtatctcctgtgaatacccccccggtttccattcgaggagtgttccctgtgctctgtgttttgtcacgcattcattcgccaaatggccggcaataatttgcggtcgtcccattgtgtccttcgtccttagtccttcgtcgcgagcaggcgccgccgcatatttacataattgcccatgtctcagtgtctcacgccataacgccgtaaacacggcaacgaagatatagcccgcagttccagatactcgcagtcagctagatttgtgtgcttgggcataaatatgaatttgaaaggtgcggaaaacacactcgcaaataggaaccactatgaatacactgaacagaacacaatttaaaccagaagtttagtttcttaacttacctaaagcatagcaaactcaaaacaagcgcatcgaatctagcaacttttaaaatatcttctcataaaaccttgtctaattcatctaatctaattcagttgctacaatgagtctgggaagaaatgtcttcttactgtgtagcattcagtttttattatgcaaagccaaattgagtctacactctcactatccaaatgttgcaaaaactttggaaaacaaaaagttttacgttgacagcccatcgtgcaaaatgcccgaaatggatcctttttccgctgacattatgagattctttaaacgaaggcagttcagagagtgtagcagcgataaagatttgctaataagtgagttcgattcgcatctacgacaatacaggatcaaaattgatgagaactctgctcagcagcatttaaagaagttcggcaatgcaacactcaagtgcgaatatcaggtgataggtcgcaataaaaaagactcgtttccggataatcattttaggtaagttcaactagaattcataagcaaataaattaacctttgttttgcagtttttccaaactacaacccttgagtcaatcctttctggtaccaaagacaatagactttatatccacccaatgccatgccgttcatggaaacatcgatttgaagcttctgcagaaggacgcctttctatttgtacaggatcgcctgaatcacgagcataagaacacggagcatcatcgtccagatttgcaatccaagccgaatgtgatcatcctgggcattgattccacatcccgcatgaacctgagacgctccatgcccaaggttcacaaattcttgcaaagaccaggatggtttgagatgcagggttacaataaggtcggtgaaaatacgctgcccaatcttttggccatactcactggaaatgccgaggaaaacgctctattcaatggtcgatttgggcacagcggattcattgacaaactaaagttcatttggcagctgttcaagaagaatggctacatgacagcttttggagaagactgcgctaagattaacacatttaactaccagaagccaggatttaagcaacagccagtggatttttatcttagaaactttattgtggctttggaaactattttaaagacgaggcgcgagtttggaaatgttttctgcctgggacgaaagttgggtttccaatacgtattcgactttgccaggcagtttatgcaacgctttgagaattcagcacccgtatttggaatcttctggagcaatagtttcacccatgaggatttcctaggagccactgccttggatcacgtattcttggaataccttacgttgtacgatgaacttggctttttcaatcgttcaatagtaatggtgttgagtgaccatggctatagatatggtgtgactcgacaggcttccaaatcgggttatctggaagaacgtcttccactaatgttcatacatgttcctccatggttcagaaagatatatccccagtatgtggaaaacctgaagatcaaccagaatcgcctgtcctcaggctttgatctccacatgaccctacaccatctgctccacctgaatgccacttctatggcggatttcagtccaaagcttcaggcatcgcagtgtaaaatgtgccaatccctgttcttccaacttccggctaacagaaactgttctcatgcgggaatccgtgaaaagtggtgttcctgcgaacccactgaaacggtaaccaaccaaaggctcctcagaaaagtggctcaagaggtggtgcatcatatgaatcggcatttgcgggatcgaaacctcactacgctttgccagaattacgctttaaagaaggtcctttacttggatagcaaaatctcattgagcgaagactcagtcgaggacgaacagctgcacacctacataatcacattcgaaaccaatccgagttcagcgcatttcgaggccactgtacagtggaactcggaaaaggaaaccttgaacatgaatgtggacgagctgagtcgattggaatcctacgagaagcatagcaagtgcacaagagatccaataatcaagaaatattgtatatgcaaagaatttaaataaatattctatccaaaaaggaactataactattcgaacaggaagtacggcaattgtcattaagcatttaagaatagagaaaatacgaatgaaaccattacacaatcgctttcagtgattcgtgttccagttttacccaatttatgatcagcttttgcagttgcattcatagatggacggcgagagtgggtcacaattagtgaccccgcttaaatcagcggaatccgctttcctccggttcgctgattgccagcttccggatgtgtcatcccgcgatgagacggaatggaggagtcttcgccagcgctgatcagcgcgacaattgcccttcccttgattgccatcaattgcgcaaaacagtcgccgtgaattgggactcggatagtaccgggcagtgataagcacagcgagtggacaagtgtgtcagtgatggattacactcatccgccgagcaagtggcgccaaaaatgcgtgggagaatgagtcagcccattggatggcgtcatgcgcgtgtgcaagtcagcaagttatataggcaggtgcggtttgggaaactttaaagaacttgaaaaaattcttacttcttaaaagaaattcggcatttcaatttcccgctttcggctggcgcctagctgcttgtgagcagtgaaagtcctcggaggtcttcgagttgtacctcatttaatcaatccacgaaaccttctcactttgtcggcggccacattaaaggagcggggaaaacccaagtcgtagataacacctaattagggtgtagagaggatcgtcgcctgcggacaaggcgactgacaactttagcgccacttcccctggccatcgtcttattagtgcgggtggtcggctggaagggtccgagatcaatttgggaatccgcctaagaagggccacgccccccaggagcgggtattaggaatcgaaagggggcggaggaagaagcggcacgcacgcaacctgcggcagctgctacctcagcctcctcaagcggaatccctatcccttcgctcgatttggtttgtatctgtatattttcatcgtcgcggtctaggccatcagtgatgcccctgattaacggctaattccaatgctcgaattatataagataacttgttgaatgtcgtaagaacgccaatcttttatttgactaattttacttcgaagttagtatggctctggcttgttaag

SEQ ID NO: 19640 - DNA, 1725 bp, DROSOPHILA
atgcccgaaatggatcctttttccgctgacattatgagattctttaaacgaaggcagttcagagaacaatacaggatcaaaattgatgagaactctgctcagcagcatttaaagaagttcggcaatgcaacactcaagtgcgaatatcaggtgataggtcgcaataaaaaagactcgtttccggataatcattttagtttttccaaactacaacccttgagtcaatcctttctggtaccaaagacaatagactttatatccacccaatgccatgccgttcatggaaacatcgatttgaagcttctgcagaaggacgcctttctatttgtacaggatcgcctgaatcacgagcataagaacacggagcatcatcgtccagatttgcaatccaagccgaatgtgatcatcctgggcattgattccacatcccgcatgaacctgagacgctccatgcccaaggttcacaaattcttgcaaagaccaggatggtttgagatgcagggttacaataaggtcggtgaaaatacgctgcccaatcttttggccatactcactggaaatgccgaggaaaacgctctattcaatggtcgatttgggcacagcggattcattgacaaactaaagttcatttggcagctgttcaagaagaatggctacatgacagcttttggagaagactgcgctaagattaacacatttaactaccagaagccaggatttaagcaacagccagtggatttttatcttagaaactttattgtggctttggaaactattttaaagacgaggcgcgagtttggaaatgttttctgcctgggacgaaagttgggtttccaatacgtattcgactttgccaggcagtttatgcaacgctttgagaattcagcacccgtatttggaatcttctggagcaatagtttcacccatgaggatttcctaggagccactgccttggatcacgtattcttggaataccttacgttgtacgatgaacttggctttttcaatcgttcaatagtaatggtgttgagtgaccatggctatagatatggtgtgactcgacaggcttccaaatcgggttatctggaagaacgtcttccactaatgttcatacatgttcctccatggttcagaaagatatatccccagtatgtggaaaacctgaagatcaaccagaatcgcctgtcctcaggctttgatctccacatgaccctacaccatctgctccacctgaatgccacttctatggcggatttcagtccaaagcttcaggcatcgcagtgtaaaatgtgccaatccctgttcttccaacttccggctaacagaaactgttctcatgcgggaatccgtgaaaagtggtgttcctgcgaacccactgaaacggtaaccaaccaaaggctcctcagaaaagtggctcaagaggtggtgcatcatatgaatcggcatttgcgggatcgaaacctcactacgctttgccagaattacgctttaaagaaggtcctttacttggatagcaaaatctcattgagcgaagactcagtcgaggacgaacagctgcacacctacataatcacattcgaaaccaatccgagttcagcgcatttcgaggccactgtacagtggaactcggaaaaggaaaccttgaacatgaatgtggacgagctgagtcgattggaatcctacgagaagcatagcaaatggacggcgagagtgggtcacaattag

SEQ ID NO: 19641 - protein, 574 aa, DROSOPHILA
MPEMDPFSADIMRFFKRRQFREQYRIKIDENSAQQHLKKFGNATLKCEYQVIGRNKKDSFPDNHFSFSKLQPLSQSFLVPKTIDFISTQCHAVHGNIDLKLLQKDAFLFVQDRLNHEHKNTEHHRPDLQSKPNVIILGIDSTSRMNLRRSMPKVHKFLQRPGWFEMQGYNKVGENTLPNLLAILTGNAEENALFNGRFGHSGFIDKLKFIWQLFKKNGYMTAFGEDCAKINTFNYQKPGFKQQPVDFYLRNFIVALETILKTRREFGNVFCLGRKLGFQYVFDFARQFMQRFENSAPVFGIFWSNSFTHEDFLGATALDHVFLEYLTLYDELGFFNRSIVMVLSDHGYRYGVTRQASKSGYLEERLPLMFIHVPPWFRKIYPQYVENLKINQNRLSSGFDLHMTLHHLLHLNATSMADFSPKLQASQCKMCQSLFFQLPANRNCSHAGIREKWCSCEPTETVTNQRLLRKVAQEVVHHMNRHLRDRNLTTLCQNYALKKVLYLDSKISLSEDSVEDEQLHTYIITFETNPSSAHFEATVQWNSEKETLNMNVDELSRLESYEKHSKWTARVGHN

SEQ ID NO: 19642 - DNA, 3377 bp, DROSOPHILA
gcaggcggcaattcgagggtgaagtctaggcctagccaaaaatatgtagggtaaacacgggtgattcgactacaggaatgataatgataaaaagtcaaagttttaaatctaaaccaataataaaccatctataaaattaagatcaatatgttgccattaataattattatatttatgtagctgttaacattcgagtatgcccctttatctacgaataccctataaaaatagttaaatcccgacagtcaaggactcctttcattgcaggcccatcccagaatccctggcgcagaggcgtctgcagtttagtgcctgtctctgcgactttgaatcttacaaaatgtgacaagttgcggaattatttttcgcagaagatgttcttcgacttgggttctttttgcccatttagttgcagtttggtttagttcggttctgttctgttctgcgtgcagatgagctgagattgataagcggcgaggagcgtgaacaggcccgaatccgcggatccgcaccatcctggtggtgcagcttggaggagcctctgttccagcgcgagatgcaagtgcttagataaaggcagcgatttatgtggaagctcctgggagctgctgggcggagcagccggcgatgacaacagtagctccatcccatcgaatgccacgtcccattccgtcctccagccgcgaataagccgaggtgccagcaatttagtggcgattacaaccggcaatggcattttaagtggccattgtcaagacgcgatctgtgggcgtgtgataagcgccggctcccgtgtgggcgatcgattccccaggtgtgggagtgggtggcccggatggtggcatggtggcatggtggcagctcgttgaaccaaacttggtagcagaggtgagaaaacacgttctgtacttagactacttgtttctggctattaagggtcaacaatagctctcttttcatcactcaataatttatatagccaaaatttaaacgtacaaaattagtcgttgcacttcatacacttcggaccaggaggatgaatcgttcgcggcacatacgatggattcctcttctgagccacctcctcggcccacagtttgttgagataatcctccagcttggccacaacatcctcctctttgtccacgccgtcggaacaggtggcaaaatcactgcccgaagatgcagatgaagaagtgctgtggcaaacattcgaggactcgctgcaggagtcgtgcttgcagtcgatgggacaatggtgattgtcccagtcctctgggggttccacagcttcatcatagctggtatcttgctcctcttcgccaagcggttgggaaacaggttgggaaatggccactggttcctccagacgataccacttcaccttgtaggagtcttggccgcattcgccaaactgctcgcccgtcaactgatcgatgttgcattcgcagatgaggaagggcgaattgcactgctggcatctgggtagattaacctcatggttgatgatcggacgcggtggcttcttcatcctgacctccttatccatttgcggaacttgcaagccacagatgatgcagggttctggtagatctgcaccctccgacagcttgatcttcatcatttgcctttggccggccttgggatgtccgggaacttcctgcttggaacagcccttgcaaggacagcccggcaccaggaggggatccgatctggtagtcatccgttgatacagcgctgcataaaccagattgatctgcctctcgtagtgcttgtgggcccaaaagaaggccgccttgtagttgtcgaagatcctggatgtcttgtgcgccgcatgcatccaagcagcatattgggtgtgcaccgccatcgcatccactatgggattgctgatcgtcaccggtggcttgccgtgatagaaggccttaaaggcccgcttgatgatggcataggtgagcatcgcctccaccggttccatttcgcacttcagtcgcagagcctggagcaggtcctcccgattcaagcgactgtcagtagccggatttggtggacaattggtgcgcagtcgttcatggtaaacgaaagccctcttaattatcgacctggcagcgctggatttgcttgtgctgatgccacagatcagcattatctgcgccaggctcttggctatatcctccacattatcgtcaaacagttggtagggatccagctttctcctgcagttgcagcagcaccgcttgattcccccaggaggaactcccgcctcctcctgcagttttctggccctctcataattgtccattgcaatttggttgttgatgaagtaaggagacagcaaacgtatcactttaaatttcacttttgacaaaacacaaaaattgtagatgctatacacagatttctgatggaccatatagtcgcagactactgtatcgaattctttggctattccatgaaaagaaagctcataaactaaccaatacaaaagtattgtcaacctatctggcatccataaacctaccaatttgtgagcaaacttgacacacaatttgatttgaatgcacaatcttcgatgaagaatgcacttcccatttcgattggaactaatgccatggctaagtttaccataatagaacaataatcggtttgtcccaatattttccctagcctgttttaatttggttatctgacccactggtggccctatctaggattacacacagaccccacacaagaatgcattattttatctcgggactcgggtctcggttctgatcgtagctgcaattatgctaaatagattcgagccgactgaccatcgaaataaataagcgcaaagaacacgacagagccaaacgatggctgttgtgtcagacctaaattgttcaaataaattaagttgtagctttcgaatggattggggggatttgggaattggagatcggtgtctttggtgtggggattggggcaagcaaatacgggaacgtaaacgttcagaggccgccgcctgttgcattgtcatttgataaattatgatatttgatcaattgttccgctgcggtggctggaagtgctgctgcctcggatatgtggagaagaagtacgtggatgagatgaagacgtctccgcatccatgcccgcatcaagtccaccgaatgaacttttgttgggtttacattgtaatggcatctggcggggcaaacacacaaacacccagtcagttaggcagtcggatggttagtcccatatccatccattcatctgcataatagaatttccaggggtatgagcattggggatttcgaaagggggtgaggctgcctctttattgtggctaataggcctcttggccgctttgttgttgtgccgcctcagcc

SEQ ID NO: 19643 - DNA, 1377 bp, DROSOPHILA
ttttgtgttttgtcaaaagtgaaatttaaagtgatacgtttgctgtctccttacttcatcaacaaccaaattgcaatggacaattatgagagggccagaaaactgcaggaggaggcgggagttcctcctgggggaatcaagcggtgctgctgcaactgcaggagaaagctggatccctaccaactgtttgacgataatgtggaggatatagccaagagcctggcgcagataatgctgatctgtggcatcagcacaagcaaatccagcgctgccaggtcgataattaagagggctttcgtttaccatgaacgactgcgcaccaattgtccaccaaatccggctactgacagtcgcttgaatcgggaggacctgctccaggctctgcgactgaagtgcgaaatggaaccggtggaggcgatgctcacctatgccatcatcaagcgggcctttaaggccttctatcacggcaagccaccggtgacgatcagcaatcccatagtggatgcgatggcggtgcacacccaatatgctgcttggatgcatgcggcgcacaagacatccaggatcttcgacaactacaaggcggccttcttttgggcccacaagcactacgagaggcagatcaatctggtttatgcagcgctgtatcaacggatgactaccagatcggatcccctcctggtgccgggctgtccttgcaagggctgttccaagcaggaagttcccggacatcccaaggccggccaaaggcaaatgatgaagatcaagctgtcggagggtgcagatctaccagaaccctgcatcatctgtggcttgcaagttccgcaaatggataaggaggtcaggatgaagaagccaccgcgtccgatcatcaaccatgaggttaatctacccagatgccagcagtgcaattcgcccttcctcatctgcgaatgcaacatcgatcagttgacgggcgagcagtttggcgaatgcggccaagactcctacaaggtgaagtggtatcgtctggaggaaccagtggccatttcccaacctgtttcccaaccgcttggcgaagaggagcaagataccagctatgatgaagctgtggaacccccagaggactgggacaatcaccattgtcccatcgactgcaagcacgactcctgcagcgagtcctcgaatgtttgccacagcacttcttcatctgcatcttcgggcagtgattttgccacctgttccgacggcgtggacaaagaggaggatgttgtggccaagctggaggattatctcaacaaactgtgggccgaggaggtggctcagaagaggaatccatcgtatgtgccgcgaacgattcatcctcctggtccgaagtgtatgaagtgcaacgactaa

SEQ ID NO: 19644 - protein, 433 aa, DROSOPHILA
MDNYERARKLQEEAGVPPGGIKRCCCNCRRKLDPYQLFDDNVEDIAKSLAQIMLICGISTSKSSAARSIIKRAFVYHERLRTNCPPNPATDSRLNREDLLQALRLKCEMEPVEAMLTYAIIKRAFKAFYHGKPPVTISNPIVDAMAVHTQYAAWMHAAHKTSRIFDNYKAAFFWAHKHYERQINLVYAALYQRMTTRSDPLLVPGCPCKGCSKQEVPGHPKAGQRQMMKIKLSEGADLPEPCIICGLQVPQMDKEVRMKKPPRPIINHEVNLPRCQQCNSPFLICECNIDQLTGEQFGECGQDSYKVKWYRLEEPVAISQPVSQPLGEEEQDTSYDEAVEPPEDWDNHHCPIDCKHDSCSESSNVCHSTSSSASSGSDFATCSDGVDKEEDVVAKLEDYLNKLWAEEVAQKRNPSYVPRTIHPPGPKCMKCND

SEQ ID NO: 19645 - DNA, 2827 bp, DROSOPHILA
tattgctatcataaccactgaggtcatgttcttcccgttcgaaacgattctacaccgtctgcaattgcagggaacacgaactataatcgacaacctcgacaatggctacgatgtcgtacccattctaacaaactatcaaggagtcgtcgattgctatcagacaacgattgtctccgagggagttagtggcctctacaagggctttggagccatgatcctgcagtttgcggcacacgtggccgtcatcaaattgaccaaatgggttgtgaatcaaatcgtagaggtcatctccaaccgaccaccacagcgaatagtgaattactataatctggatgagaatgcttgcaactccaggtccacgaccttgtcgccaagcctttccagtaccgaaatgggggagattagtcttgggcagaattcacaagactagttaatggctagtcaaattatattgcatatgtaaattatacaaatatttatttctttttgtatttttcgttgggtttattgggacgttagcatgaataattgtattttaagggtttgcttactctgcagttgcgttaaaaaaaaatctgccaattaaaaaatataactattttaaacactttaaactgagcttatattcttgcactttgtgtcccgaaaacgtcaggaccttgaaatgaatacagaaaaattaagtaaaaacagcagattgtcctgtggttggtgcgatcgtttctatgacaactaaatgatatggttgtgtatacaattcacgataaaaaaaagaggaaggagccgttaacttcacgctcattttgaagggaaacaaaacttttttcgaattcacgattttcattacgaccgttggcaaacacacgtacgattcaagctgacgtttggatacagaagcacagcttgaatgtttgtatttatatcgaaaggcatttatttgcaatatcctcgtgatccaacaaacaatgtatacaacaactgaacgttaacagaacgatatttaatatgatttctgttcgcaaaatcgtatgtcgtttgatgtttcacattttaaatataagttccgatcgttgccttacttcctataccacatctggagcgtcttcatccgcttaaccttcttctgcagctgcaaaacgccgtacatgagcgcctcggcggttggcggacaaccgggtacgtatatgtcgacggggattatcctatcgcagccacggacgacggagtacgagtaatggtagtagccgccgccgttggcacagctgcccatggagatgacccaacgtggctcgggcatttggtcgtagacctttcgcagggccggtgccattttgttggtcagcgtgccagcgacgatgatgacatcggcctgacgtggagatgcacggaacacaacaccatatcgatccatgtcgtaacgcggagcagcgatgtgcatcatttcgacggcacagcaggccaaaccgaaagtcagtggccagatcgagcccttgcgaccccagttgagcagatcgtccagtctggccagtgaccactccgcaacggaggactgtttggtgccgaacggagagtagcccttcttgggcagattttgggccacttcggcaactggaagcgtttgttgttggcgcaccagggccaaattcagagcgggcagcgccgaaatcgacgcattcggtgtctgagtcgccttttggagagcccgggacagggtcgatgacatcatcgccgaacgcagcatgttgatcctgctaaagtaaatctgtagttatactaggactgggcatttaaacatttaatacctatttatgtaacttcaacttatttcgatttataggggatgcgtatgatgtgaccgccgccgaactactaactaaaataccaaatgcaccaggaaaatatactataaaatacgaatttactttagatatcctattctcacacaagcacatcacttgcggcagcatgaactttatgcccttttcccacatgaacgcaatggttggctaaaaaaatcaacttgcttgaaggtcatagcttaagctgaccaaaaggcaagtaaaaaagtagttattaatgtttttgtttgctttattttgtaatatgttggtgtaattctattgttacagcggcttgggaaatgttatgcaaacaattgaatggtagtaaagcgacgactcaaaatacgattagcactcttaagaactaaagataaaaaaaaccacatgttgatttaactcgctaatttatatttcagtttgaattgtagattatgcttgctcgcttgattttcccccttttaaaatattactggttggattagggtagctgttctctttttgattccttttagatatcgtcgatgttcacgtcgtcctcgtcatcctcgtcgcctgcaacagcgcgtggaattccgcgttggacgacccgttgaccgccacgttggccggcactggaaacgtagttatcctcctcggattcatcgtcctcctcctcctcactttcggaggactcttcctcggcattcttcagccagagaacgaatggcatagctttctcgtgtatttcggcagcaatatttttcgagacatgtcgtttgctaaccttctgtgcccactccagtatgacggcctcatcgagtatgtccagatcataaaacaatttgaagattccagcaaccttgctcatcaatatacccttatgcagctctacagtttgctccactccaccaattagatagcgctgtgcttttggattattgagggtgaagcgaagaagcaaagggcgattcttctgcacgtccttgatgatgttttcagtgaaaagc

SEQ ID NO: 19646 - DNA, 775 bp, DROSOPHILA
aaataagttgaagttacataaatacaggatcaacatgctgcgttcggcgatgatgtcatcgaccctgtcccgggctctccaaaaggcgactcagacaccgaatgcgtcgatttcggcgctgcccgctctgaatttggccctggtgcgccaacaacaaacgcttccagttgccgaagtggcccaaaatctgcccaagaagggctactctccgttcggcaccaaacagtcctccgttgcggagtggtcactggccagactggacgatctgctcaactggggtcgcaagggctcgatctggccactgactttcggtttggcctgctgtgccgtcgaaatgatgcacatcgctgctccgcgttacgacatggatcgatatggtgttgtgttccgtgcatctccacgtcaggccgatgtcatcatcgtcgctggcacgctgaccaacaaaatggcaccggccctgcgaaaggtctacgaccaaatgcccgagccacgttgggtcatctccatgggcagctgtgccaacggcggcggctactaccattactcgtactccgtcgtccgtggctgcgataggataatccccgtcgacatatacgtacccggttgtccgccaaccgccgaggcgctcatgtacggcgttttgcagctgcagaagaaggttaagcggatgaagacgctccagatgtggtataggaagtaaggcaacgatcggaacttatatttaaaatgtgaaacatcaaacgacatacgattttgcgaacagaaatcatattaa

SEQ ID NO: 19647 - protein, 221 aa, DROSOPHILA
MLRSAMMSSTLSRALQKATQTPNASISALPALNLALVRQQQTLPVAEVAQNLPKKGYSPFGTKQSSVAEWSLARLDDLLNWGRKGSIWPLTFGLACCAVEMMHIAAPRYDMDRYGVVFRASPRQADVIIVAGTLTNKMAPALRKVYDQMPEPRWVISMGSCANGGGYYHYSYSVVRGCDRIIPVDIYVPGCPPTAEALMYGVLQLQKKVKRMKTLQMWYRK

SEQ ID NO: 19648 - DNA, 2636 bp, DROSOPHILA
gggagcggatcttcttcagacgctccagatcgtcacgcagcttcgagtccaagttggaggaggtcagctgccagtacttgccatcgatgatgtccttctgcctgttgaggaaccagttgggcaccttgtactgcagagggttcgagatgatggtcaccaccttgtcgacctgcaaacatggcatttaggttggtgtgcgtctcgaacggattgggcgtgctcaacttacctcctcctcggtgcactcaccggcgcgcttggtaagatcgacatcggccttcttcagcacaatgttggagtagcggcgacccactcccttgatggcggtcatggcgatgccaaccttgcgcttgccgtcgatgttcgtattcatgatacgcaggatgtgctggaacttctctgggatgacgagcgactgcaagaatgcaaagaaaaaacattagtataatgcatataaaccacgccatttttgccaacagctaacggcatttgcaattcactataaatttgtcgtttggcgctcagaatcgcacatatttgaggtaactcaccattttgccgtttgtattctcgtatttactcctcactgtaaagaattaagaggtattttgttttagaattttggaaaaatcaaatgggcagcacaccactcaccggaaacgggaaaagaaaagaaggccgaattaatgtggctgcctgaggcggagtaaaaaacctaaaattgcctgccacgttcgggacgcgtgctgttaatagttcgccgtgtgctgttaggcgcactctggtccatcactaatgcaaatttaaaaattcaaaaggcgccgaacttttgttcaatgaaaatgcttaaagtgccatttagatatgctctgtgtgcacatttaaaaaattaaacttcatattttatgtttctttatattttatattttattccccacatttcgtaatacgttttatcgtactgcatccctagagcaccgttatatgaaagcttttcagaatgggtgaaataaatggtaaattatattagctatgcgaatttccaatattgataaaaatgcattgcatttaagcactcagctgcgttggacaggacgatgtcgtttccctgcgcatcgtgtgcaccatggctcgcgacggcaagcagcacaacctcgaggatgtggacatgtacgggaataccgccctattgaaggcctgctatttgggtcgatttgagtgcgctcgtacgctgctggaattcggtgcaaatatctttgctatgaactattttggtcaaaatgccctgacactggccacttatgctgggcatttgactttagtaaaggaactgttgaggcgaagatcctacaaggatttcaatctgtcctcgatgatcccggccctctgtgtggctacactgcaaaaacactccgctttggtggcctattttactcaattggattcgaggggcgtgcaagaaactcaaacagtgcatggttagtaaaaatcaagtgtatttatatagtaacattaaagtaaatttatttcaggtctgggagttgcagagctgcgaggaatgattaaagctgcaggccgcttagataagcgcaatgtgcgctctcctcccacttttattagcaatcgtctgcgttaatgtattgtcattttgtaataatttattaattttaatgtttgaaataaatatactctgtaaaaagtgtgaacataatatgttaatcaaaccagttggcaggccgctcgctggctgctatcgatagattcagtcgatatcgcccgtggcttttcacatccctatcccgctcatttagcccgcctgaaagtaaaaaaaaaaaacagcccacgttaatcattcatcccaaagtcacagccgcggtaacattactgctgttaaattcttaagcccgtcatcagtatttaaataataaaacacattcaatatgttcgaggcacgcctgggtcaagccaccatcctgaagaagatcttggatgccatcaaggatctgctcaatgaggcaaccttcgattgcagcgactccggcattcaggtaaaaattgcacaaaaaagattttaaatgcatatccctaacaccttgttcaacttacagctacaggccatggacaactcccatgtgtcgcttgtctcgctgaccctgcgttccgatggcttcgacaagtttcgctgcgaccgcaatctctccatgggcatgaatctgggcagcatggccaagattctgaaatgcgccaacaacgaggacaatgtgacgatgaaggcgcaggataacgccgacactgtcaccatcatgttcgaatcggctaaccaggagaaggtatcggactacgagatgaaactgatgaacctcgaccaggagcacctgggcataccggagacagacttctcgtgcgtggtccgcatgccggccatggagttcgctcgcatctgccgcgatctggcgcagttcagcgaatccgttgtgatctgctgcaccaaggagggcgtcaagttctcggccagcggcgatgtgggcaccgccaacattaagctagcccaaaccggctctgtcgacaaggaggaggaggcggtgatcatcgagatgcaggagccggtgacgctgacatttgcctgtcgctacctg

SEQ ID NO: 19649 - DNA, 525 bp, DROSOPHILA
atgggtgaaataaatgcactcagctgcgttggacaggacgatgtcgtttccctgcgcatcgtgtgcaccatggctcgcgacggcaagcagcacaacctcgaggatgtggacatgtacgggaataccgccctattgaaggcctgctatttgggtcgatttgagtgcgctcgtacgctgctggaattcggtgcaaatatctttgctatgaactattttggtcaaaatgccctgacactggccacttatgctgggcatttgactttagtaaaggaactgttgaggcgaagatcctacaaggatttcaatctgtcctcgatgatcccggccctctgtgtggctacactgcaaaaacactccgctttggtggcctattttactcaattggattcgaggggcgtgcaagaaactcaaacagtgcatggtctgggagttgcagagctgcgaggaatgattaaagctgcaggccgcttagataagcgcaatgtgcgctctcctcccacttttattagcaatcgtctgcgttaa

SEQ ID NO: 19650 - protein, 174 aa, DROSOPHILA
MGEINALSCVGQDDVVSLRIVCTMARDGKQHNLEDVDMYGNTALLKACYLGRFECARTLLEFGANIFAMNYFGQNALTLATYAGHLTLVKELLRRRSYKDFNLSSMIPALCVATLQKHSALVAYFTQLDSRGVQETQTVHGLGVAELRGMIKAAGRLDKRNVRSPPTFISNRLR

SEQ ID NO: 19651 - DNA, 3793 bp, DROSOPHILA
tcccctccacgattagtgtcaacggcatctttgacatcatgtacccatcattttatatgcattttatacactaaataagggaaaactgaggaaaaaggatcggtaactttaattttacacacggagaatattgaactgataaacaagaagaaagcaagcataactacgtttatatacattttcaaaccagaagataacaaatataattaagagcgtcagcatagtttttgtaaacgcagagttaatacatagatttaaattctaaaatcaaatattgcatgaaaaaacgcaaatgaaatctgaaaatcaataaacaagcgtgaaataaaccaattcggtgtatgtgtattttaatggggcgttttaatttaaaaaacttacccatttcgcttgagaaatcgcagatgaagtaactcgatccaattcggtgatgaaaatgtagatgcaccaatgttggaggttaataaccctcgttggaatattttaccatgtttgccacctcattgaatgcgaataaaacatcgaaatttcattactgaatgcatttttatatatcattcacttgtgactatacgaatggtgtgctaaacccaccacagttcgattagctaacattttgattataaaaatggttttacaattcatttgactgcttcaactagacgcagtcagttttcctgtctgcctttgtataaatgaaatattaattaaattttaaaaatcatgtacaacgggcaaagctgccaaacgagcaaggcttcgtttgcggtggctagagagataaacaaattatgatacaactaagcaaacattgcaattagtataagagataaggcagccggcacaaactatgcacttaaactaattaacatgatggaggaggggtgggacgacgctgggagtgctgggggggggaggagttgtggcttattgcagaaaactaaaccctgtttacaaactaataatgcaaatcgaataactctcttctggccattgagcatcagatgccaatgtaggagcacagcacgaacacggcgaaaatcatgacaatcagaaagacgatggcaatccaggcggggattgtacctaaaaagaagttggcagtgagataatttccaattttacaccaattttattgcttacgtctttgggacagactgtggatgcagactttgttgtccaccgaaatggacagaacggctgcctccgtgtcgctggaaatgggcggtccctcctcgttggtaataggcaggaactggaggccagttacgaacatggagtgtgcatggggaatgtggagcacgcgctgcaaaacgtaagcaaagaattggagttaagactattaacgtacactttgattagttgcctctgctcacctgcagactgaatgcaatgtacatggatacgctgcctgagaacatcgtgccgacggccacgaatcgaccatcatcccgcactgccagtgacgagaggctttcgtcaatggccacagcctgacgcagttgcccgctggcacagtcccagtgctgcaggaagccacgctgctttcccaccttgcccagcggattggcaatggtaaagaggcggtagttatccttttgcgcctccacggttccgtagcggcaccgtttgaacaggtacttggccccctcgggcgttttccactgcagcttgtgttgcagctggccgctggccaggtcccacaccaagccctgtgcatccttggagatgctggcaattagcttgctgtcgggactgaagtccaggtcatcgatctccttgctgtgtgccgccagctcggcggccagcgtcatctgggggaacgtccagacgcgcagttttccgtccgtgccgccagtggccatcagacggccattaccgctgatgcgcaccacgcgctgcaggggctcggcgcccttgaggaagtccgtctggatcacatccgccgcctggatgtcgaaatgcagtcgccgaaactgacgcaatatgtcggcggtggaaaggggtggcctgtgcccgttggccactggctccacgcccgagtgtgcgtttcgctggcgcacgttgccgttctcgtgcggccgttcctccggagcaggcttgccgtccccgacgcccacaccgtttccattcccatcctcttcggattgaacgcgcggctggacgtagtacatctgacagtgcgcctcctggccggcgcacagatagcccctccggccgccattgcgcaccgcgaagttcatcaccacattggcgccggtctcatggcgcaaaacctcctccgcgcagaagtggctgccgttgtggtacagctcatagatctcctggaaagatcaatcgtcgattagaaacatcacaagaatgcggcggagcgagctgagttcatacaaagccgttcgccactcccgttttgctggagccaccgcctccggctaccagaatgtggcggctggttagcatgtccacggcgtacagcgggaagttcacgcgggccagcaggccgtcgctgggacggcgggtgtgggccattatcaataatatatcacaatcgaccggacgctgggggcggagggattggggctgagtgattgactcgagtttatcagctctggccgcggggcaggcacatctaattgggtctaccgctggcacactccggctgttaactgactgggaattgtgggtcgattcagtggacgttaatcatgggaactattttcttattgtgttttggactgagaaagttgtcttaaaaatccacgtacactgaatagcggtggcagggcgaggtatcgatacatcgataggcagattggtgattggtgccatagcagtcagctgtcttcagctgatgaacagggctgccagactggtgacgtgagcaaacagctgatgggctgcaatgttaacagctggaaatatcaaaatattcacagctgttctctaatcgataggtaactttaaaaattatcgcaataagcttaatgtttttaagtacataattgttaaccatttttatatacataagaattcaagtatattgcgatatttattttgcaacgcgtatattgcacccagtacgctgcataacgtggcttgtcttctttaccttgtaccttaaggtacaatataccatgtaccctgtttgaaatgttcaatgatccacctcataaccagtacctactggtacctacctttaagaacgagataggcttaattgtacttgtaataaaattttattaaaaagaaagtagacaaatttctcccctgcaacaacttgaaaaaggaattcttttttccaagtgaaataagaaattataatatttcaggattgtcattaatgcggtggagctcagcagtggtcttcctggttctttgttgtgacaaaatgaccttcaatcgctggtgggcggcacaaaggggactccgaagtcatatttatatactcctttacgtgggagttatttatgtatgtacatatatcagacaaaggtgtgaaacgtgttgaacgagttattgttcaaatctgcagcatcttaaattctctattaggtgtttcttattgctattttctgacttttgtcaactctgcgttgataactttatcagatttcaattaaatttctcatcaattttgccatagatcgtataggctgtatttaaatttaaatgggcgttaaagtgaaaactgtctactgtctacgcacctaaactagttttgttataattattttcatagtgcgtgaacaagtttttccggcactttgatcaaatttcacttttatcgaagtca

SEQ ID NO: 19652 - DNA, 1602 bp, DROSOPHILA
atacctcgccctgccaccgctattcagtgtacgtggatttttaagacaactttctcagtccaaaacacaataagaaaatagttcccatgattaacgtccactgaatcgacccacaattcccagtcagttaacagccggagtgtgccagcggtagacccaattagatgtgcctgccccgcggccagagctgataaactcgagtcaatcactcagccccaatccctccgcccccagcgtccggtcgattgtgatatattattgataatggcccacacccgccgtcccagcgacggcctgctggcccgcgtgaacttcccgctgtacgccgtggacatgctaaccagccgccacattctggtagccggaggcggtggctccagcaaaacgggagtggcgaacggctttgagatctatgagctgtaccacaacggcagccacttctgcgcggaggaggttttgcgccatgagaccggcgccaatgtggtgatgaacttcgcggtgcgcaatggcggccggaggggctatctgtgcgccggccaggaggcgcactgtcagatgtactacgtccagccgcgcgttcaatccgaagaggatgggaatggaaacggtgtgggcgtcggggacggcaagcctgctccggaggaacggccgcacgagaacggcaacgtgcgccagcgaaacgcacactcgggcgtggagccagtggccaacgggcacaggccacccctttccaccgccgacatattgcgtcagtttcggcgactgcatttcgacatccaggcggcggatgtgatccagacggacttcctcaagggcgccgagcccctgcagcgcgtggtgcgcatcagcggtaatggccgtctgatggccactggcggcacggacggaaaactgcgcgtctggacgttcccccagatgacgctggccgccgagctggcggcacacagcaaggagatcgatgacctggacttcagtcccgacagcaagctaattgccagcatctccaaggatgcacagggcttggtgtgggacctggccagcggccagctgcaacacaagctgcagtggaaaacgcccgagggggccaagtacctgttcaaacggtgccgctacggaaccgtggaggcgcaaaaggataactaccgcctctttaccattgccaatccgctgggcaaggtgggaaagcagcgtggcttcctgcagcactgggactgtgccagcgggcaactgcgtcaggctgtggccattgacgaaagcctctcgtcactggcagtgcgggatgatggtcgattcgtggccgtcggcacgatgttctcaggcagcgtatccatgtacattgcattcagtctgcagcgcgtgctccacattccccatgcacactccatgttcgtaactggcctccagttcctgcctattaccaacgaggagggaccgcccatttccagcgacacggaggcagccgttctgtccatttcggtggacaacaaagtctgcatccacagtctgtcccaaagacgtacaatccccgcctggattgccatcgtctttctgattgtcatgattttcgccgtgttcgtgctgtgctcctacattggcatctga

SEQ ID NO: 19653 - protein, 445 aa, DROSOPHILA
MAHTRRPSDGLLARVNFPLYAVDMLTSRHILVAGGGGSSKTGVANGFEIYELYHNGSHFCAEEVLRHETGANVVMNFAVRNGGRRGYLCAGQEAHCQMYYVQPRVQSEEDGNGNGVGVGDGKPAPEERPHENGNVRQRNAHSGVEPVANGHRPPLSTADILRQFRRLHFDIQAADVIQTDFLKGAEPLQRVVRISGNGRLMATGGTDGKLRVWTFPQMTLAAELAAHSKEIDDLDFSPDSKLIASISKDAQGLVWDLASGQLQHKLQWKTPEGAKYLFKRCRYGTVEAQKDNYRLFTIANPLGKVGKQRGFLQHWDCASGQLRQAVAIDESLSSLAVRDDGRFVAVGTMFSGSVSMYIAFSLQRVLHIPHAHSMFVTGLQFLPITNEEGPPISSDTEAAVLSISVDNKVCIHSLSQRRTIPAWIAIVFLIVMIFAVFVLCSYIGI

SEQ ID NO: 19654 - DNA, 6692 bp, DROSOPHILA
gcgacgatgatgacatcggcctgacgtggagatgcacggaacacaacaccatatcgatccatgtcgtaacgcggagcagcgatgtgcatcatttcgacggcacagcaggccaaaccgaaagtcagtggccagatcgagcccttgcgaccccagttgagcagatcgtccagtctggccagtgaccactccgcaacggaggactgtttggtgccgaacggagagtagcccttcttgggcagattttgggccacttcggcaactggaagcgtttgttgttggcgcaccagggccaaattcagagcgggcagcgccgaaatcgacgcattcggtgtctgagtcgccttttggagagcccgggacagggtcgatgacatcatcgccgaacgcagcatgttgatcctgctaaagtaaatctgtagttatactaggactgggcatttaaacatttaatacctatttatgtaacttcaacttatttcgatttataggggatgcgtatgatgtgaccgccgccgaactactaactaaaataccaaatgcaccaggaaaatatactataaaatacgaatttactttagatatcctattctcacacaagcacatcacttgcggcagcatgaactttatgcccttttcccacatgaacgcaatggttggctaaaaaaatcaacttgcttgaaggtcatagcttaagctgaccaaaaggcaagtaaaaaagtagttattaatgtttttgtttgctttattttgtaatatgttggtgtaattctattgttacagcggcttgggaaatgttatgcaaacaattgaatggtagtaaagcgacgactcaaaatacgattagcactcttaagaactaaagataaaaaaaaccacatgttgatttaactcgctaatttatatttcagtttgaattgtagattatgcttgctcgcttgattttcccccttttaaaatattactggttggattagggtagctgttctctttttgattccttttagatatcgtcgatgttcacgtcgtcctcgtcatcctcgtcgcctgcaacagcgcgtggaattccgcgttggacgacccgttgaccgccacgttggccggcactggaaacgtagttatcctcctcggattcatcgtcctcctcctcctcactttcggaggactcttcctcggcattcttcagccagagaacgaatggcatagctttctcgtgtatttcggcagcaatatttttcgagacatgtcgtttgctaaccttctgtgcccactccagtatgacggcctcatcgagtatgtccagatcataaaacaatttgaagattccagcaaccttgctcatcaatatacccttatgcagctctacagtttgctccactccaccaattagatagcgctgtgcttttggattattgagggtgaagcgaagaagcaaagggcgattcttctgcacgtccttgatgatgttttcagtgaaaagcagctcggcgagaaccaatggagccttgttaataatatccaagcgttcggcttcaatcaccagctccttgtgagtttgcacatcatccaattgcttcttgtcccgcttgtccttaaccaactcgtagaaaatatcaatgcgctccttttcagttttatcatagtcatccgaaatagtcatacccttagcaccatcagtcagatcttgcaaacgagcacgaatagcctcctaccggggtggagtagtaatatacatatgaatagctctttaagctaattgcgagtatatacggattaaacaacgtaccttcgaaacatcgacactccatccctcatcgtcgtcatccttggctgttttctccggaatagctgcgctaatctcggcctcagtttggctagcctgatttgtgccgttgccgccatctgattcaccgccagagttgttggccaaagagttattggtcatggagccatcggcgttatcgttcttctgcttctgtttcctcgagcgtttgccctcggttagcgatgatccttgggcggccggattcaatgacggggggttcttcacaatgaatgtgttcactttatggttaaccttgagcagaccatggaagccgcatgccttgcaagactgcgaaatggtctggtttttggccgacacagttaaattggtctccggattgtcgcactcggggcataacacaaacttgcgaataaaaccatccaacaaatcctgcaacttgttcacatcatgcgatccattcacaacaaagcgctcattctgaatgaaattaatagtgattaatgggagcatagctcatgggtaacataggatatctatccgtgcacataccttgtgatcgaacagcgtctgggcgcccagctcgcaaccaaagtacttggttggataggtggccgggcgtccgatggccctagccacttccgccatgttgaccagcacggtcttaatgccgtttcctttgccctcgacctttgcctgcagacgtggcatcttgtagcgatagaagatgtccgtcacactgcggtttacgtttacggtggccatcttgataggttttcggctccacagataatgctgataatgggtattactgttgttcgggtaatgttgctactgttagaggtggccagtggtatctattggttattggtggatgggaagtaattggcttcaggttttctgctagtttgtgattgatccaactttcgtttccgttcattaaatgttcttttattttgagtagttgccgctgctgcttacttaacaaatgtatccagaataagcaggaattggtgtccttccggaacggcgaattaattgtgctctaatcaaacaacgggtgtactgaatatatttgaagaatcggccagaattgcttgagagtaagttgtttttttcttcttttttttttgcaaggttatggctttgcttttattttgctgaagattttgtttattttcgccgtggtaggtattcagctattctatttttttccgaattcatatgaataattatatatacatatatatatacatatatatctatatatatatttgtatatttatatatatatacatatatatatttatttatattgtaaatttaccagtttaagtctttaaaaaatggagaaggagcaggctcatgtgtacctgaatggctgtaacttccgatgtctgttactcgaagtcctgcgaaggcaaatatgaaatagatttggttaatcgagtcgaatatgcaatgcttattacttaattatgctaagttctctttaaaaaaaaacccaccgaagtgctgtttctacagcgtataatttaatgcaatttagcaccactttccctttgcttgcaaatataatcaattcttatcgggtattacagtattatgcatttggagccacatatgtgagccaaggtaaaaaaggcccctcgtattaaacagtagcgaatttaatttgaataccagatttttttatcgtagaaaccccgagtgtgtgcattgcaacaaaacgtcgtacgacttgaatcagcaatacttaatggtctggtcatcagtgatttgtgcttaccggtgatttttggttcgcccttttgaattcatgcacagctcgaaccctttactccgttttttctcaatgagaagtgtggttttttttgctggtgtttctgaaaaatacaaatataaaacgaaatgtaattgcatttaacgcacacgttggaagccaataaaactgcattcgaattggaatttgtacgggaccttattgtatatttgatgttgcttgaaacgtcaaagcaaaagtaattggaatcatttaaaaacataacactgatttgcactatttcgtgttgctgagagccaaaaaaaaacttatggaactgctgggtcttaaagcagggtcaattttaaaagaaaaacattcagcaaatgggttaagaggtcgagcgagtataaactattttattgttttgttgtatcttagatattaacttttgcaaccggaaaatgacactgagaatttcgttaggacccccccttgaatatattcgtgtgttttcccaactaaattgacgaatgtgacaaacatttcagtacgattgtgattcttgttcccaacagccaattattagctaactatgagtaattcttttatgttactcaaggtctgcccttttattatgttttatacgagattcttgggtaatattaataataataatattatttattggaatataacgaaattcaacgaataaagcttgtcaaagcacttttcaagtgaatgggtgtgttactaaattataaaacgaatcgcagacattatttattgcccgattatcggttttctatagaacagatggctttagaaatatcacgaaatgaagtgaagtctgatctgaaactatgcatttatttatacgaagtctaaatcttaataggtttatatcttatataaacatatgccataattcagaagataaagcataataagccacacaaataaaataagagaatgcagttgaattcgctggataacttctttttgccttttacttgtatcgcaatagaagtttctggaattcctttttcagaaaccattgtatccttgcttttttttcggttgtgggagaaggaaatgtgttggctgcttatttttaagcttatttttaatgttaaagtaaccttggatggatccggatcttggttagtagtaagacattatacagtggtcgggataaatatgtgtcttagatacaaatcgattcaatgggttgttgatgattaactattacttaccaccggtatctttcaaaagtcatataagattttgtttcccctcctttggggtgcgcaatgccagttcgcaaattagacaaagatatcgtactctcgggtattctttgtgaagtcaatcgcaaattgacttggaaaatatatatggataaatcaaaatcaaacaaatcgcactgccacgggaaatcgataactttttttttttttgatagctctgattccgtgctaatattgaaaaatattagtaacgcttttaacgcgcttatgtatcgcaaaaattgaaatttttggtctctcaactattctgcaaagggaaagaaaataaaattaggaatgcgcatgaacgaacatatgtataccactccgtactaagtatttcttacattactttagtttagctcaaatttacttataatttcgaaggaaaaaggttaatttaacattcaagtatatatatattttacatatatatcttttcctattacttatgtattcagtacttttgtataatggccataaaaaacactgttgaagcgtgatttttgtgtaagcacgaagtaaagtagctttatgcagatatacactagacccaacgttacaaaaattgtggaaaactgaattatttagtatagatatatataaatgtacattttcatgcacgtatgcatttacatatggatgaaagccacgccatttaaacttttgaggttgtgttcgttttggtcacaatcacttttcaataccttttccacaagttttctataaagcgtttctgatcacaatgaaagtaaattaataattttactgaattaaccgtttaagaaaagattttctccgaagtccacgaacatacgactaaacgtcacagcacaatatgaccataacgactttagtgggctgcagcctatcactatcgattggccgaatatgatgtgaatgaattttagccttttcacactttcacttttatataatttatatggtatttattaaaatgaagatatgtaataatacgcttaaaaacgaaagaccatttttaaaaatgaagttgactaaaatagaaacaaatatatgtgttatataattaaacgtagttccaatcagccttttaaaatatatgttataagagtggatcatctgtatttcttctatattccaataccaatataccacattttttgtagaggatatcttatttattttattgaaaaaatgtttaaaatattatttcaagagccacattttaaatagtatcgatacccaactcgcagtgagtaagcactagaatgtaactacgggtaagatatcgattgtccacgttttcactagcaaatataaattgcattttatggaatacttatcgatattcttacagtactggaaaactttttcatatcgatttatttttctgcgtatacagaacgtactttcgtttcattgttgtccaaaaaagataataatattatatacttgcggttatttacaactgcaagtaatgtgtcactaatttttagtgaaaataacacaaaatacgacttgtacggcaaataagtatacgaggcaatcacgataaataaaaaaccgtgagtatggaatttcaagtggacgcttctcaatacttacatgcacatatatcgatgtgtggatatgtacatacaccttgttataaacagtttaaatcttttctgacgtaataaaatctcaagaatgtacatgtaaaaccaacaaaatgttttcaaactgcattcaaattaatgcttaaccataaccttgtgtgtatgtaaatataaacttggcaggttgatttttttttaccattctgctggcactaaacatacgtacaagtgtatgtatgtgatgcactcggcgtcatttatctgtacatgtgtaaaatgta

SEQ ID NO: 19655 - DNA, 2405 bp, DROSOPHILA
cccactaaagtcgttatggtcatattgtgctgtgacgtttagtcgtatgttcgtggacttcggagaaaatcttttcttaaacggttaattcagtaaaattattaatttactttcattgtgatcagaaacgctttatagaaaacttgtggaaaagaatagttgagagaccaaaaatttcaatttttgcgatacataagcgcgttaaaagcgttactaatatttttcaatattagcacggaatcagagctatcaaaaaaaaaaaaagttatcgatttcccgtggcagtgcgatttgtttgattttgatttatccatatatattttccaagtcaatttgcgattgacttcacaaagaatacccgagagtacgatatctttgtctaatttgcgaactggcattgcgcaccccaaaggaggggaaacaaaatcttatatgacttttgaaagataccggtgaaacaccagcaaaaaaaaccacacttctcattgagaaaaaacggagtaaagggttcgagctgtgcatgaattcaaaagggcgaaccaaaaatcaccggacttcgagtaacagacatcggaagttacagccattcaggtacacatgagcctgctccttctccattttttaaagacttaaactggtaaatttacaatataaataaatatatatatgtatatatatataaatatacaaatatatatatagatatatatgtatatatatatttgattagagcacaattaattcgccgttccggaaggacaccaattcctgcttattctggatacatttgttaagtaagcagcagcggcaactactcaaaataaaagaacatttaatgaacggaaacgaaagttggatcaatcacaaactagcagaaaacctgaagccaattacttcccatccaccaataaccaatagataccactggccacctctaacagtagcaacattacccgaacaacagtaatacccattatcagcattatctgtggagccgaaaacctatcaagatggccaccgtaaacgtaaaccgcagtgtgacggacatcttctatcgctacaagatgccacgtctgcaggcaaaggtcgagggcaaaggaaacggcattaagaccgtgctggtcaacatggcggaagtggctagggccatcggacgcccggccacctatccaaccaagtactttggttgcgagctgggcgcccagacgctgttcgatcacaagaatgagcgctttgttgtgaatggatcgcatgatgtgaacaagttgcaggatttgttggatggttttattcgcaagtttgtgttatgccccgagtgcgacaatccggagaccaatttaactgtgtcggccaaaaaccagaccatttcgcagtcttgcaaggcatgcggcttccatggtctgctcaaggttaaccataaagtgaacacattcattgtgaagaaccccccgtcattgaatccggccgcccaaggatcatcgctaaccgagggcaaacgctcgaggaaacagaagcagaagaacgataacgccgatggctccatgaccaataactctttggccaacaactctggcggtgaatcagatggcggcaacggcacaaatcaggctagccaaactgaggccgagattagcgcagctattccggagaaaacagccaaggatgacgacgatgagggatggagtgtcgatgtttcgaaggaggctattcgtgctcgtttgcaagatctgactgatggtgctaagggtatgactatttcggatgactatgataaaactgaaaaggagcgcattgatattttctacgagttggttaaggacaagcgggacaagaagcaattggatgatgtgcaaactcacaaggagctggtgattgaagccgaacgcttggatattattaacaaggctccattggttctcgccgagctgcttttcactgaaaacatcatcaaggacgtgcagaagaatcgccctttgcttcttcgcttcaccctcaataatccaaaagcacagcgctatctaattggtggagtggagcaaactgtagagctgcataagggtatattgatgagcaaggttgctggaatcttcaaattgttttatgatctggacatactcgatgaggccgtcatactggagtgggcacagaaggttagcaaacgacatgtctcgaaaaatattgctgccgaaatacacgagaaagctatgccattcgttctctggctgaagaatgccgaggaagagtcctccgaaagtgaggaggaggaggacgatgaatccgaggaggataactacgtttccagtgccggccaacgtggcggtcaacgggtcgtccaacgcggaattccacgcgctgttgcaggcgacgaggatgacgaggacgacgtgaacatcgacgatatctaa

SEQ ID NO: 19656 - protein, 464 aa, DROSOPHILA
MATVNVNRSVTDIFYRYKMPRLQAKVEGKGNGIKTVLVNMAEVARAIGRPATYPTKYFGCELGAQTLFDHKNERFVVNGSHDVNKLQDLLDGFIRKFVLCPECDNPETNLTVSAKNQTISQSCKACGFHGLLKVNHKVNTFIVKNPPSLNPAAQGSSLTEGKRSRKQKQKNDNADGSMTNNSLANNSGGESDGGNGTNQASQTEAEISAAIPEKTAKDDDDEGWSVDVSKEAIRARLQDLTDGAKGMTISDDYDKTEKERIDIFYELVKDKRDKKQLDDVQTHKELVIEAERLDIINKAPLVLAELLFTENIIKDVQKNRPLLLRFTLNNPKAQRYLIGGVEQTVELHKGILMSKVAGIFKLFYDLDILDEAVILEWAQKVSKRHVSKNIAAEIHEKAMPFVLWLKNAEEESSESEEEEDDESEEDNYVSSAGQRGGQRVVQRGIPRAVAGDEDDEDDVNIDDI

SEQ ID NO: 19657 - DNA, 4435 bp, DROSOPHILA
ggttggaccgcgggatggtcttcaaaacgagcccaaactcctgccggcagccaccaagatcgagctgatcaaccaattgtccgaaacaggactgcgaaccatagaagccaccagctttgtgagcgccaaatgggtgccacagatgggcgacaatgccgaagtgctgaaaggaatccgcaaagtgactggtataagctatccagtcctcacgcctaatctgaagggattcgagagtgctctggaggcgggagccgaggaggtggcagtctttggagccgcatctgatgcgttttcgctgaagaacgttaattgcacggcagctgaggccatcgaacgatttaaacctgtgctgaaagcagcccaaaagcatggtgtgcgcgtccggggctacgtttccaccgtggttggctgcccgtacgagggtgctgttgcgccgagtgctgtcgtcaaagtggtggaagccctgtaccaaatgggctgctatgagatctcattgggcgacaccattggtgtgggcactccaggcacaatgcgccgaatgctggatgaggtgaccaaggtcgtcccggctaaagatctggccgtgcactgccacgacacttatggtcaggctctgagcaacatactggtctcactggactatggcattcgggtggtggactcttccgtttctggcttgggcggatgtccttacgccaagggggcgtcaggcaacgcagccaccgaggatgtggtctacttactgcacggcatgggcctcgatactggcgtcaacctagacaaactgatccaagtggggcggtacatctgcaccgaactgggcagaacctcagagtccaaggttaatcgagcgtggaagggaccgcaggcgcgagttaagtgatgatgcaagcattgatactatcaaacgaaaacgaaggcatttactagcactagttacacaatacatttattatcgttgcaatatttagtcaaggagcgtgaagtacttttatgggccttaaaacttttgggcatctcttattgtgtataaggacacgtcgcctgaggcgagcgacagatcagccaggctgtgattggcgcgtcgtgggatatgcgaagacgacggattgcggactgcctcgccgggcattttcattttgccatcgtggcgcataacagtaggctccacggcggagttgaggtatttttgaatttgaggtaccttcggcatgggcaaaggagttcgttcatcaaccacctgttcaatggaaggtattagtttacgttcactcatcatggcttatatataaatttaaacttacatgcttgatttcggaagatatgtaagcctttttgggaagcagatcagcggctgaatcgattccattgataattaaagattccgcttcactggacttgggtgtttcgtcctttgttgcgaaaagtgctttaggatgacacaagcgagactcctgctccaactcactgatggccagtgtagatagcatatcagaactcgttggacggaatgtactcattagcggagcagtaccagacttctgggtgtaggtgcgtatgggactgactatgttggcgtatggctgctttatctgattttggcgacgctgaggaataccagaggctgcactgaaaaatttctttttggtccactccatggtgaggccgacattgagcggctttctacccgtgctagatgaacctacaactgtttgtggctgattagatgaccgcagcggaattgatggctgcaaaaaggctacagccggtgattttggttccggcttcggtgaaacaacgaacgtgctttgtttggtcttgggcagcacagggcaatctgccttgactgcggcgactgaaggagccccacctgccatgtactccatacccttttgcatcatgtactccatttcttccatggtatcattgaaatgcaacgaattttccttattttcaacgctcttctccgctggtttctgctcagtgtgatcttttccgtggactgaggacacacgggacgtgtcttcttgttttacttctggaactagctgcacttcttcatcgtcagaagaggatagctcgattattgtatcctctatatcgtcctcttcctcctcgacctcatccttcggaagtgaggccagctctctaagactgccatgaagatcgcttaagagctccagctcctctcccttggacattcctggtggcttggccttggcaattgcggcgtaaaacaattcgtcgacgtttaggagcgttccactgagggaagtatccgtggctgtttcgtaagaactagatgcatttgtctttagggtgcgagcgctttggaagcttgtgtgtgaagacacatcagacgactccagttcgctgtcttcgatgatggttgaggggcgaagcagccccaccattttgacaggcgaaaccttggtcaatgctttaggagtcagcccagagtcggatgaggtctcgtccattccggccagggtgttgtcccaaaagcgcgacggcgcctcaatgtcctccaggtgagtgcactccgcccccttgacgggactttcgttctccaatagatcgtcttctgtacccactgcctctagcatgcgacgcagtgcatcgatctctttctgatcgtcggtgctatgatccctagccctggccatcacctgactccggtcctcgctgtgcaggtactggaaaagagtgctatccggatcggaaccggttttgtcgcacatgcgctcaaaggcactgaagctatcatcgccatcgtccaagtgctccaagtcacctgcctcgtacatagtatcctcgccgagattaacagtcctttgactggcagaattaacggccagaactttcttggcccgcgcctccaagggtctcctcaaatcctcgtcgatctccaaactatagcgcatatccttcgtttcgtccattttcacgggctttttcggcaagctgaaaaaggaaaactgttattagttttctcaactaaattgtatgtgtgtctaaactgtccaaactatttatgcgtactgtttctctaacaattttgacatgcaggtggcttgtttgaaagtaaatgactacaaattcatcgaacactagtgcaacactatccaaggatgggtttcaatgtgtatttaccgctcggtcattagaaactgacggagtttctgacgccattcctcagtgttttggaatttcttgaggccagacatcgtgagtgtgcgagtgtgcgtgtgtcctgggtgcaaaactccagtcgacgggataaacacgtataattgcgcgttgactatagttcagaggatttagagttcgctccagtcgatcacctaccttctggcaatagtattcacgcagatcttccttaatcttcaaggcgcacacgcaaatatttcatggatttcttcacagcacgctcatttgccaacgatcgacgcgcctttgcagtcgtttatttcaaatgccacgacagagtgcccgtattgcgcttatatttttgaatggggtattccaatggacactacacatatacatcatcggagttatatcacttataacaaataataatataaaattaagacaaatatgtctaccattaaaagcaattgtactgctccgtaacttttaacatatattatttattattattattttgtgtatatatacagacatattgagctagctagtgttcttaacaatatataatatttttataagaacgttacaacttcttgtatctctgtaaatagaacaaaatcgcgagccccctattttcggtatattttggtgatatcacggtcacaccggcgactatgcaactagaaatgccgggtcagtgaaagataacaaacaaactgcgttcggcgaaagtacttaagttaagttaaaaatttgaagtaggcgagagcacataatgaacgcactccgtcacacgatatccctggtatcgctgggcacctttcaactggtgcgccggaccagggggccgcacgccagaggctttctcctcggcacgggattgggcctggccagcttttcggcggtcacgtacgcacattccgcggaggctgtcgacccaaaggtcaacggggtgcagatgaacacctcgcggttcatggccgagcccatcaccgactccaaggcactgctgggggacaaggagaacatgcgtcatcgcatggagatcctgatcatggagatccaggcggagttttgccgcgccctggaggcggaggagaactgtggccagaagttcaaggtggaccggtgggagcggcctgagggcggaggcggcatcacttgcgtcctgcaggatggcgatgtgttcgagaaggcaggcgtcaatatatccgtggtcaccggttcgttgcccccggctgcagtacaacagatgcgggctcgcggcaagaatctgaaggag

SEQ ID NO: 19658 - DNA, 1987 bp, DROSOPHILA
atgagcgtgctgtgaagaaatccatgaaatatttgcgtgtgcgccttgaagattaaggaagatctgcgtgaatactattgccagaagcttgccgaaaaagcccgtgaaaatggacgaaacgaaggatatgcgctatagtttggagatcgacgaggatttgaggagacccttggaggcgcgggccaagaaagttctggccgttaattctgccagtcaaaggactgttaatctcggcgaggatactatgtacgaggcaggtgacttggagcacttggacgatggcgatgatagcttcagtgcctttgagcgcatgtgcgacaaaaccggttccgatccggatagcactcttttccagtacctgcacagcgaggaccggagtcaggtgatggccagggctagggatcatagcaccgacgatcagaaagagatcgatgcactgcgtcgcatgctagaggcagtgggtacagaagacgatctattggagaacgaaagtcccgtcaagggggcggagtgcactcacctggaggacattgaggcgccgtcgcgcttttgggacaacaccctggccggaatggacgagacctcatccgactctgggctgactcctaaagcattgaccaaggtttcgcctgtcaaaatggtggggctgcttcgcccctcaaccatcatcgaagacagcgaactggagtcgtctgatgtgtcttcacacacaagcttccaaagcgctcgcaccctaaagacaaatgcatctagttcttacgaaacagccacggatacttccctcagtggaacgctcctaaacgtcgacgaattgttttacgccgcaattgccaaggccaagccaccaggaatgtccaagggagaggagctggagctcttaagcgatcttcatggcagtcttagagagctggcctcacttccgaaggatgaggtcgaggaggaagaggacgatatagaggatacaataatcgagctatcctcttctgacgatgaagaagtgcagctagttccagaagtaaaacaagaagacacgtcccgtgtgtcctcagtccacggaaaagatcacactgagcagaaaccagcggagaagagcgttgaaaataaggaaaattcgttgcatttcaatgataccatggaagaaatggagtacatgatgcaaaagggtatggagtacatggcaggtggggctccttcagtcgccgcagtcaaggcagattgccctgtgctgcccaagaccaaacaaagcacgttcgttgtttcaccgaagccggaaccaaaatcaccggctgtagcctttttgcagccatcaattccgctgcggtcatctaatcagccacaaacagttgtaggttcatctagcacgggtagaaagccgctcaatgtcggcctcaccatggagtggaccaaaaagaaatttttcagtgcagcctctggtattcctcagcgtcgccaaaatcagataaagcagccatacgccaacatagtcagtcccatacgcacctacacccagaagtctggtactgctccgctaatgagtacattccgtccaacgagttctgatatgctatctacactggccatcagtgagttggagcaggagtctcgcttgtgtcatcctaaagcacttttcgcaacaaaggacgaaacacccaagtccagtgaagcggaatctttaattatcaatggaatcgattcagccgctgatctgcttcccaaaaaggcttacatatcttccgaaatcaagcatgtggttgatgaacgaactcctttgcccatgccgaaggtacctcaaattcaaaaatacctcaactccgccgtggagcctactgttatgcgccacgatggcaaaatgaaaatgcccggcgaggcagtccgcaatccgtcgtcttcgcatatcccacgacgcgccaatcacagcctggctgatctgtcgctcgcctcaggcgacgtgtccttatacacaataagagatgcccaaaagttttaa

SEQ ID NO: 19659 - protein, 625 aa, DROSOPHILA
MDETKDMRYSLEIDEDLRRPLEARAKKVLAVNSASQRTVNLGEDTMYEAGDLEHLDDGDDSFSAFERMCDKTGSDPDSTLFQYLHSEDRSQVMARARDHSTDDQKEIDALRRMLEAVGTEDDLLENESPVKGAECTHLEDIEAPSRFWDNTLAGMDETSSDSGLTPKALTKVSPVKMVGLLRPSTIIEDSELESSDVSSHTSFQSARTLKTNASSSYETATDTSLSGTLLNVDELFYAAIAKAKPPGMSKGEELELLSDLHGSLRELASLPKDEVEEEEDDIEDTIIELSSSDDEEVQLVPEVKQEDTSRVSSVHGKDHTEQKPAEKSVENKENSLHFNDTMEEMEYMMQKGMEYMAGGAPSVAAVKADCPVLPKTKQSTFVVSPKPEPKSPAVAFLQPSIPLRSSNQPQTVVGSSSTGRKPLNVGLTMEWTKKKFFSAASGIPQRRQNQIKQPYANIVSPIRTYTQKSGTAPLMSTFRPTSSDMLSTLAISELEQESRLCHPKALFATKDETPKSSEAESLIINGIDSAADLLPKKAYISSEIKHVVDERTPLPMPKVPQIQKYLNSAVEPTVMRHDGKMKMPGEAVRNPSSSHIPRRANHSLADLSLASGDVSLYTIRDAQKF

SEQ ID NO: 19660 - DNA, 3781 bp, DROSOPHILA
gaacttttgttcaatgaaaatgcttaaagtgccatttagatatgctctgtgtgcacatttaaaaaattaaacttcatattttatgtttctttatattttatattttattccccacatttcgtaatacgttttatcgtactgcatccctagagcaccgttatatgaaagcttttcagaatgggtgaaataaatggtaaattatattagctatgcgaatttccaatattgataaaaatgcattgcatttaagcactcagctgcgttggacaggacgatgtcgtttccctgcgcatcgtgtgcaccatggctcgcgacggcaagcagcacaacctcgaggatgtggacatgtacgggaataccgccctattgaaggcctgctatttgggtcgatttgagtgcgctcgtacgctgctggaattcggtgcaaatatctttgctatgaactattttggtcaaaatgccctgacactggccacttatgctgggcatttgactttagtaaaggaactgttgaggcgaagatcctacaaggatttcaatctgtcctcgatgatcccggccctctgtgtggctacactgcaaaaacactccgctttggtggcctattttactcaattggattcgaggggcgtgcaagaaactcaaacagtgcatggttagtaaaaatcaagtgtatttatatagtaacattaaagtaaatttatttcaggtctgggagttgcagagctgcgaggaatgattaaagctgcaggccgcttagataagcgcaatgtgcgctctcctcccacttttattagcaatcgtctgcgttaatgtattgtcattttgtaataatttattaattttaatgtttgaaataaatatactctgtaaaaagtgtgaacataatatgttaatcaaaccagttggcaggccgctcgctggctgctatcgatagattcagtcgatatcgcccgtggcttttcacatccctatcccgctcatttagcccgcctgaaagtaaaaaaaaaaaacagcccacgttaatcattcatcccaaagtcacagccgcggtaacattactgctgttaaattcttaagcccgtcatcagtatttaaataataaaacacattcaatatgttcgaggcacgcctgggtcaagccaccatcctgaagaagatcttggatgccatcaaggatctgctcaatgaggcaaccttcgattgcagcgactccggcattcaggtaaaaattgcacaaaaaagattttaaatgcatatccctaacaccttgttcaacttacagctacaggccatggacaactcccatgtgtcgcttgtctcgctgaccctgcgttccgatggcttcgacaagtttcgctgcgaccgcaatctctccatgggcatgaatctgggcagcatggccaagattctgaaatgcgccaacaacgaggacaatgtgacgatgaaggcgcaggataacgccgacactgtcaccatcatgttcgaatcggctaaccaggagaaggtatcggactacgagatgaaactgatgaacctcgaccaggagcacctgggcataccggagacagacttctcgtgcgtggtccgcatgccggccatggagttcgctcgcatctgccgcgatctggcgcagttcagcgaatccgttgtgatctgctgcaccaaggagggcgtcaagttctcggccagcggcgatgtgggcaccgccaacattaagctagcccaaaccggctctgtcgacaaggaggaggaggcggtgatcatcgagatgcaggagccggtgacgctgacatttgcctgtcgctacctgaacgccttcacaaaggcgacgccattgtccacccaagtgcagctgtcgatgtgcgcagatgttccgctggtagtcgagtatgcgatcaaggatctgggtcacattcgctactacctggcacccaagatcgaggacaacgagacataagtcagctgtgttcctcatatttatgtccccgcatcgtcaccactcatcttcccacgttcacttcattcctaacttttaagtaaatccgcattttttgatcaataaaagctatactgtgtaatgttaactggctgagttgtacaattgattttagggcgtaataaccatttattcgcattccatatataacactgggtatcgtttaaggagagagagattgcaaacatatacatattaagagtagtggtttatcaaacaccttggcgtgggatagacaaaaaaccttggcatatctccgacattgaagtttgttagcctccgcagctgcagaaaatctggacataccattggggagttctaaatcaagggtaataatgggcgattattctattcactgtgtataagtactcgttccgtatgaggcacatagtcgggagttttgcaacaaagagctttaagcgagtgtgtgcctgcattcaagagcattaatcgtatgtaaatacatgtaataaataatgcgtgtttacacgcttccaatacttgcatacttggcttgcttatgctagaagctacatacatacgtatcctatacttagtttgtgagtatataaaacatagaaagctgtgtcatataaaattgtataaaaaaaacctttgagattacatatacgtagtaataaaaagcaagaaagtgcgtataacaatgaacaattcaaattgttcctgcgcataacaaaattcgatttacacgcctatgtgagtggagaaatggccaatgggggtataaatgcaggtgacaaaattttacagtgattgtgaaatcccattgccacttacaatctgccattggttaatattgttcattgtcggggtctcagttctccagtccaataggcatatagaccgatggaaattcatcctatgaagcggctagacttgcactgggactggaggactcctcctcgtccatcgagttggctttgtcaatgttcttggtcttcgaatcggtttgaagcaacgtctgtagagatttgatgcacttctttgagccctccatggcttcgttggataactgaaagttaaaacaatgttattatttttcctaagcttctgttgccagcgcatttcataccattgtgaaatttaggaatccgtgcggcaacccctcaagtatttccaagtcaacttgtcgcccaagccgcttcagtttcttggcaaacataacgcaatcatccagacaggggtccatgttaagtgtctgtacggaaaataaataaaaatatttaataccaatacttctttaagcttcataaacttacaagtattttggtctccggcagttgggaaagccactcatcactggcccagtacggcgacaggaatggatccttaggcacatcgaatgcaaactcctcgctgggactccgtgctatcagtgcgtccatgttgcgcacatcctgttgagccatcacgttgcttccgtgaatctcgtaggactgcgtgcagcgcgtcaaggtgttggttatgttgttgacggcttcctgcaggcggccttgcagcgtatctattgcaacaagatcccgaccagtctccactagaatatcatcatcggaactgatcttcgcatgtccatttgcctgcgcttgcaccgcttcgggagctgtctcttcggttacctccattgtggccgtgtcaatgagatacttgtccagaaaattgtcaatataggctgcagaggcggtatccttaggtgggtcggctgatatttcgattgggtagtgcacaatgggctgtgaatcatcctcgaacgagacgcacgag

SEQ ID NO: 19661 - DNA, 1721 bp, DROSOPHILA
taaaaaaaaaaaacagcccacgttaatcattcatcccaaagtcacagccgcggtaacattactgctgttaaattcttaagcccgtcatcagtatttaaataataaaacacattcaatatgttcgaggcacgcctgggtcaagccaccatcctgaagaagatcttggatgccatcaaggatctgctcaatgaggcaaccttcgattgcagcgactccggcattcagctacaggccatggacaactcccatgtgtcgcttgtctcgctgaccctgcgttccgatggcttcgacaagtttcgctgcgaccgcaatctctccatgggcatgaatctgggcagcatggccaagattctgaaatgcgccaacaacgaggacaatgtgacgatgaaggcgcaggataacgccgacactgtcaccatcatgttcgaatcggctaaccaggagaaggtatcggactacgagatgaaactgatgaacctcgaccaggagcacctgggcataccggagacagacttctcgtgcgtggtccgcatgccggccatggagttcgctcgcatctgccgcgatctggcgcagttcagcgaatccgttgtgatctgctgcaccaaggagggcgtcaagttctcggccagcggcgatgtgggcaccgccaacattaagctagcccaaaccggctctgtcgacaaggaggaggaggcggtgatcatcgagatgcaggagccggtgacgctgacatttgcctgtcgctacctgaacgccttcacaaaggcgacgccattgtccacccaagtgcagctgtcgatgtgcgcagatgttccgctggtagtcgagtatgcgatcaaggatctgggtcacattcgctactacctggcacccaagatcgaggacaacgagacataagtcagctgtgttcctcatatttatgtccccgcatcgtcaccactcatcttcccacgttcacttcattcctaacttttaagtaaatccgcattttttgatcaataaaagctatactgtgtaatgttaactggctgagttgtacaattgattttagggcgtaataaccatttattcgcattccatatataacactgggtatcgtttaaggagagagagattgcaaacatatacatattaagagtagtggtttatcaaacaccttggcgtgggatagacaaaaaaccttggcatatctccgacattgaagtttgttagcctccgcagctgcagaaaatctggacataccattggggagttctaaatcaagggtaataatgggcgattattctattcactgtgtataagtactcgttccgtatgaggcacatagtcgggagttttgcaacaaagagctttaagcgagtgtgtgcctgcattcaagagcattaatcgtatgtaaatacatgtaataaataatgcgtgtttacacgcttccaatacttgcatacttggcttgcttatgctagaagctacatacatacgtatcctatacttagtttgtgagtatataaaacatagaaagctgtgtcatataaaattgtataaaaaaaacctttgagattacatatacgtagtaataaaaagcaagaaagtgcgtataacaatgaacaattcaaattgttcctgcgcataacaaaattcgatttacacgcctatgtgagtggagaaatggccaatgggggtataaatgcaggtgacaaaattttacagtgattgtgaaa

SEQ ID NO: 19662 - protein, 260 aa, DROSOPHILA
MFEARLGQATILKKILDAIKDLLNEATFDCSDSGIQLQAMDNSHVSLVSLTLRSDGFDKFRCDRNLSMGMNLGSMAKILKCANNEDNVTMKAQDNADTVTIMFESANQEKVSDYEMKLMNLDQEHLGIPETDFSCVVRMPAMEFARICRDLAQFSESVVICCTKEGVKFSASGDVGTANIKLAQTGSVDKEEEAVIIEMQEPVTLTFACRYLNAFTKATPLSTQVQLSMCADVPLVVEYAIKDLGHIRYYLAPKIEDNET

SEQ ID NO: 19663 - DNA, 3663 bp, DROSOPHILA
ggggtcctgacaggtgtcgccgactgagtggctgtctgacagactcgcagaagtgggcgtggctcgtcggcgtgggcggggtggtgaaaaatggtggcctattattctttgtattgttttatgtggcatttatacgcgtatttttgtcgtcttgtatttggaagggcgagtacgcaagaacggcgaaccccgcgagtggaaaataacaaaggcaatagaccagccgcccaggctggagggcaacggcttctccgccacacatcgccatccaatcagtagataaataacacataaaatgaggtgcttaatcgggtttgaagtgatgaaagtgaaactgaaccgtccgtccacattcgtccttgtcgccggcggcgatggctttgtcaccgtcgtaaatctagagtatcactggtgtttgaatatcatttgccaacgccgaaattcacagagtggcgttcctttgagcccggcggcataattccaccttaaatagcacgcgtactaaagtaatttatcagcattgctggcataaattaggttttccaaaatagttgattagcaaatcaaaataagacatctaaaatgtgttcgaatatggagtacattatttgaaatgaccgcacataatctacctatcgatttccgccggtattttatgtaaacgtgctatcacttatcgataagtaatcgggtataatataagagcaagacctatataagtcactatcaagtgcttgagaataacttacaatttagcacacctctaagcatacatttgaaagcactcttaattcgcttaaaaaattgcattaatgtaattacgatacgtaatttataaaaaccgtttttgaaaacgagcacttgtcgcgttgccaaccattgccaaaccgctaccaagaaaaaatgttcacactaacagaaaacatcgatagcgatttgtgtataaccagcaaaacgggaaacagtcacactcgacacatcgaaggtatttttgaacagccagaaacaatcacactcttgtttgttaataatactagcggactcgcggccccaagatagaaaacggttcgatcgcgcgaccatcgaccagccaatttttttcgctgcaaatccgacgccgcccgaaaaagtgaaagtatttgcatgtgagaggtggaaaagagtcgcggagtgggtcagcgagcaagaagaagagccagcggtgctcgaaaagaggggtgggggcagacacaaaaacgagaaaccgtgaggcgaaaatcggaaaagtgcaataacgaggccgcgaaatctctgctaaaaggtcaatttccactcgcgatagttttagccattagttaagtagtacagtacgtcccgcgtccgtgcaattcatacgttaataccaatttatatgtgaccgaaatctgagagtgtttagtgtgcgcgagagagcgagacagcgagagcaagaacagcatgggtacaacaaaggagcgaagagagcaaagcgagggcgacgccgccaccacccacttaacaacaacagcaacagcaacaacaggagcaatagtagcagcaggagttactactacgctgccagctacaaaaacaacaaccacagcggcagacacgagcacgacgaatgccgccaaaaagattcgccgcaccttctccatgccacgcaatcccttccgctggacgcgtaagttcaaaacggcagtggccgttacgtcgtccgcgggagcggaaaacgataacgaaagcggcaagaataacggggccagggagcggcgtggcagccacacggcgatctcgtcctgcgtgggaggtgggcgtggcaggagcgggagcattgtgtcgctcagcagctacgaggccccattcatttcgtccaccaacaacaacacaaccaccgccagcaatggaaacaacaacaacagtagcagtagcaacatcaacagcaagcggacacgtgctctgcgccgttcgtccttcaggaagtttctcaaccggatcgcccagcacctgagctcaacggttaatgtcgtggtaagcgcggaaaagtgtggaaagctatatatatcaaatagcaaatgtttcacaatgtatcttacgatacataatagatacattctattactattactcatcaaaacatatcatggtgcccttggtctcttattgtgagtaattgaacggttttcttatttatacggcacaataatttataaatctagggtaactaaggaacagtgggctaatcactgcagttttttctatctggctatttacctctctggatggttacttcctttaactaaggcattacttagttaattacattcaaatgaaaatatctaatacgaactgtttagctgcgattaatgagggcgcataaacgaaactcatatatgtatgtagttccccctagtatacctttccttcttcgctttgtttgcgcgctgcttagagcgcatcttctagtttctaaaaaaccccccttccccaccccctcattccgcacttagtagtgccacaatgccccttatcaggagtccagccgtactttcataaaaggcatcttcgcttagtgcgttatcggctgctttgttttgctcccgctgctctttgtctacggcggacgcatagcatcttcatctgcatctggatgcgagtggctctgatttggcaccgttctggtattctggtattctggtgctggttctaggtcttttgtgccgcaaagagtcgcctcccaccgggtcaagaatgggcacgaatcgccccttgcaacgtttctgtttcgtatcgcttcgtttgcccagctttttgttttgctacccgtgctgagtcacaatttgcgtgaccaatgataaggaagtcgagccgtgttgtgtatatcagtccaaaatgcggcttattgggactttggctcgctgctcctcctccagggagtttcggtatgttaatctatatggtagctccagtctttgttcacacattccgttcggcggataaaaagcctttgtttacacaactataaatacatcggattccgcttttttgaagtgtatctccaatgttctacgctcttcagcggcaatttacgattaccatacgcgaggacggcgcatggaaattaattttatttttaaacaattgctgtctcattattatcataatttttgttgtgccttcgagtggctgcagcggggttccgggggtctgtaactaggtgtaggtgggcgccttttgtttcgcagacagcaattgttcaaacaattttgtgtaaatgttgccaacatttgttgctccgttcgggctataataaacaaacaagcaaacacacacacacacttacacacagtccgaaaaacaagagtttttcaggtcgtgagctgctggagcgagacaccacttaatgacggaccgggtggtgaaccggggatcgggaactccggcgagggagcacgactaccatcctatgtgtgccacgcttctgtcggagaagacagctccacaaagtgtggaaagcgacaagtgaagagccgaagacaagtgcagggcgcaatgacacacgccagtggcccgatcccctccagaaagcgataacgctgcaactagaggctgctggaattgaatttgatctaataatactcacattgtgcgccccagtgtgtgcgt

SEQ ID NO: 19664 - DNA, 1121 bp, DROSOPHILA
cagaaacaatcacactcttgtttgttaataatactagcggactcgcggccccaagatagaaaacggttcgatcgcgcgaccatcgaccagccaatttttttcgctgcaaatccgacgccgcccgaaaaagtgaaagtatttgcatgtgagaggtggaaaagagtcgcggagtgggtcagcgagcaagaagaagagccagcggtgctcgaaaagaggggtgggggcagacacaaaaacgagaaaccgtgaggcgaaaatcggaaaagtgcaataacgaggccgcgaaatctctgctaaaaggtcaatttccactcgcgatagttttagccattagttaagtagtacagtacgtcccgcgtccgtgcaattcatacgttaataccaatttatatgtgaccgaaatctgagagtgtttagtgtgcgcgagagagcgagacagcgagagcaagaacagcatgggtacaacaaaggagcgaagagagcaaagcgagggcgacgccgccaccacccacttaacaacaacagcaacagcaacaacaggagcaatagtagcagcaggagttactactacgctgccagctacaaaaacaacaaccacagcggcagacacgagcacgacgaatgccgccaaaaagattcgccgcaccttctccatgccacgcaatcccttccgctggacgcgtaagttcaaaacggcagtggccgttacgtcgtccgcgggagcggaaaacgataacgaaagcggcaagaataacggggccagggagcggcgtggcagccacacggcgatctcgtcctgcgtgggaggtgggcgtggcaggagcgggagcattgtgtcgctcagcagctacgaggccccattcatttcgtccaccaacaacaacacaaccaccgccagcaatggaaacaacaacaacagtagcagtagcaacatcaacagcaagcggacacgtgctctgcgccgttcgtccttcaggaagtttctcaaccggatcgcccagcacctgagctcaacggttaatgtcgtgtgcgttatcggctgctttgttttgctcccgctgctctttgtctacggcggacgcatagcatcttcatctgcatctggatgcgagtggctctga

SEQ ID NO: 19665 - protein, 221 aa, DROSOPHILA
MGTTKERREQSEGDAATTHLTTTATATTGAIVAAGVTTTLPATKTTTTAADTSTTNAAKKIRRTFSMPRNPFRWTRKFKTAVAVTSSAGAENDNESGKNNGARERRGSHTAISSCVGGGRGRSGSIVSLSSYEAPFISSTNNNTTTASNGNNNNSSSSNINSKRTRALRRSSFRKFLNRIAQHLSSTVNVVCVIGCFVLLPLLFVYGGRIASSSASGCEWL

SEQ ID NO: 19666 - DNA, 8010 bp, DROSOPHILA
gatgacactcgcaaatgccttggcctcaaataaatttgcattaaatatttgatttaatttcatgtaaaatgcttacaaattaattgtacaatgtgaaacaaggccatgtatgtaaatgaagcgataaagctgctttcaaaattctttcttcttttcttcgttattttttatgatttattatttatgattaatgtctgcattctccttcagcattaggcgcgagtttaatgacttacggatcagcttacttataagtatatatatatatttttgttctttattaaaaaatgctagaaaacacaaaaatcattagttgtggatttttacttcattttttatttgattttttcttgtttgtttgtttttaagagtaatcttagttcttcttgttgttttatacaaaaaatcaacaaaatagtaaaactaaaactaaagcaaagaattaatttaaaaagggtcacatgaaaactaagaaagctgaataaatcgaaatgaagatagttgattcaaatcggaaattgcgtggaactcataagaaatttatttgcattgctgcgtctatataatcgttttcttcttaatttccctcactatatatgctttttaaatgtttcgttcgttaaaaacttaaagacacttggacaatgtttgaaactgctacgagttgttggttgataaattgttttgggtctcttcaaatttgatttacaattatcgattgatgttgattgcaattatacaattaatatgtaaacattgctgctagacttgttatttatttaatgcctggatgaatattaaaaccattcaaataatgcttaataaataaataaacatgtttatttgtggttgtttctcttgctagtgcgggttctttacttgtccttctcagactcggcagcggcctcgggcttcttgttgccaatggggatggccactcggatcctggaacacaaaagcgatttagaatatctttcttacggagattttaaatggttaaactcacttgtcggtgatttctgtcaatttgctgcgcaccagatccaagtgagtgtcgatcgattgcttgttgttctcgtagaccttgggcaaggtaaacagcgagacaaaggctgcacaaatatagaagataatcagttctgttttcgattggtttaagttaatcctccacttacccaagatgaccagagtcatgccattgaaccaggcacccacgtaggtgaagacccacagaatgacgccgaacttgatcgaatcgatgatatcctcaacaagaaacagacgcctcagctcggagatgaagccattgatatgtgccacagccacgccggcaatgttctgtaccttttcgtgcgacagcgtcagatccagctccaggtaatccctgatttcgtaaggagttacgttagttaaacttttttttttgttgggagacatcagtctacaatactcacttaaaggggtgaccctcgtttgtcttttgcacggcctgtgtcacagatttgtagattctgaaggcgacggtgccgaagagggttaggagcgacaagtaggcgaacacgctgatcaccgagaagctggagatggccgccagtgtgatcaggccagcgccgaagacaatgccggatttcttcacatcgcgccagtagataagggattccactggaaagaagagcaaatggatcaattagaatctgcttttgtccaccatacacatttgatttttcattcccaaattataaccctcataaactgtgaaaagagacgagatacgagtggaaaatgtggactgagaatccccaaatatacgaagcacacatacgttcagcgtctcgcacgcatctatgtacatatatcttttcagctggcggcaattatgcaatctatgagataaatagatgagatacagattcgagaactgtggcaccatctgccgaggtggtaattatcgttagcatttgttcaacggcatgcaactaagctctgatactataatatctgaacccaagcacccccttttctcagcccggttggttcactcacacaatctgttcgacatttttcgggtattcaagttttcgggttttccaacggatcgttcgcggtgctcctacgtttgacgttcgctgccaagttctacacactagagaagtattatttggcgtctgctggtcgggggcagaacgtatatgaaaatgtctagaagaagagggccaaattgtccggacccagccggaaaacaaaagagagccgtaaagagcatagctaccaagtggaaagagcgatggcaaaagagtgtttgagtggcgaacggatatggaaatggcagtcgcaaacgcttataaatcgattgtccagctcgtgccggaatgtatctcttggattcggattcagtcgctgacgtaaacacctctccatctgctataacttggccatcggatcgggcttcattcgctttcgtcggatttgccgataagaagtcactgccccgcggcgtctgggttaacccaattaagatatgtactaaaacaaacaaatcgtctataaatacacatctcaagtgttggaaataggggatttgccaactcattaagtggtcattagtttgaactgatttgttaggttgctcaggtagcaagctacttagggcaatccagtaaggtgctacccgcaaggaaatgatatatgaccaataattaacgacaagcatttattattttatagtaccattgggtttggccaacacattaatatgcttatgatagtatgcttgcttggagattaattgaaatctatatattaatcctcaataaaaatggtatataaatagtataaatggtatatcactttagaatacacctaaacaaatagcatatagatagatatacgaaaagtctgcaagctgggtaaactagtttcagattcgaattcgtctaagttgccaggccagactcgatctgaggggtatattatgtaaatatgggtgaaataaattagaaaggagacgcacaatagtgatgagatggcagcgtctgaggcccttagcttggtgaaaagactgagaaagctctctgatgggagaaagttacccgagtaccaattgaatcgaagagttcgttacaattgcaactggaatcccgctgaagatttctttggttggaactggtttggtttcgttcgccttgaaacccgttttggccgaaagtgaagtgcagcctcatcgggacagcagaacacgaatgtagtgatagaaaataattaccgaaaagaaggcagataagagcgactggcactgataacgtatatcaagtacctgctatttagacacttgtttaataattcaatttaaaattgccaatgcaagctggatttatgatgatgggcgagcattttctgttgattgctggttgccaagcactcagttcacaacgtggcacaaaatgaatatatatgaaattagcactgtgtctagaatggaagcgaaaaaaaatttgcatagcgaaggctggatttcattggatagtgatttttggttatgactttcattgaacattttagccacgttggcgctgatgatattccgctgctgacgttggcagcaatcactgctccgctccataaatacattttattccacgaccccccgaagataagaccctcgttgtgttgctattgttgttttcatgtgggctttaagaacctagagtggtcaacgtggaccagcagccaggtgatagtgaaagcggagatagctccctgatggtttcccaattggtattacctggtccgcgttctggaagcggctgaaaattgccattggagttgttgcgtgagtagcgtttgctgccgcctgccatttttttgtgtattttaaaaacagttagcttggcgccaaaatgtatgcaaagcgggctggactttcgcgtgtctaggcttaattacagcgataaagttagttagttggctagtcacgcacacacacaaccactggcacacgaatgggacgattcggccgaccgtctgaatcgagcgcagcaaaagaactggaagaagtttgagcacaaattaaaccaacaagcctccaatttgccgtcgcatatggggaactgcttggatagagcgagcgggacagcgattgtagcgggtgggggagcaagagaaaggcagagcgagagggcgcgagagtggcggcaaacaagttttttagattcaaaaagcagtgggagccccatcaagcagtgcacagtgggcacgccagcaatccaatcgattaatggactacatatgcaatttaatgtttccaataaacaccattaaagtctataaaatgtgtattcgttcttgatggtagatttgttttttcataaatcagaagattttgttatatccgcttacaaaccaatcaagacaacccactgtgcggtagaagagagctctccattggagagcgggagagagcaagagagacgatccgcattgaaagtaaaagataaggcgcagtaacaacaacaaatccggcatgggggccgcaaggggagcaagggctgtacgtatgtacatatgtcagcaaacgtgtcaacctcaaccacgaacttggactcgcgattcggctgtgtggagccgaagattggagattggacttacatacgtagtgttacgttgagtgacgtagtgggtggggttttgcggttgaatcatgaatccgaagcgtgaccaacaatggcgaaatgcgggaaatgccaacacatacgatgggcctaaatcaataaattaaatctgcactcacatcgcctagcatttgtactgcttatcggggctcaattgggttcaatggactgcttgtgtcagtttgacaaccactgtgcgtggcaataaccaaagccgcgctcaaatgaaaacgcaataggcgggaaaactgcgtactggcgaaatgcgaaaaagcgttagttagtgacatcatcattggcaaacacttaaatccaaccccaatcacatctaacgcttttgcgttgctttccaacatttttatttggcgcgtttgaatgagtaagctgtgtttcaaatgatatcatagcaatgctcgctgacataattcctaaatgcgcgacaacaaacgtacatatgtacatagatgcaattattgtgtgcacctgacattgtcagaaagtctgcagaattgcataaggcaattatagaatagcagcgcattgaagcgaacagaaaataataaaataacccagaaagtacaataataatatgcaaaaaaaaattcaaggtttttttttggtatatatatatccactcacgcacgcaccccccacttgaaaccgcaaaaaagttccatgtttggcgagccactttggcttatcaacccaagttgcccagggggaagtgctgataatagaaaattcttctgagactagaaattgttttaattgtttcgcacagtaatcataaatgaaaaattgtcaccattgatacagcttttctatgaacttattgataacaagttatcaatgataccaaaaatattcacgtaactcctatctaatcgaatattaaacaagtggacttattagccctctacgccaaaattactctttccaatttttccttaagtcctcaacatttttcctaagacactaaaaagaatatttataaataaattatagctgcatttagagagaggggctgatttgaaaagagaggaaaagagagagcacgaggcgaggcgagaaataaaagaaatttccccaagggaaattccgtttcattcgattttcagctggccatgcggtcggccctcatatctagccaaaccctatatgtacatttatatgaacatataataatggaattcttccgcaacaattttcatttaattttacttacacgactcgcggttcaggggcaagtctttgagttcgcccaacgattgcagcagaccctgcagctgttccagaccagcagccatcgtatcttattgtgttgggattgactggattaactgagtatatacggttttagtaatatcactaaagcttttcgcccgactgcaagtggaagacaaaattggaaatgtagcgaaagttcggacgactttttcgcgcggttcacggatcgaggaaatgcgaataatgcaaccgcgggcattaacattagccaactgaacgatcgcgggccagagccgaagacgatcggatccgacctagacgaaagatatagaacccggccgagagttcctcgcacccgctggcggaactgatatggaaagtgccagccagtcgacggggccagataataggataggattaatattattatattatttcattcaccgctgatttatttgctttgcgacgataaccgcattggctaggtaggtgcacgtcttgatattgaatgtgatacagtggtcgctggctatgagagattagttggcttctttaggttactaaaatggccaatagagcagagtgtaccaaataataggtgtttgaaagtaggcaatgatagttagttcctatacagaattatctttctggaactttacactttctagtgaccactgtatccacatttgcatatattgtcagcgttagggcacctatccaagttatataattagaaaagtatccgcacaaaaaacacgaaaaattccgcgagtttttctggggcgggggcacacagattctgaatcggaataatgtcgaatgctaaatgctgcgacgacaatgacagaggcgcggatacgtgttttctgtcagctgcaagtgcaggtcattctacgagttcaaacagctgacacaatccgtggcattcgcagtgtagaaagggtatcctcatcccgcacagacactggcacacacttttaaccaaacgcacgggcacgcagagtgcggaaagaaccatttaccgatcttgttttcgtggtcgcgttctcgtgtttgttttctcgatctcgatctcgatctggacctagatcccgactctggggcaatgtgacgttgtcaaagtccgtacatcaactaaactacaattaatttcagatgcgctcagctcgtcgcagggcgaagcgaatacacacatgcccacacgaacacaagcgcacacacacacacgctgaaattacacacgcaggtacccaacgcagagaacagctgcgagcaatgaaataggttcacttttgtcaagtaaatgtaacacgatgaaaaaccatatgggattttatgtttagattaaaaggcaatggagattctttctttctgtctcagcttcatatgtttaaaaataattacttttataatttcccccacattttacaaaacatttaaaagctcttcaataaatccacaatacgtgaaactaattccttatccgaagatcactaacatcttggcccttactgtaggcaaataagggaagaggaaagggccaatggcgaatttcggaaagctaggtagccgactgattttctcccgaacatgtctctgcacgccacgatcaccgggaacaggtaaaaggaatcacagcgagcgaatgtccaggggagaagatggaagagcaaaaggaagctgaaccgaatcggttaacccgatctataggtcatacaaatgcgaatcggttataatttacagctacagtgaaggtaaacaaattgtcaagatgttgggttaaagtaggggtagtctatactatgcatttatagagattccgcagcttacaattgcttttaatgtacttaaaatctagccaattattgtattgatcgctatggatttaacatatcgagtgcacactgttccaatactctgttggtccccagttcaactgcttgaccgcccagtgcagcctacatcgcaatgtttaaatgttaaaccgcacggctagcagatcaacaccaacaacagcaacaccaacccaaagataatgccaacgacagcaacaaatgacagcgaatggctgaaatacttagctaaaatgctaaaattagcaagcaactgtgagttt

SEQ ID NO: 19667 - DNA, 784 bp, DROSOPHILA
caacgtcacattgccccagagtcgggatctaggtccagatcgagatcgagatcgagaaaacaaacacgagaacgcgaccacgaaaacaagatcgtcgggcgaaaagctttagtgatattactaaaaccgtatatactcagttaatccagtcaatcccaacacaataagatacgatggctgctggtctggaacagctgcagggtctgctgcaatcgttgggcgaactcaaagacttgcccctgaaccgcgagtcgttggaatcccttatctactggcgcgatgtgaagaaatccggcattgtcttcggcgctggcctgatcacactggcggccatctccagcttctcggtgatcagcgtgttcgcctacttgtcgctcctaaccctcttcggcaccgtcgccttcagaatctacaaatctgtgacacaggccgtgcaaaagacaaacgagggtcacccctttaaggattacctggagctggatctgacgctgtcgcacgaaaaggtacagaacattgccggcgtggctgtggcacatatcaatggcttcatctccgagctgaggcgtctgtttcttgttgaggatatcatcgattcgatcaagttcggcgtcattctgtgggtcttcacctacgtgggtgcctggttcaatggcatgactctggtcatcttggcctttgtctcgctgtttaccttgcccaaggtctacgagaacaacaagcaatcgatcgacactcacttggatctggtgcgcagcaaattgacagaaatcaccgacaagtgagt

SEQ ID NO: 19668 - protein, 202 aa, DROSOPHILA
MAAGLEQLQGLLQSLGELKDLPLNRESLESLIYWRDVKKSGIVFGAGLITLAAISSFSVISVFAYLSLLTLFGTVAFRIYKSVTQAVQKTNEGHPFKDYLELDLTLSHEKVQNIAGVAVAHINGFISELRRLFLVEDIIDSIKFGVILWVFTYVGAWFNGMTLVILAFVSLFTLPKVYENNKQSIDTHLDLVRSKLTEITDK

SEQ ID NO: 19669 - DNA, 12870 bp, DROSOPHILA
tcactataagctgcaataaagtatatcaaaggcctgttcgggcggcattctgggggctcgagttccctcccctttcagtgcaatctttcgtttgttcatccatttcataaaaattcctgataatgcttgatttccacaacatgcacaagtgcgtgtatgtatccgttttagtactgactatattctactctgtttaaaataaatattacacgagacactcgttatgttattgccccttgattaaaacatctgaatttctaaaatgtaatttttgcatatccgatagatattttgtctgtgctgcttccaaaaaaaaaaaacgttaaaactctaaatataattcacaatattttgtttgtataaattattatgctggcgggtggttactcgttatgttattgctatatctttatcaattatctgcaagcacagatgatatacatatgtatgtacctatttataacacaaagctgatcttgaagagggcaaaaatagattgagtgcgttgtcaacgctcactttcaacattttatcacccttgcgcttcagcgaagcctgtcttacgtgtctaccaactatgaaatgcaaagtaaccgccactgagtactcttagtacacttaacgcataatatgcctggggctgggttacgcctcgtttctatttatgtacaaaacatcgatatccagatagcaagtaccctcgttacttagctactatcacacacactgactgaacctgttgctgtcgcattgttgctttgtcagagaggttttacaactagtatcatagctattttgtgagtattgcttcatttttatacagggttttttcttttggtaacactaggcttttcttacactatttattgaatcgttttccaccttgatattttgccgtctttgagggagataagaactaagctttcagtcgaatctgaaataggttgtattactgattgtggttgcaaatgaaataaaataaaaattcataacttatgttcttgctaaatatttatttatgtagtacccaattgaaagtgtatatattgaaggatccttcgggccatgccgaagtcattcattacacaagtaaaagtttggcatgtctccatttcgaaacggcttcatatttgttttcaaattaagactagaaactggaccttagtgtctaaactctactttgagactgcacatctatatggcgcgataaagtcacttaataacttaaatgttaaatacgtgtgttgtatgcaaagttatgtgaggtcatcgaacgaagcggacaattagacagattcaaatatggtttgtggacatgctcgcactttgatgtaatcgattcgtttgattaacgttgagttgttgggtgtaaaacaagtaaacccaacaaaaccaagttaatgggtttccaaaaaagaacgacaaaatacgagagatcgtgtaaaagtttggcattttgccctaaaagtttatgctattttacaaatatacaatgtatgcatatatagatgtatatcgcttatgatttgatttgacttgttgattgcctacgagctaataataccttaggtttgaactaagatttccatatcgtatgtacgttagtatatgtgtataagtatatatatatctatatataagttatgtatacaattgtataatattgcaatttccaaatgttcagtttcaatatgatgtatttttttttgtatgggttagggatctggccgtttaatggattgaaagtcgtggaccggcggcacccatctgtatgttacaatacaaaattgcttgtcttctcttggttaataataatattacaatttctgctgtcatttcaagggggtttttcgtcgtccacagcgacgtctcatttacaaatttgatccctatactaatactactttctacaaatatatgtatgtgtaattatatgttacgatcgagatttttcattactttcgtttgggtgtttgttgacccagattcaaattctgtttgaattcaccatacatcattcgctttgagttttgtattattgcaaaataagatattttctctactattgttgttttttgtgcatcagcgccatattgaatgattaaatataagttctcacaccgccttttcaaagggcagacagggaaaagtatttttcctaaaattgagagctcctctcacttatatgacaatgatcttacattggtattctgctgtaaccatttcttaaaattgtaagcaagataaaatataaattcatttgattttgtggctgattgctccaaaagcctattcaaaacattttaccgatcttaagcaaggcctcgcagcaaataaattgtgtcattcaattgttctctgatttaaaattattcttatctttgtcttgtactcgaacattctcacattactaagattctttaaatatttaaaggagacaaaatttacaatgcggtaaacgtttgttgtccattgcttatcaatgttaatatacatgtgctataaaatgaaactgagaaatacacaataaaaccaaaacataaattaaatactctttctctattaaaatgtatgtttatattaaagtaatccaatggcatgaaaataaagtcctgtcaaaacagtgggtaataagtagggtaaggtatgttttcaatgagttaattaacaaattagtcttcattggagaatacttcaatttctttcgagtacaagactataagatggccttggtaggatcatgggtaacatgaattcccttttgcttgcccttttgtccatcggcgtttttaaaacaggcctttggcgccggccaacttacgtcgccggaatcacatgagtcatcatttgagcgtattgtaaatgttatcctctccggccaattcaacggtggtgatgtgggcagcgtgcctctcgcccagcggttcctcgcccaggtacacagtatggtagctgattgcgctgctcttcaccgccgccgtagctccattcacctcaatccgactgaccgactgtggtccattgaccgaatacttgagcgatgcataatctccatcatcgtcgggcacatgagtgaactgagtggcgcccgaaaaggtgtccactgtgtgcgagggacagatttcggcgtatatattctccttggtatagtccacagcgggaactggtctactggcggactccgatcgcaggcagtccccgccggaaatcacaagcgaatcgcgcacactggagtagggcaagtcgtcttccaccagcgatgcgggcgatatcgccagttggttgagtcctcctcccaacagagaaactccaccggctgcccttcttccagtgaccggttccttggtcagcgcctgttgctgcgcctttagcaacatcagatgtcgcttctccttttcagcctcgtgaagttgcaacttttgcggcaagctaaacagaggtaactggtgcaaactggacgatgacttgctatactgcctggtcttcacgtgaaactcgttgtacagcttctccgtgatgaaggactgtggaggtggggtctgattctccacatcttccagctcggtacctgcctcactgatggcgtcattgtgattgtggctggccagcaaatcaggtcgttgcttgcattgaccattgagaagctcaatatcctgcagggacatggacttttgcatcattgtgtccagagacctcggctccatggtagtcagcatcgttgtttcggtgtcggacgctgctgtgctgtttagggagatagcatcttgctctggctgttcgggattcgagccaaaacgctcctgcagaagcttagacatatccgtatagcgctccatgctcattcgcttggcctgctcatcgagatctaagtcagattgatgtttctctatttgtggttgctgttgctgcggatgatgctttccgaaccacttcttcttggtagactggaatacacgcatgcgctcagagatgcgattcaaactggattccgagtgagctgcagcagaagctgccgcttccttggcttccagattctccagatccgatttgctgaggaaaataatggaatcctccttttcgtgcgctgctgccatggagctcttctcgcgtctcaggatctttggaaaatgcagtggcttcaagattcgtagcccctctcgattcttgcttcccgaacgttccgagcgctgaattaactcaatctccacgagcttcaggaatggatcgcaattaaattgacaaaactttagcatattctgcacattcgtgttagcgagcatccgttgttcggagtcaaatcctaaataactttttaccagctgaatatctcgactgggatagaacttcctcagctgcaagggcgtctgggtatcgacgtcctcaatggaacagccaacaaccacatcctccttgctcacttgactaatacatagctgctcgggaatgtcgggtccgcctggaccggagatatagcgcagtgttagcggtaactgcttggccgccgtcaccaaagcactcaaacgatgcacgcactccggattcagcttgcgctgcgcatcgcccagtttctgaagcagctgaggaattcccggttcaatctcgtagaacttgcccttggtggacagtgggacgtacaacacctgccggttttcattaagcagctgggcataccggttcttttccttctcccttcccatgtacccactgccatgggacctggtcgcattgccgttgccatgttgcgacatattgacctgatcctgtttgccatcctcgaagacggccaacagacggaatacctgcccgccccttgccgtcgttttcacgtactgtggtcgtcccttgtttatgggcaggcatccctcgtgcgttggactgctcgtactgttgggcgaggattccgtaaacgccggcatgttgtccactgagacaaacttgtaaacccgttcccgaaccagctgtatcagagatccgtattgtgtggccgtggggagacccttctcgcttagcatcgaaaagtaacctgcgggaaaaagaaaaaatacaaatgttaaaattgtccttgtatcttatgttgtatgcgtatctcttctattaaagtgggttcatctaaccattatacatttcataaataaattaattacaattgggtcaaaataaatgttcacagaagcttcgccttctcaaggtcataaaagcatttaaaaaaaatagcacaaatcaataattaaaaactaattttgaaatctctttgaacaagacagatattttggttcagtcgctgaacaaatctgtttactgtctaaaatctgaaaaccatttttccgacagctgacagcttcgaacagaatatagtacacaatttgcaatccaaaaatgagtacaaaaaataaaacaaataacgtgacgtgcgactgggcatctcttagtattgagatatatgtatttaattttcttaaaataaaagcattttttgtcaattaaatgcaaaaccgacaagtttgattggagggtttgtaaaaaataaaattcgaatgtaaaaagagtttcagttagcgcaggtggattttacagaaaaaaatgcaatgcaattaaacattacatgtatcgatgagtccattaatcatttcatttggttcaattcgcgccactgagcttaaattataatgatacaataaaaaaaattgatgataaagagagactaatgcaatcagcgtcgagaccaattgaatcaacacaagaaaaatccaatatgctcgtgcaaattgaatcactccaatttgccatccattttttccggacattgcaagcctaatgaataaaatgataatacccagcgtcagtaagtctataaatgggcagattgcataatatttgcacccattggtttacattgcgcctcgccaaacggctgtgaaaagtcacatggcgttgcgatttgaaacaatggctgaccgcacagtacggcgaagaagcagcagtgggtggttggttgggtactgcaggtggtatcggtggtgtcggtggtgccggtggtgttgctggtgtcggtggtgggccaccgaagaagtcaccgctgccagacagactgggccaacaaccaaaaccaccggcactggaaccccgaatagagctcattgcataacgcctgatgagcaatagttgcgattactttccattgttgaactgtgactgtgtcacgcaaaaaaaaaaaaaaacatcaaagtgctggatacatatgtctgtatgtttagggaattgtgtacttagtaacctcgcactgggagatcagagttcgcttggctgactcactaagcgagttgagttggttacgagtggaccgtgtaatcaggcaaaagtagtaagtatctaaatgcattcgtcatgagaacactaaattgtgccttcaaatgttcccgtctggattatgtaaatgggcatgcgactacaatcagccgtgttcgtgccgaatcagtcacaggttttcctcccattttttttttttttaatcattcggttatgcccttagctactgccaatcggcgcatcaatcggtgggtcattgaagttaatttactgtgagcgataaattaacttccctcaatggaatgacaacttgtttgaagccgccctcgtcggggccaacgtgtaattacaattagccgcagcacttaagttctagctgttctgtgaaaaatgtatctttcgcttttacaattgtaataatcaataaatagcaggtaattagaacgcaaacgtactataaacctgagatagcatacatgtaataatatgactacttaactattgtaacaatcaattttaatagttaataaacaatatgtttgctaattgattttagtttattacagatacatactgttaagcaatatgacaaattgttatttatgatttaaataaacccagaactcgatgcaatcatccaattcagaaactcacccggaaactcctgtggaatgagcagagtcttcttgcgctgcgatgcctgagtcttggcgttgtgtccgtggtagatgttgcgctgtcgcaccagcctgtagagcagaaaaagctcatcgtggccgggtggagtgccaccgttgctgctgtggcgaccgttgttgttctggtgaccagaaccagaaccagaacccgagcccgaactaagaccaggaccagagccagttccgtttccggtggcgctgcctccgctggacgatgaatgggtgccggtgtcaatgttgccactggaaatgtttccaccaccactgccaccagaaccaaacggattcgctcccgtcgaggagctgctcgatgccgccgtggaggagccatgcgatgagctggactgcagcgtttcgtttgagctcttgctcgcatgcagaatgcggacgactcgtggcagggaattccgctcaaggaactcaatggctgtcagcgcaccctgtaagatgcattgtttattagttgaagttagagtttatttaaataatttcgaatgtggttaggaaacttacaaatcgacaacgaataattaaccaacatttttgcgcgattagaaaacttattgacgtcatgtacacgagaaaatttaatataaaaaaatgtatattctatattttattttaatcctaatctacgttaatctgcttttatgatatattgtatttgtagaacaaactttgggggattttaaaaacccgtttctatcgttattcgaattttttgccatcagattatgttactatttgaaattggtttgacgtagatttgtgtatatataggtatagtgtaattcaatcttacttcgctgctgcccttggaggccttgctgtccccggtggagtaatcgccgctgccattgagtgcgtcacagtatccagaatgggcacctcccagcaatcctgagcccgatcccaggccgtaggtgctgttgttggcactgccgcgcacgcgtcgtgccctccgctggttcagctcgatctcgttgcggcgagctaggcgggcgttctcgaaatcggccaccgagaacatattcgaactggtgtcgtgggagttgaagcgccgcagtttgggcttgcgcgccccagccgccgaatggtggccgtgatgggcgccaacggctgctccacctgcagtggcaagagcaaaaggtacgaaaaaaattaaaataaagaataaagaaacgcaacgcaacgcggaggagtcgtgagtgagtgaggtagcacattgtgcatcggtgaggtaatcgcataaatataaatgcacatgtgagtgtctaattgccaccccgttgtctgcagtgggaaaaacccacacaccgtcgtatcaacttccacatctacgagtacagtggcagagcttcgtctataatgagtgtatattccccaagcgaatttcagttggcgtgacgcaacaacaaaaaaaaaatataaaaaaaataaggcaagtggttcaaaactgttgctaagcgcagctaattttcagtcaacggtcaacgagacgatgacacacagtgggcaaatatcgccccaaagcgtaaccgcaaaattaacaagaattttcgaaatagacaggaaggaatgtcgaaagatcttgcactgaatttaaagtggggaaaatcgaacttttattgttcaagacggccatttttagaccacaataaatttaatgcactgaatagctgcacctgtacacaacattcttgcctgctcggctttgttaaacatcgtttcaaggctaaatataaatgaaaatcttttagccaaagttttgtatatgatttggaatctacgaacttcaagttcaactggccagaaaggcaatctatctctatctaataataacatgcaaatactaaaaacgtaggtatacacaaaactcaaactgctctatttgcactcgattctataattcaaagtttactaatcagtgcttatttttgcgttttaacaacgtttacgcaaacaaatttgtcactaacaagactttatttgcaatacaaatatattgactatcagctaattgatactaaattttgctattgacgtttgccatgggtcattaaaaatacctgcttggtttatgaaatgcttgaaaattgcttaaaaacttgtgaaaacatttttgatttatttccaagcataaaaattcgttatcaggtcaatgatctatgtgtaagctattaatcaacgtattttattatcgattaggtcacttcgattcgcatttccgggttattgattacttgtttaaaaagttttgagaactttttgttagattcgaatgcacttgagttaatatcgaggaagaactgcgggggtctatgacttgacaattttaaggtcgaattgtatttttggttgaaagatccaatcggatcggatatcgaggcactaataaaagagtcaacaactggaggcgattaacggcacacaagtacgtagacaacacataaagataacacctccctcatgggcaacatatattgtattatatcgttatcgggccgacatccaaaaaagcaattgtctgtcgccccaaacaataccgcatgaaatcacttagccatattcgtttttttccccgattttttgtgttgctttagaaatatataggtatgtatgtagttgtgtaaataagcgaacttcgagcgttgcaattaaaaagagatatcgcgatttttgattgctcattgttcgaatgcggcccatggtgcgatttggatccgctgattggtggtcgacggcgcattactcactttaattgcgcacatttggcttaattttttgccccacacacaacacacatttaataaatgcaggcgagggcagaaatcacagcataacaccgggaaggggctaaaacgttttgtgaaattgctcttatctttcgtgaaatatcaattgcagagtagactttcagccagcgagcgagagagtaagccatatacatacatacatatatatatacatataaatagagagagaaagcgatagaatggatgaaggggggtgggtgtgagattgtcacgtttcgtgtgaaattatgcgaatcgacgcgcgcgccttttgcgaaaagaaatccccatacagacaacacaaccaccagttagacaaaaaaaaaactacttctggtaacgaaactgttgtaccctttcaatccaatctaaaaacccttcttctgatcttaccctttccggaatttaccgcagatacacatacttatcaacaatatgacttaatctacacatcttagtctttaatggtcgagatttctttagaaccattcatatttttgaatgggtagacaaaaataagtctttctaggtcatcttatcaaccatatattttaaaatttaagtgagtaatgttaatcacttcatctctttattgttcagagtgttgattggtattccatccaaactagctggccataaaaatagcacatgtttcggttttcacttttaaacgttctgctcgaattcgatttgcacaaaaataaatatttatacgatttggattcgcttatcccaaagaccagtacagttggctatcaaattaattaatttagatgcaaattcgataatcaagaactttaaatcatactgcaatctcttttgaacttttttcgtataacaccaccattgaaattgattacaacttcgttaatatattgcacaaatccattttcaaatcattagtttcacttactgaagtttacctgtagttgtaaacttggatcttttattacgtgctgtaaaatcttgtaacggcgcaccttttacggaaaatgacgtagaaaatacactcatttttaaataattgggtgcttgttgtaaaaaattaaattcattattttacagcagcaaccaattgctcgtaattaccatactgtattgtgtgaaaatagttagtgccactactgtttcagtctcataaagttgtatttatcaaacttcctaaaggaatcaacgcaaaaacattttcattttcgaaatggtgtaaattaagtcttcagtttaatcattttttgagtgtattaggtcttatctttttagtacattcaattcccttcgcaggattattaagtgtatataaggatgatctgaattaccataccctaaatgcagagcatttacaaaataaaagcaaaggcgacgtcattgagcaaacaattacccattgcgctctcccgctctctcctctctctctctcacgctcgcttgaagcgcgtgccttgtcaaccttccccaccacccctcctccgcacccacttccactcttcgcgctaagcttaccgttacatgcagctgctgctgcagctgcgacgctgttgctgggtgcgcccgctgctgctgctgttgcgaccccgttgccgcccactgggccagcgcctgctccacccactgtggagccaggatttgtagttgtagctgttgttgttgttgcgccctttgtggctgatgcagtgggtgttgttgctgctgccgctgatgttgttgttgctgctgctggtccgccgggcatgtgcggtctactgttcatcagccagttggccaggtgcctctgccgctcgagctcgatattggtgcgctgcattccgagtccggacagctttaaggtctcgttcataatcgcaatcaatcaaaccgaaaaaaaaaaatgaatgcgccactgcaacgagcggacgcgtcgccgccgtcgaaacgaatgtattccaactcggtacgtctcgcgatgccgattttcagcgaccaactgagcagacttgtccgactgcagcggcgccctcctcgatcgttgctgctgctgctgtaacgagagagccacagagagagaggaagagagagagagagaaaagcgtgagagaaaaacaacggagagcacaaaatgcgcgcacagtgggcagcgtttacataagtggcgtcgcggccagcgcaactcgaattcgcacagtggcctcaatctgacagctgcacactctcacaattatcggcaaaataatatttgccgagctgctcaattttgtttggcaaatatttttgccttattattagactacctacttatttattgagtgtggtttgggcatagtagagtaccttatatcggggagttgtgtcacccccagttttagtttatgcatttctgaatcatccgtatttcagaagaatgaacattaccgtgaacaatttcttatttcacaaaaggctactggatgacaaattaaaataagatatagtgcttcctagaaagctatttttcaaagatattcactttaattgatttgtataaatttactttagttttagtttcacgaattttgtagttaatcttttctattctaatatttatgcgtttaagtttctttttattgttgccctaatcaaatgatcaactaaattagcagctgtgcaaaccttttcgcagagttcatataccccaaatccaagcgtaacaacaacaattgcaaaatgtgtaaaaagatgttgagctttagcaaaaaaaaaaaatctccatcgtaattgagatggttgctgtgtgcctgtgtgtgtgagatggatgtgcgtgtgttgtgcataaattaaaattgcgatgacgatgacgacgttatcagaaacttggctctctcgctccctcgctcgctcactcgcccgttcgttccttggcttgttcaatgtcgccgcaccttttcgattgtcgaccgcccgccgcccacttcgccgccccccagccaccacccactactcgtgcaacagcgtagaaagcagagccagttcgtctggcgttggcagcaaaaacaacaaccgcgcgtcatcttcaaacgttatgcgacagcgtaatcggtgcgattgttagaagagcgagc

SEQ ID NO: 19670 - DNA, 5404 bp, DROSOPHILA
ctctcacgcttttctctctctctctcttcctctctctctgtggctctctcgttacagcagcagcagcaacgatcgaggagggcgccgctgcagtcggacaagtctgctcagttggtcgctgaaaatcggcatcgcgagacgtaccgagttggaatacattcgtttcgacggcggcgacgcgtccgctcgttgcagtggcgcattcatttttttttttcggtttgattgattgcgattatgaacgagaccttaaagctgtccggactcggaatgcagcgcaccaatatcgagctcgagcggcagaggcacctggccaactggctgatgaacagtagaccgcacatgcccggcggaccagcagcagcaacaacaacatcagcggcagcagcaacaacacccactgcatcagccacaaagggcgcaacaacaacaacagctacaactacaaatcctggctccacagtgggtggagcaggcgctggcccagtgggcggcaacggggtcgcaacagcagcagcagcgggcgcacccagcaacagcgtcgcagctgcagcagcagctgcatgtaacggtggagcagccgttggcgcccatcacggccaccattcggcggctggggcgcgcaagcccaaactgcggcgcttcaactcccacgacaccagttcgaatatgttctcggtggccgatttcgagaacgcccgcctagctcgccgcaacgagatcgagctgaaccagcggagggcacgacgcgtgcgcggcagtgccaacaacagcacctacggcctgggatcgggctcaggattgctgggaggtgcccattctggatactgtgacgcactcaatggcagcggcgattactccaccggggacagcaaggcctccaagggcagcagcgaaggtgcgctgacagccattgagttccttgagcggaattccctgccacgagtcgtccgcattctgcatgcgagcaagagctcaaacgaaacgctgcagtccagctcatcgcatggctcctccacggcggcatcgagcagctcctcgacgggagcgaatccgtttggttctggtggcagtggtggtggaaacatttccagtggcaacattgacaccggcacccattcatcgtccagcggaggcagcgccaccggaaacggaactggctctggtcctggtcttagttcgggctcgggttctggttctggttctggtcaccagaacaacaacggtcgccacagcagcaacggtggcactccacccggccacgatgagctttttctgctctacaggctggtgcgacagcgcaacatctaccacggacacaacgccaagactcaggcatcgcagcgcaagaagactctgctcattccacaggagtttccgggttacttttcgatgctaagcgagaagggtctccccacggccacacaatacggatctctgatacagctggttcgggaacgggtttacaagtttgtctcagtggacaacatgccggcgtttacggaatcctcgcccaacagtacgagcagtccaacgcacgagggatgcctgcccataaacaagggacgaccacagtacgtgaaaacgacggcaaggggcgggcaggtattccgtctgttggccgtcttcgaggatggcaaacaggatcaggtcaatatgtcgcaacatggcaacggcaatgcgaccaggtcccatggcagtgggtacatgggaagggagaaggaaaagaaccggtatgcccagctgcttaatgaaaaccggcaggtgttgtacgtcccactgtccaccaagggcaagttctacgagattgaaccgggaattcctcagctgcttcagaaactgggcgatgcgcagcgcaagctgaatccggagtgcgtgcatcgtttgagtgctttggtgacggcggccaagcagttaccgctaacactgcgctatatctccggtccaggcggacccgacattcccgagcagctatgtattagtcaagtgagcaaggaggatgtggttgttggctgttccattgaggacgtcgatacccagacgcccttgcagctgaggaagttctatcccagtcgagatattcagctggtaaaaagttatttaggatttgactccgaacaacggatgctcgctaacacgaatgtgcagaatatgctaaagttttgtcaatttaattgcgatccattcctgaagctcgtggagattgagttaattcagcgctcggaacgttcgggaagcaagaatcgagaggggctacgaatcttgaagccactgcattttccaaagatcctgagacgcgagaagagctccatggcagcagcgcacgaaaaggaggattccattattttcctcagcaaatcggatctggagaatctggaagccaaggaagcggcagcttctgctgcagctcactcggaatccagtttgaatcgcatctctgagcgcatgcgtgtattccagtctaccaagaagaagtggttcggaaagcatcatccgcagcaacagcaaccacaaatagagaaacatcaatctgacttagatctcgatgagcaggccaagcgaatgagcatggagcgctatacggatatgtctaagcttctgcaggagcgttttggctcgaatcccgaacagccagagcaagatgctatctccctaaacagcacagcagcgtccgacaccgaaacaacgatgctgactaccatggagccgaggtctctggacacaatgatgcaaaagtccatgtccctgcaggatattgagcttctcaatggtcaatgcaagcaacgacctgatttgctggccagccacaatcacaatgacgccatcagtgaggcaggtaccgagctggaagatgtggagaatcagaccccacctccacagtccttcatcacggagaagctgtacaacgagtttcacgtgaagaccaggcagtatagcaagtcatcgtccagtttgcaccagttacctctgtttagcttgccgcaaaagttgcaacttcacgaggctgaaaaggagaagcgacatctgatgttgctaaaggcgcagcaacaggcgctgaccaaggaaccggtcactggaagaagggcagccggtggagtttctctgttgggaggaggactcaaccaactggcgatatcgcccgcatcgctggtggaagacgacttgccctactccagtgtgcgcgattcgcttgtgatttccggcggggactgcctgcgatcggagtccgccagtagaccagttcccgctgtggactataccaaggagaatatatacgccgaaatctgtccctcgcacacagtggacaccttttcgggcgccactcagttcactcatgtgcccgacgatgatggagattatgcatcgctcaagtattcggtcaatggaccacagtcggtcagtcggattgaggtgaatggagctacggcggcggtgaagagcagcgcaatcagctaccatactgtgtacctgggcgaggaaccgctgggcgagaggcacgctgcccacatcaccaccgttgaattggccggagaggataacatttacaatacgctcaaatgatgactcatgtgattccggcgacgtaagttggccggcgccaaaggcctgttttaaaaacgccgatggacaaaagggcaagcaaaagggaattcatgttacccatgatcctaccaaggccatcttatagtcttgtactcgaaagaaattgaagtattctccaatgaagactaatttgttaattaactcattgaaaacataccttaccctacttattacccactgttttgacaggactttattttcatgccattggattactttaatataaacatacattttaatagagaaagagtatttaatttatgttttggttttattgtgtatttctcagtttcattttatagcacatgtatattaacattgataagcaatggacaacaaacgtttaccgcattgtaaattttgtctcctttaaatatttaaagaatcttagtaatgtgagaatgttcgagtacaagacaaagataagaataattttaaatcagagaacaattgaatgacacaatttatttgctgcgaggccttgcttaagatcggtaaaatgttttgaataggcttttggagcaatcagccacaaaatcaaatgaatttatattttatcttgcttacaattttaagaaatggttacagcagaataccaatgtaagatcattgtcatataagtgagaggagctctcaattttaggaaaaatacttttccctgtctgccctttgaaaaggcggtgtgagaacttatatttaatcattcaatatggcgctgatgcacaaaaaacaacaatagtagagaaaatatcttattttgcaataatacaaaactcaaagcgaatgatgtatggtgaattcaaacagaatttgaatctgggtcaacaaacacccaaacgaaagtaatgaaaaatctcgatcgtaacatataattacacatacatatatttgtagaaagtagtattagtatagggatcaaatttgtaaatgagacgtcgctgtggacgacgaaaaacccccttgaaatgacagcagaaattgtaatattattattaaccaagagaagacaagcaattttgtattgtaacatacagatgggtgccgccggtccacgactttcaatccattaaacggccagatccctaacccatacaaaaaaaaatacatcatattgaaactgaacatttggaaattgcaatattatacaattgtatacataacttatatatagatatatatatacttatacacatatactaacgtacatacgatatggaaatcttagttcaaacctaaggtattattagctcgtaggcaatcaacaagtcaaatcaaatcataagcgatatacatctatatatgcatacattgtatatttgtaaaatagcataaacttttagggcaaaatgccaaacttttacacgatctctcgtattttgtcgttcttttttggaaacccattaacttggttttgttgggtttacttgttttacacccaacaactcaacgttaatcaaacgaatcgattacatcaaagtgcgagcatgtccacaaaccatatttgaatctgtctaattgtccgcttcgttcgatgacctcacataactttgcatacaacacacgtatttaacatttaagttattaagtgactttatcgcgccatatagatgtgcagtctcaaagtagagtttagacactaaggtccagtttctagtcttaatttgaaaacaaatatgaagccgtttcgaaatggagacatgccaaacttttacttgtgtaatgaatgacttcggcatggcccgaaggatccttcaatatatacactttcaattgggtactacataaataaatatttagcaag

SEQ ID NO: 19671 - protein, 1107 aa, DROSOPHILA
MNETLKLSGLGMQRTNIELERQRHLANWLMNSRPHMPGGPAAATTTSAAAATTPTASATKGATTTTATTTNPGSTVGGAGAGPVGGNGVATAAAAGAPSNSVAAAAAAACNGGAAVGAHHGHHSAAGARKPKLRRFNSHDTSSNMFSVADFENARLARRNEIELNQRRARRVRGSANNSTYGLGSGSGLLGGAHSGYCDALNGSGDYSTGDSKASKGSSEGALTAIEFLERNSLPRVVRILHASKSSNETLQSSSSHGSSTAASSSSSTGANPFGSGGSGGGNISSGNIDTGTHSSSSGGSATGNGTGSGPGLSSGSGSGSGSGHQNNNGRHSSNGGTPPGHDELFLLYRLVRQRNIYHGHNAKTQASQRKKTLLIPQEFPGYFSMLSEKGLPTATQYGSLIQLVRERVYKFVSVDNMPAFTESSPNSTSSPTHEGCLPINKGRPQYVKTTARGGQVFRLLAVFEDGKQDQVNMSQHGNGNATRSHGSGYMGREKEKNRYAQLLNENRQVLYVPLSTKGKFYEIEPGIPQLLQKLGDAQRKLNPECVHRLSALVTAAKQLPLTLRYISGPGGPDIPEQLCISQVSKEDVVVGCSIEDVDTQTPLQLRKFYPSRDIQLVKSYLGFDSEQRMLANTNVQNMLKFCQFNCDPFLKLVEIELIQRSERSGSKNREGLRILKPLHFPKILRREKSSMAAAHEKEDSIIFLSKSDLENLEAKEAAASAAAHSESSLNRISERMRVFQSTKKKWFGKHHPQQQQPQIEKHQSDLDLDEQAKRMSMERYTDMSKLLQERFGSNPEQPEQDAISLNSTAASDTETTMLTTMEPRSLDTMMQKSMSLQDIELLNGQCKQRPDLLASHNHNDAISEAGTELEDVENQTPPPQSFITEKLYNEFHVKTRQYSKSSSSLHQLPLFSLPQKLQLHEAEKEKRHLMLLKAQQQALTKEPVTGRRAAGGVSLLGGGLNQLAISPASLVEDDLPYSSVRDSLVISGGDCLRSESASRPVPAVDYTKENIYAEICPSHTVDTFSGATQFTHVPDDDGDYASLKYSVNGPQSVSRIEVNGATAAVKSSAISYHTVYLGEEPLGERHAAHITTVELAGEDNIYNTLK

SEQ ID NO: 19672 - DNA, 6912 bp, DROSOPHILA
caaacaatacaaaacaaacgacgaccagagaaaagccgaaaataaaagtttttccaaaactatatatctacggaagacaagagaacttcgcgttagaccaaaaataaacccaatttcccgagcgatccgtggagagtccatctgtagctgcgatccgcagtaagaatttgtggctcgtacggatcggtgcttcttttctctgtacggatcccatcggatatagaatcggaaacggattgttagacggaagacgggagagtgcgggcaaaatatacagcatggaacttaatgtggaaaactgaaaagttttcctcagtgcgaatcagaaggcgatcagcgatcggtaatcatcattaacagcagtccaatgcccaatcccgatgggcccataattcaccagcgctaattgcccacatgaaatcgaagttcataattgctcggacatgttatgtagtccgcatctataagcaagaggaaccagcagagttctcgacaggcgtggcacgagatttgacgatgagatgaatgccccgccgggcggcggcacccaaaatagtctcatggagtcgagtcttccgcacctgatccccttggctcttcggccttgccccagcaacccaaataaataaatatttggacaaataaacatatgtgccgtggagctttgtctggtttaccttttggcttctcggtaattgctcctttggagattaccaacgatttctgaaacgaacgccatagaaggcgtgtttattcgcaggcataattttaaacattatgtagcattcccattaaggttactacaatatattacttcggagaggcactctcaaacaactcttcatctcaacaacaatttacaatttctaagggtatttgccaggccgacctccaaacattttcgtcccatcctttatttagtttattttgcctttcataattcacagccaaccgagcggcaaattagccaaaggaaggaggaggccagaggagggtgaccatgtcgggtaggcgggcccaatctctgccggcgcacatgttggagccagcgaagccgcaacgcggacgctgtgtagctgccatctgcttctcgtggaaggtgctcacctgcattgtgtcccatgtgctgctcgtgcttctcgtggtttcctattgcgtgggcggtgcctacctcttccagcatctcgaacgaccccacgaactagaggtgagtgggtgattttgctggaaggtctcaaatgctaaaaatccaaaatccccatgcaggtgaagcgagacatacagaatcttcgcgttaatctcacggagaatatctggctactgtccgacgacgcagtggtcctaagggaaagcgattggatggccaatgtcagcaagcacctggccaattttgaaaagcaaatccttacggccatcaaggccgacggctgggatggcgacgaggatctgcgcaagtcccagtggacctttgccggatccctgttctactcgattattgtgataacgaccataggtgagtatgttttttttaagcttatggattgagttcttcaaagtcatgtgtgagtaaacatgggaatttatttgcttagtctatacgtaaactatgcctacactaaggtgactacttccaactcagcctaagggaaaaaggagggttgagtgggaaagtaatagcttcagttccatatctttaacataacaccttccacttctaaaacacgaagctctagaccttcttactgagcttatcattcacttttctgggtgacgctgccacactcttagcactcttaccatcggccacagctggcgatttctcgtcatagccgaagcctcctcctagaggtggaaaacttccaccgtatccgagtccaccgttgcctactccaagttgacctaagcccagtcctcctgccagaccatagccctcggtgtactgaggtccaccgaactgttggtttgctgggtactgtcccaatcctgggaactgggcacctgcgcccgcgaattggcttccaccgaagtcgccacctggataggagccgtaagggtattgcccattgccaggaaattggttgaggccaagtccattactggggaagttgttaaacccaccacccacgctggctccggggaatccagctccgggaagtccctgtcctactcctccgtatccgcctggatatccactaatgccattttgagctccagagaatccaccatagcctggctgatagggagtggggtatagctgcggtctccctatgattccggtgggtccgccaggtccgactagcactccggggtttccgttatagcctccaagtcctccgaactgtccggcattggtctgaccaccgtatggattaaactgacgggtgcctacgttgggagtgtccgatgacctggtgggctccacatcggcatagtcctctatctcatcattctccggttcgcccggaaaaggtcttcgagtcgtgggctcccgcctcagcttttcgtcgtacgagttccttatgggggaactgcgattgatgtcccgaaaagagcgctccctgcgattgtaggacctccagacccactgatctcgatctccatccgaagacttagccgccactgatccaagaaggcataggacgatgatgaggcaatagcttggcatgattggcacgctttgttcgattacacactgacccgatttttgcgcttgatcgcggcaagctcccgcaacagaatagttcgaaaatgcgaccggcacacactacttatataaccgcacccgagaaccaaaaaacaaatacaaccgccagagacatcagcggcgatgacgacgcacaaactcagtcaagcgacgagggcagccgcaggtattcgcattcggcggctgcccgaccaatgaatcaacgatcgtgccagacagaaatcttcagagatctgtggcccaagtcttggcccacgttgattcacctgaagcgcgaccagaccgcaatccgcccaggaaccaatgaggcaagcggatgagtcggacaattggttttgtccacacagcgatcacgttgaaatcgcataaatcacggtaattgaccaccaccgatcgacctaaaagcttattcctgggaatttccatgagttggaaaacatatgcttgcttcctttgcagggcgggagtcacaagtcaaagattcagctcggacacagtcaggtgagcagccagcacgtggttgacctctaaaaatgggttcattcgggtggtgatggctttcaaagggagcgagggtgtgtggagcgtgtcaaatgaaaccaaaagtggattgctgccatccaattgtttgtggtcaaaacaacagcaaggtcaaacgccactgaccgatcgtgattatcttttctggcatttcagatttttagattttaacgatgggaatttctcattattagtataccctaacacacagggggtgttggtgattagtgattactcataaaaggggaagtggtgcatggaaggttttcaatcgaaggccttaagcaaaccccaagaactctataaactctcctactttaaaagtatacagaaacctttttcactttaacccacttagagcattcaacttttcggctttcgagtggaagtatttggtataaatcagtttattagctctggctgttgatgatgggagcttagttttacgcttttcgtctgcacttttccccgatatggatttacggctagcacacaaatgggtttagtgaccgacgcccatcagatagaaccccgcgaagaggggcacagaatgctatctacgaatttgcacacttccgtaaaggccaaaagcggcagacttgaaatgccatgtttgctatttcgaagcgataatgggcttggcatgaacaaaaagaagtacatatggattggggattgggccttagcgggtcttagattcattagtatttcaagaactttgcggtcacgaggttgaaggtgaaaggtgactcaaaatcaatcttacctatctgcgaaagagtaattatgtgttccttgtcattctctggacaggctatggtcacatatcgccgcgtacggattggggcaaggtgacaacgattttctacgccattgtgggcattccgctgatgctcatctgcttgtccaacattggcgatgtcatggccacatcatttcggtgagttgacatcgatgagctgagaactaaatgagtatgttttcatacatatattccaatataggtttctgtactggagaatatgctgctatgtgtgcacccgcacggccaaacgtccgaggaatgcccgatcccggcagagatcgatgcgctctcagcgccatgcccgatcccagccgccgccctcgttccggcgctccatgaagatgacccaacggtctgggaatgactcgggtctgggtccttccatgggtcatgcctattcagatcccgacctgcgcaccatgggccggggctacgatgaccgcgagttcggacatcggagcagtggaggcggacgcaatcgtcgtcagcagcagcagcagcatttgcatcacgatcctcgccagcgtcacaccatttacggagatgggtacgaaactcagaccctgaacagatccaaccgctacagtagccggcaaagacaacgggatcggatgagggacagacacacggtagaaagggagcgctactctcgatcccacttggatgctggatccattgaggacttcggtgacatgcaacctcctgcgaaaagagctgccagtgtgcgatcggttcgatcgccacacaatcaggaatcttccaaagcgtccagagaactgcatcgtcttcactcggcacctgggagaagtagggccaagtccgtggatcccaggcacgtttcttcacattacgaagacgtcgacgaggacgtggtgaggaaaacaccaattataccaaataggtatgctttagatgacttcgggggcaacagaagacaagcagctccaaggagtcaatccatgcccagatctgctcaccaaaggcaacgccagaaggacagagaacgggaacgatctccacagccgccaccgcagagctcctatcgccaacagcatgatagacgagctggaagtctgggcaggcaatcatctcgctatggcaaccatctcgaacttcccgactatgatgctccaccgccgggacgggaccatcgacgggataggcgtggtcactcccagggtcgctacgaggactacgtggaagagagcttcgatgagggatccctttacggagacaataactacgaggattatccgcctgagcgccaccactcaaggagtcgagaaccaaaaagaaatcgccgaagagagcgggctgaacgtttgcccccttccccgagaatcatgtcaccaatgggatttccggtccagcggcaaatccgtcggcgacccagctacgattacgacgacgatgactctatgtacggggatgagtatggggactatggagatctgctgcccaaggatcgacctgtccccatttggttatgcgtctttctggtagtgagctacatccttggcggagctgttctttttgcgtactgggagaactggtccttcttggattccgcctacttttgcttcattacactgacaacaatcggtttgtgtttatcccaattccttgcgcactcttttcatctgcttttgcattacaggatttggtgactttgtccccgcgaaaggagtcaaggacgagtcggagcagtccatcgcctattgctcgctgtaccttcttttcggcattgccttgttggccatgagttttaacctggtccaggaggagttcattgccaatgtgaaggaggtagcccgccgtctgggcattcttaaggatgatgacgacgagcaggatgaggattagtaatagatagatagatagttatgacatctgttttttcctaaatatgttggatgctctaattataaggaacacactttgaaagatggatatttaatatgtttaaatgttttatgaaaaaaaacttcaacaaatttaaattcacaaacgagaatatgataagtaaaatagttaagattatattaattataaagcgcttccttggaaggcatgacatcattaaaaaaccaaattcacttcttccctaaaaaatagtatcgaagtttaagaataccttctgatatatcttaaacctgcacttgaactaaagatttccttaactttacatagcatactgagtttatttaaataataaatgtacgaaattccaaagattgatatacagataaaatgaatatccagaagagccaaacaaacacagcgatccgaaatccactaacataaacgggttactgggaaggggagactactactgtcatcgaatgcaatcaggctacgttttctttgttgtgctaaaaatattgaaaataaaagcaatgataatatatccccaccctttatttgttaagtcattagcggacttgcacttgacttaccctgacgaaggcgggagaacctcgaggtgacgttttactgggtgtcagggaacgtgacaacgagctgctgcgttttccaccagtagctacgggtggctttagggcgttcgaattggaattgcgggtggtgccgcacccacgcttcacggtgacaccatccacgggctcaatgggcgtggagttcattatggtttcagtttcggacagctcctggacggaatgcatggagacgtcatgctcaccctcgctgcactacggattggaaacataaaagttggtgcttttcaacatacaaggttgaaggattttaggttacctcatctatagtggccgtggtgtccagatctgaccagtccagctcttggcgatagcgcctcacaatttcctgatgtggcgacgtggccacg

SEQ ID NO: 19673 - DNA, 2190 bp, DROSOPHILA
atgtcgggtaggcgggcccaatctctgccggcgcacatgttggagccagcgaagccgcaacgcggacgctgtgtagctgccatctgcttctcgtggaaggtgctcacctgcattgtgtcccatgtgctgctcgtgcttctcgtggtttcctattgcgtgggcggtgcctacctcttccagcatctcgaacgaccccacgaactagaggtgaagcgagacatacagaatcttcgcgttaatctcacggagaatatctggctactgtccgacgacgcagtggtcctaagggaaagcgattggatggccaatgtcagcaagcacctggccaattttgaaaagcaaatccttacggccatcaaggccgacggctgggatggcgacgaggatctgcgcaagtcccagtggacctttgccggatccctgttctactcgattattgtgataacgaccataggctatggtcacatatcgccgcgtacggattggggcaaggtgacaacgattttctacgccattgtgggcattccgctgatgctcatctgcttgtccaacattggcgatgtcatggccacatcatttcggtttctgtactggagaatatgctgctatgtgtgcacccgcacggccaaacgtccgaggaatgcccgatcccggcagagatcgatgcgctctcagcgccatgcccgatcccagccgccgccctcgttccggcgctccatgaagatgacccaacggtctgggaatgactcgggtctgggtccttccatgggtcatgcctattcagatcccgacctgcgcaccatgggccggggctacgatgaccgcgagttcggacatcggagcagtggaggcggacgcaatcgtcgtcagcagcagcagcagcatttgcatcacgatcctcgccagcgtcacaccatttacggagatgggtacgaaactcagaccctgaacagatccaaccgctacagtagccggcaaagacaacgggatcggatgagggacagacacacggtagaaagggagcgctactctcgatcccacttggatgctggatccattgaggacttcggtgacatgcaacctcctgcgaaaagagctgccagtgtgcgatcggttcgatcgccacacaatcaggaatcttccaaagcgtccagagaactgcatcgtcttcactcggcacctgggagaagtagggccaagtccgtggatcccaggcacgtttcttcacattacgaagacgtcgacgaggacgtggtgaggaaaacaccaattataccaaataggtatgctttagatgacttcgggggcaacagaagacaagcagctccaaggagtcaatccatgcccagatctgctcaccaaaggcaacgccagaaggacagagaacgggaacgatctccacagccgccaccgcagagctcctatcgccaacagcatgatagacgagctggaagtctgggcaggcaatcatctcgctatggcaaccatctcgaacttcccgactatgatgctccaccgccgggacgggaccatcgacgggataggcgtggtcactcccagggtcgctacgaggactacgtggaagagagcttcgatgagggatccctttacggagacaataactacgaggattatccgcctgagcgccaccactcaaggagtcgagaaccaaaaagaaatcgccgaagagagcgggctgaacgtttgcccccttccccgagaatcatgtcaccaatgggatttccggtccagcggcaaatccgtcggcgacccagctacgattacgacgacgatgactctatgtacggggatgagtatggggactatggagatctgctgcccaaggatcgacctgtccccatttggttatgcgtctttctggtagtgagctacatccttggcggagctgttctttttgcgtactgggagaactggtccttcttggattccgcctacttttgcttcattacactgacaacaatcggatttggtgactttgtccccgcgaaaggagtcaaggacgagtcggagcagtccatcgcctattgctcgctgtaccttcttttcggcattgccttgttggccatgagttttaacctggtccaggaggagttcattgccaatgtgaaggaggtagcccgccgtctgggcattcttaaggatgatgacgacgagcaggatgaggattag

SEQ ID NO: 19674 - protein, 729 aa, DROSOPHILA
MSGRRAQSLPAHMLEPAKPQRGRCVAAICFSWKVLTCIVSHVLLVLLVVSYCVGGAYLFQHLERPHELEVKRDIQNLRVNLTENIWLLSDDAVVLRESDWMANVSKHLANFEKQILTAIKADGWDGDEDLRKSQWTFAGSLFYSIIVITTIGYGHISPRTDWGKVTTIFYAIVGIPLMLICLSNIGDVMATSFRFLYWRICCYVCTRTAKRPRNARSRQRSMRSQRHARSQPPPSFRRSMKMTQRSGNDSGLGPSMGHAYSDPDLRTMGRGYDDREFGHRSSGGGRNRRQQQQQHLHHDPRQRHTIYGDGYETQTLNRSNRYSSRQRQRDRMRDRHTVERERYSRSHLDAGSIEDFGDMQPPAKRAASVRSVRSPHNQESSKASRELHRLHSAPGRSRAKSVDPRHVSSHYEDVDEDVVRKTPIIPNRYALDDFGGNRRQAAPRSQSMPRSAHQRQRQKDRERERSPQPPPQSSYRQQHDRRAGSLGRQSSRYGNHLELPDYDAPPPGRDHRRDRRGHSQGRYEDYVEESFDEGSLYGDNNYEDYPPERHHSRSREPKRNRRRERAERLPPSPRIMSPMGFPVQRQIRRRPSYDYDDDDSMYGDEYGDYGDLLPKDRPVPIWLCVFLVVSYILGGAVLFAYWENWSFLDSAYFCFITLTTIGFGDFVPAKGVKDESEQSIAYCSLYLLFGIALLAMSFNLVQEEFIANVKEVARRLGILKDDDDEQDED

SEQ ID NO: 19675 - DNA, 4761 bp, DROSOPHILA
caaattatgcatttgaattctctagaaatgagtaccaaacaacccataaattcaaaatcaatgcttattgtacatctataagtattttatatttattttggaatttatcataaattttgcttgaattttaaatacacatccatagatcgtcattagctattctcaattcagttttaaataggtcgtaacataataagtttgacttgcaagcaaaacagaaacgaacaaaatgtatctaaaaaatgtgaatacttaagtgaatcaatatattttatatgctgtcttcatgtacatagataatagataatatataacaattacgattacaaaaaaacacgacattttatgtgagtgcaggacagtgacggcggaaaaagggggtcgggacatggaacaggggggagggaggagagggggacagtggagcagtgggcgtaggagcacagcttggatgaaaaatgaatttcgctttcttgttgtctctctggtcgaggcgacgagagataaagttctataatgtaagcgttaaatatattatttatattatgtttgttatatatataagatcgtatatatgtgagtgtgtgtgtgtgtgtgtgttgcgtgtgcgagggagtggggttattcctatatcgttttaatgacttaaagaactagaaaacatcatcatcagcagcagcagcagcagcatcatcgtcatcagtgtcatccctttcgcctgattaatctgggttagtatcagaatcgaattattccacaggacagagacagacacacaataatttagtctagatacttgtatttggaggcatatatcgtgcgattaagatgtcctgtctacttgatccgctgcagctgcgtgtcgaaggcatcgtgggccgctttagttttccttttgtttttttgttttctcctttttgtttggtttttttttcactttcagtttagttccaagttcggttttgttccgtttataaatattgtttatgcattgtgtgttgtttctgtgttatcattacagtaattatttgtaataaagacgacggcattctaggaattgtttatgcacaaaagcaaatagttattagttccatgctccaatgctagctttagtttcatgtttttctttactttcatttcgtgttaagctatttcaatgtttattaagtgttctttctccatctccctctctctggcgcggctatcatcatctttttctgtcccagttaagcaggatgagtgctgcttgagttcgtggttgattgattgattctccttttgatttgattagatccccggaaagcagagtgtcacttagtacctgctgttgttaaactgcgaattgatggccgtattaacggccgaggaggctgcttcctggacgtgctggttgcgcagaaactcggtggtgaactccgcctgggccttggccatactggcccctgtgctgcggtagatcgagtgaatctttgtgatcatcagcacattggccacggccaccgctgtgaaacagaatgccacgttcaacagcagaatgccgacgataatacccgacgcttgcccatcgaactgcccgatggccgtaataaagccacagtagcccatcttgttgaagcccaccgcctgcacaatcgagtacagcgtttgaaagaagtagatgaagaagaagaccatgaagttgaagctcgaatcgttgcggaatgccttgtacgccggtcggaacctgaaaattaatcacacatcatcacattattcatgttttaagaatcttccaggtataaactcaccagcagacataggaggcgggcgagaagagcatcgtgtagaagatggccaggaagaaggtctcgaattcgccagcgtggaacagcaaaattagaccgcctatcacgttggccaacaacgtcatggtgtaaactgtcggagaaagtattcaaaatagacacatacaatcagcataatgctataatctgtaggggaaagcattattatatactatatactatgcatgcagtaaataatgctagaaatgcatttaaaaactatcttaatactgataacatgtaaatcaaacaaatttcatgctcccctctttgcaagcatattctgcacaaaggcacgcacacatccaagaccattagccattcagctatatctgattaataatggcatcggcctgtagacgacacgcgatgactaattccacaacctatggcaccgcttatcagcgaaaacatgtagaaaacacagccataaagaaccaatactcacaaatccaaatgtaatacaatcgcttgaccagtttctggaactcgggcggtatctccacctcgaagtcctggtagaagcacggctttacacaaaagttatccggcagcggtggccagttgttcagctgcggcacattgccctgtagctgctgctcgcggcggtccagttcggcggccttgcggtccaactcctcctgccggcgctggatacaatgaaaatcatatgattatcgactgttttatatatacattttgtatgacttaataaattggccgtatatggtaaatactttaaatcttattcatttacatatttgggaaaacaaaggcgaaattcaatgataggaattcacatccaaatcttgagtttgttaaacttctatcttaacctcaggcatttggcctatctataggaaatattctgtacaagaataaagtgcaaacttaagcctccaaatcatatgtatttagatctactaactagtatttcttgaattattgtgtagggccgaagaagccaagtaaatcaagagaaaccgcagtttgcacagtgaagactcggcgcggcagccgcttctagtctcaaccagataaatgctccaaagcggatatatcgttggcagatcgagataagcccgcttatctttctgactcttgatggagagtaaaatgtgatatgcctgccctaatcccggcactctagcaaagtgattactgtacagacttttagggcaaacttttagtgtaactgtgtggtgtggtccatttcgattgtttccgagtatttggatgtacatatgcggtttttggagtattgcggatgtggccatgccggcacagcacaccgcagagtgctcactgttgtgtgggcggtaacgcgagacgaccggccaagtgggttacctgcagctcctccgaggtgatctgtatgctggtgctaggcgccgaggcgcccagggaactggtctgcgggggcggaatgttctgcgatagcggctggaccaccgccgccgtgttcgttgagttgatctgcagctgcggcttggcctgctcctcgaatggattgtaatcctcaagagagacaagggcggcgccgctctggagtcgtcgtgcctgctggatggcggggtcctgcgggggaaaaccgggaaatcccaatcagaaaccaattcattcaacatatgtgacgaatgcacccaacacacacacacactacactcacaggcacgcacaccaacaccccacctttgcgtacgtgtgcgtgtgtgtgcgatgggttttttcttcggcttccgcgctctctctcctagctcttctatcgcctcaccgcaaacggattgtccagattgggctccccgaagggattctcgtcgagaccggagccggacatgggaattctactttggatacggctgttcaatgaccagaaaaacgcactgactcgcactttgcttttcgctgtgtatattttccctaagactctgctcagttatcgatgtcggttttagtgatggttcagcatcgataagctttcgttgggaatcaaagtgtaggcctcaaatatcgaaagaattactttaaagaattaatgttatttgaattacatattaaattcattttggcagaaaaacttattatttaacacatttaacattaatctagaattctgaaaaatgtgaataactggtatacaatggtctgattttttaggacctattaatacattttattaaaatgatagcaaaaagaaaagattctatatacaattggatgtaaaccagcagttatcatatgaattttaaatttaaatggcaacaatcgtgccaatcggaactgctccagctgaaccagctgcgtggaaccagttcccatccctggggccgccattccgcaattggaattctagtgtcttgggttgcgattcgattcatttaccgctgcccgcgtctccaattcggttgtgtgcgattctgtctgctccgcatccaagtcaaacatccaatccttgcaagaatgtcgaagcccagctacaaagtcggtgagttgcgttataaataaacccaaacggatggcaaactctcgaatcgaatctccggccggcaacaggcgacatgtgcgggtgaattgcatctattcatgagcacatgtttctgaggttaaaagagagacaaaacagaggagagcacgttgttgctggggcaaaaaacgtagaaattcagaccgtatggtgtataaatcaacagtgcctgcttatctgaccctatctcccttttatatcccactcgacagccgatatcagtctggcggaatggggacgcaaggcgatcattattgcggagaacgagatgcccggtctgatggcctgcaggaagaagtacggcccatctaagcccctcaagggcgcccgcatcaccggctgcctgcacatgaccgtccagaccgccgtgctcatcgagaccctcgtcgaactgggcgctcaggtgggttcagt

SEQ ID NO: 19676 - DNA, 1447 bp, DROSOPHILA
aactgagcagagtcttagggaaaatatacacagcgaaaagcaaagtgcgagtcagtgcgtttttctggtcattgaacagccgtatccaaagtagaattcccatgtccggctccggtctcgacgagaatcccttcggggagcccaatctggacaatccgtttgcggaccccgccatccagcaggcacgacgactccagagcggcgccgcccttgtctctcttgaggattacaatccattcgaggagcaggccaagccgcagctgcagatcaactcaacgaacacggcggcggtggtccagccgctatcgcagaacattccgcccccgcagaccagttccctgggcgcctcggcgcctagcaccagcatacagatcacctcggaggagctgcagcgccggcaggaggagttggaccgcaaggccgccgaactggaccgccgcgagcagcagctacagggcaatgtgccgcagctgaacaactggccaccgctgccggataacttttgtgtaaagccgtgcttctaccaggacttcgaggtggagataccgcccgagttccagaaactggtcaagcgattgtattacatttggattttttacaccatgacgttgttggccaacgtgataggcggtctaattttgctgttccacgctggcgaattcgagaccttcttcctggccatcttctacacgatgctcttctcgcccgcctcctatgtctgctggttccgaccggcgtacaaggcattccgcaacgattcgagcttcaacttcatggtcttcttcttcatctacttctttcaaacgctgtactcgattgtgcaggcggtgggcttcaacaagatgggctactgtggctttattacggccatcgggcagttcgatgggcaagcgtcgggtattatcgtcggcattctgctgttgaacgtggcattctgtttcacagcggtggccgtggccaatgtgctgatgatcacaaagattcactcgatctaccgcagcacaggggccagtatggccaaggcccaggcggagttcaccaccgagtttctgcgcaaccagcacgtccaggaagcagcctcctcggccgttaatacggccatcaattcgcagtttaacaacagcaggtactaagtgacactctgctttccggggatctaatcaaatcaaaaggagaatcaatcaatcaaccacgaactcaagcagcactcatcctgcttaactgggacagaaaaagatgatgatagccgcgccagagagagggagatggagaaagaacacttaataaacattgaaatagcttaacacgaaatgaaagtaaagaaaaacatgaaactaaagctagcattggagcatggaactaataactatttgcttttgtgcataaacaattcctagaatgccgtcgtctttattacaaataattactgtaatgataacacagaaac

SEQ ID NO: 19677 - protein, 343 aa, DROSOPHILA
MSGSGLDENPFGEPNLDNPFADPAIQQARRLQSGAALVSLEDYNPFEEQAKPQLQINSTNTAAVVQPLSQNIPPPQTSSLGASAPSTSIQITSEELQRRQEELDRKAAELDRREQQLQGNVPQLNNWPPLPDNFCVKPCFYQDFEVEIPPEFQKLVKRLYYIWIFYTMTLLANVIGGLILLFHAGEFETFFLAIFYTMLFSPASYVCWFRPAYKAFRNDSSFNFMVFFFIYFFQTLYSIVQAVGFNKMGYCGFITAIGQFDGQASGIIVGILLLNVAFCFTAVAVANVLMITKIHSIYRSTGASMAKAQAEFTTEFLRNQHVQEAASSAVNTAINSQFNNSRY

SEQ ID NO: 19678 - DNA, 4813 bp, DROSOPHILA
tttatatttcaccgaattgacgaagatttttataacctaacgactaccgatatttatttagccaaacaatgaagtacaattttatttgattgagtttttcgttcaaactataaatcttcttgtataattccctaacgatttttatgatgaagtgcttggcatgcctaagttaagctttttttacatgaaaccaagtttcggactaaaatctatgagcatagttataaatgtaaggacacgtattctctttaattacgattactttgaattgtacattaatctatctgattgtaacttttccacaaccaaaaaattctggcacaactgcatatgattctttcgattcgttgtcgggctacgttttgtgaatcgtttataatgcggatctatatacaaacatatatatttctttaaaaataatgtattctatatgtagacgaaagcattacaccaaaacattatattgataaaaaatgtttgaggactctaccacattgttttctggagagaaagaactttattacggtgtaaaatgttcattgtattcataaataaacgtgaagttgttgaatatgaagtatgatttggaagtgaactaataaaaattaaaaaaaaaacacttggctggggttaggaaggtctctttattgttgcataagcatcagttctcaaatattgttgaatcctgacatgttccgaattcttgtaatcctggatcgcaatattggccattttcttattcataactgacgtattagccagattttcgtcattgatggaacggatagaactcgacaacatttttacattgtattgagccggaaagtatgcttctgttttggttttcatacttggctctctcaaaatatgcataattcaaagtaaagctttctttctttccactttctcatgctctggctagtttaccgggcttacaagcagccagaggttcaacgtctgcagcgacttggtcgacaactcagttcagttggtgcacttgacgcgtctggttctgcttcccaccactgcggattaagccaagcctgacgaaggccaagtccaagaaccttctacaagaagcaaacgagcggagatggattatcgtctagtgctggtatgtcatcattacgggtgtgctaactgcacactttttctatggctcgctggtcaagttcgttgcccaagtcttttgttttgcaatgcgttaacattggcgagctaaccgcttacgtttactgttactcagtccctgggaaccgcccgattctggagcatgctaatgaattaagctaaccaaagagcagcgtacgttccgatccgttctgccccttcttctagttcggtcttctaactactggcttttggccgggtgccgagcaactttcccgttaggcgtgtggcacgcatattgggaacagagcgccaacaagttctttcctgaccagatcaaatcagcctgtcttggccccgaaaggcggttaggtcttcattctgcaattgagctaccaatatttacctatgcaaattgtgctctttccatttgggagctctctcgcagggcaaacaagtttctgcctcattagaagggaaaaaacaaaagaacgagcttagcggctgacccgattttggattccccgacgccgcattcaaattacgctgtgaaccgtgtcacaaagagagaaattccacagcttcttggcactgcagccgcccaccgatctgtaccacttgacctggattactcgggtctgtccgtggaacttttggtttcattgagatgccactgcccagaacttcagggaaagttccctcgaacaattaatggtcaagtgagcacagcggagagatgctgaagtggcgtctcgatcgcagttgctgcctcggtttgtttatcttcacaaaaacagaaacagaaactttcgcgctttcgccaaacaacaaaacatcgaaaagtgtatgtatggccgggtaaaagatctcgattctttttccggacaatattgggccattcaccgactcttctgggcaattaactcgactccagacggctacggccactgattgtacctccactgtgactatcttttgttttgtagaaaattctcagctttctgctgctggcccaattgggtttctcccagccgcagcagcagtcgccatctgactacggtgaggagcagcctccggagggttattacgccttcgtcgagtccccgaatgcggtgcctcccaaggtcaggccgccaccttacacctttgtaaatgcggagtgcaaggacgtggccgccggcaagaagtctgccgtgtccgttcacaacatttgcggagatctaaacaagggtcagatacccaagaatccgctgggacaaaatgtactcggggagccctatcccttgtaggtgaaaatatttgcgtaacaaatttcagacatctctaatgtacacctcctccacagcgaacttattcgcaaccaaacgctgaagttcctttcgaaaactttgcccgttctaaaggccgacgataccctacccaaggtcacccagatcattcgagatgaacccgtggaacagctggacagcaacaacatcgacaggccctatcccgcaggaggttccactcgcgtccgccgcagcctgccggagggcgtggagtccaacgagtacagctacttcgatcccgccctggacgaggaggagcaacacaagcaaagggatcggaataaccagcagagaagggccgccgaggagaggaagccaaggaaattctgcgatggcggtggagtgtaagtttttagcatggaaacgggggagtagagttattccaatcttaactgctacataaatgaaagataaatatatcgtatttcttaaagcacgggaaaggcgcgcatataaagctaaagaggtcaccacttaaaaattatgagtcatctttataaaattatagattcgaagaattatcaaggcaaagaacccaaatgagcttgtcatttcactttccacatcataatgtaaagccatacaactaaagaagctcaacactttaatcgacatccatagatattgtagaataggttaagagaggagtacatcatggggtattcaactgcttagcattttgacgacacaactgcgtgcaggtcaattaataaaagatttttaaacttttaactccacccacagattttgcaccttatacagggcaattcagggagacaccggaggagcagcccctgccacgcccactgcggaaaggcgcgaggaggtgggtcccatccggtacgagggtcctcccactccctgtcccgccaaggtagagtacgctactcccgtcttcgctaagaactaccaaggcgcctggcgttatgtggtccagattccctatgagggctacttcacccagacggtggaggtgacgcgttgcattcaggcacgctgtcactacctggacggcggttgcttgtcgtcaccacgctgggtaagcctgttggtggcggagatcttctaccccaatgcggaggacacagtgcccaccagctcgaccaccactcaggccccttctgtgcaggatttccaggcctaccagcagtacctgcagaagagggcaggcgtggctaccgcctccgacggaacctcgtctggagcagccggccccgcggcgcaggtggacgcccactgcgatggacacgatgaactgggctgcttccaggtgcgtctctactacgactggttcctcatccccggctcttgcaagtgctggcgcccggactacttcgccaagtacgtgcgccggaagtcggtggccgagttgtgaacacttcctggacaggattttcgaaggaaatccttagaataagactaagttctagcctttagaggaacacaactttgaggtgaaaggctcattctagtaatccacccgggtgccccacagccctatacggatcacgcagagtttgcagttcgtgcatctaccagatacaatcttaacctaggcggttagctccctctttcgactgattaagccaagagcagtgcatttctactaataaatacgtttctacctaatcataagagagcctctctattcggcactttgctgagactgcgatgtggtattggcctagcctgtgtgtgttagcctcctggaactctctcagctgcgcttgtgttggaagatccaccgaaaacccacagaaaccagtcgcgcaagttgcgcatgcgtgcgagactcgggcccaaaacctcggccgctgatctagtgtgcagtcaatataaccagttggttggctttgggtgttttggccggggatccaagcgaccgagctgcattacatacacagaatagttgcagagtttgcgcagaagccttgacgaacggcctcaaaaggctgccagacgagccgcggactcggatttcaggagccaattttccgcatagcttgggtaagtcagccaaatggagggccgtctctttgtttataaacaaaataagcaaccaaagtggactaaggtacagatgcagctgcgataataacattgagtaaacttggtacttgaaggcaagaaactaacaaaatcattcatttgcacgtctcagttgagcccatttaaataaaattgtagagtttgaaatcaagtaattttgtgtggcgactagacgattttataaaaataaatttgttaaaactgcttgtaaataagtgggaaatatcttagctcagagattcagtcctaaggcagcgtgccagattcacacacattccatttggagttacccatgcaaatgagctcctattaatataagttatgca

SEQ ID NO: 19679 - DNA, 1371 bp, DROSOPHILA
acgcgtctggttctgcttcccaccactgcggattaagccaagcctgacgaaggccaagtccaagaaccttctacaagaagcaaacgagcggagatggattatcgtctagtgctgaaaattctcagctttctgctgctggcccaattgggtttctcccagccgcagcagcagtcgccatctgactacggtgaggagcagcctccggagggttattacgccttcgtcgagtccccgaatgcggtgcctcccaaggtcaggccgccaccttacacctttgtaaatgcggagtgcaaggacgtggccgccggcaagaagtctgccgtgtccgttcacaacatttgcggagatctaaacaagggtcagatacccaagaatccgctgggacaaaatgtactcggggagccctatcccttcgaacttattcgcaaccaaacgctgaagttcctttcgaaaactttgcccgttctaaaggccgacgataccctacccaaggtcacccagatcattcgagatgaacccgtggaacagctggacagcaacaacatcgacaggccctatcccgcaggaggttccactcgcgtccgccgcagcctgccggagggcgtggagtccaacgagtacagctacttcgatcccgccctggacgaggaggagcaacacaagcaaagggatcggaataaccagcagagaagggccgccgaggagaggaagccaaggaaattctgcgatggcggtggagtattttgcaccttatacagggcaattcagggagacaccggaggagcagcccctgccacgcccactgcggaaaggcgcgaggaggtgggtcccatccggtacgagggtcctcccactccctgtcccgccaaggtagagtacgctactcccgtcttcgctaagaactaccaaggcgcctggcgttatgtggtccagattccctatgagggctacttcacccagacggtggaggtgacgcgttgcattcaggcacgctgtcactacctggacggcggttgcttgtcgtcaccacgctgggtaagcctgttggtggcggagatcttctaccccaatgcggaggacacagtgcccaccagctcgaccaccactcaggccccttctgtgcaggatttccaggcctaccagcagtacctgcagaagagggcaggcgtggctaccgcctccgacggaacctcgtctggagcagccggccccgcggcgcaggtggacgcccactgcgatggacacgatgaactgggctgcttccaggtgcgtctctactacgactggttcctcatccccggctcttgcaagtgctggcgcccggactacttcgccaagtacgtgcgccggaagtcggtggccgagttgtga

SEQ ID NO: 19680 - protein, 425 aa, DROSOPHILA
MDYRLVLKILSFLLLAQLGFSQPQQQSPSDYGEEQPPEGYYAFVESPNAVPPKVRPPPYTFVNAECKDVAAGKKSAVSVHNICGDLNKGQIPKNPLGQNVLGEPYPFELIRNQTLKFLSKTLPVLKADDTLPKVTQIIRDEPVEQLDSNNIDRPYPAGGSTRVRRSLPEGVESNEYSYFDPALDEEEQHKQRDRNNQQRRAAEERKPRKFCDGGGVFCTLYRAIQGDTGGAAPATPTAERREEVGPIRYEGPPTPCPAKVEYATPVFAKNYQGAWRYVVQIPYEGYFTQTVEVTRCIQARCHYLDGGCLSSPRWVSLLVAEIFYPNAEDTVPTSSTTTQAPSVQDFQAYQQYLQKRAGVATASDGTSSGAAGPAAQVDAHCDGHDELGCFQVRLYYDWFLIPGSCKCWRPDYFAKYVRRKSVAEL

SEQ ID NO: 19681 - DNA, 4389 bp, DROSOPHILA
ggcgtacaaggttccataggtcgcctccaggtcggcgggtacgtgctggtgggtgtcctttccattgactgcctgtgggccgtcgtcctcgtggcccagtttcagattgtcattgaagagggcaataaactgggggcttgcccgctcggcggaagccgcgtcaatcattgtgttctgcagaggaagccaatttggttatgcacctattgcaagcaaacaaagacaatcgcactagcacagctgcagcgacaggtgataaccatgtccgatgcactgcttctccggattggagtgactaactttgtgggtatgaaggtcgcattgagactgaaaccagttattgttgctctcaaaatagggaactttatacttgatgtatatataaatatattgtttgctttttacctatatgcaaataaatgccactctgaattttgttgaaacttattgaattaggattttcttgcagtgtagttgcaatgcaattacaatgtaagccattaaaaactttcactaaacaactacgcacttaaacgatttgtctgaagtatcgaattgtcagtgcgacgtgtttctgcacagtggcttttattgacaaatttacttacagattcttaactcgttgcttttagctcaatgcatttttaattggtccacctattgcggctccaaacattactattcttataggacttagcaccgatttaaccgatttggccagtgtgaccgttttgaggcacaataggggcattcccataattttttaagcttaaacatatttttacaatgattcaattcaatataacatttaatataattttaaatatatattagagaataactttataaatccaaatatgctagaaactttatctcttagatgagatatgaatgtaatttctaattacagtgtacatggcctattaccatttatggcgccagtattttttaatcggcgagcactggtcacactgcttgcatataaaatttcgcaacagagcggcttgcagctttaatattttagtcgtaattaaatgcaatatgtttgtactataaacgccgtcggaagagcttaataatgagcttgagcattgtgagttactatggcagccagcagagcaagtgcggctactgcgcgggagcgaactgcagcctgtcgcacggtgagaacatgcaaaaccagtccaaaaaccaggtgcaatgtaccaattattgtggattcgtcataaatgacaggtatgcacgcgtatcagctggactgccgggactatcaggacctcatcgatcgcggctggcggcggtgcggctactactgctacaagctgcgcaaccaggagacctgctgcccctgctacacaatcaaatgtaatggcctggagttcaagctctccaagtcgaacaagcgcatacttcgccgcataaatcgatttttgcgcgacggcaagcgagagtccaaaccggaagccggcgacggtgacggggaagccgatgccgattacgccatagtggctcccgaggtcacggccagcgaaccgcaaccccagctgccagataagagtccccctgttatcaatgtcgagcaagttgcatcactggcaacggctcagaggaagccgacgaagcaggcaactgctgccgcggtggaagctcctacgttggggtccaacaaatgtgcgtatgctccttaatgccttaatgccacagtaatatatatattatttattatattagcatcactcttatcttcatcagccgcagcaccgatctcaaacaagccgtgcaagaaggccaagcagatgcgattggatcgacggctggccaagctgggagactcggcctcctactcaacgaaatcccttacccaggaaaagacacttcgcgacttcttgaacacggacagcgagacaaacaaacatcggctaaaggtgcgttgcgaataaatgtggatagaataattagttagaccgtttgcaaaactaagctggatagcgtgaacctatgtacatatgttgataagggtttacactgtatattgcgcctatgtgtttcctgtgtccgttccccgagtataagtctcccgctacatgtagacacatctgtctttgtgctgtttgtgttcttgcagatcgtgttagtcgcttcctcagacacagagcgcacttgtgccgatgcagtgatcgcgttgtatcgcaaataccaaataaccgttcataatgataaccccgcacgcctcaccctagctagtatgcagcggttcttggtcaaatcgcctcttaaggtaattataaacgagtattcatctttgccccaaaaatgtattcgcagctgcgcttaattcacgtctacgacgacgagttccggcggaccctgccccagagttttgcgctctataagaagtatcagatatcgatacataatgatccgccaaaggatcaggacgcgtacaaggagcatctgcaggcgactcccctacaggtttttctctataataattcatacatttaaaagctttacttctaacctcataattccgggacgtttttgcttgcagaatgagaaaccctgggatggtcccgaaatgggctacggttcgtttcatcagcagtactggctggacgacaagttgattgccgtcggcgtgattgacattctgccgggttgtgtaagctcggtgtactttttctacgatccggactatagctttttatcgcttggcacatatggttcactcaggtaaagcaagattccgagcaaagaaagataaaactgcatagaagaaattcttacagggaaattgaattggtgcagtcgctcgccgagaaggtgccttctctcaagtattactatatgggtttctacatacactcctgtcccaaaatgcgctacaagggcaagttgtccccctcttacttgctgtgcccggagacctatgaatggctaccgctcaccgatggtaagtttgcgattttcttgttaatattctgtactaataacaaacacgtatatattcagttattcgtgctaagctagacgaacataaataccagcgcttaaacgaagatcctgcagctagggatgtgaatgagtttttgatggagcatttggacgaagttaagctgctcttgggtggaagaacccgcacagactacaagcactttaggcaggcatgtttattatcattaacatcagtggttcataatctaatatacgttttatttacagctgcgtgggaccgtctccgatgacgatatcattattgagtacagcaagctcgtgggaaaagagtgtgctcggcgcatgctatacgtgaagtaaagttgccattatttgaattttgaattaaatgccgttcgcaatagcaatatgttgaaaatataaaatattttaataattccaccggtcttgcacccaatatagttgtaatcattagcagacacttgattaccccttgttgtttgcctacaccaggtaagcgccactgttggaatgtaaagaataatatgctcgtcattcgtacatatttttctgaaaagctgacagctttccactcataatcgcctcttatcagaaacaagcagctaaatgcatcaattaagctttatgggctggcaacattctgtgttggtacaagtcggataaccgctggagataatgtactttataagccactccagggtgagatagttggccaggaagccaattgttgccgtgaaatcaagtcgtttacagcagtggaacaagtcggatgtgtccaaagggttcggattaccaactgtctacgctggaaagagtgttcttgcccaaggtgaggagtgtgagaagttatttgcgtctgaagacgagcgcttaattataaataaacttgtgtcaataatatctgttctgctctggcttttcaccggcattcgccaagtgcgctaattaaacaaaaattaaattataaaacaacggtcaagtaagtttttacagcacgtgtattttatggtgatatttttttttccaaatttatgaatactatcattcgccagtttgggttgggatttaccaaacaaattagtaatatgaatatcggggtggtaatatttttgaattattagtcaccgtgtttattggcttacattttagcacaattttgtgagatttgttgttaacaaatttctcggcacattttcgttgcgccaatcgcatgcgatttttggcacgctatcagaaagcgttaaaaaaaggcagttcgacgttgagcttcaaccgacggcagcaatttaaacaatttttaaccgttttaaccggtgctgccgccgctgaaaacgagactgcgactgcggcaggtggaagttttgcttaaatcgtcgccccaagtagatgtatatatgccattggcaaccgccg

SEQ ID NO: 19682 - DNA, 1586 bp, DROSOPHILA
cggcttgcagctttaatattttagtcgtaattaaatgcaatatgtttgtactataaacgccgtcggaagagcttaataatgagcttgagcattgtgagttactatggcagccagcagagcaagtgcggctactgcgcgggagcgaactgcagcctgtcgcacggtatgcacgcgtatcagctggactgccgggactatcaggacctcatcgatcgcggctggcggcggtgcggctactactgctacaagctgcgcaaccaggagacctgctgcccctgctacacaatcaaatgtaatggcctggagttcaagctctccaagtcgaacaagcgcatacttcgccgcataaatcgatttttgcgcgacggcaagcgagagtccaaaccggaagccggcgacggtgacggggaagccgatgccgattacgccatagtggctcccgaggtcacggccagcgaaccgcaaccccagctgccagataagagtccccctgttatcaatgtcgagcaagttgcatcactggcaacggctcagaggaagccgacgaagcaggcaactgctgccgcggtggaagctcctacgttggggtccaacaaatccgcagcaccgatctcaaacaagccgtgcaagaaggccaagcagatgcgattggatcgacggctggccaagctgggagactcggcctcctactcaacgaaatcccttacccaggaaaagacacttcgcgacttcttgaacacggacagcgagacaaacaaacatcggctaaagctgcgcttaattcacgtctacgacgacgagttccggcggaccctgccccagagttttgcgctctataagaagtatcagatatcgatacataatgatccgccaaaggatcaggacgcgtacaaggagcatctgcaggcgactcccctacagaatgagaaaccctgggatggtcccgaaatgggctacggttcgtttcatcagcagtactggctggacgacaagttgattgccgtcggcgtgattgacattctgccgggttgtgtaagctcggtgtactttttctacgatccggactatagctttttatcgcttggcacatatggttcactcagggaaattgaattggtgcagtcgctcgccgagaaggtgccttctctcaagtattactatatgggtttctacatacactcctgtcccaaaatgcgctacaagggcaagttgtccccctcttacttgctgtgcccggagacctatgaatggctaccgctcaccgatgttattcgtgctaagctagacgaacataaataccagcgcttaaacgaagatcctgcagctagggatgtgaatgagtttttgatggagcatttggacgaagttaagctgctcttgggtggaagaacccgcacagactacaagcactttaggcagctgcgtgggaccgtctccgatgacgatatcattattgagtacagcaagctcgtgggaaaagagtgtgctcggcgcatgctatacgtgaagtaaagttgccattatttgaattttgaattaaatgccgttcgcaatagcaatatgttgaaaatataaaatattttaat

SEQ ID NO: 19683 - protein, 477 aa, DROSOPHILA
MSLSIVSYYGSQQSKCGYCAGANCSLSHGMHAYQLDCRDYQDLIDRGWRRCGYYCYKLRNQETCCPCYTIKCNGLEFKLSKSNKRILRRINRFLRDGKRESKPEAGDGDGEADADYAIVAPEVTASEPQPQLPDKSPPVINVEQVASLATAQRKPTKQATAAAVEAPTLGSNKSAAPISNKPCKKAKQMRLDRRLAKLGDSASYSTKSLTQEKTLRDFLNTDSETNKHRLKLRLIHVYDDEFRRTLPQSFALYKKYQISIHNDPPKDQDAYKEHLQATPLQNEKPWDGPEMGYGSFHQQYWLDDKLIAVGVIDILPGCVSSVYFFYDPDYSFLSLGTYGSLREIELVQSLAEKVPSLKYYYMGFYIHSCPKMRYKGKLSPSYLLCPETYEWLPLTDVIRAKLDEHKYQRLNEDPAARDVNEFLMEHLDEVKLLLGGRTRTDYKHFRQLRGTVSDDDIIIEYSKLVGKECARRMLYVK

SEQ ID NO: 19684 - DNA, 2684 bp, DROSOPHILA
tcctgattttcgcacaggatcagtggtctgaactgcagcaagaaaggctaaactttcaacgcgcccgcgtttttgaggccaatcgcagcctccagattctggccgacacctgggagcacggcggctacccactgcacattaatttggctgtgccgacacccaccgtcccaaaaccgaggcagatgtccgatctgctcagtcgggttcgcgagaagccgccgcttctgtcagacttgtacgaggcgcagcactctcattcccatccgcagttcctgcgtgccatgcccaacttcgtgctcagccagccctcgccggtcagccaatcctcggccgggctgggagacgccgacgtggtctactgacgaatcaatgctgctgcgtacattgtaaatagtgtattattaaacaacttgaactatgtaaagctatacgggattggggtagcggcgcatgtacttgttaagttgcttgtagttcaggttgctgcccggttggacgattccctggttcacggtcttcttcgcctcaaacttacggtccatgtagcacttgtagcagttctggaactggctgatctccttgtggcagtacttctccacgaattcgttgtctttcaagcaggcgaacagcacgcccatctcctggagacaggccacatcggatccggagtccgccttcccgctcacggtgttcttcagccgcagaggcagaatctcctggaagggcacgtccttctcgctttgaggcgctcggccgcgcgcggcaaacagggctccgggtacgcgcatctgaaaccccttggctctgtgagtccggtcatttcagtcaaaaaatacgattttacccacctcgtaatttccaccgactcctggacaactgaacagctgcttcagattacgtcacgaactggttcctgcttttggtggtgattgccagtacgtctgcagccctggtatttcgtttaacataagcatacggtcacacttagagtctccgtggaacaaaaggtaaataatcaacctgcgggcacgccaggagattcttcaaggatcaccgaagaccacgcgcacatggaagccgccgagcagctcgacgaggcggcagcaccagccgccctttgcgcgccttcgcgtgcagcctacgcggccgccgagcaggaagatccagacccagaccaggagcaggaccgaggccgggaatcgcccattggttcgttggagtgcgcccccaccctgagcagtcgcaagcggcagctgagtcgctttcatccataccacgggtccaatatccagttgggcgacgacgccacagtggcctaccggagagctagttttgccgacgccctgacattctcggagcgtccgctggcccctggggacatcttcttggtggagatcgaaaagatagagcgcggctggtcgggccatatgcgtcttggtctcaccgaactagcgcccaatgtgattcgcaccagcagcgagggaaaaaaggcgcctcaggagaatctggtttttctcgcgcaacccaagggacaaggcagcactcaacagagccatcaaggaactcaaggacaagctgtgtaccctacggcaagactccttcgacagattccttgaggagctggaacctggtgacccgcaacataatctgtggcaagtcacgcgtcatatcaggaggcctgcaaagaaggcgtcgccggtgcgaaaagcggacggctcttggtgccgctctgaagccgaaagagctgaagcgtttgcagatcacctccagaatgcattcacaccatttgacagatgcactggcgaagagcgtgctgcaaccaccaggttcctagagagtccatgtcctcctagcctgcccatagagcccgtcaccccagaagaggttgcgcaagagatcgcctccctaaaggctagcaaatccccaggactggatcgcatcgacgccacatcccttaaaatgctgccaccgccctgttcccagttgttggccaacatatacaacagatgcttctcactagggtacttcccgagatcatggaaacgtgcagaagtcattctcaccctcaaacctggaaaacctgaagccaatcttgcctcatatagaccgattagtctgctgacaatcctctccaaaatactcgaaagagtatttctgcgcagagtcatgccagtactggacgaggctggactgatccctgatcaccagtttggcttcaggcgatcccacggaacaccagagcaatgtcaccggctcgtagcacgcatcctagatgcattcgagaataaacgatactgttcggccgtattcctggatgtcaagcaggcgttcgacagagtgtggcatcctggactcctctacaaactcaagtcccaccttcccagttcccactatgccctactcaaatcgtatactgaaggaagagagttccaagtgcgatgcggttcctcaacaagcacgacaaggcctatacgagccggagtacctcaaggcagcgtccttggtcccatcctctacaccctgtttacagcagacctccctatcataccctcccgttacctcacagcagccacctatgcagatgacacgggcggttccttgccaccgcaacaaaccctcaattagcatcagccatcatccagaggcaactggatgcactggatccatggctgaaacgctggaac

SEQ ID NO: 19685 - DNA, 684 bp, DROSOPHILA
acaaaaggtaaataatcaacctgcgggcacgccaggagattcttcaaggatcaccgaagaccacgcgcacatggaagccgccgagcagctcgacgaggcggcagcaccagccgccctttgcgcgccttcgcgtgcagcctacgcggccgccgagcaggaagatccagacccagaccaggagcaggaccgaggccgggaatcgcccattggttcgttggagtgcgcccccaccctgagcagtcgcaagcggcagctgagtcgctttcatccataccacgggtccaatatccagttgggcgacgacgccacagtggcctaccggagagctagttttgccgacgccctgacattctcggagcgtccgctggcccctggggacatcttcttggtggagatcgaaaagatagagcgcggctggtcgggccatatgcgtcttggtctcaccgaactagcgcccaatgtgattcgcaccagcagcgagggaaaaaaggcgcctcaggagaatctggtttttctcgcgcaacccaagggacaaggcagcactcaacagagccatcaaggaactcaaggacaagctgtgtaccctacggcaagactccttcgacagattccttgaggagctggaacctggtgacccgcaacataatctgtggcaagtcacgcgtcatatcaggaggcctgcaa

SEQ ID NO: 19686 - protein, 181 aa, DROSOPHILA
MEAAEQLDEAAAPAALCAPSRAAYAAAEQEDPDPDQEQDRGRESPIGSLECAPTLSSRKRQLSRFHPYHGSNIQLGDDATVAYRRASFADALTFSERPLAPGDIFLVEIEKIERGWSGHMRLGLTELAPNVIRTSSEGKKAPQENLVFLAQPKGQGSTQQSHQGTQGQAVYPTARLLRQIP

SEQ ID NO: 19687 - DNA, 3178 bp, DROSOPHILA
aatatctacggtctacagtcgttctgagatgcagagcatcggcaagttcgcccttaacctttgtaatctccctaagaattgtgaggcgtatgcaaccaagttgtatcaaattctggagctgctactgccggccagccattacatgcccatgactctcgtcacactaaacacggcagcctttgccccaaagtaagttggctaagcagaaatagtataaaattgaatacctattaatgagtacttgcaggaaggattatgagacaaacaagctggtttccggcgtactacagttggctccccatacgcatttggtgctcgacgagacgtgcatgcaacagggcaagctggaggccaatggtgttcatgccgttcagcatttagcgcacttgatcaataatcaggaactgaagtgcgactttcagtattaccaaatagactaccaagcaaatattccagttctcgtgctcagtgaagggcgaagtatgttgccggtaagaatataagtttatataaataatcattatatccaatagaaactattaatgatatgttttcagagcgattttgtgctgcccattaatgccgattctaaggccgtggaacttgttgatgaatctctaaaggcagcccaccactatctgcagccatcacgtctgcagcagtttcgcaagtacttgaccacagcgcgcactagcggcttcaacgtgagcgaggagcacactgaaatgatccagcaggatttcgtggacatgcgtaaagctaatgtcaaaagtaatgccgatgatctgcatggattgctggtcctctcacggctgctgggcatcgcccgggggaaggatacgttggacaaagaaacatggcagctggctacggagttcgaagcaaagcgtcgccagcgtattcaatctctgccgaaatcatctgcccaattgcgcaattaagagggcctctcttttataccatttaatattaagtttttataaataaaatagaattttttaaaattattctctttatatttaatttgtagctttacaggcaagtctagtaatttagtactcaagtaaatgggactctaggagcgtcatgactcttggtccactacaacttcatgacttaaatgctcgaaacgcccttcgattagctgactggccaggcaatctccgcacagattaaggtaacaataacaactgttacaacgccattgggtcctggtcacagatgcctcttcgcactcggcacacttggcggccagcaagtctggctcatatccgtcctccatttcccgtttctcgtcctgaatggctgatagaagcttaaggcatagttcctgttttcgctttgactccgcattcagatcggcatccatgtactcggattcgatctttggttcgatcttggatgccggcataaggagcatatcgctcgcaggcgatgggattcgcaggtcgtcaaatgtgaaatcgtcctctggcatttgtagcgatatattatgagcggggaagaaggttgacttgcgaagtttgatcttcggcttactcaaaccaggacgtcgatgcttgggtatgcgaccgggcacaggcattccggcatcgtgcagcttttggaaatacttctggacacgactatacacttgctgtgccgttctgttgcccaaggccttcgctatcttcccgaatctgcgcatttccacttcctctggcggatactggatgagcagctgctccaagcgactctgctcttcgttggtccacaagcgattgaaattctccgaccgtccattgctcctgtcccgattcttgttcgcctcttgcgtccatgaagacgcatcggtcggtgtctcatttgtgcccccttcctcgtcattgggcgacagagttggcaagtccggtagaacggtcgtggtgatgtaattatccgctatcaaaggctcgttgtttcgcagtttgtccagcatatgttgcggattctccaagtagatattttgtgtggcttccaattcctcaatctgctgatgcacccgaatcctttgtgcctgcagcacggccaaagtgcgcagcaaattggtatagcactggttgccacgcagggccaggtgctcggtctcaaagtgaaacacatcctcatcttctgcagatatctctgctatttccattacaaagaattagcaccaaatacccgtttgtatacaaaaaatgtgtttacgcctctgcgctagagatggcagctcattaagcaaaacagttatcgaaatttagcaacatatcgatcttggatcattatcagctgttatcagcgaaaaaagaagaagcggaatacgtaacgtttatttacaaatttagcaatgataagtgcaccaattcgctctatccttgcacttacagcaaaggtaatttcacggaaaatcgaacgcacttgacaatattttaataattttaaaactaacagcgcacggcggttacaagcgcggccaatcaggtgcgaattgtggaggttggaccgcgggatggtcttcaaaacgagcccaaactcctgccggcagccaccaagatcgagctgatcaaccaattgtccgaaacaggactgcgaaccatagaagccaccagctttgtgagcgccaaatgggtgccacagatgggcgacaatgccgaagtgctgaaaggaatccgcaaagtgactggtataagctatccagtcctcacgcctaatctgaagggattcgagagtgctctggaggcgggagccgaggaggtggcagtctttggagccgcatctgatgcgttttcgctgaagaacgttaattgcacggcagctgaggccatcgaacgatttaaacctgtgctgaaagcagcccaaaagcatggtgtgcgcgtccggggctacgtttccaccgtggttggctgcccgtacgagggtgctgttgcgccgagtgctgtcgtcaaagtggtggaagccctgtaccaaatgggctgctatgagatctcattgggcgacaccattggtgtgggcactccaggcacaatgcgccgaatgctggatgaggtgaccaaggtcgtcccggctaaagatctggccgtgcactgccacgacacttatggtcaggctctgagcaacatactggtctcactggactatggcattcgggtggtggactcttccgtttctggcttgggcggat

SEQ ID NO: 19688 - DNA, 1178 bp, DROSOPHILA
gtatttggtgctaattctttgtaatggaaatagcagagatatctgcagaagatgaggatgtgtttcactttgagaccgagcacctggccctgcgtggcaaccagtgctataccaatttgctgcgcactttggccgtgctgcaggcacaaaggattcgggtgcatcagcagattgaggaattggaagccacacaaaatatctacttggagaatccgcaacatatgctggacaaactgcgaaacaacgagcctttgatagcggataattacatcaccacgaccgttctaccggacttgccaactctgtcgcccaatgacgaggaagggggcacaaatgagacaccgaccgatgcgtcttcatggacgcaagaggcgaacaagaatcgggacaggagcaatggacggtcggagaatttcaatcgcttgtggaccaacgaagagcagagtcgcttggagcagctgctcatccagtatccgccagaggaagtggaaatgcgcagattcgggaagatagcgaaggccttgggcaacagaacggcacagcaagtgtatagtcgtgtccagaagtatttccaaaagctgcacgatgccggaatgcctgtgcccggtcgcatacccaagcatcgacgtcctggtttgagtaagccgaagatcaaacttcgcaagtcaaccttcttccccgctcataatatatcgctacaaatgccagaggacgatttcacatttgacgacctgcgaatcccatcgcctgcgagcgatatgctccttatgccggcatccaagatcgaaccaaagatcgaatccgagtacatggatgccgatctgaatgcggagtcaaagcgaaaacaggaactatgccttaagcttctatcagccattcaggacgagaaacgggaaatggaggacggatatgagccagacttgctggccgccaagtgtgccgagtgcgaagaggcatctgtgaccaggacccaatggcgttgtaacagttgttattgttaccttaatctgtgcggagattgcctggccagtcagctaatcgaagggcgtttcgagcatttaagtcatgaagttgtagtggaccaagagtcatgacgctcctagagtcccatttacttgagtactaaattactagacttgcctgtaaagctacaaattaaatataaagagaataatttt

SEQ ID NO: 19689 - protein, 356 aa, DROSOPHILA
MEIAEISAEDEDVFHFETEHLALRGNQCYTNLLRTLAVLQAQRIRVHQQIEELEATQNIYLENPQHMLDKLRNNEPLIADNYITTTVLPDLPTLSPNDEEGGTNETPTDASSWTQEANKNRDRSNGRSENFNRLWTNEEQSRLEQLLIQYPPEEVEMRRFGKIAKALGNRTAQQVYSRVQKYFQKLHDAGMPVPGRIPKHRRPGLSKPKIKLRKSTFFPAHNISLQMPEDDFTFDDLRIPSPASDMLLMPASKIEPKIESEYMDADLNAESKRKQELCLKLLSAIQDEKREMEDGYEPDLLAAKCAECEEASVTRTQWRCNSCYCYLNLCGDCLASQLIEGRFEHLSHEVVVDQES

SEQ ID NO: 19690 - DNA, 8792 bp, DROSOPHILA
atcatcctgttcatcatcgtgttcgcgatcatcaacaacttttacctgttctatttgttctcctggcaggtaagctgcattctctgaaccactagtttattgatactattcaagaatttccaaagaatatcataattttgatcgaaaaggtttatcttgcaaatgtttaaaaagtgtatatatacatctttgtatccactttcattgtaaacaattaactacaatttatccaaccagtttttttgaaagtgttaaaagattggaagcacttctggtttatcaacataaactatcgtgaatagtccataaataataaaaataataaacagcaagataaacctgttttggaaaacaacgtttaaaaacgtttaaagaaaaaggttaaatgtaaatgttatttttcttaatatgttaatataatcctttccagatcgtcgtcgctggcatggctctgcctggtctgggctacatcttcgccttcctggcagccaagctgctgcaccaaaatgcagccgacgccctgaccatcgccatcgagacgggcatccagaacacgggcatcgccatcttcctgctgacgaccacgctggaatcgccggaggcggacatcaccacggtggtgcccgtatcggtggccgtgatgacgccgctgcccctgctgggcatttatctgtacaaccggtgctggggcaacaagcgaattagtgaggccagcgccaccgcctccgaagcggagcggatagctggggcgatacattagcattaccatggctatatagcatggctatagcacatagtttctttgtacatattcgttattttgataacctatacatcgtgctagcgcacgtagacaaggctgagatagatgctggttaaatttgggaccaaggaatgccgcaaatctcaagcgtattatactccagaatttcacctaacacctaagacgaacccaaacttattgggataattattttttttacaataaaattaacctattaattttgcaagcgttatgggctatttatttgtaaatatattttatacagtttttgtgctatcgttaaatcgttaaacattaaggaacatgcatttaaatattcatatccaaaacgtttcgacgtgattgtataacaatataatttcaagagttgggcagcaaacttttatgcaaagtttcgattataagtggcggcgaaattttgaaataatgtgcaataatattatttagaaatgaatgtacagtaatatgggtctagcaaaaaagaatttccatcgatcatcactggtcacccatggtgtacgccagaagggctgcctcatccagagtcaccacttcggtggccagtgactgtaggatcttcattaggccaaatatggtgtgcgcgccgagattcagccggcggaattcgtataaaagacgcatatagttaactgtgcccgtgctcaagtccactccattcaacatattcggcaacagattgtagtaattgatcacgcagaaggctcgctgcaagtccggtccactgactgtggtcacatagctgggatccagacgccttcggctgaggaactcgcgcagcggtaagcacaactcgcgcgtcgagtcctccatttcctgcttgaagagctcttgcatcatttggataagctccacggagatgagcggatgctcggactcctggctgcgactcaaataggcatcgatgagcttcatctgccacacatcgatgttgttcggcatggacttggttacgtgctaaaaacaaagaacgttacattcgcggtcaaattatgcaagtgaatggatgcacttacatcgtatagggttaggtaaaccggcaggaaatgcatgcgatccttgaccacggcattgtagaatagcagcatcacctggtgccgcttcatcagctccgggggactcaaatccgtgcctttggtgtccaggcagcgactgaggaactgcttcaccatacgttcgctggcaaactgctgcaggtcgttcatatcgatctgccaacagatgctctgttccatcgtcaatgtttgggccagcatgctcttcagcctgtccgggtcctccaagtgggaaaggcagcccgttcgcttcttaatatcaatcggtgcactcatctccagcgccttttccagctgatcccagttgcgcgatcgctcgaagcacactggccaatagttctcgtcgtccaccaccacctgctgcagggtgctcagcactggcaggatgcagggagcgatgggcaggcggcgcagctcggtggcacccacctccaacacggatatgttggccaggcacagcttattggtgtcaatgtcccggggaaggaacaggcgcggttccacagccagtacatagagatgtctcagcgcttgcagatggtatcttaaaatgtaaatccatgcggtgaagtgtgctaacacattgctgcaaatatattaatccttaccgattgtcgttgctgtgtatgggaaacttggggaagaaggcgcagaccagtgcagcaatcgactccggtgtctgggaaatggtgaagcgacccgcgccgaggaatagcaggccaagcgacatgtgtatggccatgtgagagccgtaggttatgtgcggatattgtggtcccactcgcgacctgagaaaccgaattatgcgaagaatttcgcagttgccggagccggcgaacaccaacgagatcgagatgagcagcaccatcaggcagctctccacagtggtgcgaccggcacattcgcccatcggcctgctggggaagcgaaggaaatcctttatcaccgaccgcagcgtggcaaaggccaccagattctcagtgccggcgtacttgagaccaatgcagaaggcagctccagccatgatattgcaataggcttgcctggacaagagtatataattcgtatctaattactttgacattcaacttcagttactcacgagatggcctcgtagtccacgtcatagtcctcgggtgcatactcattttcgtagaacgggagttttaggtgagctcggagtgctcgcggaaactgtgcctggaaccacgcgttgtccggccggacatcctgccataggatgaggccccgggaaattgtgcgcagcagaaggaagtcaggccgcaccatgtccagtagataccgcgaatccggcggctgcatccattcggcaatagctgcgttccccgagttgaagaacataagtcccaatgcgagcgttgcacccggagcagtgacatctatgttgacggtatcgccttcacgaacttggaacgaggctagtcggtatttctccttctgggaaccgccgatgggtctcttcactccaccgaccatgtagtagtgcagggtatccggcagttggaggtcccttaggcccgccggcgattcaccctgaccgagggtaaccaatccgagggatagacctgctgtcatggcatacgattcgcgctcaatgctgttctccatctcagggcctggaggacggccaatctcctggagcagcacctcggctatgtggcgcttagctgatccttgatagagcaaaccgacgcccattatagcagccacctgtgtgctttgcggtatatccaactccatggcggtggctggcagcagtgcctccaagtgaacgctcaacaactttgtggttttcgtatccatggtgccgcgatgggcagcggaaatgcccagcagcagaccaacgttggtcatctcatcgcatttaaccaaatacttatagacactcatgaaggacagcgtctttaggtgaccattcaagcccagggccatgaggaaaccagcgtgctccagggcattatgcgaatgcgttttgggcttgttgtagacaatccaattggagtctatgtcctgagcctggggtgagatcttcaggccagtggccacgccattgtgaaacgatggccacatttgcatattcgctgggaattcgatctgctgcatttcgatggtggtgcccttcagcggctccttgcccaacaggcacaatttgggcatggtcaagctttcgctgggccgcggcaacatcgttctcagggtgaacatacctctgcccacgggcagtgtcattgtgcgcgaacatagtgcaaacagttgcttctcctgctcctcaatgaattcgtgatcgctggttcccggtgcctgttgcacttcaatgaccaccggttccgagctgttaagcagacggcgcacttcatccacccgcatgtcatcgggaaaacgcagacgcagtagttttgtgtccatgttgtccatgtcgtcgcggcgcaattgggccggtgaatcagtttctgatcccccggtcggcggacacctcgctgacagtgaatcttccttgtagacccggccacaatgcggttgcccagtgctcgtttcgaggaacggcagttgagcgtgggccgccaattctggacgcaggataagttcataggtggccatgctgcagcccatgggcggcgagaggcgagcctcctccagtgcctccgctacaatcagatgcactgccgccgggaatctttcaatgtctcgccgtgtcaagcgcatggccagaagtagctgtaacatctgatggctacgcggagcatccgccgtgatattacgcttagagcgccgcgtaaagttggcctgaacggcgccggggatctcaagcagctgccaccagtaattcagacgctcatgcccatgagtcaccagcgatacgagctgcagtaaaatgcgacttctctcgttaacgcactccaagaaggtgtaaggcatcacctcctcctcgccgacaataatgtgctcgagttgggcaaacacactgggtgccggaaccctcagaagctcctggtgcagcatcatagctccgtgctcagctcccagcaacgagagcttgcccgtacgattcgagagttccggaaagtctagtatgtagtgcagcacataactttccagctgcatatcgatggccagctggtgtaggaactggaacgaggagatggtgttagaaaaccactaatggatctattaaatgattcacctaccgttgccagatatggaagcgctccataaaagtcagcgtccagtttgagatcctcgtacagtaaatgcaggctgaagaagatggcgggaatcattcggaagagcagcgcaccgatgttcacgctgtagctgtggccatcggctccgcagggagccagtgtcgtctggagcagcaggaactcccagtcgtcgtccgtgaaatcatcgcaatcattgtatattcgccgtttcttcggctcatcctggccacccagtgtagaattggaactgcaactagaaccgtcactcgattccgtcgcagtagcgccgcctccaaattgagtgtgcagcggtggcgtggcacatctagcgtagttctcgcccgcatccacatccggtgcagcagtcagacccattagggcgagcagtgtggagcggaatagcagccattcctgctctatggagtaattcctcgatcccggcggattcctgtcgctataccaacggataacaaagtccaggaactgggtcggacttagaacctgccgtagcgtagccacacatctggtgagcaatcgtgtatcatttagaaatggcagcgctattctgagcattctgcccgtggcataaaccaaagtcaatcgatttcccgccggatctctcagggatttgcagacattgtgcgcctgccgctgtgtgtaggacaccggctgcggttggatgggcgacagcatgtgcagctcctcttcgaaggcagccacatcccccggcgcttttgtgggcagtaggctgctccttcgcacctccacgaaagaactgctgccggacggaatgccgcttgctggtccagcagctgccattggtgttttaacgtgagacggagcgggcgaagccgacggagatggggcagcagtcatgggcgttaccagcggtgtgggaatggaggtaggcgccaaaaacggcgtaatgtgcaccttggatatgagcacggtgcctgtgtatagaagtaagctgccactcggatcgagaacggcaatcatgtgcattctcttcagacccactgcatctttcgcggccagcgtggaggcgtgcgtggagagctgcacctcgccccttccatagccagtgaggcggaccaactgaaggcggcacgagcgggccagcaggtagcacaaaaaggtctgacccactaaatccgtgtggataaatgctcgggtggccatctcgcagaactctcgttgactaaggaagacagacaattttagtactgaaagtggcatctttggtggcatttactgacgttccgtagatgttctccgtccagatgtgctccatacacaattccggctcaatgggttttgccggcttcacgtgcgttaacttgcgcatatccttcacggacatggactgctggctaatactgctctgcagttggctcaatggagtgcctagggaggcgcgactaaacggaagaagaggcaataataagtaagtgatggatgacagcgacttaaacgtacttcgactgtccaagaactccgctgaacgactgcgactggctgagtccgaactggttgcccatgccggtggtggtggtgttgatattcctggccgcaaacgataagttcgttgcttttggcgtggctagcaatggatagacagtgaataaatcgtatgcccttgctggcattgctatcaactcacctccagtttgcttggtggaactgaaactattgcctgccatcgacctgggtcccattagcgtctgtcccagctccatctgctgactcacatagttgatctcttcgggcgttaccttacgcaggcgtgcaacgaaatgcttaaagaacttggcatcgtacagcatcaccaaatccgattcctcggtggtgaagaccacagtgtattccggttcggtcatgtagccggtggagccggtggccgtcttcaggacgacgggacaggcctcgtgcagcggatgcgacatagagaagagacgcggcatcggaatggacatgtgcgatatcaaggcattgctggagtccttttccagcagcaggccatacttggtttgccacagctgtgacacgggaaagtccagattggctagaaagtcctcgccgttgctgcagtacacccgcagggcgtcctgatccatcacacagatggcggtcaaatggtcgtcatccgggtggacagccgccttcagctgcgccagtcgcccgcgcacaaaactgcgattcaggaagcaggcgaagcgcaccggcgtatcggtggtgaaacacatgcgccggtacaccccattgtcggtatcgtcgtcatcgttgacgccttgtgtccacaccaccgtgttccggttcacatagagctcctcctcgttgttaaccatatagtcgcacattggctccacgcgccgcaccagcggtggattgagcagtctgttcggcagcgaggtggcctggagaccacatcgctttgtccgctcggtcaacttgcgtcgcagggcggcgcgctcctcggatgcctcgtagtcatcgtacagctctcggactgtccacgactcctgtccgcccgaagggcagtcctcaccggccgacgagatgttcacattctggaggcgctgcagcagcagatgctccgtggtgggcagttggtggcgcgccattggctggtcatgtgggcccggatgctccgcggacgtctgacggccgcgcggcacaaactccagcggcggttctgcgacggcgatcatgtccgcgtcgccaggtgcatccagaattgcgattgacaagttaattgattacaatttattattagcaaggaatttgcacaattatttaaaaactgtcatcgaaatcgggtggcgataagtgcctgattctatcgggcctgcagtacttcgatatgaggagagctatcaaaaggccgataacgataggaagaccagaatcgcgacaaacaaaacaattaccagtatatgccataaagtcataccgaaagaaatgctagagaaatggctttgcctatttttaaaaatataaaatataacagttcgattgcttttactatcgattacaatgccggttggtcacttgtagcaaccagctttggtccgctggcgtaccggttattttcccggtctggcagcacagtgcgtttgttcggcttttccaattggatttcggagtctggattttgatttgagcagacaaacggaaccggaaatcctggccagaatttggcaatgagcagcggcaccgccggctgcaagcgcgcgcacagcatcgaggttgagcagccgctgacgtcggagcgcctggagcacagcctgctgttggtcaagggacgcctggtgcccaagtgttccacggcgcgtcaactgaaggcgatcctcgatctgcccgagcacctgtcccaggagcagctcacccagctgtcggccggcggcgagtttaagctcctattcgacttggaacaagcgaatcgcgaggaggaggaggaggagagcgcctgcctcctggagttgcgatcctgcacggccacccgaacgattagcttcagttaccggccccgccgcagctcctaccgggtgcagccgctctacctgctctgtcaggacgaggagaagacgctggcgcagcagcacgaggtgcactccctcatcgatcttaatttgcggctggtgcagtccatctacgcgcacaaactgcacgcggcgggctttcccaaccgcaccttcacgctcaacggca

SEQ ID NO: 19691 - DNA, 6375 bp, DROSOPHILA
atgatcgccgtcgcagaaccgccgctggagtttgtgccgcgcggccgtcagacgtccgcggagcatccgggcccacatgaccagccaatggcgcgccaccaactgcccaccacggagcatctgctgctgcagcgcctccagaatgtgaacatctcgtcggccggtgaggactgcccttcgggcggacaggagtcgtggacagtccgagagctgtacgatgactacgaggcatccgaggagcgcgccgccctgcgacgcaagttgaccgagcggacaaagcgatgtggtctccaggccacctcgctgccgaacagactgctcaatccaccgctggtgcggcgcgtggagccaatgtgcgactatatggttaacaacgaggaggagctctatgtgaaccggaacacggtggtgtggacacaaggcgtcaacgatgacgacgataccgacaatggggtgtaccggcgcatgtgtttcaccaccgatacgccggtgcgcttcgcctgcttcctgaatcgcagttttgtgcgcgggcgactggcgcagctgaaggcggctgtccacccggatgacgaccatttgaccgccatctgtgtgatggatcaggacgccctgcgggtgtactgcagcaacggcgaggactttctagccaatctggactttcccgtgtcacagctgtggcaaaccaagtatggcctgctgctggaaaaggactccagcaatgccttgatatcgcacatgtccattccgatgccgcgtctcttctctatgtcgcatccgctgcacgaggcctgtcccgtcgtcctgaagacggccaccggctccaccggctacatgaccgaaccggaatacactgtggtcttcaccaccgaggaatcggatttggtgatgctgtacgatgccaagttctttaagcatttcgttgcacgcctgcgtaaggtaacgcccgaagagatcaactatgtgagtcagcagatggagctgggacagacgctaatgggacccaggtcgatggcaggcaatagtttcagttccaccaagcaaactggagccacgccaaaagcaacgaacttatcgtttgcggccaggaatatcaacaccaccaccaccggcatgggcaaccagttcggactcagccagtcgcagtcgttcagcggagttcttggacagtcgaatcgcgcctccctaggcactccattgagccaactgcagagcagtattagccagcagtccatgtccgtgaaggatatgcgcaagttaacgcacgtgaagccggcaaaacccattgagccggaattgtgtatggagcacatctggacggagaacatctacggaactcaacgagagttctgcgagatggccacccgagcatttatccacacggatttagtgggtcagacctttttgtgctacctgctggcccgctcgtgccgccttcagttggtccgcctcactggctatggaaggggcgaggtgcagctctccacgcacgcctccacgctggccgcgaaagatgcagtgggtctgaagagaatgcacatgattgccgttctcgatccgagtggcagcttacttctatacacaggcaccgtgctcatatccaaggtgcacattacgccgtttttggcgcctacctccattcccacaccgctggtaacgcccatgactgctgccccatctccgtcggcttcgcccgctccgtctcacgttaaaacaccaatggcagctgctggaccagcaagcggcattccgtccggcagcagttctttcgtggaggtgcgaaggagcagcctactgcccacaaaagcgccgggggatgtggctgccttcgaagaggagctgcacatgctgtcgcccatccaaccgcagccggtgtcctacacacagcggcaggcgcacaatgtctgcaaatccctgagagatccggcgggaaatcgattgactttggtttatgccacgggcagaatgctcagaatagcgctgccatttctaaatgatacacgattgctcaccagatgtgtggctacgctacggcaggttctaagtccgacccagttcctggactttgttatccgttggtatagcgacaggaatccgccgggatcgaggaattactccatagagcaggaatggctgctattccgctccacactgctcgccctaatgggtctgactgctgcaccggatgtggatgcgggcgagaactacgctagatgtgccacgccaccgctgcacactcaatttggaggcggcgctactgcgacggaatcgagtgacggttctagttgcagttccaattctacactgggtggccaggatgagccgaagaaacggcgaatatacaatgattgcgatgatttcacggacgacgactgggagttcctgctgctccagacgacactggctccctgcggagccgatggccacagctacagcgtgaacatcggtgcgctgctcttccgaatgattcccgccatcttcttcagcctgcatttactgtacgaggatctcaaactggacgctgacttttatggagcgcttccatatctggcaacgttcctacaccagctggccatcgatatgcagctggaaagttatgtgctgcactacatactagactttccggaactctcgaatcgtacgggcaagctctcgttgctgggagctgagcacggagctatgatgctgcaccaggagcttctgagggttccggcacccagtgtgtttgcccaactcgagcacattattgtcggcgaggaggaggtgatgccttacaccttcttggagtgcgttaacgagagaagtcgcattttactgcagctcgtatcgctggtgactcatgggcatgagcgtctgaattactggtggcagctgcttgagatccccggcgccgttcaggccaactttacgcggcgctctaagcgtaatatcacggcggatgctccgcgtagccatcagatgttacagctacttctggccatgcgcttgacacggcgagacattgaaagattcccggcggcagtgcatctgattgtagcggaggcactggaggaggctcgcctctcgccgcccatgggctgcagcatggccacctatgaacttatcctgcgtccagaattggcggcccacgctcaactgccgttcctcgaaacgagcactgggcaaccgcattgtggccgggtctacaaggaagattcactgtcagcgaggtgtccgccgaccgggggatcagaaactgattcaccggcccaattgcgccgcgacgacatggacaacatggacacaaaactactgcgtctgcgttttcccgatgacatgcgggtggatgaagtgcgccgtctgcttaacagctcggaaccggtggtcattgaagtgcaacaggcaccgggaaccagcgatcacgaattcattgaggagcaggagaagcaactgtttgcactatgttcgcgcacaatgacactgcccgtgggcagaggtatgttcaccctgagaacgatgttgccgcggcccagcgaaagcttgaccatgcccaaattgtgcctgttgggcaaggagccgctgaagggcaccaccatcgaaatgcagcagatcgaattcccagcgaatatgcaaatgtggccatcgtttcacaatggcgtggccactggcctgaagatctcaccccaggctcaggacatagactccaattggattgtctacaacaagcccaaaacgcattcgcataatgccctggagcacgctggtttcctcatggccctgggcttgaatggtcacctaaagacgctgtccttcatgagtgtctataagtatttggttaaatgcgatgagatgaccaacgttggtctgctgctgggcatttccgctgcccatcgcggcaccatggatacgaaaaccacaaagttgttgagcgttcacttggaggcactgctgccagccaccgccatggagttggatataccgcaaagcacacaggtggctgctataatgggcgtcggtttgctctatcaaggatcagctaagcgccacatagccgaggtgctgctccaggagattggccgtcctccaggccctgagatggagaacagcattgagcgcgaatcgtatgccatgacagcaggtctatccctcggattggttaccctcggtcagggtgaatcgccggcgggcctaagggacctccaactgccggataccctgcactactacatggtcggtggagtgaagagacccatcggcggttcccagaaggagaaataccgactagcctcgttccaagttcgtgaaggcgataccgtcaacatagatgtcactgctccgggtgcaacgctcgcattgggacttatgttcttcaactcggggaacgcagctattgccgaatggatgcagccgccggattcgcggtatctactggacatggtgcggcctgacttccttctgctgcgcacaatttcccggggcctcatcctatggcaggatgtccggccggacaacgcgtggttccaggcacagtttccgcgagcactccgagctcacctaaaactcccgttctacgaaaatgagtatgcacccgaggactatgacgtggactacgaggccatctcgcaagcctattgcaatatcatggctggagctgccttctgcattggtctcaagtacgccggcactgagaatctggtggcctttgccacgctgcggtcggtgataaaggatttccttcgcttccccagcaggccgatgggcgaatgtgccggtcgcaccactgtggagagctgcctgatggtgctgctcatctcgatctcgttggtgttcgccggctccggcaactgcgaaattcttcgcataattcggtttctcaggtcgcgagtgggaccacaatatccgcacataacctacggctctcacatggccatacacatgtcgcttggcctgctattcctcggcgcgggtcgcttcaccatttcccagacaccggagtcgattgctgcactggtctgcgccttcttccccaagtttcccatacacagcaacgacaatcgataccatctgcaagcgctgagacatctctatgtactggctgtggaaccgcgcctgttccttccccgggacattgacaccaataagctgtgcctggccaacatatccgtgttggaggtgggtgccaccgagctgcgccgcctgcccatcgctccctgcatcctgccagtgctgagcaccctgcagcaggtggtggtggacgacgagaactattggccagtgtgcttcgagcgatcgcgcaactgggatcagctggaaaaggcgctggagatgagtgcaccgattgatattaagaagcgaacgggctgcctttcccacttggaggacccggacaggctgaagagcatgctggcccaaacattgacgatggaacagagcatctgttggcagatcgatatgaacgacctgcagcagtttgccagcgaacgtatggtgaagcagttcctcagtcgctgcctggacaccaaaggcacggatttgagtcccccggagctgatgaagcggcaccaggtgatgctgctattctacaatgccgtggtcaaggatcgcatgcatttcctgccggtttacctaaccctatacgatcacgtaaccaagtccatgccgaacaacatcgatgtgtggcagatgaagctcatcgatgcctatttgagtcgcagccaggagtccgagcatccgctcatctccgtggagcttatccaaatgatgcaagagctcttcaagcaggaaatggaggactcgacgcgcgagttgtgcttaccgctgcgcgagttcctcagccgaaggcgtctggatcccagctatgtgaccacagtcagtggaccggacttgcagcgagccttctgcgtgatcaattactacaatctgttgccgaatatgttgaatggagtggacttgagcacgggcacagttaactatatgcgtcttttatacgaattccgccggctgaatctcggcgcgcacaccatatttggcctaatgaagatcctacagtcactggccaccgaagtggtgactctggatgaggcagcccttctggcgtacaccatgggtgaccagtgatgatcgatggaaattcttttttgctagacccatattactgtacattcatttctaaataatattattgcacattatttcaaaatttcgccgccacttataatcgaaactttgcataaaagtttgctgcccaactcttgaaattatattgttatacaatcacgtcgaaacgttttggatatgaatatttaaatgcatgttccttaatgtttaacgatttaacgatagcacaaaaactgtataaaatatatttacaaataaatagcccataacgcttgcaaaatt

SEQ ID NO: 19692 - protein, 2030 aa, DROSOPHILA
MIAVAEPPLEFVPRGRQTSAEHPGPHDQPMARHQLPTTEHLLLQRLQNVNISSAGEDCPSGGQESWTVRELYDDYEASEERAALRRKLTERTKRCGLQATSLPNRLLNPPLVRRVEPMCDYMVNNEEELYVNRNTVVWTQGVNDDDDTDNGVYRRMCFTTDTPVRFACFLNRSFVRGRLAQLKAAVHPDDDHLTAICVMDQDALRVYCSNGEDFLANLDFPVSQLWQTKYGLLLEKDSSNALISHMSIPMPRLFSMSHPLHEACPVVLKTATGSTGYMTEPEYTVVFTTEESDLVMLYDAKFFKHFVARLRKVTPEEINYVSQQMELGQTLMGPRSMAGNSFSSTKQTGATPKATNLSFAARNINTTTTGMGNQFGLSQSQSFSGVLGQSNRASLGTPLSQLQSSISQQSMSVKDMRKLTHVKPAKPIEPELCMEHIWTENIYGTQREFCEMATRAFIHTDLVGQTFLCYLLARSCRLQLVRLTGYGRGEVQLSTHASTLAAKDAVGLKRMHMIAVLDPSGSLLLYTGTVLISKVHITPFLAPTSIPTPLVTPMTAAPSPSASPAPSHVKTPMAAAGPASGIPSGSSSFVEVRRSSLLPTKAPGDVAAFEEELHMLSPIQPQPVSYTQRQAHNVCKSLRDPAGNRLTLVYATGRMLRIALPFLNDTRLLTRCVATLRQVLSPTQFLDFVIRWYSDRNPPGSRNYSIEQEWLLFRSTLLALMGLTAAPDVDAGENYARCATPPLHTQFGGGATATESSDGSSCSSNSTLGGQDEPKKRRIYNDCDDFTDDDWEFLLLQTTLAPCGADGHSYSVNIGALLFRMIPAIFFSLHLLYEDLKLDADFYGALPYLATFLHQLAIDMQLESYVLHYILDFPELSNRTGKLSLLGAEHGAMMLHQELLRVPAPSVFAQLEHIIVGEEEVMPYTFLECVNERSRILLQLVSLVTHGHERLNYWWQLLEIPGAVQANFTRRSKRNITADAPRSHQMLQLLLAMRLTRRDIERFPAAVHLIVAEALEEARLSPPMGCSMATYELILRPELAAHAQLPFLETSTGQPHCGRVYKEDSLSARCPPTGGSETDSPAQLRRDDMDNMDTKLLRLRFPDDMRVDEVRRLLNSSEPVVIEVQQAPGTSDHEFIEEQEKQLFALCSRTMTLPVGRGMFTLRTMLPRPSESLTMPKLCLLGKEPLKGTTIEMQQIEFPANMQMWPSFHNGVATGLKISPQAQDIDSNWIVYNKPKTHSHNALEHAGFLMALGLNGHLKTLSFMSVYKYLVKCDEMTNVGLLLGISAAHRGTMDTKTTKLLSVHLEALLPATAMELDIPQSTQVAAIMGVGLLYQGSAKRHIAEVLLQEIGRPPGPEMENSIERESYAMTAGLSLGLVTLGQGESPAGLRDLQLPDTLHYYMVGGVKRPIGGSQKEKYRLASFQVREGDTVNIDVTAPGATLALGLMFFNSGNAAIAEWMQPPDSRYLLDMVRPDFLLLRTISRGLILWQDVRPDNAWFQAQFPRALRAHLKLPFYENEYAPEDYDVDYEAISQAYCNIMAGAAFCIGLKYAGTENLVAFATLRSVIKDFLRFPSRPMGECAGRTTVESCLMVLLISISLVFAGSGNCEILRIIRFLRSRVGPQYPHITYGSHMAIHMSLGLLFLGAGRFTISQTPESIAALVCAFFPKFPIHSNDNRYHLQALRHLYVLAVEPRLFLPRDIDTNKLCLANISVLEVGATELRRLPIAPCILPVLSTLQQVVVDDENYWPVCFERSRNWDQLEKALEMSAPIDIKKRTGCLSHLEDPDRLKSMLAQTLTMEQSICWQIDMNDLQQFASERMVKQFLSRCLDTKGTDLSPPELMKRHQVMLLFYNAVVKDRMHFLPVYLTLYDHVTKSMPNNIDVWQMKLIDAYLSRSQESEHPLISVELIQMMQELFKQEMEDSTRELCLPLREFLSRRRLDPSYVTTVSGPDLQRAFCVINYYNLLPNMLNGVDLSTGTVNYMRLLYEFRRLNLGAHTIFGLMKILQSLATEVVTLDEAALLAYTMGDQ

SEQ ID NO: 19693 - DNA, 5679 bp, DROSOPHILA
tgttggcctgcagcagcatttgcagcaccaggttggcccgatgcggcgtcaccgagtacgccatttcgattggattttcaccaagcactctctaggcactgcacttcagttcagtggcaagtggctgcaacgtttgttgtacttcctgctggttgccagggcaacgtaatcagctggaaaggacgcttcagctctgagtgctgcgactgctgccgtttgcaggacctaagctgcctgctcccgcactcgaaaaggtcctgccgcaagctccttcgatttaaatattcagctacagcctgtctccaaactctttttgacatgtttaaactattggaaagggttactttctgctccaaatatgtattagcctaacattgaggtgctgcagattgaagattgaaggaaggcggaacacattagcgccacgccaaccatgagaaaccagctaaacgggcgaagcgaaacgaatagagcggcgaggcggcagagatcaacggactatgcgacggcaaggagtgcattgctgctgtctggtggccatcgccctggccatggccatacgccaggtgtccatgggcatcagcgccagcgatcgccgcttccagtgcctgcagacgcgactgataggccaggccaactgctcgccatgcgccgatctgtacgtcttcaatcgccaatccgcctaccggcgctgcgagcacgtcaacggtaattgctacccacatcgcacggtcttcgccagcgcccgcatgtgcgagctcacctgccagccgtacatccggcgacccacgctgcacgaggtgaccaccctgccgccgccaccaccgatcgtcgagcccttcggcgacagcgatgaggagttcgagtgaggttttgtcaacaaagataagctgcttttaattcagttggtatgggaatgtttggtcgggattataggtagtggtgcaggtgatggtaatgcgtaatgtttaacaagatcctttgtggaggagattcgattctaatggggcacactggagttgatggtctcctccaaggcagacactgcaagacgaagtgaaaaagagtaagttcaaatgtccaaatttcgggaccaacaatcacttacggaatccgtgatcgttctggtgcaccagcgtgttaaggatgtcggccagcatctggtggcaacgtatgtacgttaactcgatctccgccacctggttgagcgccaggtactccaagctacgacgttgcgtttcgctgtcatcaatgccgtcatccgaaatggtgacgtccaagcatagggcatcgtggtcgtgcatgcagctggcgcaggtggtccactccatgtccagcacgtagaccagatgaaagatctggtcgagggcgacgcggaatgccttaaattcgtcggtcagcatacagtgtgtcttcagccacgccaggtgctcgtcgtgcatgatacgcaactcgcggacattcttgcactcgccaatcctgagctcgaactgccggctcacggcctccataatgtgcgcgtgcaggttgttgatgaggaaaattaaccagaagcgcacaatctccaggcgacgaatggtcagaccgatcaaatccagtggtgcgcagggattgaacctagcgcgacgcaaaaactgcatattctccagcttccagacggcccacttcaccttcagcatcagacgccacaccgaattgtagtcttgcatgtgcgcgggtgtgagaatgtaccactggtgcatggccattggccgctcgaagtccagttcaatagcctccagggcctcatagaccttgattgaattcgagtttatctgggatattaacttgacatgaagataatgagccaattgcggataatgcggaaggagcacagcgcatagcttagaagtgagcaccgaacccagtgcccagctattgtttttctccatgcgcacgaagagtgcgttgtagtatggcacaaataggtagtatttctccagcagcatcgtatgccgcaggaatcgcatcttctcggccacctgcgtttccttgcagtacgctcgaatcgcgtactcgttcgccagccactgtctccttcgcagtatttcgcgcagtgcctccggcaactcagacttcagctgcagacatgtggagcgctccaagcgcttcaaaatgttggccattagaacggggttgcttttaagccgctcacgttgtcgctccaaacgttgttccaccaacggctgggtaaatatggcgaaaagttcatggttcctaatgccctgcctattgcacacagtcagatcttcgtagtctttgtccggctccggctcatcctcgtaatccgtgttgtccgcaccacagtaaacctttagctgcgcaaagaactgcgtgaacagctcatcgtgcagcgacggcagttggatttcattgttgctggtcagcatttcgctcagcgtatttacactacatagcaaatcttgcgtttcgccagactccaaggcatgctccagcagtagctggtagagtgggcaggattgcagcttgttgaagatctccacgagtagcaaatcatcctccattcccatatttcgtttgcgcacgtggctacgtgtgttcgcatcttcctcgtaactattaaaaacaatgtagttatgacttcagctggccagagtgatgtgtgagcaccattttggcttaccaaaactccacgatgaactcgcgaaggtgatcttccagcgcggccctgcgccaccagccgtcgatgatgatacaatatcgcttgagagatataaacagcagggcagtggccagcttctggtgcggcacctgcagcaaggtgtgcttatacagtctggatagcaagtaggcactgcgtatgtgcgcaggtcccttatccaggatgacatcttcggccagctctcgcagtaagcgcagctggctaaaatgttccctgaactcaatcgtaaaacggatcagtgtatttttcgctggatccttattgacacgatcctcgtaagcgatgaggagctggcaaatgggctggacaagatctctcaggccgtatgcaaagaactccacggtgtatgttgtctttacgccatgaaaatgcaacgtatgagtatcgatgatgtgacgcagttccatcatgtcctccagcgcaggcaccacatcaaataacagaaaattttgcattgtgctctacaaaaaaaaaagccggactaaagatagagttacacattaacgattcgactttcttaccgcagtcaccgtacaaatactgacattgtcacgcacagtaatgcgtcgcgtggccttgtcgaattcaaagaaacaacagctcgctggacgcacaaacatgaagaggatctcccttagcagacagggctccgtgatggttttcggcactggcagggccaacaagcctcgggcattgtgattcagaaactgcacgtagctgacggcaaagttgtccagtggcttagcactggagggcagggcgtttaaatggacatcttggcaccaccagtgggaatggattttacggaagagcgtatctgtgttgccactttgccaatattgggtgaatggtcggggcggttggggtggcggcaactggagcagcttgcttcgtctcagatggctgccctttaagttgttgaggcttagaacagttggtttcattatccgaaagtcgtaactccggatcacgctctgctcgggcggcatatacgttttgttaacacttccagtcggaacgactgccatcatggcctgctcgtacaccctggccatttccaagaggcttcgcgagacgccaatattttcatcgggcttcagagtagttgtcgagtcgcagtccgactcctccgaccagtccttttggaaagaaggtaaaggtattagtatgctgcaaatgattttatggaaagaacaggctacatatgtgtagcagatgacatatgtttggggttctctagatgctcacacttaagctgtccgagctgtcatcctctggcggatccagaaaatcctcggacagcagcgctgcccagtccacctccgtttcggaggtattcttggctgcctccagtttcgcctgttcctctatctgtgcctgtcgctcggcttcctccatgctattaattatggacagacggcgctgttccatgaactcgcggttcagccggatcttttgcaccggcctatcggctatgcgaaacagcaattcgagcatttgccatccggggttaggattgaattgctgttgattttcgtccatagccaaatacctgatggccaagtccttgatgctctcaccaaaagacgccatgccctccgcccgaaaacgctctgccagatcgtccaggttgcgtttcacctccatgtccgtcgttgtaggagcccatgtcctgcgttggttggcgattatcttcaatgccgtatcctccatctggcgcaactttttctggctcgtctgcgttttaagttggttaaattggaatagggataacatctgttttaaaacatacccccggttccgacaggctcctgaccagttttcgcacgttctcgtttatggcggagttgactgccgtcgaggtcttgccggagcgcttccgtaggttacccttctgggcgggaggagccatttcgctccgctttctgattgagatccaataaattctataaatggcgccctcagcaatgacaacaacgtaaatggtacaccggcataattatcggttcagttatcgatagcaatggaaacagctgttcgtggatgatcgacaatcgacttgaaacgtaaacaattgtaaatgttgtcatttaaattgagttttcgaagggcaatatgacgaccagctcgcctcaccccacctacgtaatactgggctctggcggccacacggcggagatgtgccggctgacccaggcgctgctgcaacagacagacatcgaacagacggagaagtaccagccaattagactgatcctggccaacagtgactctacctccgagcgccagttcaggcaggtcctgccgcaggctgcccagagggcggaattcgtgaaggtgccgcgcagccgcgacgtgggccaatcctggctaagcagcatcttcaccagcctgtgggcgcttctctggagctgctatctggtctggcgtgatcgcccccaactgatcctctgcaatggacccggcacctgtgtgcccttctgctatgccgcctatctgtggcgcctcctcggacgcctgccctcgcactccagaatagtgttcgtggagagcttctgccgcgtggagacgctgtcgctgagcggacgcctgctccttccgctggcggacctctttgtggtccactggccggcgttggccacgcgctatttggataaaaagaatgtgcgatattttgggcgaatcctgtaacatgtttttaataacattaaagttaacattagtttctatttaacgaattatgttttgtatgagatgttttttgtcctagcgcttcttgcgaccagcgcagacggatccatggaccttcaggtgtagaggcatgatctccaggccacatctggggcagcctacggtctctttgaagaggttgcgctggcggcgctgacgcggagtaagttcgtcctcgctagacggcagagtagacgagtcggtagaggagctcaggttgagcttgt

SEQ ID NO: 19694 - DNA, 3219 bp, DROSOPHILA
gccatttatagaatttattggatctcaatcagaaagcggagcgaaatggctcctcccgcccagaagggtaacctacggaagcgctccggcaagacctcgacggcagtcaactccgccataaacgagaacgtgcgaaaactggtcaggagcctgtcggaaccggggacgagccagaaaaagttgcgccagatggaggatacggcattgaagataatcgccaaccaacgcaggacatgggctcctacaacgacggacatggaggtgaaacgcaacctggacgatctggcagagcgttttcgggcggagggcatggcgtcttttggtgagagcatcaaggacttggccatcaggtatttggctatggacgaaaatcaacagcaattcaatcctaaccccggatggcaaatgctcgaattgctgtttcgcatagccgataggccggtgcaaaagatccggctgaaccgcgagttcatggaacagcgccgtctgtccataattaatagcatggaggaagccgagcgacaggcacagatagaggaacaggcgaaactggaggcagccaagaatacctccgaaacggaggtggactgggcagcgctgctgtccgaggattttctggatccgccagaggatgacagctcggacagcttaagtgactggtcggaggagtcggactgcgactcgacaactactctgaagcccgatgaaaatattggcgtctcgcgaagcctcttggaaatggccagggtgtacgagcaggccatgatggcagtcgttccgactggaagtgttaacaaaacgtatatgccgcccgagcagagcgtgatccggagttacgactttcggataatgaaaccaactgttctaagcctcaacaacttaaagggcagccatctgagacgaagcaagctgctccagttgccgccaccccaaccgccccgaccattcacccaatattggcaaagtggcaacacagatacgctcttccgtaaaatccattcccactggtggtgccaagatgtccatttaaacgccctgccctccagtgctaagccactggacaactttgccgtcagctacgtgcagtttctgaatcacaatgcccgaggcttgttggccctgccagtgccgaaaaccatcacggagccctgtctgctaagggagatcctcttcatgtttgtgcgtccagcgagctgttgtttctttgaattcgacaaggccacgcgacgcattactgtgcgtgacaatgtcagtatttgtacggtgactgcgagcacaatgcaaaattttctgttatttgatgtggtgcctgcgctggaggacatgatggaactgcgtcacatcatcgatactcatacgttgcattttcatggcgtaaagacaacatacaccgtggagttctttgcatacggcctgagagatcttgtccagcccatttgccagctcctcatcgcttacgaggatcgtgtcaataaggatccagcgaaaaatacactgatccgttttacgattgagttcagggaacattttagccagctgcgcttactgcgagagctggccgaagatgtcatcctggataagggacctgcgcacatacgcagtgcctacttgctatccagactgtataagcacaccttgctgcaggtgccgcaccagaagctggccactgccctgctgtttatatctctcaagcgatattgtatcatcatcgacggctggtggcgcagggccgcgctggaagatcaccttcgcgagttcatcgtggagttttgttacgaggaagatgcgaacacacgtagccacgtgcgcaaacgaaatatgggaatggaggatgatttgctactcgtggagatcttcaacaagctgcaatcctgcccactctaccagctactgctggagcatgccttggagtctggcgaaacgcaagatttgctatgtagtgtaaatacgctgagcgaaatgctgaccagcaacaatgaaatccaactgccgtcgctgcacgatgagctgttcacgcagttctttgcgcagctaaaggtttactgtggtgcggacaacacggattacgaggatgagccggagccggacaaagactacgaagatctgactgtgtgcaataggcagggcattaggaaccatgaacttttcgccatatttacccagccgttggtggaacaacgtttggagcgacaacgtgagcggcttaaaagcaaccccgttctaatggccaacattttgaagcgcttggagcgctccacatgtctgcagctgaagtctgagttgccggaggcactgcgcgaaatactgcgaaggagacagtggctggcgaacgagtacgcgattcgagcgtactgcaaggaaacgcaggtggccgagaagatgcgattcctgcggcatacgatgctgctggagaaatactacctatttgtgccatactacaacgcactcttcgtgcgcatggagaaaaacaatagctgggcactgggttcggtctatgaggccctggaggctattgaactggacttcgagcggccaatggccatgcaccagtggtacattctcacacccgcgcacatgcaagactacaattcggtgtggcgtctgatgctgaaggtgaagtgggccgtctggaagctggagaatatgcagtttttgcgtcgcgctaggttcaatccctgcgcaccactggatttgatcggtctgaccattcgtcgcctggagattgtgcgcttctggttaattttcctcatcaacaacctgcacgcgcacattatggaggccgtgagccggcagttcgagctcaggattggcgagtgcaagaatgtccgcgagttgcgtatcatgcacgacgagcacctggcgtggctgaagacacactgtatgctgaccgacgaatttaaggcattccgcgtcgccctcgaccagatctttcatctggtctacgtgctggacatggagtggaccacctgcgccagctgcatgcacgaccacgatgccctatgcttggacgtcaccatttcggatgacggcattgatgacagcgaaacgcaacgtcgtagcttggagtacctggcgctcaaccaggtggcggagatcgagttaacgtacatacgttgccaccagatgctggccgacatccttaacacgctggtgcaccagaacgatcacggattcctgtctgccttggaggagaccatcaactccagtgtgccccattag

SEQ ID NO: 19695 - protein, 1057 aa, DROSOPHILA
MAPPAQKGNLRKRSGKTSTAVNSAINENVRKLVRSLSEPGTSQKKLRQMEDTALKIIANQRRTWAPTTTDMEVKRNLDDLAERFRAEGMASFGESIKDLAIRYLAMDENQQQFNPNPGWQMLELLFRIADRPVQKIRLNREFMEQRRLSIINSMEEAERQAQIEEQAKLEAAKNTSETEVDWAALLSEDFLDPPEDDSSDSLSDWSEESDCDSTTTLKPDENIGVSRSLLEMARVYEQAMMAVVPTGSVNKTYMPPEQSVIRSYDFRIMKPTVLSLNNLKGSHLRRSKLLQLPPPQPPRPFTQYWQSGNTDTLFRKIHSHWWCQDVHLNALPSSAKPLDNFAVSYVQFLNHNARGLLALPVPKTITEPCLLREILFMFVRPASCCFFEFDKATRRITVRDNVSICTVTASTMQNFLLFDVVPALEDMMELRHIIDTHTLHFHGVKTTYTVEFFAYGLRDLVQPICQLLIAYEDRVNKDPAKNTLIRFTIEFREHFSQLRLLRELAEDVILDKGPAHIRSAYLLSRLYKHTLLQVPHQKLATALLFISLKRYCIIIDGWWRRAALEDHLREFIVEFCYEEDANTRSHVRKRNMGMEDDLLLVEIFNKLQSCPLYQLLLEHALESGETQDLLCSVNTLSEMLTSNNEIQLPSLHDELFTQFFAQLKVYCGADNTDYEDEPEPDKDYEDLTVCNRQGIRNHELFAIFTQPLVEQRLERQRERLKSNPVLMANILKRLERSTCLQLKSELPEALREILRRRQWLANEYAIRAYCKETQVAEKMRFLRHTMLLEKYYLFVPYYNALFVRMEKNNSWALGSVYEALEAIELDFERPMAMHQWYILTPAHMQDYNSVWRLMLKVKWAVWKLENMQFLRRARFNPCAPLDLIGLTIRRLEIVRFWLIFLINNLHAHIMEAVSRQFELRIGECKNVRELRIMHDEHLAWLKTHCMLTDEFKAFRVALDQIFHLVYVLDMEWTTCASCMHDHDALCLDVTISDDGIDDSETQRRSLEYLALNQVAEIELTYIRCHQMLADILNTLVHQNDHGFLSALEETINSSVPH

SEQ ID NO: 19696 - DNA, 4484 bp, DROSOPHILA
gggataacatctgttttaaaacatacccccggttccgacaggctcctgaccagttttcgcacgttctcgtttatggcggagttgactgccgtcgaggtcttgccggagcgcttccgtaggttacccttctgggcgggaggagccatttcgctccgctttctgattgagatccaataaattctataaatggcgccctcagcaatgacaacaacgtaaatggtacaccggcataattatcggttcagttatcgatagcaatggaaacagctgttcgtggatgatcgacaatcgacttgaaacgtaaacaattgtaaatgttgtcatttaaattgagttttcgaagggcaatatgacgaccagctcgcctcaccccacctacgtaatactgggctctggcggccacacggcggagatgtgccggctgacccaggcgctgctgcaacagacagacatcgaacagacggagaagtaccagccaattagactgatcctggccaacagtgactctacctccgagcgccagttcaggcaggtcctgccgcaggctgcccagagggcggaattcgtgaaggtgccgcgcagccgcgacgtgggccaatcctggctaagcagcatcttcaccagcctgtgggcgcttctctggagctgctatctggtctggcgtgatcgcccccaactgatcctctgcaatggacccggcacctgtgtgcccttctgctatgccgcctatctgtggcgcctcctcggacgcctgccctcgcactccagaatagtgttcgtggagagcttctgccgcgtggagacgctgtcgctgagcggacgcctgctccttccgctggcggacctctttgtggtccactggccggcgttggccacgcgctatttggataaaaagaatgtgcgatattttgggcgaatcctgtaacatgtttttaataacattaaagttaacattagtttctatttaacgaattatgttttgtatgagatgttttttgtcctagcgcttcttgcgaccagcgcagacggatccatggaccttcaggtgtagaggcatgatctccaggccacatctggggcagcctacggtctctttgaagaggttgcgctggcggcgctgacgcggagtaagttcgtcctcgctagacggcagagtagacgagtcggtagaggagctcaggttgagcttgtcgatctccccttctgtgtaaccggagctgcgaagaattccttttgatgactttgctttcgatttagcgcggcgtgatgtggaagctcccgacgagtcctttgaggttaaggaagcagttgttcggcggtttttaggcttaaacgatggcggttccaagcgcaccataatggcgcagccatcgaagtgattggacaactcagtgcgcctcattttctcaaagcaaatgggacaagatacgatgtcgttctcaattcttttggcgtagcttgagcaactgggctgcacgtcgttctcacgctggaactccttcagcagggtgtcctctccaaaaatatcatctataatggattggtcagctagctccgtggcggctgttaaagattcatttgcggccacctcatcgtcgtattcatcatcaattaagaggatatcgtcctcacacaaggtcaactcatcctccattacctggcgcttgatgatctgcgtgcgctcctgactggtcatggtttttctgccagctggcatcttcatctcctcttcatcactagagctttcgaccaagttgacgatgggcgtatgaacatccctgaccattacgtcatcatcgtaggactcccagttgattatctcgctgtcgctggaaacacgacgcctctttttcttattctgtcgcttgttggaagcatcttcgctaaaacgctgaagtcgaatttgacgaagtttagcggaatcgggaacatcagtgtcactaagatctatgtgttctatagcgctagagccaccaagactgtagccctgtccgctcatttcagtggtggctttcgaacctgatttgtccagttcattgaatccgccgcttttgttgccttttgtgccagcagctggtgtcttgggcaatgcaaagggttcggaagagagtccgggataagaagtcggcggcaccgccttcgccagatcgcctagtaagactgtgccggtggccgctttcttggctgacggctggccgaaccagttgcgtatgtcttccttgggcgcggccaccgccggtgtggacttcttagcccttgacttggtctccggcttgggggccttcgggggttcactcaacttcaaaaaggtgccgctgcactcacgttgatgcatcttccaccactgatcgttcggaccgggcgctcggttgctggtccgcttcacatagccccaaaagggtgagcgctctcggcaaatgcccgtgcagcgccagatgtgggtgcgataggaggccacctcatcgtgaaaagtgtggtaaacggtgatgttggtgcccgccaccttattgatcgtctccatgatgcgcttgaaattgggtccatggccaccgttaccctcgcgtatattgagcacaaagcagtaggcatggatcatttcgtgctggataaacaaagaggtataatgtaatgctaaatagctatgtgcatatgcaattctataggcttgagatgccaattaagaaccttactgcgtgcaacaattcttaccaagagcgtttccacgagatccttgcgcggacgcaactttagcagcggctcactgagccgaatggtcacctgtttgacgaagcgattgccacgctggtagcagattccagcgcacgagtacatcttcttgctccattccagggagacggcgcccaggcgctcctggaagaacttctcgtcgaagcgtatgaacatggcgtagatgtccggggtgggatcgaccagctcccactccggatccaccagattcatcgtcttattcagatagtcatcatggctggcctgaatagcgcgcactggcttctttttagccgcttctcgttttttgtttttgatttcagagttctccatttttgtctgattgagatgaaaggcgatacgatatgagcagggcctacggttgaatgaaatgctatgtttttcatggcacactcactgattttggctgattcgatttggggtagacgaactgaatgctgctgtccagctcgctagcaccgtcctcatcgccctcgtttattaggttctgaatcctgcgtgccagctgatagtccctgtcctgcagaacccagagtggagagtgtttttttatagaccagattaccatttccaactacgtacattgctggcatccgcggctgtgtaactttggtctgactccgcatttagctggttctgcaggttcagagcgaacaagtagtctgcatctgacatgatggtcgccttgttgatcctgggccaatcctctacagaaattagtatcgcaatttcgaggtgcacaaaaatacttcgaaaaatatttcgcgcttcgccgcagtgtgaccagtctttggggcaaaaatatatgcgcggttagtcaggtatcgataagttcggttatcgcgcaaagcttgcctactctatttatcacatttaacgacagtggtaagcgatttgaaacttaacaagcgatttaagactacggtgaaatagcgcgacacttttaataatatttgataaagatttgtgctataaaaattggttttacatcaacaaataaccgtggttacagttcaattctgtaatagtgaagtgcacgctcgtttaatataacaatatacatataaattttaatataacgtgataagtcttattacttgcttcaaataacatatacacagtgttcagtgtcgcacaaagtccatctctagttgcagcgcttttttcaaatagctcaagaaattccgagaatcgaatttagcctgcgcatgcgtacatctattataactgatctattcgctgtggaaacgtaagaatttgaagcgacgcactcattttgataaactttcaagtctaaatggcatagcgcgcagtcaacattaattacacacctatcgcgtcttcaaatctatcgcgtcttttggggtggggagaaggaaggcgatccctgcgctaagcgaacaagtggcatcgatatcgtaatgtcctacgtatcgatgctgcaccattcattaacggcccaacgcttgtcaaggcaacattgtctctttggtaagtctcccggcatccgtttccggaaaattttcaaatcttacaatttgcaaatggggagcttaaaaaaaaataaagttcgccaaaaacgaatcccaagccaaggccactgattttggggcaaaaccgcgtggaaatactcggagcgccatcaattcagcaggttggtccggcaaaaaaaatgtgacgatggctaacagcagcaaagggagcccagcacgtgttgttagcatgggccactcgtt

SEQ ID NO: 19697 - DNA, 2236 bp, DROSOPHILA
cctcgaaattgcgatactaatttctgtagaggattggcccaggatcaacaaggcgaccatcatgtcagatgcagactacttgttcgctctgaacctgcagaaccagctaaatgcggagtcagaccaaagttacacagccgcggatgccagcaatgacagggactatcagctggcacgcaggattcagaacctaataaacgagggcgatgaggacggtgctagcgagctggacagcagcattcagttcgtctaccccaaatcgaatcagccaaaatcaacaaaaatggagaactctgaaatcaaaaacaaaaaacgagaagcggctaaaaagaagccagtgcgcgctattcaggccagccatgatgactatctgaataagacgatgaatctggtggatccggagtgggagctggtcgatcccaccccggacatctacgccatgttcatacgcttcgacgagaagttcttccaggagcgcctgggcgccgtctccctggaatggagcaagaagatgtactcgtgcgctggaatctgctaccagcgtggcaatcgcttcgtcaaacaggtgaccattcggctcagtgagccgctgctaaagttgcgtccgcgcaaggatctcgtggaaacgctcttgcacgaaatgatccatgcctactgctttgtgctcaatatacgcgagggtaacggtggccatggacccaatttcaagcgcatcatggagacgatcaataaggtggcgggcaccaacatcaccgtttaccacacttttcacgatgaggtggcctcctatcgcacccacatctggcgctgcacgggcatttgccgagagcgctcacccttttggggctatgtgaagcggaccagcaaccgagcgcccggtccgaacgatcagtggtggaagatgcatcaacgtgagtgcagcggcacctttttgaagttgagtgaacccccgaaggcccccaagccggagaccaagtcaagggctaagaagtccacaccggcggtggccgcgcccaaggaagacatacgcaactggttcggccagccgtcagccaagaaagcggccaccggcacagtcttactaggcgatctggcgaaggcggtgccgccgacttcttatcccggactctcttccgaaccctttgcattgcccaagacaccagctgctggcacaaaaggcaacaaaagcggcggattcaatgaactggacaaatcaggttcgaaagccaccactgaaatgagcggacagggctacagtcttggtggctctagcgctatagaacacatagatcttagtgacactgatgttcccgattccgctaaacttcgtcaaattcgacttcagcgttttagcgaagatgcttccaacaagcgacagaataagaaaaagaggcgtcgtgtttccagcgacagcgagataatcaactgggagtcctacgatgatgacgtaatggtcagggatgttcatacgcccatcgtcaacttggtcgaaagctctagtgatgaagaggagatgaagatgccagctggcagaaaaaccatgaccagtcaggagcgcacgcagatcatcaagcgccaggtaatggaggatgagttgaccttgtgtgaggacgatatcctcttaattgatgatgaatacgacgatgaggtggccgcaaatgaatctttaacagccgccacggagctagctgaccaatccattatagatgatatttttggagaggacaccctgctgaaggagttccagcgtgagaacgacgtgcagcccagttgctcaagctacgccaaaagaattgagaacgacatcgtatcttgtcccatttgctttgagaaaatgaggcgcactgagttgtccaatcacttcgatggctgcgccattatggtgcgcttggaaccgccatcgtttaagcctaaaaaccgccgaacaactgcttccttaacctcaaaggactcgtcgggagcttccacatcacgccgcgctaaatcgaaagcaaagtcatcaaaaggaattcttcgcagctccggttacacagaaggggagatcgacaagctcaacctgagctcctctaccgactcgtctactctgccgtctagcgaggacgaacttactccgcgtcagcgccgccagcgcaacctcttcaaagagaccgtaggctgccccagatgtggcctggagatcatgcctctacacctgaaggtccatggatccgtctgcgctggtcgcaagaagcgctag

SEQ ID NO: 19698 - protein, 724 aa, DROSOPHILA
MSDADYLFALNLQNQLNAESDQSYTAADASNDRDYQLARRIQNLINEGDEDGASELDSSIQFVYPKSNQPKSTKMENSEIKNKKREAAKKKPVRAIQASHDDYLNKTMNLVDPEWELVDPTPDIYAMFIRFDEKFFQERLGAVSLEWSKKMYSCAGICYQRGNRFVKQVTIRLSEPLLKLRPRKDLVETLLHEMIHAYCFVLNIREGNGGHGPNFKRIMETINKVAGTNITVYHTFHDEVASYRTHIWRCTGICRERSPFWGYVKRTSNRAPGPNDQWWKMHQRECSGTFLKLSEPPKAPKPETKSRAKKSTPAVAAPKEDIRNWFGQPSAKKAATGTVLLGDLAKAVPPTSYPGLSSEPFALPKTPAAGTKGNKSGGFNELDKSGSKATTEMSGQGYSLGGSSAIEHIDLSDTDVPDSAKLRQIRLQRFSEDASNKRQNKKKRRRVSSDSEIINWESYDDDVMVRDVHTPIVNLVESSSDEEEMKMPAGRKTMTSQERTQIIKRQVMEDELTLCEDDILLIDDEYDDEVAANESLTAATELADQSIIDDIFGEDTLLKEFQRENDVQPSCSSYAKRIENDIVSCPICFEKMRRTELSNHFDGCAIMVRLEPPSFKPKNRRTTASLTSKDSSGASTSRRAKSKAKSSKGILRSSGYTEGEIDKLNLSSSTDSSTLPSSEDELTPRQRRQRNLFKETVGCPRCGLEIMPLHLKVHGSVCAGRKKR

SEQ ID NO: 19699 - DNA, 3601 bp, DROSOPHILA
ttgaggcgatcgcgacggggcgtggccgggaagcagaggagcggtccgccgcgccggtcccgtccgcccgtgaggaagacgacccgttcctggaggagggtcaggagatccctggcccgctggccgtccatgccgtcggcaggggaagggggaggggtggttaaagcggccgggggttaatcactggaggggttaaactggggggtctccgcccgttttttaatccgacgatgggcactgcagcataacgaattccagcctcgaatttcacttgttttggctctgttattagttattattatgaaccgctgcttttgctcattgattttcgcaaatttctcgctggcattttcatggtcactcttttgctgttgtgtttgtgttgttgcggttttcgtgtgtttgcccgtgtgtgcgtgtgtgtgtgtgggtggaaaatgagtggggaagcagagatgcagattagcaatgggtatttcacttggttttctaaatgctacacataatttgcacacaatttgtgtagttttcctatttttagatgcaaggagtggagtttttttcttcagtcaccctcgcactttcgtgcgtgtgggagtgagagggagatacaaacagacgggcaaacacacacactcgcatgggggtgcatacatatgcgtatgtgtatgtggcatgtgcacacatgtatacatatgtactcccgttaaatgtcataaatcacacgcagcataaaaacatcaaatagaactcgcgcaggcaggcacacaagttgaaacattatttggaaatatacacactcaacacaacattcgccactgcgaacgggcgaaaatccgctatgttttaattgcctcaatttgaacacaaactccagacgtatatatagcctgtatatacatatgtatatgctatgtatatctgtatcatcacatcatccgcaagcagttctcttgcgtcttggctcttcttcttgccactgcttgtgccaccaaattgatttttttcactcgcgctgcttttgtttttcacacgctttcccaccggtaaaatcacccaagttaccgttgcacgcagttcgcgacttgacgcgggctaagctaaaattttcatttttcaagaaaccgcgattttacgaacgggcgctctctgttttgtttaaacaaattggattttgcgaaacgacaagtgtgaccagatgccgaaacggcttacaaactgaattttcagccttttttaatcgagcacaccgattgcgtgcctcgataggtgttaataatcgatagtcataaggcatcgcaattgagtagagtttttcttaaaaaagtctacatagttacgctcatgattatctcaaaatgatacctatgattaaatattaaatattttgactttttttaaataatatgtaaaaataccaactatctacgataacaggcatcgattgtactactatcgatgctcgcctgctagcataagctcgctgatacaacactgtctgttgttcattagcttccgtttctgccgagttttaccaaataaacccgaatcaaattaatatacctgcaaacattttacgcaaaatcaagaactcgcttcgccagcgcaagaagaagcaccgcccacggcaggccacgcccccagtgcgccccgatcccaaggacgccgccgccaaaatggagagcaacttgaacaggatcattcgtgaatcggccaaactgaaactctgcggtcagctcagcaaatacaccaatgtgatgaagggtgagcaaactttcacctttggagcagcaccttcaagctctccatcccatagaatccccgctagaaccgcttccctaatcgcagcatccactttgcaggatggcagtaccgttggtttacggtggacgccaagacaggatcgctgagctactacctgtgcgactcgtcgacggtgggcgacgacatcgcgccctcgccccacgtcctggccagtgctcccaggggccaggtgcagctggccggcgcagtggtgtacccgagtgacgaggactctaggacgttcgccatcgcctgcgcctccggcgatacggtaaagctgagggccaacgatgccagggcccgtcaggagtgggtggatggcctgcgggcggtggtcgagagtcacatgaaggcgatggacatcagcaactcgtcgccgcttcctccgcgggaattgcttgccgcctccgatgccatggtttcagcgcgccaagctctgtttctcacggaacaatggtaactgcacagtgattcgtagctaacgccgcattacctcctgcaatctataaatctatccccaaacccttccagcaacgcttctctggccagggccatcgagagcatcgactgcgcttccttctcgccaacggatcccgatcttcttttgctcaaggcgatctccacggccagcacccagtgcctgcaccagtgcttgggattactgcaacgccaccaggagatcaaccagccggtggcagaggccgtgcctcttgtgctttgagagatgcatgctgcaaggatagtctccagtttccagtttccactaagatatgcccaataaacactaagccaaaccgcaatgcaaaatcaagaatcaagattcaagacaacggtttggtaagcaatgagaagactttcaggttgggttacttttcaatgtttttataaaatactttttgttcgtttcggttttccgtttttaagtttttatgttttttgttttcttcgattaattagaacattcatttcgacatttaaagttaatttgaacataaagtttgcactaaagtttatagaaaatgttgagttttggacgtggacttggacgctgatccagatcgtacaaagatacacaatatccaggagatttagccgctaactcttgccactgcttatattacatcctattccgaaagtaattcgttaagtttcgatacgtgtgggaacatcaaagtctattgggggaactgggattacatagatacttatatatcgtgtgtgcttatatacgggctatggctatggtagatgttcttgcgtatgcaaaaatagtcatgtttatcattatcatcgtaattaactcttgtccgattaatcaattgtgtgcttgccaaaccaaacgttgccgaaagtatgcctaaatgcctaaaaggggtttaaaccaaataaagagatactcatatatgtacgttctccgatactcaatcgtatcgtaatgtcgccagacttgccaaataaatcctcgagtcctgccgcgaatccttggcctcgctctcgaccggatcggaagtggagcagagtccaaattaaggctagaaaaggcactttagaaggggatctagtggggatttgggttgatgcgggatcaattcggggactacgttgggtttccaataatgtcgaaatcagtggcctcgagttcggcgggagcagcagcagggctcggtgtaaaaaattgttgcttctaaattttgtctaaaaatttcgattgtataaatacgttaaaaaagttcacgtgtttttgtttgttttctttttacaaattttgtttgcggtgtattcatcgctgaatttaatt

SEQ ID NO: 19700 - DNA, 1104 bp, DROSOPHILA
tttttttcactcgcgctgcttttgtttttcacacgctttcccaccggtaaaatcacccaagttaccgttgcacgcagttcgcgacttgacgcgggctaagctaaaattttcatttttcaagaaaccgcgattttacgaacgggcgctctctgttttgtttaaacaaattggattttgcgaaacgacaacttccgtttctgccgagttttaccaaataaacccgaatcaaattaatatacctgcaaacattttacgcaaaatcaagaactcgcttcgccagcgcaagaagaagcaccgcccacggcaggccacgcccccagtgcgccccgatcccaaggacgccgccgccaaaatggagagcaacttgaacaggatcattcgtgaatcggccaaactgaaactctgcggtcagctcagcaaatacaccaatgtgatgaagggatggcagtaccgttggtttacggtggacgccaagacaggatcgctgagctactacctgtgcgactcgtcgacggtgggcgacgacatcgcgccctcgccccacgtcctggccagtgctcccaggggccaggtgcagctggccggcgcagtggtgtacccgagtgacgaggactctaggacgttcgccatcgcctgcgcctccggcgatacggtaaagctgagggccaacgatgccagggcccgtcaggagtgggtggatggcctgcgggcggtggtcgagagtcacatgaaggcgatggacatcagcaactcgtcgccgcttcctccgcgggaattgcttgccgcctccgatgccatggtttcagcgcgccaagctctgtttctcacggaacaatgcaacgcttctctggccagggccatcgagagcatcgactgcgcttccttctcgccaacggatcccgatcttcttttgctcaaggcgatctccacggccagcacccagtgcctgcaccagtgcttgggattactgcaacgccaccaggagatcaaccagccggtggcagaggccgtgcctcttgtgctttgagagatgcatgctgcaaggatagtctccagtttccagtttccactaagatatgcccaataaacactaagccaaaccgc

SEQ ID NO: 19701 - protein, 224 aa, DROSOPHILA
MESNLNRIIRESAKLKLCGQLSKYTNVMKGWQYRWFTVDAKTGSLSYYLCDSSTVGDDIAPSPHVLASAPRGQVQLAGAVVYPSDEDSRTFAIACASGDTVKLRANDARARQEWVDGLRAVVESHMKAMDISNSSPLPPRELLAASDAMVSARQALFLTEQCNASLARAIESIDCASFSPTDPDLLLLKAISTASTQCLHQCLGLLQRHQEINQPVAEAVPLVL

SEQ ID NO: 19702 - DNA, 2826 bp, DROSOPHILA
gcagagtgggcaggatgggcgggggacttctccaaaaccggaattgcttcgagccgcgacgtcagcagcgaaaagagcagcagcgaggatgtgagcagcgtcattggagggggcactgaaaatttcacgaaaatatcattgaatatttgaactcaaaggattaagagttaatggcattactcaccttattatgggattttagactgattctaggtggggaaacgcgtttgcgtttgcgcagttaataattttcactctcggctatcgcgcatcacttatggcttatatacatatgtgtgtctgtgtgcgtgcgtggaatcgtgggcctaaattatttatgcacattacacgttaacgacgcagctccataaaatcattgtatctttaattcgggcttcgatcgggccccgaagccaccggacaagcacatgcactcaacaagtcaaataaacaatggcatttattattccatggggatgctggaactggaactggagaacgaaccgcgacgctggttcagatgcattgcatcgttcaccggcgaaccggtgattccgaattcatcggttcatcgcggtacagtggactgaatctatctggtatcagatcaaattcatttattcagttcatattgaaacttactcaaaagcactcgttattaaattgattttaattaagtaaaaaaatatttagtaatattaatattaatttatattatacaaaagctacatatatttttagaaaataataaacaccaaatcatgtaagatttacgacgttatatagtcaatggcaccatagtcaatgaatttgaagtgtagtttctttgtacatttatatagaattatgaattcagctgtttatagagactgcactgatccacatcaatagccatcgatataatttgcaatactataaaattatgtcctaaaccgttttgttagatttgaattagttacccgaagccaagaattggatatcaccgttaaaataataaaatacattttccaatattttatttaattaataatttttagattatttctatagagaattatgcacattttacgcaggttgcttctgcaccttcgccaattctgccttgaacttcgaaatggtctcacgtgccagctttagtttgtccttaagtgtaacaatctcccccttgaccttctgttttacattcacaatgttgtccaacgttttcgtcttcttttcctcaactagaaaagtatatatctaatgagtaaacattcaaaatggtaatcagctcatagttacagtcagtgtcatgggttagcaacccattggcgctctgttctgaaagcaggagataatgctgcaagatctgggtgggctcctggaacactatttcctcatacgactccgagaccaggcccttcttagtgtccatagtggtgctagaggagagctcgccatcgaccacaggcgattggaagagcttaaggatgtggtagcaggtaaccgggcgctctgattgatcgttgaagtatatcttgatgatcacctcgaattcaccccatccggtctcggtaatctcgtagggcggcttaactacgatcctgttcggattagcgtagctctcgtgcagcttgaaatgcacctttttcacgtaaatggacatgtcctcgttgaaatagggcttcaaatagactttccactgatgcgtgtgtccgtcctcctcgcgcttcttgccgaaggatctggcaatgtttccatacactatgggctttactatagttacgccctttagtcggccacccgagtctccgccaaagtcagtcataattcaacgattttaagttgtttatgcttcgttaactaaatattgttttggttcttcttcttgcttttcggctagcagttgttatcgatatatggatgcactgaataccagggctgaatataattatggacatgaaaaaaaagaattaattatttaattaatttattaattaattaacgaaaattccacaataattaatttaaatattttagctgtattttatttcttttaagtttaagccactcttatttcttaattgcatcccttgtttccgattgcgtctttcgattgtttttgcactgtattgtgggttgtggttccatcacttgtatcaatcggacgctttggtcaaattttattgtttaatttaaaattaaatgatttgaagccatatttaccagtgagacagtcaaatacataaaatgatggcgcgtcgcggtggaaagcgcatacgtatggatgatccgccgccggactacgaggaattgcacaggtacagttctccgttttcccaccattcgtgtttgcctataagaaatatgtaattattttttagcgatgccctgaatgagagcacctcggatgcggacagccccaccaaacggatgaccaggctcagagcgcggggcggagtgcgggacaaaccgcccataattgatgatgacgaggatgacttcttcgcgccaatcgcgcgcaaacgaaagactcccgccacccgcaaggggccaacagaacgcaaggaacgcgttgaacgaccgcgcaaggagcccgtcgacaagggacatcacgagcggatagacagtgagcgggagataaccacggacgagaatagtctctactatattgtgcgacactcgaagaaccctattgctgtaggagaaacaattgcctttctatttcccaaatactaatcacacgttcttttcagagcattgttgaccaatggattgagcagtataaggcaaaccgagaaacggccctggttgcactgatgcagttttttattaatgctagtggtt

SEQ ID NO: 19703 - DNA, 768 bp, DROSOPHILA
aacttaaaatcgttgaattatgactgactttggcggagactcgggtggccgactaaagggcgtaactatagtaaagcccatagtgtatggaaacattgccagatccttcggcaagaagcgcgaggaggacggacacacgcatcagtggaaagtctatttgaagccctatttcaacgaggacatgtccatttacgtgaaaaaggtgcatttcaagctgcacgagagctacgctaatccgaacaggatcgtagttaagccgccctacgagattaccgagaccggatggggtgaattcgaggtgatcatcaagatatacttcaacgatcaatcagagcgcccggttacctgctaccacatccttaagctcttccaatcgcctgtggtcgatggcgagctctcctctagcaccactatggacactaagaagggcctggtctcggagtcgtatgaggaaatagtgttccaggagcccacccagatcttgcagcattatctcctgctttcagaacagagcgccaatgggttgctaacccatgacactgactttgaggaaaagaagacgaaaacgttggacaacattgtgaatgtaaaacagaaggtcaagggggagattgttacacttaaggacaaactaaagctggcacgtgagaccatttcgaagttcaaggcagaattggcgaaggtgcagaagcaacctgcgtaaaatgtgcataattctctatagaaataatctaaaaattattaattaaataaaatattggaaaatgt

SEQ ID NO: 19704 - protein, 227 aa, DROSOPHILA
MTDFGGDSGGRLKGVTIVKPIVYGNIARSFGKKREEDGHTHQWKVYLKPYFNEDMSIYVKKVHFKLHESYANPNRIVVKPPYEITETGWGEFEVIIKIYFNDQSERPVTCYHILKLFQSPVVDGELSSSTTMDTKKGLVSESYEEIVFQEPTQILQHYLLLSEQSANGLLTHDTDFEEKKTKTLDNIVNVKQKVKGEIVTLKDKLKLARETISKFKAELAKVQKQPA

SEQ ID NO: 19705 - DNA, 12714 bp, DROSOPHILA
ggataattttagcatattttaaacccacttgtaaacgtgcaatcgtgtcgcccgtattcggaaacatatgtcccgcatatatctcgctatatatatatatatttatatatatatttaactatatatatctccaaaactgtaaaatgtctgtatgtgtatatgtgcaacactagcaacttgtaaatatgtaatatgcaacttgaacatgtcgagggcagcagaaaatagtagaacccaatggttttggccagttttgcttgcctgtgacacgccttcacagcggccttgctaatgagtagccgccaaataataaaaataattaaataactaaacgaaccaattgtatttgcagttttcacttcgattgtaagccgttcttcccagctaaaaaatgaaatgcaacaatattcttttaagtacatacaatataagactgctgccttggtttatttttatttctacacatcgcgcttagtaggtttgcctataacatttcgataaactctttgaaatcgtttgctaaaacacacgtaggacacacgtaggatccacatacatttggttatggccatggatggctgctgtttgtatctcagcgttaacaacatttaaacatttctacacatcgtaaacaggactgctagacttctcataaatatcattcgctctttgagttcaattgtttttttttctcagtttcgtttttgttttataaaaatatacaattataaatataaatattcatatatatacatatatatcatttgtatatatatatatatatattatgcagtatgtacacttagaggtttcaaaaagacaagaaaaaaatgtacgtctttttagttttttttttcgctcaataaattagtagaaaatacttgtttgttgttaatataaaaatacaatagggtccataggtttcgatacacatacacgtttacattgcaatatattttcactgattttggtaattcgtttttttgattttttcttattttttttttcgtggcggaaatagagttctgcttaagtttaccattagaaactggcaatgttgcattgcacaaaaggtgtgtttgtataaaaaaattatacaaaaggctataaaattattttttccggtgtcttgggggttggtgtgtgtgtgtgtgtgtgtgtgcgtgagtgtggtgaaagcttttttttttggtgggtgagtgcgtgtctttgtgtgtgtatggcaagcattttggtgcatacttttcggtcgtttgctggggtacattttatgtaaaagctgcatgttataactacatacatatgtagatcgtataactgctttactagaaaaaaaactttaaaaaaaatatatgaagctacactgggaaaccaatttccacgccatttactgcgatgtaatagctaaaaacagacgacgaaattatcatttggttatgattcttcgaaatccgaaataatccgaccccaaaaaaccccgcttatatggcaacagatcttcgtctgcgaaacacaatcagcaatcgtttaactttagctacgtacatttatatacacacattgatcaacatcgaacaacgggccaatacatacaggtaatatccattcgttggctcaaaaaaattgttatttagttacttatatgcatagtgggttaactctatggtacattgaatctacatacaatccacatctatatttcgctactaccatttaaagccacatatttccattagtttaattaagtgtagttaattctatttgaaaaaaaaaacagtggtagaatggaaagaaagcacttcgtttggttgtgcagatgagtcaactggcggctagtaacacttaaacacacacatattttgcatatgccgaatggtctgcttctgtttggagtttcaatgctccaacacgttagccatcccgaaaaacgcagttaacaacaatcaatcgatggatcaatcaattaaccaatcaatcactagcaacttttacccgattctatcgttcctaacgtttctatctattcatattcatttatatcacaaaaaacacggttgctttttttaattttcaaccccccaccccttcgggtaattcctcgccccgccccaccgattttttatcccctggatctggtttggttttctggcaacagctccatactcttagccacttgtggttgtcgacgacggatggtctggttgtccgggaaacttgctgccctaccgttagagtcattaaatgcaattttgaaaccatttttcaagtgccttgctaccccgcaattttcctaagtttccactggcattgagttgttgttggctgttgttgttgtgttgctggtggcaatgttgttgttgatgttgctgctgttatggttgttgttgttggttagggtaattgtgtgggtgtggctggtggctgcggcgttgggtgccaagtggctgccaccattcgcctgcagcgattcctgtgacttgaagagcgtggtggtctcactggagtgcaagtcatcatcctcctcctcttcctcctcctcctcgtctttgtcctccgcttgctgctcgccctgcaccacatcctcatcccgcccctcgtgctccatcttcttggtgcccaattgttcaaccttatcagcctcgtcatcatccagtggattatctcttcgtgtcgtgtagaggaacacctccatgtgatctttgccctttacatagacactgccacgtggctcgaactcatagcgattggtgaggaagggcaggcaatccttgcccacctgaatgcgattgggtagcccggtggagtccattctggaggccacattgactgcatcgccccaaatatcgtaatacagcttgctagtaccgattactcccgccgtcacatcgccaatgttcatgccaatccgcaggatgagattgaattccaacagatccttgttgaaggcatccaccacctcctgcatggcgattgagaactccattagtgtgtgaatatgttcgtcccccgtgccgcgatgcgagggatccaatccactggccgccatgaaggtcgaaccaattgtcttgatcttctccacagcccggaattccggacgtgagagcagctcatcaaagtcaccaatcagctcgttgagcactcgcaggaactccttgccacccagataactctcgtcgtacatctcattgaagttcacgatcgaggcaaagatgatggctatgttgtgatggttctccgagtacttggccgtgttcttcagatgctcagccacgtgcttgggtataatgttgtggagcagcatgtcggcctggttcttcatgttctgcactcggaccttatcctgattggccaccgcattgccgtagaaggtcagccgataaccaatctcaaattcgcgattaaggaaccagaccaacaccaggatgagcagcagatccagatagatttccacatgatagtcctgaaaccacttgatctcctggatgaaattcgacgcctcctgatcctgctgctggtcactccgattgtgactgtagaccatcaactgggacactgcaatgccaataaagcagagggctgccaaaaaggccagtacattccgcacccaacaattcagctgtgtgaaattgcagaagtgcacgatgcacacaaagatcaggaatccataatggtactcaaacgcctccagttgctccaagtccaggagcagaaagttggcgatgatcaacagcactggcatggccatcagaacggccaggcaaatgtgccacggataccagctggatatggcctcgaaaatgcgatcggcacaggactcaaaatgtggtcttcctcccggtgcagctcctcgctcatcccgctccaaatcctcactggtcgtcgacttggaacggaatcgattgctaacattgctaccgctctgccggcgacacatttgccttgtgaagaggaagagggcgaacacttggatgcctgtgaagcaggagaacaaggtcacccacagccggaagctgggcgacaccgtgttctgggtcatcaaaaacagcgagacggagatgcacagataaaccgcaatccccacgaatatatcaatgtaggtattatagcgtggcgtggccaaagtcggcggtccttccgtctcattttccgctccaaaacgatgggccttcgagcggaaatcgcgttccaactgccgtgacttgaagtataaactgaatttccgcaacggcggtttgaccagatagctcctctgcgacctggcattatcccgaacgcaacggataagctgaagatccgattgcttgcgcaattgctgcaggcaggcggccagtggatccgccatttgcgaagagcaggcgggcatcaaaagaggcggtggcggttgtaccgccagcggaagacccagtccctggacctctcccaaattggagatactggacgtggagctggtaaagtaaccggagaccctgtgctgactaatcgccgtctggttgagtgcatagatttgctgttggatcgaggatctgcgcgagttgctcttgatcccggaatccttgcgcgacgtggccgatgggcagatgctcgactggcgggagtgcgtgggcggaaagatgccaccacctccgacggagttgcccggagctggcaagcaacagggactcgttgaggaagggcccggttccaggctattcggtgtgggtctaccggttgccaaggtggatgctcgtggtcgcgggagtggcgattgctctactggcggcgctgtctgggaggtaccagctcttccttcggccccaactcctgctggtcctgctccgttcacccctcccgttgactggcggccacattgcgatctatagctgcccgaacgaccgaatggagatatatcgctccgtgactgactgatgtaggatcgcacatcgatgatgtcatcgtacatggagtactgaccaggagaacagcaacccccgcctccactgactcccgcctccggcgatctgagcacactgcttgccagtgccgtggatgtagctgcatgatggagcaccggacgagcggccggaatgtccagggtctgagtgcgatggttggactctaccaaaacgggcaactgctgatagccacaaccgttgccattttgcatctggttgtccatgaatgccaaggtctcctcgggattcagttgattatgctggtgcagctcctccttctccttctcccgctccctctctctttccttgtccagatgaccggcggaggagctgccgccacagctgctcctgttggttaaatcctcaaatcgcttaaggaatcgaggaattttccacacctttagcttgatcttcgatcgcgtttcggccgctggtggatttgccggcggtagcaacggtggactgactggtggttgttcatcagagtccagactgccgggcagggacttggtggtaatgatgatcttcggtcgttcccgcaccacaatcaccggaggaattcccgctgccgccggatggatgatgccacgttccacatcccggtcgcggctctgcgacttcttacgcatcttcatgctcaacgaggtgagacgcggtcgcatggagagtaccggcgagggattcagcgagctggatagctgacccaccggcgaggccggaggaacgttcggctgcaccgccgacacattggtggcactctgggaaagggaggcgccatgggcgccgggcaagagcagggaactgccagtggcattcgcaggcatgctgggactcaggctattggttcgtgtgaagtcgcgtcgtcttcccaccacgaagtaagtacgatgacctgatggaatgacacgctttaggggatttccggatggaagtagtcaaagagcacactcaccaaacacctcctcgccctcctccaagtagtaggcatcgcccaaaaagctggatgtctcctgcgagatgtgcacctgctccggtttgcccgaggattccattctgggatagggataaagcggaagttaggcaactgtaatctttggcagtgatacccacacgacaacttacttattggccaggctgacgtcgttgctccacacatcgaacttcacccgcctcgtgccgacgatcccgcagagaactgttcccgtgtggacgcccactcgcatcttgacaccctcgtggcgctgggcatcgaagcagcgcatggcatcaatcatgcccagacccatttccacacagcaaatggcgtgatccgcccgtggctctggacaaccggacacgcagtagtagcaatcgcccagcgtggagatcttctcgcagccactcagcgagcaaaggtcgtcaaaacgctcgaagagatcgttgagtatctccactaactgttcggctgttttcgtggaggacatgcgggtgaagccaacgatgtccgcgaatagaatgctcacgttctccatgctgtgcatgtggaatggtcggaacagggacttcacatcgttggaggcacgtggtcgcatgtagtgggattccggtggcaatccaccggcatccagacccgacggaccaccctcattgagcagcatatcggccactttcggcggcatcaccgagtgtatcatcttctccttgagctgcttttccatctccaattgacgacgcacgaggagattctgacccaccttcatgaaggtgccgcgcatgcgcaccagattcatgatcagcacatgcacgcccaccaaatgcacactcagatgggccattatccgcagtatgagtatcctattgctgggatctccgttggcttccattcctgatcccccagctgctccacctccgccgtgcatgggacctccatgaatcgcactgcatccgattaccatgtgcgagaccatctcgaaggcaatcgaatagctaatcgccgtactggcgcccagccacaagggcatcggtagagccgtgtagatcagcagaacgatctccaggcagatggcgaaatgacccagcggactgaacgcccggcccgtgtaggtgaggaatgccaatgaggcgccgcaaagtagcagcgcagttaccgccgaggtcaccgttcggtgctccctgtacaggtcccaatgggtgaagcacaacgccatgatggtgaccagcgagagcatcgaaaaggagctagagattgggcgccagaagtcctccgatccgccatccaccacaaagtacaggcaccacatcagcgagcagagcaggatgtacgagagggtgaacctgaaaggcagacgtatataatcattagaaacgagatcccagaagcgaaaaggaaataattgggattgtatttccgttttaatggtataagtaactaatttttaaagaccagccacgactgcatgcaacgaagggaacatttatggcaaccaaagctttgaactttaaagattaatgggttaggtgcagtacaatatgcccaagaagccaaggacttgacccaactgggtggcgctggggttttttcccagttgccagcgatggcaagcacttcaagattcttacgttcatcccatttaactttcgcttgcaggcaggcagtgctattcatcctaattaacgccaactgcagcgaaaggaaagcggctgagaactggagcggtaagcggagaaagcggcttactcaactcaactttccaagctgtcaccatgggaacttttgccagtggaactgcattcatcacccacttggttccgctccagggagcagaggtcattgcggaactaaacgggtaatgctgcccagatgacgaccaccacctgcccgctaatctccggccattgttgatggcttagccagctgttgggaccaggagctgtcgccattgtttcgagcaactttggttggtagcacccttggtctctccatcaaaagttccccaagtgaaaaagtgtcaagtgcagagcaactgcgccttccatcttggaaaattcaaatttcggacttgacgaacttaaaactttccgaggcttacatatgccaaaagctggttcgagaaacttttctattttaaagtcctagtaaatgaagtagtgcaaatggcaacttccaggaatcacaggtgattcgaaccaatttagggaaattgtaaaaacatttggctaagatggagattgcacacatgtctaaagtacaaaatatgggtagcaaactcattagacagaaaaataccaaatgaaagttaatgccttcactagatttttgaaaagttagcttcatccccaagcgaacttaatatatttggtttaaaaattccccaggtgacaggactggcagccaaatcgattggttgtttgcctatttctggtgccgcacgcgaaactgctgcaattggccgccaaatggcccgagatggcattgacctgcaactaaccccaagccccttaacccatacctcttaccccgtaacccataccccccttcgtccacctcttttgggtaggcacacgccaacagagcatttatggcggcaatttcgccatcctgcgcagttaccagcccctttgccactaattccggacccctgttcccctgatcccgaccagaaacccatgttctttggcgtcgtgttgattgcatgcacgtccgtgtgttggactcccctgcaattccatggcaccgtacacctgcaaaagggttagtaaaaaagggtctatccaggcggaaggcagtcgttggggtctttgggctaaatggaatctccgccaggtgtcagcgaacctgtgacttttaaacacataattggatgtggaaaagtggtttgaagtgtataataataaatacatatttaataggattttttgaggatttttaggtactgaaagtttttagattttccattccgccacaattactaaaaataaactagtgggtgcagccagcatttgttagccatttattttcgtgctcaatgcatttgcctcactttctaaaggtttttccattttgcacaccattttttacgtatttataacgatttaaacgaaaagatatttaaattgttccaaatcggggtgaataaatgacgttgtaaaagctttaaactgactgtattcccctggtagagttggcctatttgttcttttgattgcgctggctgacagctcgatttgcatagttgagtacttgagcagttgggtggaagccacgatgatggacgggttgacccactgaccccccttcagatttaattccgttttggatgccatccctctgtgattttaattacaagagcgcgggaaaacccaatgctactgataaaaatattcaaacccaaaataaagcatataatttaagaacacaaatcatatgaatctgaatttggaaaggggaaataaggtactttaaaattttgttgccttcactgatttagagtgaaggaaagttgtaattttgtttcggatatattgcatagactgcatgtggcgtctatatccctcacctgtatcgcatgcggacgtgtggaaagacgctggcctggtactgctcctcgaggaccggggaatcgaacttggggtccagccaggatttggccgccgcccgctcgaatgccactgggagcatcacgctgcagcaggagtgccgccggcccgtctggctcaggtaggtctggatgtggggcgccaaggcgatctggatgtcatcggtggagttcgcacggctatcgttgaccagaacgcccggcggcatcgccctggagctcaccgactggcggcgcgactgcaagtaaaggaacgaaatgcttaaatagtattgcaagatatagtgtatctaaaatttatcctagttaatgatattagtacgtctattaaatattattaatacaatttaagtggcttgtcattcctttcggcaataataaatactggaatgtaaacatgatttaatttcaatttctaaaaacagcattttagctcttttgacttttagaagtataaatttttaaacaattacgcgactaaaagagtccgcaaatcgtgtggcacaagaataaaagtaaacaaaattataattaatagcaacaaaggggttgaaatgcggggattagcgtattatttaacggagcaacggaggctgccattgcgaatgggcgtggcggtgggtgcgaggtcaaaggtcacggccaagggaccccaaatctttgccatttcgcaaatgggtcaatggctttccgagctattatttccccaggcgaatcgcacaaaattgcactgagaatctggcatttttcactttatttcaactgtatgatattatttaaaaaaaacattaaacaaaaacacatatcaacgacccaaaaactagtgacgatcgcacctcaccaccaacacaccagagttctaatatctttacttttgtaacgaaaaatgatttttttttaagaaaatacaatttccaaaaattatgtgcacatacagtgctgttcgtcactacgtggactgccggccactgtgataaatctctgatttatggccctcgtaaaaattccttttgaaacgctttttaatttcctttgccagtagtatttctcatttttgattatcaccaaaaattgccgcagcgcaagtcacgcgacatcggctttgatttctgatttccgatttttgacttctgatatttgccagctgatttgcgattgttgatttcattcggccttcaatttctgacaatcttatcgggaaatgggcgaacgatgggtgcccagagagccagaagccaaaagccaaacgaaagcagcagcccaaatgcagccaaaaatcgctgggaaaatcaaaaagcaaaagaaacttaaatgttggatgcccaatcgcatcgcgtatacgacccgtgggcggcactcgagcgaaacgttcaaacaaaacgaacaaagttgctaagttaatcataaaagcattccccatacaaagcgacttggttgttcattaagaagccgctaaaaagtcggtccaaaaatagaagttggtggaataaaaaaaaaattaatagataaggtgcggagtaacaaatctaaaaatgcccccaacacaatctatcatttcaataatttcataagctattttaaacattgttagctactcgtaaaagtgctaagatttcattggtaaaagtcttaaaataaaacatttatagttacgatcaaatagaacaaaaagtttgaatgtcgaacaaaggggtattaaaaatgttctgacaagcttttatttatttgcgtggggctaagatacaagaaacaagcgcgattacaactttctttcacctttttcccctttgaagcgacttttgggataaagttaaccaaatctgtgggcatattgggttttcttttgaccgctgaatccttttcgtaaccgcctacccaagccaaagcaaatatttaatttgcaaattgctagctgacccttgaattgctcttaatattttgtttttttgtttttcttcatcatttagggattgcggttttctagtcttcaattgctcctacctaccgaataacaatccacacaaattccatgaacgtgagttaaacattgcacatatattcgaatggtcggcaaatgcgcgacaataacgttaaaataaacaattcacttagagtccaagcattttcgtcgtattttcttcgttatttattggcaattggaaatttgcctctcgcgctatgcgtacgttattcgattcgatttgaattcggatttggattcgatgtgatacgattcgatgcgatgcgatttgatgcgatttcatttgattcgatttgagagtgaaacgaaaacagtaaacgatacggcggcaaaacggaaacaaatggctttcaagcggcgaagcggtgcggttcaacgaattccgttgacgcgtcgctgaatgagaactgatttaaattttttcggtgcgacgttggggattgtgtcgattgtaccgccgtcgatcgccagcggtaaaatagcaaacagcaaacagctgacagaggcagaagcagaagccacagccacatcgtttggagaatgcaaaaagcagtcagcttatcgtctacctgataaggccaggtgagcgagaattggcggcgagtaactgagcaatcgctcgaatcgctggaatcgaaatcgaagagcgatatagatagggatctatctacttgagatcagtccagttttgaataacgctttcaagtggccaaggattcccggccataatctatgaggtcatattcagagataccccctttttgaagttgggcgactttgttgttggacccgttggaaatataacagaaaaaaattaaatataaatagcgctcggctattccggcagttgtagccagataagataaggatcgcccccagacacgattctttctttgccatgtgaactggccgggtaaatcgccttgaacttcttcggcgagtgcactcatttacacactaaccccttcgcgctgccattcactaacttacacttggagaaaagatagggtaacttgtaggaattactttagcaaattgcaagaatatatgagtatttcatttaatttacttattataaggcctttgaataatatttattattgcgtctggcctaagttgatctcattagtatgttcataagatcaatgtcaacttcgcaatatagtatacccaggaattaacacatttgctgaaattatatgcaaatacaggcaacagaggcggcaca

SEQ ID NO: 19706 - DNA, 6597 bp, DROSOPHILA
gaattcaaatcgaatcgaataacgtacgcatagcgcgagaggcaaatttccaattgccaataaataacgaagaaaatacgacgaaaatgcttggactctaagtgaattgtttattttaacgttattgtcgcgcatttgccgaccattcgaatatatgtgcaatgtttaactcacgttcatggaatttgtgtggattgttattcgtcgcgccgccagtcggtgagctccagggcgatgccgccgggcgttctggtcaacgatagccgtgcgaactccaccgatgacatccagatcgccttggcgccccacatccagacctacctgagccagacgggccggcggcactcctgctgcagcgtgatgctcccagtggcattcgagcgggcggcggccaaatcctggctggaccccaagttcgattccccggtcctcgaggagcagtaccaggccagcgtctttccacacgtccgcatgcgatacaggttcaccctctcgtacatcctgctctgctcgctgatgtggtgcctgtactttgtggtggatggcggatcggaggacttctggcgcccaatctctagctccttttcgatgctctcgctggtcaccatcatggcgttgtgcttcacccattgggacctgtacagggagcaccgaacggtgacctcggcggtaactgcgctgctactttgcggcgcctcattggcattcctcacctacacgggccgggcgttcagtccgctgggtcatttcgccatctgcctggagatcgttctgctgatctacacggctctaccgatgcccttgtggctgggcgccagtacggcgattagctattcgattgccttcgagatggtctcgcacatggtaatcggatgcagtgcgattcatggaggtcccatgcacggcggaggtggagcagctgggggatcaggaatggaagccaacggagatcccagcaataggatactcatactgcggataatggcccatctgagtgtgcatttggtgggcgtgcatgtgctgatcatgaatctggtgcgcatgcgcggcaccttcatgaaggtgggtcagaatctcctcgtgcgtcgtcaattggagatggaaaagcagctcaaggagaagatgatacactcggtgatgccgccgaaagtggccgatatgctgctcaatgagggtggtccgtcgggtctggatgccggtggattgccaccggaatcccactacatgcgaccacgtgcctccaacgatgtgaagtccctgttccgaccattccacatgcacagcatggagaacgtgagcattctattcgcggacatcgttggcttcacccgcatgtcctccacgaaaacagccgaacagttagtggagatactcaacgatctcttcgagcgttttgacgacctttgctcgctgagtggctgcgagaagatctccacgctgggcgattgctactactgcgtgtccggttgtccagagccacgggcggatcacgccatttgctgtgtggaaatgggtctgggcatgattgatgccatgcgctgcttcgatgcccagcgccacgagggtgtcaagatgcgagtgggcgtccacacgggaacagttctctgcgggatcgtcggcacgaggcgggtgaagttcgatgtgtggagcaacgacgtcagcctggccaataaaatggaatcctcgggcaaaccggagcaggtgcacatctcgcaggagacatccagctttttgggcgatgcctactacttggaggagggcgaggaggtgtttggtcatcgtacttacttcgtggtgggaagacgacgcgacttcacacgaaccaatagcctgagtcccagcatgcctgcgaatgccactggcagttccctgctcttgcccggcgcccatggcgcctccctttcccagagtgccaccaatgtgtcggcggtgcagccgaacgttcctccggcctcgccggtgggtcagctatccagctcgctgaatccctcgccggtactctccatgcgaccgcgtctcacctcgttgagcatgaagatgcgtaagaagtcgcagagccgcgaccgggatgtggaacgtggcatcatccatccggcggcagcgggaattcctccggtgattgtggtgcgggaacgaccgaagatcatcattaccaccaagtccctgcccggcagtctggactctgatgaacaaccaccagtcagtccaccgttgctaccgccggcaaatccaccagcggccgaaacgcgatcgaagatcaagctaaaggtgtggaaaattcctcgattccttaagcgatttgaggatttaaccaacaggagcagctgtggcggcagctcctccgccggtcatctggacaaggaaagagagagggagcgggagaaggagaaggaggagctgcaccagcataatcaactgaatcccgaggagaccttggcattcatggacaaccagatgcaaaatggcaacggttgtggctatcagcagttgcccgttttggtagagtccaaccatcgcactcagaccctggacattccggccgctcgtccggtgctccatcatgcagctacatccacggcactggcaagcagtgtgctcagatcgccggaggcgggagtcagtggaggcgggggttgctgttctcctggtcagtactccatgtacgatgacatcatcgatgtgcgatcctacatcagtcagtcacggagcgatatatctccattcggtcgttcgggcagctatagatcgcaatgtggccgccagtcaacgggaggggtgaacggagcaggaccagcaggagttggggccgaaggaagagctggtacctcccagacagcgccgccagtagagcaatcgccactcccgcgaccacgagcatccaccttggcaaccggtagacccacaccgaatagcctggaaccgggcccttcctcaacgagtccctgttgcttgccagctccgggcaactccgtcggaggtggtggcatctttccgcccacgcactcccgccagtcgagcatctgcccatcggccacgtcgcgcaaggattccgggatcaagagcaactcgcgcagatcctcgatccaacagcaaatctatgcactcaaccagacggcgattagtcagcacagggtctccggttactttaccagctccacgtccagtatctccaatttgggagaggtccagggactgggtcttccgctggcggtacaaccgccaccgcctcttttgatgcccgcctgctcttcgcaaatggcggatccactggccgcctgcctgcagcaattgcgcaagcaatcggatcttcagcttatccgttgcgttcgggataatgccaggtcgcagaggagctatctggtcaaaccgccgttgcggaaattcagtttatacttcaagtcacggcagttggaacgcgatttccgctcgaaggcccatcgttttggagcggaaaatgagacggaaggaccgccgactttggccacgccacgctataatacctacattgatatattcgtggggattgcggtttatctgtgcatctccgtctcgctgtttttgatgacccagaacacggtgtcgcccagcttccggctgtgggtgaccttgttctcctgcttcacaggcatccaagtgttcgccctcttcctcttcacaaggcaaatgtgtcgccggcagagcggtagcaatgttagcaatcgattccgttccaagtcgacgaccagtgaggatttggagcgggatgagcgaggagctgcaccgggaggaagaccacattttgagtcctgtgccgatcgcattttcgaggccatatccagctggtatccgtggcacatttgcctggccgttctgatggccatgccagtgctgttgatcatcgccaactttctgctcctggacttggagcaactggaggcgtttgagtaccattatggattcctgatctttgtgtgcatcgtgcacttctgcaatttcacacagctgaattgttgggtgcggaatgtactggcctttttggcagccctctgctttattggcattgcagtgtcccagttgatggtctacagtcacaatcggagtgaccagcagcaggatcaggaggcgtcgaatttcatccaggagatcaagtggtttcaggactatcatgtggaaatctatctggatctgctgctcatcctggtgttggtctggttccttaatcgcgaatttgagattggttatcggctgaccttctacggcaatgcggtggccaatcaggataaggtccgagtgcagaacatgaagaaccaggccgacatgctgctccacaacattatacccaagcacgtggctgagcatctgaagaacacggccaagtactcggagaaccatcacaacatagccatcatctttgcctcgatcgtgaacttcaatgagatgtacgacgagagttatctgggtggcaaggagttcctgcgagtgctcaacgagctgattggtgactttgatgagctgctctcacgtccggaattccgggctgtggagaagatcaagacaattggttcgaccttcatggcggccagtggattggatccctcgcatcgcggcacgggggacgaacatattcacacactaatggagttctcaatcgccatgcaggaggtggtggatgccttcaacaaggatctgttggaattcaatctcatcctgcggattggcatgaacattggcgatgtgacggcgggagtaatcggtactagcaagctgtattacgatatttggggcgatgcagtcaatgtggcctccagaatggactccaccgggctacccaatcgcattcaggtgggcaaggattgcctgcccttcctcaccaatcgctatgagttcgagccacgtggcagtgtctatgtaaagggcaaagatcacatggaggtgttcctctacacgacacgaagagataatccactggatgatgacgaggctgataaggttgaacaattgggcaccaagaagatggagcacgaggggcgggatgaggatgtggtgcagggcgagcagcaagcggaggacaaagacgaggaggaggaggaagaggaggaggatgatgacttgcactccagtgagaccaccacgctcttcaagtcacaggaatcgctgcaggcgaatggtggcagccacttggcacccaacgccgcagccaccagccacacccacacaattaccctaaccaacaacaacaaccataacagcagcaacatcaacaacaacattgccaccagcaacacaacaacaacagccaacaacaactcaatgccagtggaaacttaggaaaattgcggggtagcaaggcacttgaaaaatggtttcaaaattgcatttaatgactctaacggtagggcagcaagtttcccggacaaccagaccatccgtcgtcgacaaccacaagtggctaagagtatggagctgttgccagaaaaccaaaccagatccaggggataaaaaatcggtggggcggggcgaggaattacccgaaggggtggggggttgaaaattaaaaaaagcaaccgtgttttttgtgatataaatgaatatgaatagatagaaacgttaggaacgatagaatcgggtaaaagttgctagtgattgattggttaattgattgatccatcgattgattgttgttaactgcgtttttcgggatggctaacgtgttggagcattgaaactccaaacagaagcagaccattcggcatatgcaaaatatgtgtgtgtttaagtgttactagccgccagttgactcatctgcacaaccaaacgaagtgctttctttccattctaccactgttttttttttcaaatagaattaactacacttaattaaactaatggaaatatgtggctttaaatggtagtagcgaaatatagatgtggattgtatgtagattcaatgtaccatagagttaacccactatgcatataagtaactaaataacaatttttttgagccaacgaatggatattacctgtatgtattggcccgttgttcgatgttgatcaatgtgtgtatataaatgtacgtagctaaagttaaacgattgctgattgtgtttcgcagacgaagatctgttgccatataagcggggttttttggggtcggattatttcggatttcgaagaatcataaccaaatgataatttcgtcgtctgtttttagctattacatcgcagtaaatggcgtggaaattggtttcccagtgtagcttcatatattttttttaaagttttttttctagtaaagcagttatacgatctacatatgtatgtagttataacatgcagcttttacataaaatgtaccccagcaaacgaccgaaaagtatgcaccaaaatgcttgccatacacacacaaagacacgcactcacccaccaaaaaaaaaagctttcaccacactcacgcacacacacacacacacacacaccaacccccaagacaccggaaaaaataattttatagccttttgtataatttttttatacaaacacaccttttgtgcaatgcaacattgccagtttctaatggtaaacttaagcagaactctatttccgccacgaaaaaaa

SEQ ID NO: 19707 - protein, 1690 aa, DROSOPHILA
MPPGVLVNDSRANSTDDIQIALAPHIQTYLSQTGRRHSCCSVMLPVAFERAAAKSWLDPKFDSPVLEEQYQASVFPHVRMRYRFTLSYILLCSLMWCLYFVVDGGSEDFWRPISSSFSMLSLVTIMALCFTHWDLYREHRTVTSAVTALLLCGASLAFLTYTGRAFSPLGHFAICLEIVLLIYTALPMPLWLGASTAISYSIAFEMVSHMVIGCSAIHGGPMHGGGGAAGGSGMEANGDPSNRILILRIMAHLSVHLVGVHVLIMNLVRMRGTFMKVGQNLLVRRQLEMEKQLKEKMIHSVMPPKVADMLLNEGGPSGLDAGGLPPESHYMRPRASNDVKSLFRPFHMHSMENVSILFADIVGFTRMSSTKTAEQLVEILNDLFERFDDLCSLSGCEKISTLGDCYYCVSGCPEPRADHAICCVEMGLGMIDAMRCFDAQRHEGVKMRVGVHTGTVLCGIVGTRRVKFDVWSNDVSLANKMESSGKPEQVHISQETSSFLGDAYYLEEGEEVFGHRTYFVVGRRRDFTRTNSLSPSMPANATGSSLLLPGAHGASLSQSATNVSAVQPNVPPASPVGQLSSSLNPSPVLSMRPRLTSLSMKMRKKSQSRDRDVERGIIHPAAAGIPPVIVVRERPKIIITTKSLPGSLDSDEQPPVSPPLLPPANPPAAETRSKIKLKVWKIPRFLKRFEDLTNRSSCGGSSSAGHLDKEREREREKEKEELHQHNQLNPEETLAFMDNQMQNGNGCGYQQLPVLVESNHRTQTLDIPAARPVLHHAATSTALASSVLRSPEAGVSGGGGCCSPGQYSMYDDIIDVRSYISQSRSDISPFGRSGSYRSQCGRQSTGGVNGAGPAGVGAEGRAGTSQTAPPVEQSPLPRPRASTLATGRPTPNSLEPGPSSTSPCCLPAPGNSVGGGGIFPPTHSRQSSICPSATSRKDSGIKSNSRRSSIQQQIYALNQTAISQHRVSGYFTSSTSSISNLGEVQGLGLPLAVQPPPPLLMPACSSQMADPLAACLQQLRKQSDLQLIRCVRDNARSQRSYLVKPPLRKFSLYFKSRQLERDFRSKAHRFGAENETEGPPTLATPRYNTYIDIFVGIAVYLCISVSLFLMTQNTVSPSFRLWVTLFSCFTGIQVFALFLFTRQMCRRQSGSNVSNRFRSKSTTSEDLERDERGAAPGGRPHFESCADRIFEAISSWYPWHICLAVLMAMPVLLIIANFLLLDLEQLEAFEYHYGFLIFVCIVHFCNFTQLNCWVRNVLAFLAALCFIGIAVSQLMVYSHNRSDQQQDQEASNFIQEIKWFQDYHVEIYLDLLLILVLVWFLNREFEIGYRLTFYGNAVANQDKVRVQNMKNQADMLLHNIIPKHVAEHLKNTAKYSENHHNIAIIFASIVNFNEMYDESYLGGKEFLRVLNELIGDFDELLSRPEFRAVEKIKTIGSTFMAASGLDPSHRGTGDEHIHTLMEFSIAMQEVVDAFNKDLLEFNLILRIGMNIGDVTAGVIGTSKLYYDIWGDAVNVASRMDSTGLPNRIQVGKDCLPFLTNRYEFEPRGSVYVKGKDHMEVFLYTTRRDNPLDDDEADKVEQLGTKKMEHEGRDEDVVQGEQQAEDKDEEEEEEEEDDDLHSSETTTLFKSQESLQANGGSHLAPNAAATSHTHTITLTNNNNHNSSNINNNIATSNTTTTANNNSMPVET

SEQ ID NO: 19708 - DNA, 7619 bp, DROSOPHILA
gatcgacgcagcctggaatcgctacgctttcaacgatgagaacgttcccgtttggttcaagctcgatgaggacgagcatatgaccaagccaacaccggtgccgaaggagctgaccgccgagtaccagcgcaagttgcaggaggtgaacgtgcgtccgatcaagaaggtcatggaggccaaggcgcgcaagcatcgtcgtgccacgaaacgcttggccaaggctaagaagatggccgaaaagattatggagaacagcgatgccaccaaccacgagaagtccaagcaactgaagaaggtgtacaagaaggctcaggagaagaagaaggaggtcacatatgtggtggccaagaagcagacagcagctcgacgcgcacgtcgtccagctggcgtcaagggtcgctataaggtcgtcgatccgcgcgagaagaaggacaagcggtcaatggatgcaaagaagaggcgcgaaaagggttcgaagggtcgcaaggggaaggggcgtaaataaatgtaaatctaaaaaataaatatgtaatattttatagatactaaatatatatataaaacgaatcaggtagttttttttttctttgaatatgattttatacacttaaaataagaaatcagatgcgaaactgcaaatataaacgcaaaactgttgtttcctttgaagaatatatgtatttatattaaattcagctgactattgacttttccatgcccattgcaacgcctttaagtgcgaagaaattcgaaaaaaaaacatttttcagctgcaagaaaccgaaagggagccattcaaaaacacagtgtatgttttcagaggaagtcttttgcactctttttgaattctttaatttatttcgattttatgcgttatttcaaaaaaaaatgtattgacttttggataaatgccgtgcatttggacgccaactgccatttgacgttggtaatgcactaataaattttaaacaatatcgaaagcaaaaccattttgaatatctgagtttgcggctatacggagtaatccgtgtaagctagtgtattataggttatttttaatttgtaataataataataaataaatgcataccggtctgttaaatattatttcatttccatataaataattttataaatgagatgctgtttactattccaatacaattcaaccagttattttgagttcttattttatgtattctaatagtatacacatataaatatttttataaaaaggtatgaagggacttgtagataagaagacatcgcttttttttattatccgctctcctcgcaattgattttagctgatcatctcgcgatacttcagcttgtgtttggtcagcatgtccgtcactgtgaccagcttcttaattgaaagtatgttggatagctcgtgcagttcttgcgaatgagatacgcagatgtgatgcaaggtagccagctcgcgtcctgcaggaattataaaagaaatcattgtatatttaataatataacagcgccaaatagaaaacatgagctgacaaataattaccagtgtcttgtgaattcagatttgtactttgttcgacaaacattccaagcggttggttcggatcgttcaccgaggacagttgatccaagaaaacaatcatacgctccttgttcttcaagataaacggattgacaacctccatgtattgttcctaaaaatgaaaaagaaatcgaatttattttggtaatcacataactgagtcgaatcgatacgcaccttgccgccgaattcaatcaagttggccagattctgcagacacttggcgaccatgaccaaagatcgtgttgctgccatcggtggcgtctcgctgaccaatccaaattggcgtggattgagcagcgctgggcacagaaggcgcaagaatataaagccagagacgacgcgtgtgcgaacgagccgctctgtcggccatttggccatcacagccttctgaagacagctgcaaatgaaacgcacgttgcgtggacaggcgtccggtgaagtgaatatcgactgggtgaccagatcgaggatttgcaatagaaactcggcattcgtacaggcatcatcgttgacgtccattttcgtgggattcaattcagccgactgcttgctctccaaaatgcgctgcacggtttcgctgacggccgattgcaggaagccgctgcattcggtgcgcatatatagatccattagggtggtggccaaggatgcgccacggaaaagcgttgtggtttcgttttcgcgcgtcacctccgcttggcacagcattcgaattagttccgtttcccgtttctcctgcctaaagactcgcaacagagccgtggccaaaggaacccgatcattatggcacaattcagccagcgccttcacagcatacagctccgattcgaggagcaattgctgcagaggactgtactcttcacacggcattatcagatcgtcgaggtagcgcatacgcaatcgtagcgagccccattcacccatcggcgtcatgccagtgagttggtaccagccctcggtttcctggccattctttagactagacaagtcaatggttagctcagccacttcggagtccttaccgcgtttgccgcgcgatattaatgttatggttagggagacaacatctggcggaacatcgctgcaagcaagcaagttacaaacatatattattcgataagttatcaaataggcgaaggaatggtagacttactctagcacaaactcctcttcccaaacgggttcgggtgcaattttgacacgagttttgcccactttgacttgattgagggaaatactgcagtatggatgtggcactagtttaaatggtaatcgatgagcttccagcacatgcagattaagacaacgaagctcacgaaggcgtgataccttcttctgggcacgactcagctgggaatcgcattgtgccttgagcgaattaatccactccacgtagctttcctgactaggagcacacagatacgtcactgtggccaagcatggcagggccctttcgacaatttggaagcaatagggacgctcccacagcgaatcgtgacattgatagaggtaagcacaggacaaatcgatcagacccttcggtttggtcttcttcggattgtcgtagaagcatagttgcgtctcggaaccatcgttgattaaagcgaaatagagttgcttccatttcgtcgttttgtccgacttcttgttcaaatggccgtgatgtttgattcccttgatctttttgagaccgatttggtcacgacactcgcgcaatgttgcgtagatcttttcagcggccttttccacaacatattgctgattgaactcgggctgaatgccattgacaactggatggttcagtgagtggccctccacaatttgctctttgcgatatcgatttataaccgcatccaagcattcgaatgtacgaccgcccattaaatagcgcacgcctttcttttcaatacgaaagcgttggatttgattgtttatatgaaagaatagagagtaatcccccggtgagttgtcacttgggcgaacgaggaaacttcctggtccagctgttaggatgaaaaaatgtgtttcaattacatacatatagcaacagagaaaagtcgaaaatatcgattgtaggcgtcactagaagaagctcaaaattctaaggattcatctcgtgaatctcgggaaagcttgctttccttacttgtaggtaccttaaactaataatacacacctttaaccaacatatcgacggcttcgtttttggtgcagttgggatggaaccagggaaacaccgtatttggatcgatagatacatccagatcgtcaacaagttctctgaatatcattccctgctcgcccgtacgatgggcagtcacccacaaccagccatcgcccatgtcattgtgtacaaaaaagatatcacctttctggaaactcagttcatcggtctctggcatttttgtgtaaggcaggatggctacgacgcgtttcttatcattaactggctccggcggagcaactggtatggccaagcgttcgcgtttcagtagatcactacatgaggtatagtaaccaaccaagtcgcttaaggaaatgaattgtcgtcctccgatatagaagtctccgcacacagctgtaatcctatgttaacgatacaacatacatatataaaaaatcattcaaaacaatggcatttaatgggtatcttaacctattacttaccgaaaatgatttatgccggtgcggccataataactcagaacataggagccaggtttgcggtcactttcgcgaactgctcagcattaaaaaaagaacacaaaggtatttatttagtaatactttctcaccttcgaataccatcttatacacacctaaatagctgcccagtttactgcttccgcgtaggcgagactctgcagagtagcgatcgagtcgtccatggtaccattcgctttccggaggagcaataatcgctggacgttcacctgcgtttggagtttgcaaggaaaattagttatcgatcgaactacaatgtatgggcatgtaactttacttaccattcagcatatgtggtccatcgaattcatcgtgatccaattcctgagccaagtcacccaagtcgatgccgccaggtgccattatgccacccaatccggtcatgccacccagccccgcaagattcccatcatccgaacagcccgttggcgatccgggcttatctttctggatgacaacatcaatgtttcccaaatgtattaggtccgccattgttaggcttatgatctctgttcagcaaatgcgagtcttagtctatatttaacttcgagtggaattcgatttaataaaagccacatatagcaatgataagaatgcgtttaactgaggagatacgttaacttttgtgactgtgtggggttttccgtgctaaactgtaagaagaccagataaaaacacttagctgccttactttgattacaatacgaaaatcatatttgataaaaatcagaaatcagattagagagtcactaatagaatcaaatgcttaactaaaccaagatatgtctaaaaccattcactaaaaacgccccgagagatttgttagttctagtttccgctttctaatgctattaaatatagataatggaaaataattcggaattcggggcttaccgtgaaatcattttctttgccatatcggtggtggtaatctcacaaaaacaaattggaatagattcgctataagtgtccaaaacaaaattcgggtccaatgttacgaaagttgaggatctaacaaataatttaacaacgtatgcaaaattgtggggcaagaatacatcacacctacactaaatacgattaaacctaagcctattggtaaaacaagaaatttactaataggcgctattacaaccgattacaaccagcaccagaaaccgggtttattaattagaatatagagacaatgctactttatatccaaaaccatatttaaaagcaattaacgacgtagacttcgcagtaaactaaatgaaagataagatggacagcacatccatcagctgtttgcgctttgtttacttttacagataacaaatcaattgtgattgtttcagtcagtaatataggagtgtagtgaacccacagcttagacaacaaaaaaccatacaactttaagatctttaagttgtttcttctataaagattttcatcttagaatctgtatattgattctatacgttttcaatgtgtatggataaggaaaattgtctattccatttctttgatattttaaacggtttttcatcgaattattaaataaacatttacctctggacgaattaagctgtgagccactgtacatatgtacatattgctctttgaaatcgccgggcgactgactttcttacatatgcgcagacatttttaggatatttcgagttgtatgaaagtacaagttacttatgaattgtaacaccgtatatatactttatgtacattggtatatatataggaatatgctgcaccctcttgtacatcaacatctatctaaaacacaagcgatttatatgagccgcacaccacacacaaactttaggctaagccctttttgccaaacgagccgaacacaaaaaaattcattcggttcttttcttcatacatacacgacccgaagagtcatcatatcatcatcatcatcaacaccatctcatcatcatcaacatcgtcatcaccgtcgccgtctttatcatactcctctcaagcggggtaattactgcccatttgattcacaatttctgggctgtgttcggtttgtgattcctttgtaaatgaatcattagcacaaccatttaattctctctcatatgggtaacaaaaaatacaaaaaaaaaaaaaataaaaccatttacacagaacattaatcggttaatgcgcatgtgtaaatattttcctctatatactttacattgcactgcagcaccgagctaaaaaaacaaatcgcgctgctgggaattgccgtcttttatttgctcaacttgtgttattcataacaattgcatatttaaaacgaactaaaatttcttccgtaccgatagccacagaattcaattgtgcgcagtgtgaacgtagtgaatcatcgaaatataccacacacccaacttatcggacgaatgtatgtgcgtcaagatagcgccagagagtacagctcgaataagaaatcgattataaacgataagccaatttaagatataatattttaaagaaaaaacaaacgcaaataatatttattcagcatttgaatgtacatttcttaaatgaaaagctaatatgtgttgaaattacaaaagatgatttaaacactttgaaaataacacatgttttttgtgcgcacgaaaaccgttagccgtcaaaatctgaaatggggtaaaattaagtttatatattttcatattttcaagcttatttagacagcaggcggcagcccgaatctttgtcattcgaatactattatatggacacaatactctgaactgaacagttcgacatcagtgggatttagaaggcataatcatgtccaagcgccaacgcgatgttcacgatggcgctggaaagaaaatagccaagattcggtttaagaagctcatccgatccgtgatactgaatatgcagtggctaagtgagctgcccgaggagggtggaatatcgctgaatgtgaagaagaacgttgccatgctgcgacagaagcgcaaagtgggcatgatgaccatggccgtaagtccaacgaacctcttctttcatatcaaggctagctcaagagtttattcctttttgtgtttgcttaattgcaggagaaatcgctgctgcgcactccacatgctaagcgttccgtcgatgagaggaaaaagctctgcaccattgtggcaaatctggcttgcttttcaaaatttccgccagtgagtagcgcgctgatcatttgtacatatgtataatattacttatccgacctgttaccccttttagaaagtccgcgcccgtcttgttccgattgtcaaattcatggcaatatctcccgggcgtattgttatgaaggaggagg

SEQ ID NO: 19709 - DNA, 3675 bp, DROSOPHILA
gctatcggtacggaagaaattttagttcgttttaaatatgcaattgttatgaataacacaagttgagcaaataaaagacggcaattcccagcagcgcgatttgtttttttagctcggtgctgcagtgcaatgtaaagtatatagaggaaaatatttacacatgcgcattaaccgattaatgttctgtgtaaatggttttattttttttttttttgtattttttgttacccatatgagagagaattaaatggttgtgctaatgattcatttacaaaggaatcacaaaccgaacacagcccagaaattgtgaatcaaatgggcagtaattaccccgcttgagaggagtatgataaagacggcgacggtgatgacgatgttgatgatgatgagatggtgttgatgatgatgatgatatgatgactcttcgggtcgttttagcacggaaaaccccacacagtcacaaaagttaacgtatctcctcagttaaacgcattcttatcattgctatatgtggcttttattaaatcgaattccactcgaagttaaatatagactaagactcgcatttgctgaacagagatcataagcctaacaatggcggacctaatacatttgggaaacattgatgttgtcatccagaaagataagcccggatcgccaacgggctgttcggatgatgggaatcttgcggggctgggtggcatgaccggattgggtggcataatggcacctggcggcatcgacttgggtgacttggctcaggaattggatcacgatgaattcgatggaccacatatgctgaatggtgaacgtccagcgattattgctcctccggaaagcgaatggtaccatggacgactcgatcgctactctgcagagtctcgcctacgcggaagcagtaaactgggcagctatttagttcgcgaaagtgaccgcaaacctggctcctatgttctgagttattatggccgcaccggcataaatcattttcgtgatctactgaaacgcgaacgcttggccataccagttgctccgccggagccagttaatgataagaaacgcgtcgtagccatcctgccttacacaaaaatgccagagaccgatgaactgagtttccagaaaggtgatatcttttttgtacacaatgacatgggcgatggctggttgtgggtgactgcccatcgtacgggcgagcagggaatgatattcagagaacttgttgacgatctggatgtatctatcgatccaaatacggtgtttccctggttccatcccaactgcaccaaaaacgaagccgtcgatatgttggttaaagctggaccaggaagtttcctcgttcgcccaagtgacaactcaccgggggattactctctattctttcatataaacaatcaaatccaacgctttcgtattgaaaagaaaggcgtgcgctatttaatgggcggtcgtacattcgaatgcttggatgcggttataaatcgatatcgcaaagagcaaattgtggagggccactcactgaaccatccagttgtcaatggcattcagcccgagttcaatcagcaatatgttgtggaaaaggccgctgaaaagatctacgcaacattgcgcgagtgtcgtgaccaaatcggtctcaaaaagatcaagggaatcaaacatcacggccatttgaacaagaagtcggacaaaacgacgaaatggaagcaactctatttcgctttaatcaacgatggttccgagacgcaactatgcttctacgacaatccgaagaagaccaaaccgaagggtctgatcgatttgtcctgtgcttacctctatcaatgtcacgattcgctgtgggagcgtccctattgcttccaaattgtcgaaagggccctgccatgcttggccacagtgacgtatctgtgtgctcctagtcaggaaagctacgtggagtggattaattcgctcaaggcacaatgcgattcccagctgagtcgtgcccagaagaaggtatcacgccttcgtgagcttcgttgtcttaatctgcatgtgctggaagctcatcgattaccatttaaactagtgccacatccatactgcagtatttccctcaatcaagtcaaagtgggcaaaactcgtgtcaaaattgcacccgaacccgtttgggaagaggagtttgtgctagacgatgttccgccagatgttgtctccctaaccataacattaatatcgcgcggcaaacgcggtaaggactccgaagtggctgagctaaccattgacttgtctagtctaaagaatggccaggaaaccgagggctggtaccaactcactggcatgacgccgatgggtgaatggggctcgctacgattgcgtatgcgctacctcgacgatctgataatgccgtgtgaagagtacagtcctctgcagcaattgctcctcgaatcggagctgtatgctgtgaaggcgctggctgaattgtgccataatgatcgggttcctttggccacggctctgttgcgagtctttaggcaggagaaacgggaaacggaactaattcgaatgctgtgccaagcggaggtgacgcgcgaaaacgaaaccacaacgcttttccgtggcgcatccttggccaccaccctaatggatctatatatgcgcaccgaatgcagcggcttcctgcaatcggccgtcagcgaaaccgtgcagcgcattttggagagcaagcagtcggctgaattgaatcccacgaaaatggacgtcaacgatgatgcctgtacgaatgccgagtttctattgcaaatcctcgatctggtcacccagtcgatattcacttcaccggacgcctgtccacgcaacgtgcgtttcatttgcagctgtcttcagaaggctgtgatggccaaatggccgacagagcggctcgttcgcacacgcgtcgtctctggctttatattcttgcgccttctgtgcccagcgctgctcaatccacgccaatttggattggtcagcgagacgccaccgatggcagcaacacgatctttggtcatggtcgccaagtgtctgcagaatctggccaacttgattgaattcggcggcaaggaacaatacatggaggttgtcaatccgtttatcttgaagaacaaggagcgtatgattgttttcttggatcaactgtcctcggtgaacgatccgaaccaaccgcttggaatgtttgtcgaacaaagtacaaatctgaattcacaagacactggacgcgagctggctaccttgcatcacatctgcgtatctcattcgcaagaactgcacgagctatccaacatactttcaattaagaagctggtcacagtgacggacatgctgaccaaacacaagctgaagtatcgcgagatgatcagctaaaatcaattgcgaggagagcggataataaaaaaaagcgatgtcttcttatctacaagtcccttcatacctttttataaaaatatttatatgtgtatactattagaatacataaaataagaactcaaaataactggttgaattgtattggaatagtaaacagcatctcatttataaaattatttatatggaaatgaaataatatttaacagaccggtatgcatttatttattattattattacaaattaaaaataacctataatacactagcttacacggattactccgtatagccgcaaactca

SEQ ID NO: 19710 - protein, 925 aa, DROSOPHILA
MADLIHLGNIDVVIQKDKPGSPTGCSDDGNLAGLGGMTGLGGIMAPGGIDLGDLAQELDHDEFDGPHMLNGERPAIIAPPESEWYHGRLDRYSAESRLRGSSKLGSYLVRESDRKPGSYVLSYYGRTGINHFRDLLKRERLAIPVAPPEPVNDKKRVVAILPYTKMPETDELSFQKGDIFFVHNDMGDGWLWVTAHRTGEQGMIFRELVDDLDVSIDPNTVFPWFHPNCTKNEAVDMLVKAGPGSFLVRPSDNSPGDYSLFFHINNQIQRFRIEKKGVRYLMGGRTFECLDAVINRYRKEQIVEGHSLNHPVVNGIQPEFNQQYVVEKAAEKIYATLRECRDQIGLKKIKGIKHHGHLNKKSDKTTKWKQLYFALINDGSETQLCFYDNPKKTKPKGLIDLSCAYLYQCHDSLWERPYCFQIVERALPCLATVTYLCAPSQESYVEWINSLKAQCDSQLSRAQKKVSRLRELRCLNLHVLEAHRLPFKLVPHPYCSISLNQVKVGKTRVKIAPEPVWEEEFVLDDVPPDVVSLTITLISRGKRGKDSEVAELTIDLSSLKNGQETEGWYQLTGMTPMGEWGSLRLRMRYLDDLIMPCEEYSPLQQLLLESELYAVKALAELCHNDRVPLATALLRVFRQEKRETELIRMLCQAEVTRENETTTLFRGASLATTLMDLYMRTECSGFLQSAVSETVQRILESKQSAELNPTKMDVNDDACTNAEFLLQILDLVTQSIFTSPDACPRNVRFICSCLQKAVMAKWPTERLVRTRVVSGFIFLRLLCPALLNPRQFGLVSETPPMAATRSLVMVAKCLQNLANLIEFGGKEQYMEVVNPFILKNKERMIVFLDQLSSVNDPNQPLGMFVEQSTNLNSQDTGRELATLHHICVSHSQELHELSNILSIKKLVTVTDMLTKHKLKYREMIS

SEQ ID NO: 19711 - DNA, 3328 bp, DROSOPHILA
agtattaatgccaccgtaaagaaaacttttacaaaacgtgagcaaaatataaacgattggctttctacccattttgcgatagcattttttgatttaatgaagtacacgcaaaaactttttgttcgtaaagtaaaaccaatctcgaacctttatattaattctgttttgattttcattactatttcctccaatattgaatatgaaaaacgctctatcgccgataaaactgtacgatatcgtggacaacagactcgcaatcgcgactccccgataagctccatgcatttcgggcgcttcaacccccaattcggaaaactttatcacaatcagcgcagcaactaccaccatcactacaacggatttatcagcagtgctagccgcccctgacgcccatggccacccatcaaaaaaatacacacaagggatcaggaagcgggaaaaggtggtgagggctgattgagcgggtgcccgaaaatacccattaatacaggaatcgcatctgataagggtggctacggtggatcacccacccaacgagctatgtgggccgatggaaaggtgagatctgcactgcaaatttcttctatggacagagaatctaatttataacacactatgcagatttgaagtttgattttattcagttttagaaaatgaggattaaacgaattttagaaactattcgaaaaccgtttcagaaattccaaatgtatgaaaatgaaaatgaaatgaaaaagatcaaattatggatataaatatttatattgaaaaataacttttaaaagtgaaacattttcgaaatggggtattctaatccagaagatcgtttcgtgaaagtactgataaacttcataccagaagtgcaagacaactaattgatataaaaaaaagggaaattaatcagctttcaatctcttttaaaatgccctattttttaagtgtaaaatcgaaggaccctcaacgagcaattcgaagtaccaaacaggtaaatggtactcaccctagcatgcatgtgcacatcgttctccccgggctgctggactccggtgcggatctttttgttttgcggcccctcggtgacgactatggttgcccctcctccgccggcgccactggcgccactgccattactagcgccgttgtagggcattgtggtcgccgttgcgaactggagcgaaatctcggggctgattaaagtttgttggtgtagaattttggcggatttttgaggcctgagcccagtggttgcgcgaaagatatattcaagtgacgtgcgacgaagccgcgcgaagatcgatttcaaaaacgcgcgcgcggtttttgttttctgtggatcacactcgaatctcctgggcgagaaatgagttgtaaatgtttactttgtaattggtgttgaatgtgggatgtttgggttgttgtttatatgatggtgtagctgttgtgggctcttctcatttatttactattcgcctcgcttcaacttccttctttggcgctgcgtaaaacactttcaactttttattgcacttgtgattggagtgataaattttccgggttcctctggatgttcctgtgatttggatttaccaggcaccaagttcccattcatcatgaagctgtgcttttcctcatccaagagcatgaacggcgcctggaacaatgcggccagcgagggcatgatcgagaaggagaacgaggtggataccaaggtggacatctacaattgagatttgattacgattgtgtaagcaagcaaacaacaaccggcttaactagaacacaatacagaacaacactggggatatgggtcgcaaacaacgtgcagaagacaacagcaacagcaaaatcagcaacaaatgcgtcaccaactgcaccaaatgctgaaacttcaactacagatccactacgatccaccaacttgatggcttacacattcgacaagaaaagcgggaatttcaaacaaattgattgctaaatcaattaaacaaaccaacaaaaaatgaaatgataaatgataaacattcaagaaaaaggaattacacttaggcgcaaacgcatgtaacttttctacgagccatttgcatagatttactgaattccaccatatatcaattcagctagttagtatgacagcctatgtacgatatggcctcgtttaaaagccacaccaaaagaaaacacacttaatgcacattacattacattgaattacatgcgtttgcgttgcaacaaaacaagcaaaataatacaaaaaaaaataattgttattattgttacaatgaagcattaggactttctcacacaacagcaaaaaaaatggaatcactccaaccaattgtaaactatgtattgtttaattgataaaaaacgacaaactaaaccaaaaataaataattgtaattcaaaactcaaaagcatgtgaaagtaactccgaattcccccctttcctccaccggctctttcccctaaaatgcacattgacccttgacccaacttcccataccccaaacccacggcagacttttgtataggtaatgtaatatgattttcatttcgatacgaatatattattagtgcaacaaaaggaaacatttctttggacaatatttcgacaagtattcgggcgtgagaaaaagtcttaacaaaaatatttattgaaaaaggaatatttgtgtaaattaaaaccaaaaatttagcaattttaaataaaatttattagttttagttatgcaaaatcgagcactgcagcaactttatggcagttgatttaacagttttttattttaacgaatgtaaaacgagcagaggaatgaattaaaaacttgcacaagccaatgtttttattattaacaaaacaagaaaaagacaagatggtaaacataatttttgtgcttaatttacaaagttgaaaaaggcataaatttatatgtatgagatgtatttgtatttatattaaaattaattttaatttacactaaatgtaaaaagcaaaataactaaatattaaaaaaaaataacaagctaagataaaagatgaaacctacaatataatttagttaagtgcaaatcgaaaagagcatctagcttagttaagaaatagcatcgttcagacatgcagacagaaaacatacaacaaaacaacatatttttgaggcgttttaaaattggaagacagagccaaacatttcaaaactccaagtgaagttagcaaagcaaagctactactaaagatgggtgagggcgtattgcaaatgcgattaaaagtagacgaaaacaaaagaattaaagatatcagcaataaagcaacagcaacaacaccatatcaaag

SEQ ID NO: 19712 - DNA, 2935 bp, DROSOPHILA
cagtttcgaggtttcgaggttcgagctaaaactttgtgcacggagcaaattaaaaataataaaataagaaataaaataataacaggcataagaaaagaaaagcgacgacaacaacaaaagctgatgaatacgtgcgttcgtgtgggtgccgtgcattctgcgtacatatttacaagcattcgtacgcttaaattaaatactttggcttaattaaatacttccgcggcgtcgttgttgtagttgttgatattttgcctcttcacgcgttgtctacggttatcgattgtcgtcgtctcgctccctcgtacgcatacgcatcgagttgttgtttgtttgttgtttgtgtctgtcctcgcgttttgtttgtgtactgacaaaataacaacaaaataaaacccgaaagactgcgaataagcataaataataaacaacgagacaagtgcaaaaagcgcagcgaaaaggccagctggtaaatccaaatcacaggaacatccagaggaacccggaaaatttatcactccaatcacaagtgcaataaaaagttgaaagtgttttacgcagcgccaaagaaggaagttgaagcgaggcgaatagtaaataaatgagaagagcccacaacagctacaccatcatataaacaacaacccaaacatcccacattcaacaccaattacaaagtaaacatttacaactcatttctcgcccaggagattcgagtgtgatccacagaaaacaaaaaccgcgcgcgcgtttttgaaatcgatcttcgcgcggcttcgtcgcacgtcacttgaatatatctttcgcgcaaccactgggctcaggcctcaaaaatccgccaaaattctacaccaacaaactttaatcagccccgagatttcgctccagttcgcaacggcgaccacaatgccctacaacggcgctagtaatggcagtggcgccagtggcgccggcggaggaggggcaaccatagtcgtcaccgaggggccgcaaaacaaaaagatccgcaccggagtccagcagcccggggagaacgatgtgcacatgcatgctaggtccacaccacaacagaaccagcagcaagcacttatgaacaagtcaaatgacgacctacggagaaagcgtcccgagactacacggccaaatcacattcttctcttcaccatcataaatcccttctatcccatcacagttgatgtcttgcacaaaatctgtcatccacatggccaagtgcttcgcattgtcatattcaaaaagaatggggtccaggccatggtcgagttcgataatctggatgcggccactagggctcgcgagaatctgaatggagccgacatttatgccggatgctgcactctgaaaatcgattatgccaagccggagaaattgaacgtgtacaagaatgagcccgataccagctgggactatacgctgagcacagaaccaccgctattgggacccggagccgctttcccaccattcggagctcccgaatatcacaccaccacaccggagaactggaagggggccgccatccatcccactggcctgatgaaggagcccgctggtgttgtgcccggacgcaatgctccggtggccttcacaccgcaaggacaggctcagggcgccgtcatgatggtctacggcctggaccacgacacttccaacacggataagctcttcaatttggtttgcctgtacggcaacgtggcacggatcaagttcttgaagaccaaagagggcaccgccatggtgcaaatgggagacgctgtggccgttgagcgttgcgtgcagcacttgaacaacattcccgtgggcactggtggcaagatacagatcgctttctccaaacagaacttcctatccgaggtgatcaacccgttcttgctgcccgatcattcgcccagcttcaaggagtacaccggctccaagaacaatcgtttcctatcgccggcccaggcgagcaagaatcgcattcaaccaccgagcaagattttgcactttttcaacacaccgcccggcttgaccgaggaccaactgattggaatctttaacatcaaggatgtgcccgccacatcggtgcgcctgttccccttgaagaccgagcgctcgtcgtcgggactgatcgaattttccaatatctcgcaggcagtgctggctatcatgaagtgcaaccatctgcctattgagggtaaaggcaccaagttcccattcatcatgaagctgtgcttttcctcatccaagagcatgaacggcgcctggaacaatgcggccagcgagggcatgatcgagaaggagaacgaggtggataccaaggtggacatctacaattgagatttgattacgattgtgtaagcaagcaaacaacaaccggcttaactagaacacaatacagaacaacactggggatatgggtcgcaaacaacgtgcagaagacaacagcaacagcaaaatcagcaacaaatgcgtcaccaactgcaccaaatgctgaaacttcaactacagatccactacgatccaccaacttgatggcttacacattcgacaagaaaagcgggaatttcaaacaaattgattgctaaatcaattaaacaaaccaacaaaaaatgaaatgataaatgataaacattcaagaaaaaggaattacacttaggcgcaaacgcatgtaacttttctacgagccatttgcatagatttactgaattccaccatatatcaattcagctagttagtatgacagcctatgtacgatatggcctcgtttaaaagccacaccaaaagaaaacacacttaatgcacattacattacattgaattacatgcgtttgcgttgcaacaaaacaagcaaaataatacaaaaaaaaataattgttattattgttacaatgaagcattaggactttctcacacaacagcaaaaaaaatggaatcactc

SEQ ID NO: 19713 - protein, 475 aa, DROSOPHILA
MPYNGASNGSGASGAGGGGATIVVTEGPQNKKIRTGVQQPGENDVHMHARSTPQQNQQQALMNKSNDDLRRKRPETTRPNHILLFTIINPFYPITVDVLHKICHPHGQVLRIVIFKKNGVQAMVEFDNLDAATRARENLNGADIYAGCCTLKIDYAKPEKLNVYKNEPDTSWDYTLSTEPPLLGPGAAFPPFGAPEYHTTTPENWKGAAIHPTGLMKEPAGVVPGRNAPVAFTPQGQAQGAVMMVYGLDHDTSNTDKLFNLVCLYGNVARIKFLKTKEGTAMVQMGDAVAVERCVQHLNNIPVGTGGKIQIAFSKQNFLSEVINPFLLPDHSPSFKEYTGSKNNRFLSPAQASKNRIQPPSKILHFFNTPPGLTEDQLIGIFNIKDVPATSVRLFPLKTERSSSGLIEFSNISQAVLAIMKCNHLPIEGKGTKFPFIMKLCFSSSKSMNGAWNNAASEGMIEKENEVDTKVDIYN

SEQ ID NO: 19714 - DNA, 5026 bp, DROSOPHILA
tgagtatctccgagctgttgatgttttgctgctgaatgcgattcaccatgtccgcgttggtcttgttgttcgaaatgcggttgagtgattcaatgtcgtcctgatactggcgaaggctctccaccagccgattgttgttctccgcctcctcgagcagcgccgtgcccagggcgtccaggtccttcacccgactggccatgcgctgcgcatccattataatctggcccacggataggttcgacatcctgcccaattcagtccagttgcgatttttggatttgtattgttttcgggggccaggccctctgctgctggcactgcgaaaacaaagggaaccgcttaaatttgtgcactttctggggcctacgagcagtgtcttacgttcggtgcgggtaaggtgcagcttcgtccctagcgtaacagcttcatttgattttccggccaaaatatgtaggaatagaaacgattttaatagaaattttgacgacgacccaattattggctgacagcttattaaatcccaaacgccatcggatgttgcacaaatccctaacgccactcattgaatgcgaaaaaatactgtttcaacacttgatataccgcaaatataccaaagatttaaattataattttgttttttaacttttagcttgagatgtcatttttttggctaaatcctttatgtttatgttaaaaaactcttttaaggttaaaaggtgaagctacaagctttattgtcatttttgtataggtcattaagaagctatcagtacagattttgatcttatcgcgaaaaatggaagacttagcgtagaatggacataatgctatgttcttaaacgatcatgcatacataaatctagttatgtctatttaagtacctatttaagtacaaacagcaaaggttttgtcattcaaagtggtagataaaacagaggtagaggaatagcatggtacatcgggcgtagggatgcacagactaaagatcacgagattgcgattacacgccaacgctgttgaggctgccggaggagaggttctcggagcgactggacagacgggggcgtttcatgagtacacgacccggcttgccgggattttcgatggaacccgcctctgcggattgatttagattgttgttgttgccgttgttggagccattgctgccgccagcacgttccagcgtgcgttgtgagcgacgcagcgaggaggaggacatcctgcgcagcgtgggatcgtagtcatagctcgacggccgctgataatagggcgcatcctggtctgtgtcattcttctcctccagcgcctgctgctgctgctgggcgagtggattcaaggttatgtggatgtgtcgtgttcgctggcgctgcttggtgggcgagcagttgcccagcggcacaaagtcatctctcagctccgccatccgtggcttgtttggattgtttccccggcttctggaattcctacgccggcaaacacagaaacaggtgctaatcagaagcagaatgagcactgccccgccgccgattgttcccgtcagcatgggactcatattgaatgtctcgttatgactgggagttgttgtatcgcggtcgcccatttgcagtgttggctcctctgtggtgctggttttgggacgttgggtgcgcccctgcttaagggcactaaattcggatgcagaggcggcactgaaggactgcaacttgaactcgtacatggtggccgtctcgaggggtgctattttaaagcttctagcatgggctccttcaatggttgccttgaaatattcccctgccgaggacgagggtcgatagtaggcgtagtagccagtgatcaggtgttcatccgcatcgctggctagactccagtgcagcaccacagcggtttcagagtattcctcgatctccagaagctctggcaccggcatcggatcaagtgctgcacctggctgcaggtaaaatttcgccgaggtattactttccttattgtcattgttggagtaaacggctaggatgcggaaacgataggtgtgctgaggcttcaggtccgtcaccgaagccgtgaagctcttgcccagctcggagttccacttcggttttccatacggtatattatcgttggttgtctgccagttcttgcgcttgccaaccatgcggtactgaaccttaaaaatgacaattggtaacccatcgtttcggggcaccatccagcgcaacattacggattcatcgctaagtcgggttacatttggaggagtcggtggatacatctgcttctgcctggaaccctgattgggcttgggcctgtgtgtaccccccgattcccggggttcctgaatctgcttgggattcacctgcagcagtgtacccgcactgtgctcaccaagtctgtttcgtgcaaagcattggacatagcccgcatgacgcttcaagacgctgtgcaatatcaggaaattattggagagctcagcctcagaatcatcgatgctgctgtgaccgttcagcagccagtagatctctggcgttggcactcctgtggccttacactccaacttcaaacgatcgccctcgttggtaagatcggcccagggtggtcgcacaatctgaggcggctgctcgacatgcacttttatgtagtgttctaacgcaggccgcactccattatcttgaaagcaaatataggtgccagcatcattaactcgggtgttggatatctccaaagcgtgtccaaatactttcgaacgcttgttcttaacagctcccacgacatcgggactgctccagacaaccgtcggtggcggtgagccaactccaggacacagcagcaacagcgaactcccttcgcgtatggtaatttcttgggagctcggctgtcccctgagcaagtgtggagatttactctccgacctctgctctggtgtaacctgtagttgcagcgagccgggcagctgaattctctcgccagaggcaggattggttgcctggcaggaatagctgcctgacgactcggaggatacattgcttagaaaaagatttccattggttccgatgaactccggtttgatttccactccgtttcgatagtaggaccaactggcagatggattcgattgcacctgttgtccgcaggaccagagcacagagtttccagcagacacccgccattggaggggtgattccgattcctgagcgtccaccaggctagtgctggccagctccaatcgagcaatggtagacgtgaccaccagcggaccgaaccagccaacgcatcggtactcgcctagagtgtctggtcggacgagcaccctcagtcgcgagatggccgcctcctgggagacattcgctttggccgtgcctgtcttaaggtacttgaaccccgctcccggagatctgctggaccggtggctccattcgaagcgctctggctgcaaactggtctcgcactccagcaccacctcgtctcccaggggcgccaccaaagattcgggtgcgcgaagaattcgcacgccaggcgatggatgcgcgggatgtgcgggatgtgcgggatgtgcgggatgtgcagagtgggcaggatgggcgggggacttctccaaaaccggaattgcttcgagccgcgacgtcagcagcgaaaagagcagcagcgaggatgtgagcagcgtcattggagggggcactgaaaatttcacgaaaatatcattgaatatttgaactcaaaggattaagagttaatggcattactcaccttattatgggattttagactgattctaggtggggaaacgcgtttgcgtttgcgcagttaataattttcactctcggctatcgcgcatcacttatggcttatatacatatgtgtgtctgtgtgcgtgcgtggaatcgtgggcctaaattatttatgcacattacacgttaacgacgcagctccataaaatcattgtatctttaattcgggcttcgatcgggccccgaagccaccggacaagcacatgcactcaacaagtcaaataaacaatggcatttattattccatggggatgctggaactggaactggagaacgaaccgcgacgctggttcagatgcattgcatcgttcaccggcgaaccggtgattccgaattcatcggttcatcgcggtacagtggactgaatctatctggtatcagatcaaattcatttattcagttcatattgaaacttactcaaaagcactcgttattaaattgattttaattaagtaaaaaaatatttagtaatattaatattaatttatattatacaaaagctacatatatttttagaaaataataaacaccaaatcatgtaagatttacgacgttatatagtcaatggcaccatagtcaatgaatttgaagtgtagtttctttgtacatttatatagaattatgaattcagctgtttatagagactgcactgatccacatcaatagccatcgatataatttgcaatactataaaattatgtcctaaaccgttttgttagatttgaattagttacccgaagccaagaattggatatcaccgttaaaataataaaatacattttccaatattttatttaattaataatttttagattatttctatagagaattatgcacattttacgcaggttgcttctgcaccttcgccaattctgccttgaacttcgaaatggtctcacgtgccagctttagtttgtccttaagtgtaacaatctcccccttgaccttctgttttacattcacaatgttgtccaacgttttcgtcttcttttcctcaactagaaaagtatatatctaatgagtaaacattcaaaatggtaatcagctcatagttacagtcagtgtcatgggttagcaacccattggcgctctgttctgaaagcaggagataatgctgcaagatctgggtgggctcctggaacactatttcctcatacgactccgagaccaggcccttcttagtgtccatagtggtgctagaggagagctcgccatcgaccacaggcgattggaagagcttaagg

SEQ ID NO: 19715 - DNA, 2957 bp, DROSOPHILA
gaataataaatgccattgtttatttgacttgttgagtgcatgtgcttgtccggtggcttcggggcccgatcgaagcccgaattaaagatacaatgattttatggagctgcgtcgttaacgtgtaatgtgcataaataatttaggcccacgattccacgcacgcacacagacacacatatgtatataagccataagtgatgcgcgatagccgagagtgaaaattattaactgcgcaaacgcaaacgcgtttccccacctagaatcagtctaaaatcccataataagtgccccctccaatgacgctgctcacatcctcgctgctgctcttttcgctgctgacgtcgcggctcgaagcaattccggttttggagaagtcccccgcccatcctgcccactctgcacatcccgcacatcccgcacatcccgcacatcccgcgcatccatcgcctggcgtgcgaattcttcgcgcacccgaatctttggtggcgcccctgggagacgaggtggtgctggagtgcgagaccagtttgcagccagagcgcttcgaatggagccaccggtccagcagatctccgggagcggggttcaagtaccttaagacaggcacggccaaagcgaatgtctcccaggaggcggccatctcgcgactgagggtgctcgtccgaccagacactctaggcgagtaccgatgcgttggctggttcggtccgctggtggtcacgtctaccattgctcgattggagctggccagcactagcctggtggacgctcaggaatcggaatcacccctccaatggcgggtgtctgctggaaactctgtgctctggtcctgcggacaacaggtgcaatcgaatccatctgccagttggtcctactatcgaaacggagtggaaatcaaaccggagttcatcggaaccaatggaaatctttttctaagcaatgtatcctccgagtcgtcaggcagctattcctgccaggcaaccaatcctgcctctggcgagagaattcagctgcccggctcgctgcaactacaggttacaccagagcagaggtcggagagtaaatctccacacttgctcaggggacagccgagctcccaagaaattaccatacgcgaagggagttcgctgttgctgctgtgtcctggagttggctcaccgccaccgacggttgtctggagcagtcccgatgtcgtgggagctgttaagaacaagcgttcgaaagtatttggacacgctttggagatatccaacacccgagttaatgatgctggcacctatatttgctttcaagataatggagtgcggcctgcgttagaacactacataaaagtgcatgtcgagcagccgcctcagattgtgcgaccaccctgggccgatcttaccaacgagggcgatcgtttgaagttggagtgtaaggccacaggagtgccaacgccagagatctactggctgctgaacggtcacagcagcatcgatgattctgaggctgagctctccaataatttcctgatattgcacagcgtcttgaagcgtcatgcgggctatgtccaatgctttgcacgaaacagacttggtgagcacagtgcgggtacactgctgcaggtgaatcccaagcagattcaggaaccccgggaatcggggggtacacacaggcccaagcccaatcagggttccaggcagaagcagatgtatccaccgactcctccaaatgtaacccgacttagcgatgaatccgtaatgttgcgctggatggtgccccgaaacgatgggttaccaattgtcatttttaaggttcagtaccgcatggttggcaagcgcaagaactggcagacaaccaacgataatataccgtatggaaaaccgaagtggaactccgagctgggcaagagcttcacggcttcggtgacggacctgaagcctcagcacacctatcgtttccgcatcctagccgtttactccaacaatgacaataaggaaagtaatacctcggcgaaattttacctgcagccaggtgcagcacttgatccgatgccggtgccagagcttctggagatcgaggaatactctgaaaccgctgtggtgctgcactggagtctagccagcgatgcggatgaacacctgatcactggctactacgcctactatcgaccctcgtcctcggcaggggaatatttcaaggcaaccattgaaggagcccatgctagaagctttaaaatagcacccctcgagacggccaccatgtacgagttcaagttgcagtccttcagtgccgcctctgcatccgaatttagtgcccttaagcaggggcgcacccaacgtcccaaaaccagcaccacagaggagccaacactgcaaatgggcgaccgcgatacaacaactcccagtcataacgagacattcaatatgagtcccatgctgacgggaacaatcggcggcggggcagtgctcattctgcttctgattagcacctgtttctgtgtttgccggcgtaggaattccagaagccggggaaacaatccaaacaagccacggatggcggagctgagagatgactttgtgccgctgggcaactgctcgcccaccaagcagcgccagcgaacacgacacatccacataaccttgaatccactcgcccagcagcagcagcaggcgctggaggagaagaatgacacagaccaggatgcgccctattatcagcggccgtcgagctatgactacgatcccacgctgcgcaggatgtcctcctcctcgctgcgtcgctcacaacgcacgctggaacgtgctggcggcagcaatggctccaacaacggcaacaacaacaatctaaatcaatccgcagaggcgggttccatcgaaaatcccggcaagccgggtcgtgtactcatgaaacgcccccgtctgtccagtcgctccgagaacctctcctccggcagcctcaacagcgttggcgtgtaa

SEQ ID NO: 19716 - protein, 886 aa, DROSOPHILA
MTLLTSSLLLFSLLTSRLEAIPVLEKSPAHPAHSAHPAHPAHPAHPAHPSPGVRILRAPESLVAPLGDEVVLECETSLQPERFEWSHRSSRSPGAGFKYLKTGTAKANVSQEAAISRLRVLVRPDTLGEYRCVGWFGPLVVTSTIARLELASTSLVDAQESESPLQWRVSAGNSVLWSCGQQVQSNPSASWSYYRNGVEIKPEFIGTNGNLFLSNVSSESSGSYSCQATNPASGERIQLPGSLQLQVTPEQRSESKSPHLLRGQPSSQEITIREGSSLLLLCPGVGSPPPTVVWSSPDVVGAVKNKRSKVFGHALEISNTRVNDAGTYICFQDNGVRPALEHYIKVHVEQPPQIVRPPWADLTNEGDRLKLECKATGVPTPEIYWLLNGHSSIDDSEAELSNNFLILHSVLKRHAGYVQCFARNRLGEHSAGTLLQVNPKQIQEPRESGGTHRPKPNQGSRQKQMYPPTPPNVTRLSDESVMLRWMVPRNDGLPIVIFKVQYRMVGKRKNWQTTNDNIPYGKPKWNSELGKSFTASVTDLKPQHTYRFRILAVYSNNDNKESNTSAKFYLQPGAALDPMPVPELLEIEEYSETAVVLHWSLASDADEHLITGYYAYYRPSSSAGEYFKATIEGAHARSFKIAPLETATMYEFKLQSFSAASASEFSALKQGRTQRPKTSTTEEPTLQMGDRDTTTPSHNETFNMSPMLTGTIGGGAVLILLLISTCFCVCRRRNSRSRGNNPNKPRMAELRDDFVPLGNCSPTKQRQRTRHIHITLNPLAQQQQQALEEKNDTDQDAPYYQRPSSYDYDPTLRRMSSSSLRRSQRTLERAGGSNGSNNGNNNNLNQSAEAGSIENPGKPGRVLMKRPRLSSRSENLSSGSLNSVGV

SEQ ID NO: 19717 - DNA, 2824 bp, DROSOPHILA
ttatggaagttcgacttgtggatagaaattggtatgaataaagtcgctaaatgattcgaattagggaagtttgagatatggaagttcgactgtatttttcattgttatgcttttttttcccttagtaatgctaaatcttttccattggcttttaaaccatctaaaatgtagtttgaatcatgagaaaaaaaagtgtatcattaaaaagtcggagtaattagcttactagaagctttgtatatgtatttttgccctctatgctaatccttcctttagattccaatttcaccaaaggacccgtgcacttcaatactacaaaaaattagtcaagctcatcagcataatgattccagtcacagtgcagaatttgacaacataattggaaagataaacacagcaatcaaagaggattggataactaataaaaaagcgctattaataagggagtacttggaatttgaaaaattgcgaaaatatctcgatcatattttggctggaaaaattgaggaatgcgatatgcgccttgcagtagttaaaagtagaaagtgttggaactattacacaaaactgaaagtgatgttccataaggcaatgcaagagacgagtgccagaaaacagtatttaataggtaatatatcaatggtatgcagtgataacatcgtgtgaacagataatttgtaaatgtgaaaacaaataaaatggcttatgaattgaaaatagtaaccaagatgaatattacttatatcatttctgcttcttcactgcggtcattgaagatgaaagtattttcatacgacccttgatctttcatttcaatgaccatttaagacatttcaactattaactacgcttatcgattgccaattaccaattatatgaatatattgccattgaattgccaagactgtgtctatatcgtaatctatttaaccgataatcggtaatttagattcacaatctaacaataattaactttttaatactaattccgagattgccattagatgttaaagccgtccgcatccagatgggtaggcgatgatgcttgcgtaggacttatatgcttctgaattagggagttctttccatcgtaagcaaagaaacaattggttgcgttgctagtagctctcttttgaggttgtttacccatctgcattagaagttcgtcgatccgttccgttttcaatttaataatactctccatgtgggtcaatcgctgttgataggcatcgataataacatcttttgcatgactatcacgttccactttctcgtacagcgaatataggatcattttctgcggcacctgaactatgccatcgccgatctgtttgttaaccacaacagtttttatctcatcattttcctcccaaagttgttcctgccgcaatgccgcatttcgttgttctgcaaggcgttgtcgtttctccaatcgtatcacttcatgcaacatgacttcggcggcaccactaacaccattcgccatttgctccataaaatctttagtcaacgtcatatttaacttggataacactttaaagttgaatgtctcccaattggccaacttcagctgaacactactcttcttcggataattgaagagatccaccaagcgcggataatcgcgtttgaatatttcggccagcggcaaaacatcggaaaactcgcgacgcaatctttgagtgctaatactattttgttgcatccatttgttaacttcctctaactcttcgcggctcagattcttgccactcacgatatgcatccttggtgataatgatatgatatgcaatagcaaaatcaatttgtaaatatggtctcggctttattgttgtgtgggtatacacatattaaaatatccgatgtgtctgagtttgagtctgaatcggctaaaagattcaactacagtgagtgcaaatccaaagcatcctttgggtaggaatcttaaatatgggatagtacggtaaaagctattatattggggcattattaataccccttttattcttattttgagtcttggaaaattcccattcaaagtcttctatgctttcgtatttataagtttctgtatgatttgtttgccgacaacaccgtagattcaatccctactttttggcctacactgcactggagtataatacttttcagtatacacgtattattgtatcttataatttagatcatcagttatctgttatactacttaccgatgttatactaatacaattaatgtataacagcaaatcgcgttcaagaacacaagtttgctatttgtaagcactgtaaaatgtaatgtagaaaagtttatgtaaagtatattacgatttaaatgcgatttacttgtatagcttatagttaaaaaattctaccatgttaattatattcatatcaaataaaaagaaattaagataaaaaaaacctttgttgattggtatttaaaataattaactactgaaaaatcgattcattcacttaggaaccaactttcgctaccagctcatgaatttcccaacttcaataaaatccctggtgaaagctttgggacagacctttctttccccaactaggggagatgtcccgagcagtgttgagtatccgtatggactcaacagaaatcccctttgagtgactcactcactggattcgagtgtgcagacaagctttcgctcatttgtgttcggcttttcatttgaacgcttggaatggagtccaaagtttttgccaacgacagttcattacggttttcaaggataagcgatacctacgtgctcgccggatagagcgcatgtgaatataacgcaccaaagtacatctgcgtatt

SEQ ID NO: 19718 - DNA, 824 bp, DROSOPHILA
gccgagaccatatttacaaattgattttgctattgcatatcatatcattatcaccaaggatgcatatcgtgagtggcaagaatctgagccgcgaagagttagaggaagttaacaaatggatgcaacaaaatagtattagcactcaaagattgcgtcgcgagttttccgatgttttgccgctggccgaaatattcaaacgcgattatccgcgcttggtggatctcttcaattatccgaagaagagtagtgttcagctgaagttggccaattgggagacattcaactttaaagtgttatccaagttaaatatgacgttgactaaagattttatggagcaaatggcgaatggtgttagtggtgccgccgaagtcatgttgcatgaagtgatacgattggagaaacgacaacgccttgcagaacaacgaaatgcggcattgcggcaggaacaactttgggaggaaaatgatgagataaaaactgttgtggttaacaaacagatcggcgatggcatagttcaggtgccgcagaaaatgatcctatattcgctgtacgagaaagtggaacgtgatagtcatgcaaaagatgttattatcgatgcctatcaacagcgattgacccacatggagagtattattaaattgaaaacggaacggatcgacgaacttctaatgcagatgggtaaacaacctcaaaagagagctactagcaacgcaaccaattgtttctttgcttacgatggaaagaactccctaattcagaagcatataagtcctacgcaagcatcatcgcctacccatctggatgcggacggctttaacatctaa

SEQ ID NO: 19719 - protein, 254 aa, DROSOPHILA
MHIVSGKNLSREELEEVNKWMQQNSISTQRLRREFSDVLPLAEIFKRDYPRLVDLFNYPKKSSVQLKLANWETFNFKVLSKLNMTLTKDFMEQMANGVSGAAEVMLHEVIRLEKRQRLAEQRNAALRQEQLWEENDEIKTVVVNKQIGDGIVQVPQKMILYSLYEKVERDSHAKDVIIDAYQQRLTHMESIIKLKTERIDELLMQMGKQPQKRATSNATNCFFAYDGKNSLIQKHISPTQASSPTHLDADGFNI

SEQ ID NO: 19720 - DNA, 4820 bp, DROSOPHILA
gaaaaccccatagccattcgattttcacaaacaattaaccaataatattaggtataaacgagattggctggttctaaacaacggttttagttttaaagttgagaatcagaaggtgatttcattacatatttttgttatagtgcctacggtgtataagactttaaatttgtttggacaaatattcttaaaaatttgtttagaattgaattaattaggcaaaaagatgacataataacaattccagattcctaagagccaaaaacccaatggtttaaaaaaaaaagtttctcgaactttttttctagttaatttagtgatgatgttgaaatatcgcacacatgttatatgatgcctcttaaagagttaagaaactggcggggatagcaaaatatttcgtttaattttctgtgacttttaaaagttcatagaatatgtgcattaattaagtttgagcaactaagcaggcaaatcaaatgtatcatacgttattattatgttataccactaattcacaggataacaagttttttcaagaaaacaacgatctgattaaaactttatgcggtatactactttttcatcacctattattttgctgtttgtaattacggaattgggtggttctgcattttattagagatgtttcaattaatatccaataccatttactatattttgggatctgttttaaaaactaacttataacagtttcataattgctttattttataaaaacaaaattggttttgttaaattcaaaggtcgtaggcgatacacacatagaggttcgtaaaaatgttggatagaaatttccactttgaccttaattatacttaaaaaaaaaattaaatgattgcatatgtagctggcattatttacaataactattcaacaggaaaataggcgaagatgcgttctcggtgttttcacagctaatttgtccaatcgtcgatgaacttcaatttctcagaacgctagaaagtgcaacacccagtgctaattattgtgagggcgagaactcagtgggcgccaggacacggcagtgcatctcgcggattaatggcaccgtgtaggccacacactcatcccatccgggggatcgccaggctgcttcccgggtctccttacggtcttgcagagatttgtaacctattttgaaaagaagagcaaatattaatgtttgctttacagcttatataaaaatatggcttcaaaaattgctagtggcttaaaatatcctttaaaccattctaaacgtatttggcaatgaaactcaaattactcaaatcttttaattatactatctatcacttacaccaaatgtgatgaacattgtacagtcttccgatctgcgagaagaatccggcgaatgcttcgttgttgtgcttgcgatagttgatggcgcgggcccagttgtttccccactcaatcatggtgccaggtgtcagtcggtatgagctgagacaattgggttaatttagctatgcatttttgaattgaaaatactctgcaacataccgcatttcgtaaatgttcttgccggtacgactggcaatttgcggccagtagctgaatgccaagagatattgcagatgacgggagcgcaagaacttggaacgctcctgcatcaagctaagatactcgggatcgttccaaaggtcttctttggcctgatctatcttctcgaagcctcctgtgtacttccacaggtgcaggcactgatccatgtcgcccacttgaaccgtccatgatgccaccaattcgcaggaaaggtttgccttcttctcgttgatcaaagcgacagtagttttgctgtaaaaggtaagggtacttttaacaatctatgctactttcgggatttaaaaccacccggaaatgtgtttgaaagtatgctatcgaaaatggacaacgctttcaatgtttattctttagctttgagtactctgcacctatttagttcttttaggcaccttttaaggacgttaaatttcagtcacttactagttatttaagtagctgcccatggaatcgggcctgacgttgtgggtatgaagggcatatatgatttccttatcgctgagcattcgactgtgcgactccttggttggttctattttccgaacgagcagttttgagaaccatgattctgaatcgttgcggctcggagtggtggacagagagctaaaagtatcaataatgggtaatttaaaaaggttggcataataaacaattacaaaataaacttacaatatcttaattgtattctgtataaggtaagatatattggtaatacctaaaaatacatttttaaatgatatgttctaagtccaaactctctagataacgtttttaataagtctatctttcagatcgaagatataatattcaatttttggaaggccacttatcaatattagctataagtaggccaattgaattggaccgtgggcaaaaaatagataaataaggagaacgctatttcctttacactgaacttacaaattaagaaaagctacccctgcgtattattaactttttcgaattttccaggggcaaatgtattcataacttaaaaatacaaaatgcatatatagtacggcatttcatacatgaagggtaactaaaattcgcaccgtcgtgtttattttgtttttgtatacgtttttgctttgctgacgtcgcaacggcattttcatttatgtatggatgtatacgtacgaaattggaaccaaacatacatattaacgtgtaggagtgtgaatgctagtgctggaaagggtacgcgatttgtgtacctacaaggacggtacctggtaggtactcttaatgctaagtatgacggcttggaaaatgagtaagcaacaactactctgcgtaaatttaataacatgagtttagggaattctttaaataaatgtgaataatatatttaatctaaaagacttaaaatgactagtagttgaaaaacataatgttaataaaaatgaacccctaggctggaggaaaattgaatatgaataccattaaatatcattattttaagatccttataaatactgttatttatatataaataagtaagaattaagaattaattttgttatttcaatctaaaaaatttgaatatacgagtatatattcattgcctatatttcatttggattccacgaatctgggcaattaataagtgccacaagctgatatccaggtacaggtacctgtgcctactcggcaacactgatcaaatatgtaaatggactcagctgtgggcaatttttgtgttcattttttatagtatattcatgttgtttttcttaccggacagcgttgttgttgcttttgccgacggccaatagattacgtagcttaagcattttcgatttatgtaggatctggcgagtatatatgtatatagagcgatatggggtgaaaactggaaaataaaatcagtaactgttatcatcccgattcgccatctctaccactgcaatgtgtgtacattatgtgtactttagtcaaggtgaagtcagagtcattttaacaagtgcgccggtacatggtctatggtagcattgataatagagaatgtagagcgttctctcgtttcaactctgtccgatttccccacccgctttaaattcagcaattattttggaaaaataataaatgtttctctttccacactagcactcactttatagttatttgcgggagtgttacaaactaaaataatatttaaatgaaatgttaacgttaaaagaaaacaaaataatatgcagtagagctgtcttaaccactgaccgattgtatcgatatatcgcgtccatgcgcttggctatcgatatggacctaagagttaacaaagtagtcgtcttttcgattgcatgctatagcgataaggtgttttagttttttgcggtcactctgaattaattacgttacatttcaaatttgtttaaaagctgactttgaaattcatagtttttaaagcgaaaatgggtcattttgttaatctaggaccactcttcttcttggccgctctcatgctcaagtccgatctgaaagctcctatcctcgttcagttcgttttcttccttcgcgagcatcggtaatagaaaaaatggcggttcggcgtgccaaaatgaattaaatcagttttaatgtttttcggtattaaaaagtactgaaagtttgttaaaatgataatcaatgagtgatcgcacactgctaaacgcattttaactcattacttttctttaaacgatttaattatgtgatttacacgcacacgcgtttgtgccgagaagtacatatgtacatacttatgtgtgtgtgtgtaagtaagcagctcggcttgatctgctttttaaatttgagcgcggttatatagttcacgcacacacgtttccgcggagaagtacatacatatgtgtgtgtgcgtaagtgagcatatcggtttgatttgtgttttaaatttgagcgcggttatatagagttcatatttataatgcttgcttatttattaaaacccgacaaccacttttgtatgcttaatactttttgcgaatatatatataaaatgtattgctataaatttcaaaatgaaatacacctgaaaagtggaccaaaaaaagaaaatggcgaaaacgaacatttttgttctgctttacttctccgcccgtttgctttaaattccatttcgttttctaccttcgccggtgattaaaacggttacattttgtgtttttatacactcgggcgtacattaatacatacctgagttaaaagtgaaattaaaaatagcatttctcaatatatcg

SEQ ID NO: 19721 - DNA, 1008 bp, DROSOPHILA
cgatatatcgatacaatcggtcagtggttaagacagctctactgcatattattttgttttcttttaacgttaacatttcatttaaatattattttagtttgtaacactcccgcaaataactataaagttttcaccccatatcgctctatatacatatatactcgccagatcctacataaatcgaaaatgcttaagctacgtaatctattggccgtcggcaaaagcaacaacaacgctgtccgctctctgtccaccactccgagccgcaacgattcagaatcatggttctcaaaactgctcgttcggaaaatagaaccaaccaaggagtcgcacagtcgaatgctcagcgataaggaaatcatatatgcccttcatacccacaacgtcaggcccgattccatgggcagctacttaaataactacaaaactactgtcgctttgatcaacgagaagaaggcaaacctttcctgcgaattggtggcatcatggacggttcaagtgggcgacatggatcagtgcctgcacctgtggaagtacacaggaggcttcgagaagatagatcaggccaaagaagacctttggaacgatcccgagtatcttagcttgatgcaggagcgttccaagttcttgcgctcccgtcatctgcaatatctcttggcattcagctactggccgcaaattgccagtcgtaccggcaagaacatttacgaaatgcgctcataccgactgacacctggcaccatgattgagtggggaaacaactgggcccgcgccatcaactatcgcaagcacaacaacgaagcattcgccggattcttctcgcagatcggaagactgtacaatgttcatcacatttggtgttacaaatctctgcaagaccgtaaggagacccgggaagcagcctggcgatcccccggatgggatgagtgtgtggcctacacggtgccattaatccgcgagatgcactgccgtgtcctggcgcccactgagttctcgccctcacaataa

SEQ ID NO: 19722 - protein, 222 aa, DROSOPHILA
MLSDKEIIYALHTHNVRPDSMGSYLNNYKTTVALINEKKANLSCELVASWTVQVGDMDQCLHLWKYTGGFEKIDQAKEDLWNDPEYLSLMQERSKFLRSRHLQYLLAFSYWPQIASRTGKNIYEMRSYRLTPGTMIEWGNNWARAINYRKHNNEAFAGFFSQIGRLYNVHHIWCYKSLQDRKETREAAWRSPGWDECVAYTVPLIREMHCRVLAPTEFSPSQ

SEQ ID NO: 19723 - DNA, 3778 bp, DROSOPHILA
ctagatttttcaatggtagccttcaaataaagttgatttgttttgcgaaatgctgactttagtttcggatacatgcgtgtggctcttgcatttcgctattcgcagttcacgtataccaatttttatttaaacatgtcttcaaagtcctcaatttgtttaaagtaatataacagcataaggtagtgaaataataagcatttattaccttatcatttcttctaaagaatcaaagtcctcaagttgtttaatgtaatataatagcataaaataataaacatttacaatcgtataatttcttctaaagaatcaaagtcctcaatttgtttaaagtaatataacagcataaggtagtgaaataataagcatttattaccttatcatttcttctaaagaatcaaagtcctcaagttgtttaatgtaatataatagcataaaataataaacatttacaatcgtataatttcttctaaagaatcaaagtcctcaatttgtttaaagtaatataacagcttaagttactaaactaataaacatttattaccttatcattttttctaaagattcaaaggcctcagattgtttaaggtaatataagcataaagcataacttaccaatataataaacatgtattaacttttcatttcttctaatgaattgttaaacaataaatccctttaaagtagctagaatataaatgcacattgttaactacttattgtgggtttgtaaggttcttcgcaattgctccccaaataatattcgcattaagtaatattccattcacattactatatatgttctatttaaagccactttccataaaaaatagccaatatttcataagctttctatccgaatatctccattttatttacaccgatttcttagagctacgcttcttagcctggttgtctaaatggtacggggtggggaagtttggggccatccttgtgtggagacagccccttagtggtgcggtgagttgtcccggtagtaatactattctatcatgtacttggattcgtcacagaactcctcggtgtccagcagatcgccgaccagttccttgacagagtcaacgctctggtagccaccgacgtacgggtaggaatcgtcatgctgcagcccttcgcggtcattggcctcctgctccgcgttgtcctcctcgttgaacatgaagtcattcgccacaatgcactcctcgagaacctttgtctgctccagctctacggagtccagcgaaaaggactcggggatttgctgttgcttgcgcgctgactccttccgtgcggaggcattctggttgcgactggatgcatcagcggatgatgatgcgaccgatgcctcgccgttgcccgagcctcggtgctgttccatatgagccgacagataggtcttcttggtgaaacccttgtcgcactgcgtgcactggaactgcttcttgccggtgtgcgtccgccgatgggcggacagaacgtgagcataggcgaatcccttgttgcacacctcgcacacatacggccgctcgccggtgtggatcctctcgtgcttcttgctgctgccaaagtccgagaaacgacgctcgcagtgccgacagctgtagggcttctggccggtatggacgcgcatgtggcgtcgcagctcaacgtttgagatgaacgccttctggcacacctcgcaggaatatgggcgctcgttgttgtgacgccgcatgtgggcatttagcgcgtgctggtacttgtatgtattaccgcaaacatcgcagatctttggcgagcgttcgcagttgcggcgtttggtcgtggaaccggccttaaaatcatcgtccacgttcgccgtcagtttttcatgcttcacattgggcgaaacgcgacggtaggtgcgctttttctgctggttggcgggatgagtaggcggcaacggcaacggcggactggccaccacagactcctcgatgagcggagtctcgatctcgtacagatgctccggcgtgttttcgtcatcccaaggatccagttccagcatcttggcctgcccctcatcctcatcctgctgttttttagggtccttttcttctgcctgctgagtaatagaatcctgcgcttgaaagtcattcagggataggaccatcgctccgtctggtatcagggatagtgaatcggtcttctcctccttgacatcctcggagggctccgtgctggtagttattgtaccgcttactgaactggaagagcagggctccacgttgagcctccttattttcagtgttgctggcagccgaacgtgagcctgttccagatcaagcttaagctgctcctgctgcttatcgaccagcataggggcaggaggagcagcagcagcggcggcgaagacggcggaggtcgaggtagagcggctggcggagcgaaatagcttctggacagcggtgcacttttcgtgaaagcgataagagacggacagctccagatggcactgcttgcagatcttgtccggccagcgctgcagctgcgacgggctgctgtccagctgcaggctggtgcagcagcgaatcttgtccaggatgagcatatgaggagactccgggtcgtggccatagatcgagctggcctcgggctcctccgccaggcagaccaggcaagccacgcccaggtccaccacacgcggctgcaggttgttggacattgctccaatctcggactgaacctgcgttatggctcttgctcaagctgctcccaaaattcgcaacacgcgcaggcaacaagaaaacacttcttttgaaatagggatggcacttgcgtgtttttcggtacctgacactcagtgtggcaatcacgagacttgcgctattatcgttttattggttattggatatttattggtttggttatttctttaaattaaaaatgtgcaggcccttttagcttaggtgtatatttgaaagtggtataaagcaaggcaaactattttaagattcattattttttgtgaatttgcgatattagtagcgattattttgtatcgattattttgtagctatgattacccacctctagcgattgagctatcgatgatttacctttacgaaaagtgcgtctggcgtgaagtgtttggttttcagcaaattaaggatttaagtaggcaagcctggaaataactttaattatattactgacatatcatcactagttttcatactttacaagtgttcgtttatgtttctatacaagtgaaattattttcaacagaatttaaattgttatatttcgcgcttttcggtaaaaccatttatcggcgaacagaagatttgcttttgacggcaggcagaagatttgcgtttgacggcaggcagaagaagttgattttattcagtgaaaaatggattgtaatccaaggttgcaggttggccagcaattattcgaattttttaccaagccggaaaagccggatgagtctggtggcgatgtagcagctccgttgctcttgaagaaattcggcaagttgatccgttacaacaacgatgatctgaccgagcagggtgacttgactttggcggccatcccgcgttactggcaaaaatatttaaaaagccagggtctgaagctgcgcatcgatggcgacgaactgctccccagcccggtggaccgcctggagttgatggagcattcacgcaagtggcgtttcccgctcgccgaaatcactgtgctgaacaaggaacgctactctctgcgtttccagcgccatccgattattgcacatgtgcttaactctgtgctcacg

SEQ ID NO: 19724 - DNA, 1778 bp, DROSOPHILA
caaaagaagtgttttcttgttgcctgcgcgtgttgcgaattttgggagcagcttgagcaagagccataacgcaggttcagtccgagattggagcaatgtccaacaacctgcagccgcgtgtggtggacctgggcgtggcttgcctggtctgcctggcggaggagcccgaggccagctcgatctatggccacgacccggagtctcctcatatgctcatcctggacaagattcgctgctgcaccagcctgcagctggacagcagcccgtcgcagctgcagcgctggccggacaagatctgcaagcagtgccatctggagctgtccgtctcttatcgctttcacgaaaagtgcaccgctgtccagaagctatttcgctccgccagccgctctacctcgacctccgccgtcttcgccgccgctgctgctgctcctcctgcccctatgctggtcgataagcagcaggagcagcttaagcttgatctggaacaggctcacgttcggctgccagcaacactgaaaataaggaggctcaacgtggagccctgctcttccagttcagtaagcggtacaataactaccagcacggagccctccgaggatgtcaaggaggagaagaccgattcactatccctgataccagacggagcgatggtcctatccctgaatgactttcaagcgcaggattctattactcagcaggcagaagaaaaggaccctaaaaaacagcaggatgaggatgaggggcaggccaagatgctggaactggatccttgggatgacgaaaacacgccggagcatctgtacgagatcgagactccgctcatcgaggagtctgtggtggccagtccgccgttgccgttgccgcctactcatcccgccaaccagcagaaaaagcgcacctaccgtcgcgtttcgcccaatgtgaagcatgaaaaactgacggcgaacgtggacgatgattttaaggccggttccacgaccaaacgccgcaactgcgaacgctcgccaaagatctgcgatgtttgcggtaatacatacaagtaccagcacgcgctaaatgcccacatgcggcgtcacaacaacgagcgcccatattcctgcgaggtgtgccagaaggcgttcatctcaaacgttgagctgcgacgccacatgcgcgtccataccggccagaagccctacagctgtcggcactgcgagcgtcgtttctcggactttggcagcagcaagaagcacgagaggatccacaccggcgagcggccgtatgtgtgcgaggtgtgcaacaagggattcgcctatgctcacgttctgtccgcccatcggcggacgcacaccggcaagaagcagttccagtgcacgcagtgcgacaagggtttcaccaagaagacctatctgtcggctcatatggaacagcaccgaggctcgggcaacggcgaggcatcggtcgcatcatcatccgctgatgcatccagtcgcaaccagaatgcctccgcacggaaggagtcagcgcgcaagcaacagcaaatccccgagtccttttcgctggactccgtagagctggagcagacaaaggttctcgaggagtgcattgtggcgaatgacttcatgttcaacgaggaggacaacgcggagcaggaggccaatgaccgcgaagggctgcagcatgacgattcctacccgtacgtcggtggctaccagagcgttgactctgtcaaggaactggtcggcgatctgctggacaccgaggagttctgtgacgaatccaagtacatgatagaatag

SEQ ID NO: 19725 - protein, 560 aa, DROSOPHILA
MSNNLQPRVVDLGVACLVCLAEEPEASSIYGHDPESPHMLILDKIRCCTSLQLDSSPSQLQRWPDKICKQCHLELSVSYRFHEKCTAVQKLFRSASRSTSTSAVFAAAAAAPPAPMLVDKQQEQLKLDLEQAHVRLPATLKIRRLNVEPCSSSSVSGTITTSTEPSEDVKEEKTDSLSLIPDGAMVLSLNDFQAQDSITQQAEEKDPKKQQDEDEGQAKMLELDPWDDENTPEHLYEIETPLIEESVVASPPLPLPPTHPANQQKKRTYRRVSPNVKHEKLTANVDDDFKAGSTTKRRNCERSPKICDVCGNTYKYQHALNAHMRRHNNERPYSCEVCQKAFISNVELRRHMRVHTGQKPYSCRHCERRFSDFGSSKKHERIHTGERPYVCEVCNKGFAYAHVLSAHRRTHTGKKQFQCTQCDKGFTKKTYLSAHMEQHRGSGNGEASVASSSADASSRNQNASARKESARKQQQIPESFSLDSVELEQTKVLEECIVANDFMFNEEDNAEQEANDREGLQHDDSYPYVGGYQSVDSVKELVGDLLDTEEFCDESKYMIE

SEQ ID NO: 19726 - DNA, 4199 bp, DROSOPHILA
gctcgtccgccagccattggcggccctggacagagttgcggcagcgtgcctcgggatcgccgcgcgtgcgattgagctgctcctccggcgccagaagctgctgcgtccacaggagcggtcgtgtgcgctgcaccacatactcgtcatagtgcaggccggaaaacgagtcctgcgcatacaaaggtaactcaattagccaacgggttgcaccatgttgtgaaggtctagttggagcacctgcactcacccgatcgaaaatgtgtccgaatccgtagatgagcagcagtaccaccagcacgatgtacacaatccggcgtctcagcaggcgtgtcagggcggctggccacatcctggccaatacctagcgctccatcacagctcccgccgggtgtaattctcctgggacacggacatggcagtggccacaatcggggaatttttcagtttgaatgctactggggcattgggtgctgtcactcctcggatgacttcagctacttctgctgatcgtgattacatccagttgcagtgtcggtgcacttttcactcagaactgaactgatgaaattttcctggattgttgatgaacttttctaggcaacttcctcgttggaaaaagatctcttcaaattgaaagggggagctctcttttctctgcgttgcagcatggtgtgcaatcagttactggcccactatgcctctatttgtattattttgttttttttttttttcttgcaataaatggaagcgaaattcgttagcaagcacaaaaacaaattcctaaatatttatttatttcaatcagctgtttaccagtgttgcgaaatactgacggggggaaatacaaatcgattagtgctatcgacgtttcataatttgaaatttatttttataaaaaaaatgcaaattgaaacggtttttctaatgtatataaaaatatatattacatttttctgactttaaatgatcttgggatatctgatttttacaatgcatttttctagttctgtgtgcaatcaaatttcttccagttttcagcaaaggatttcacctttccgatggggtttgcctcctttcgcggctttcgccaagcattgggatttaactccagcattccgccgaggatttcctgaaagtatatagtgcaatcagcatacaaatgagtcaaataagagcaagcaatgccaacgaacctgggcaaagttagccggaaatcgatcctcgtcctcgatgacgtgcgcgaagcccgaatccatgccgaagtgaacccatacgtagggcaggcccttgggaatggccgcccgcagggacttctggcgcagcgagaccagctgcttgttgatgcaccactcctgctccgattcctcgatggctttcttgaagtagaagggcgccatctctccttggctggcgggaattgggatgcagtggacgctgagatgcggccgacggtgcagcttgttggcaatctcgtagaagacgacatcctggcgccgggcagcgaacatgcgggtgagtgccttacggaagttgcttatctcctcccaggcatcttcgtctagttgcgtgcagcagggtacatgctgcagggtcgtcagaatgcagtgaccgctctggaggcccatgtaccacggcaaactgagatagatcttatcgcccagggaaacgagcagctgtttgtccaacttggcggagtcaaaacaccgctcgcagttgtccagcgtggccaccagtttctcgtgctccctaatggcgctctgcatctcccgcttttcagcatcgctggctgagatctgtttgcgcaccttatcagcgaatatgtcatccaagtcatcgttgggattcttgtgcttggacacaatgtcggcatactggagattgacttctgcggctgtggcgtgtttttcccgctcgaactggaggttaaaatatgttactatttagtatttgcttttgaaagttgaacttaccatttgcttaatatcgtagcggtcatcatcggcaaagtatcttacacgctgaccatccacgtgggtgtccactttcttgctgccgcgttttggtcccatcctgccaccgtacgattcgttcggatcgccggactgcaccagcggacgcacgttgccgctctggtccaccttggtgagcagcacgtgctctgctgaggccttggacttggctggcctggtatttgcattccgcactgactcgccggaggcaatgaactctgctcgctccttccgtgcggcctccaattgctgattgagttccgccgccagttctttctttcctttgagctctgccttgatggccttgccggccagctcattgatctgttcgtctgtgaggcaggatggtctggacttgggctgctgcaccgcctcctcctcctcctcatcagatgatgtggcacttttggagcgggatctgcttcttctgggcggactgggagcctttgcgcctggttttcgccaaccgcgtgaggatccctgtgcggagctgctggaatgcggcttggcctgccgttcatcgtcgtcctgtggcttctggaaaccgggcagacccgtgccattgctcttccagtagggattgagctcacggccactcttggccggatcgtaggcatcaatttgttgggccttctcgttgggcttcgctggctccttgcgttccctggagaacgtcttcagaaggagagactcgctggtcatccagtcgtcccgctgagggggctccttcttagtgacattgtccgccgcgagaggcggaggagcctccacccactcgtcctcgctggcgctttccttacggctcctcttggacttcttcttgcgtcgcttgcgctccttttcatcctcactgaacgaggaggaagatgaagtggaactttcgctgctactgctgctgttgcggtgcttcctgctcttcttcgatgacttggacttggacctggacttgtgcttggaaacattcttctttgactttttggcgggcttctccagtttcttggccaacgcgggcagcatccagtcggcttcgccgcgcagctccttctgcctctcccgctgcccacgcagttccgcccgctccttggcctgctgcagcatcgcctcccgggcctcccggagctcctggcgcgccttatccttttctctgccgctttcaaattgtatgtagctcatgtctaatttggttcttcttgtttaccaaaacattagtgttagagatggacaaatatgcacaacagtgatatcgcttaagtcactactgaataacagacatatcgcttaactcactattgaaaagttgattgcaatatacaacaagagagaatgatatagtcaaattccccgttactcggctagtgtgaatgcgaaagcgaaatttaataaatttaatttaattttaattttagaatctgtatggtgaatctcaaccttctagcttttataattcctgaaattttggcgctcatacggacatgaaaagatcgactcggctattgatcctaatcaagaatatatatacttcatatggtcggaaacgtttccatcttcctgttacatacacttcaacaattctagtatagcctttaactttacaacgggtataaaaaagtatcaaaaaattccaaaggagtgttttttatttataaagttaattctcaacaagacttgaagtcatattaaaatctaaagtttaaaggcgctttttatatataattaatgacctgcctgttcttagtcctcatccgaggaagtttcattcttgatcttgtcggacttgcgcttttgcaactcctgctccacgtcggggtccttgaccaggtgctctaacttgatgtcggacaagttgggacagtcgcgcaccgggcataggatgccaatgttgtccttgatgatcattaaaaccgtttcgcggtcgtagatatgaccgcaccttttgttgcgcacggggtgctttatcaggagcttggaccagggatcgtggaacgggacgacctcgacgccgaagtcttccatgataaggtcctcatcaaggccggcgatattcttttgagcttctgattcccccgcattcatgtagttcgtgtcctcaagtgagttattgacatcgatgcgcatctgctccacagcttcggggcgctccttgcagacttcctcggacttctcgatggtgttgctagagtttttggttag

SEQ ID NO: 19727 - DNA, 2015 bp, DROSOPHILA
gaagaaccaaattagacatgagctacatacaatttgaaagcggcagagaaaaggataaggcgcgccaggagctccgggaggcccgggaggcgatgctgcagcaggccaaggagcgggcggaactgcgtgggcagcgggagaggcagaaggagctgcgcggcgaagccgactggatgctgcccgcgttggccaagaaactggagaagcccgccaaaaagtcaaagaagaatgtttccaagcacaagtccaggtccaagtccaagtcatcgaagaagagcaggaagcaccgcaacagcagcagtagcagcgaaagttccacttcatcttcctcctcgttcagtgaggatgaaaaggagcgcaagcgacgcaagaagaagtccaagaggagccgtaaggaaagcgccagcgaggacgagtgggtggaggctcctccgcctctcgcggcggacaatgtcactaagaaggagccccctcagcgggacgactggatgaccagcgagtctctccttctgaagacgttctccagggaacgcaaggagccagcgaagcccaacgagaaggcccaacaaattgatgcctacgatccggccaagagtggccgtgagctcaatccctactggaagagcaatggcacgggtctgcccggtttccagaagccacaggacgacgatgaacggcaggccaagccgcattccagcagctccgcacagggatcctcacgcggttggcgaaaaccaggcgcaaaggctcccagtccgcccagaagaagcagatcccgctccaaaagtgccacatcatctgatgaggaggaggaggaggcggtgcagcagcccaagtccagaccatcctgcctcacagacgaacagatcaatgagctggccggcaaggccatcaaggcagagctcaaaggaaagaaagaactggcggcggaactcaatcagcaattggaggccgcacggaaggagcgagcagagttcattgcctccggcgagtcagtgcggaatgcaaataccaggccagccaagtccaaggcctcagcagagcacgtgctgctcaccaaggtggaccagagcggcaacgtgcgtccgctggtgcagtccggcgatccgaacgaatcgtacggtggcaggatgggaccaaaacgcggcagcaagaaagtggacacccacgtggatggtcagcgtgtaagatactttgccgatgatgaccgctacgatattaagcaaatgcacaagaatcccaacgatgacttggatgacatattcgctgataaggtgcgcaaacagatctcagccagcgatgctgaaaagcgggagatgcagagcgccattagggagcacgagaaactggtggccacgctggacaactgcgagcggtgttttgactccgccaagttggacaaacagctgctcgtttccctgggcgataagatctatctcagtttgccgtggtacatgggcctccagagcggtcactgcattctgacgaccctgcagcatgtaccctgctgcacgcaactagacgaagatgcctgggaggagataagcaacttccgtaaggcactcacccgcatgttcgctgcccggcgccaggatgtcgtcttctacgagattgccaacaagctgcaccgtcggccgcatctcagcgtccactgcatcccaattcccgccagccaaggagagatggcgcccttctacttcaagaaagccatcgaggaatcggagcaggagtggtgcatcaacaagcagctggtctcgctgcgccagaagtccctgcgggcggccattcccaagggcctgccctacgtatgggttcacttcggcatggattcgggcttcgcgcacgtcatcgaggacgaggatcgatttccggctaactttgcccaggaaatcctcggcggaatgctggagttaaatcccaatgcttggcgaaagccgcgaaaggaggcaaaccccatcggaaaggtgaaatcctttgctgaaaactggaagaaatttgattgcacacagaactag

SEQ ID NO: 19728 - protein, 665 aa, DROSOPHILA
MSYIQFESGREKDKARQELREAREAMLQQAKERAELRGQRERQKELRGEADWMLPALAKKLEKPAKKSKKNVSKHKSRSKSKSSKKSRKHRNSSSSSESSTSSSSSFSEDEKERKRRKKKSKRSRKESASEDEWVEAPPPLAADNVTKKEPPQRDDWMTSESLLLKTFSRERKEPAKPNEKAQQIDAYDPAKSGRELNPYWKSNGTGLPGFQKPQDDDERQAKPHSSSSAQGSSRGWRKPGAKAPSPPRRSRSRSKSATSSDEEEEEAVQQPKSRPSCLTDEQINELAGKAIKAELKGKKELAAELNQQLEAARKERAEFIASGESVRNANTRPAKSKASAEHVLLTKVDQSGNVRPLVQSGDPNESYGGRMGPKRGSKKVDTHVDGQRVRYFADDDRYDIKQMHKNPNDDLDDIFADKVRKQISASDAEKREMQSAIREHEKLVATLDNCERCFDSAKLDKQLLVSLGDKIYLSLPWYMGLQSGHCILTTLQHVPCCTQLDEDAWEEISNFRKALTRMFAARRQDVVFYEIANKLHRRPHLSVHCIPIPASQGEMAPFYFKKAIEESEQEWCINKQLVSLRQKSLRAAIPKGLPYVWVHFGMDSGFAHVIEDEDRFPANFAQEILGGMLELNPNAWRKPRKEANPIGKVKSFAENWKKFDCTQN

SEQ ID NO: 19729 - DNA, 4809 bp, DROSOPHILA
gggtttgcaaattgcatctctatttataatcaacaatgttgacttttatcgataaagatatacatgttgtttttcgatttagcaacttgatctacaaaaatgaccttattctagtttacaactaattaaaaacttattgtaaaagttgatcctaagttggataattaaacatatttttatatatacgttcatatatgcataacaagtaaaaacaattagttgagacatttatatttgttctctttgcatatatttattttttgcggtattatttattgttgcttattggtttgcttcggtaaatcttcattatttgcttgtgtgtttttgattagagtgtatcattcgtacatgcctatggctacactcaatattttgagttaatttttctatgcatgcgcttgataccagaaggaaacttcactttgcgatttacacgaaatttgttaacaaaataaatattattagtggctgatatatatatgtatatacaactcgtacatatctacattaatgggcctcacacatatggcacttattggccctatccatacacatatatatatgtctgtatatacatctgcatacagcttttaacacatatgcatgtacatctggttatgtgccttccttgtgtgtctgatcgtgagcgtgtcaacatcgtatcgaatcaattctccgcgcagatatgcatccaacttaattgctcacatccgcaagaacattattacataactttccaaggcggcaaataatgtttgtccttgatttttaatgttatctttcctcattaaaacttgcctataatggtaacgatgatatctacatcaaccactccaccaaagtagctccattcactttgtttcggttcctatcgggaaacatacacgaaatctgaaaactgcataacaattcgtattgctcattgagttttgaccagtaagcctgaaatgcatttcatacataaccatgccacgaatataatattcctttttttttttggttgatatttttatatctacataactatggtggattctctttgcggtgattgacttcgaggaaactctagttggcaaccaatagttgctgatacgatgatccggtgccatagaaggagcttatgccatcgatcagtttagtattgctgttagaattgttaccgttgtttccgttcgcattggcgtttgcatttccgtttccgtttcccgatgaggaggacggttgttcctgttgttgaattggatggctactactgttgttggtggagttggtaggaggactagtggcttttcctacgtttacggctgccaaggtgggtgtacttagaggactgttttctgccgatgagtccccggcaatggtaacggccacagcagcagctgctgcagatgacgatgatgatgaatcctcgagcacaacactaccgcagtccacattgagaccaaagcagctttcgctactatttggacgatccattccgacgcgagtctgttgctgcgaatgctgttgggtattggcatggccattgccatagtagcacggctccagataagtactatacttattggcgccaacacttccgacagcggtgactgcagcaccagctgttccgctcacatacagacccatgctgctaacatccgcagagaagtgcgactcaaagaggcagcgtggattgccatattgtggatacatattgatcggcatatttggatagtaataggaatcggccgacgatcccgatacggactgattttgatttccggccagcgataggggattcggcgatagggaacgggcaggcgatacggcgtccatgccgccatatgctgccgataccgatgatcctgcggacgggacaactgcatggccatgatgcatctgctgttgcattgcacgctgtttgatgtagttggagaactcagtgggcgacatgcgataggcgctgctgctgaagtacagaaaggagacagaaatatgttattattattgcatttattttgaattttttttcttctaagattatgatatcgttgtgagagtatttacctgtttgtgcgcttggagctagtcttcagcttggtgctgccaaatttagtctgcgcaaaggtggccgtggtgaatgttaatggcgcctgggcgccgcgttgcatgaatgccgctgcagctgcattggcggtggcaccgtttccgggaacgggacctggagcggtacctggaccgggtgcatgattggatcctgatctagaaccagagcccgttccagatcccgctccggaaacggaactgcagctgccagagatcgtacggttcggactgcccttgtaggtgggcgaactggacgcggccgagtgcggcgatgatcctgattggtgatgccccttgggactcaggctcatattgttcatggtggtattaacggcgtcgatgggtcggaagcattgcgcctccgggttgaacattttggtgacttcgcgatctgcagaatgactgtcctcatgattttcattgttttccgtgtaaagaatctgatgattagaaaagaaggggtattacatcacattacatcacattcacaggacgtgtgatacatcaaataatataatataatttattaatttatataatattataatcaataatgtgtgtgtgtgtaccttaacgctgactaaacgcggcatttgataagcattgtatgacaaagacaatcggacattgcagcaaacacaagtattgctatttcggtctattcagacaggttgatacagcatggcgatgttctcgctcattttaaagctaatgccattaacaaattcagaaacttcaatataacgttgaaaaattacacccagtggtagaatatttctaattctattctattaagatattttcttgaatatggaaagttttattattgttataggaagaagatgaccaaacttaagattatatgagtttaaaattgtttaacagagtgcggaatctttaaatgtatgcagattttgttgggtgaaatactataaatgtttacctttaccgctcctttttcaccaatgcgaaaagagacctccccaggatctatccacacggaaagttcatttggtaagttttctaggatatcgccgattgggaccccactttctctagccgccctttccaaaaccgaatcaatgggatccccggtctttaagcagcgataggcagatccctataagaaatgaatatgaaaaaaaatgtattttagaatatgtatcatacattgcagggatgatcatttaccttgaagggtttttctgggtaccagtgatcctggaacttgtcgcgtagggccttctctagctcctcgccgaatatatttacacgtctgcgcggcaacttgttgtagagataggatatgacaaagttcaaggcgacctggatttcaatatgcatcttgatcctgcggccgaaactttcggtattcgttctttacccttatcactttcgcttcacggactccggctcggaatccggttatgttagccgatctgtttccggatcgctgcctgtcgttggggagtgcagtttatggcgatatcctactgattaagagcgttcaaagacggtttctgtagatcatcaacacattgacggcaatttggaaaagtgggcttttgtgccctttatgcgttcgtttagttttgtttagtatatatatatatattattattattttttttttggtttttttcttgtttttgtggtttagcttccttctgttacatttatgtataaattgttttacgtggtttaaggtttttggtggggggagttgtttctgtttggttagagttttagtgttccactgtgttgtgattatctgtatttgtggaagttaaccgagtggagtgagagtcgtgtttgtttgttattcgaaaagatgtgttttctcctgcctgtctagctgtcgtattaagcgtagttgcctagattctaaatatttatgtcgtatttacaaggcatatccaaatattaaattatgtacatttgtgtgtatttatgtgtctttattccttgtcgacttttatttggccacggtttttggttgtttttcgtattatttggtggtgcatctgtcgattctctttgatttggcaacccgagcacgcttttttttttaaaacatttccattaatcagggaaatgtttgggcttgcactttaaccaaatgtctgtcaactcctgaaagatggatgtaaaatagatggttaattaaaattgaaacaatatagaacaatatagcgctgtttactgccccaatgaaagcaatgtttcagttttcaaagtgcattgtactttatttattgagttttgtgcaacttaaacataaagactgtgtgtaaaaaacaaacacacaattccccaacccaagtcacctacctacataggtgtctatatacacatacagaaataaaaaaacaacaaaaaaatacatactgccaataacaaaccacaaataaatataaataataacacacaataacacaaaatggcggccaagcgaaaccgcgatgcggatatcgtcaaacacaagttggacctacgggtgcgatttaaaaaattggttcgggctgtcattatgaatcagacttggctatccgatgaagaggagcaaggcatctcgatgaatgtgaaaaagaacgtggcattgatgcgacaaaaacgaaagcccggcatgttgaccgtagcggtacgaataacttaatttaaactgccatttagaatgataaaaatatgcaaaatcccaggacaaggcactattgcgtt

SEQ ID NO: 19730 - DNA, 2137 bp, DROSOPHILA
cccaccaaaaaccttaaaccacgtaaaacaatttatacataaatgtaacagaaggaagctaaaccacaaaaacaagaaaaaaaccaaaaaaaaaataataataatatatatatatatactaaacaaaactaaacgaacgcataaagggcacaaaagcccacttttccaaattgccgtcaatgtgttgatgatctacagaaaccgtctttgaacgctcttaatcagtaggatatcgccataaactgcactccccaacgacaggcagcgatccggaaacagatcggctaacataaccggattccgagccggagtccgtgaagcgaaagtgataagggtaaagaacgaataccgaaagtttcggccgcaggatcaagatgcatattgaaatccaggtcgccttgaactttgtcatatcctatctctacaacaagttgccgcgcagacgtgtaaatatattcggcgaggagctagagaaggccctacgcgacaagttccaggatcactggtacccagaaaaacccttcaagggatctgcctatcgctgcttaaagaccggggatcccattgattcggttttggaaagggcggctagagaaagtggggtcccaatcggcgatatcctagaaaacttaccaaatgaactttccgtgtggatagatcctggggaggtctcttttcgcattggtgaaaaaggagcggtaaagattctttacacggaaaacaatgaaaatcatgaggacagtcattctgcagatcgcgaagtcaccaaaatgttcaacccggaggcgcaatgcttccgacccatcgacgccgttaataccaccatgaacaatatgagcctgagtcccaaggggcatcaccaatcaggatcatcgccgcactcggccgcgtccagttcgcccacctacaagggcagtccgaaccgtacgatctctggcagctgcagttccgtttccggagcgggatctggaacgggctctggttctagatcaggatccaatcatgcacccggtccaggtaccgctccaggtcccgttcccggaaacggtgccaccgccaatgcagctgcagcggcattcatgcaacgcggcgcccaggcgccattaacattcaccacggccacctttgcgcagactaaatttggcagcaccaagctgaagactagctccaagcgcacaaacagcagcagcgcctatcgcatgtcgcccactgagttctccaactacatcaaacagcgtgcaatgcaacagcagatgcatcatggccatgcagttgtcccgtccgcaggatcatcggtatcggcagcatatggcggcatggacgccgtatcgcctgcccgttccctatcgccgaatcccctatcgctggccggaaatcaaaatcagtccgtatcgggatcgtcggccgattcctattactatccaaatatgccgatcaatatgtatccacaatatggcaatccacgctgcctctttgagtcgcacttctctgcggatgttagcagcatgggtctgtatgtgagcggaacagctggtgctgcagtcaccgctgtcggaagtgttggcgccaataagtatagtacttatctggagccgtgctactatggcaatggccatgccaatacccaacagcattcgcagcaacagactcgcgtcggaatggatcgtccaaatagtagcgaaagctgctttggtctcaatgtggactgcggtagtgttgtgctcgaggattcatcatcatcgtcatctgcagcagctgctgctgtggccgttaccattgccggggactcatcggcagaaaacagtcctctaagtacacccaccttggcagccgtaaacgtaggaaaagccactagtcctcctaccaactccaccaacaacagtagtagccatccaattcaacaacaggaacaaccgtcctcctcatcgggaaacggaaacggaaatgcaaacgccaatgcgaacggaaacaacggtaacaattctaacagcaatactaaactgatcgatggcataagctccttctatggcaccggatcatcgtatcagcaactattggttgccaactagagtttcctcgaagtcaatcaccgcaaagagaatccaccatagttatgtagatataaaaatatcaacca

SEQ ID NO: 19731 - protein, 564 aa, DROSOPHILA
MHIEIQVALNFVISYLYNKLPRRRVNIFGEELEKALRDKFQDHWYPEKPFKGSAYRCLKTGDPIDSVLERAARESGVPIGDILENLPNELSVWIDPGEVSFRIGEKGAVKILYTENNENHEDSHSADREVTKMFNPEAQCFRPIDAVNTTMNNMSLSPKGHHQSGSSPHSAASSSPTYKGSPNRTISGSCSSVSGAGSGTGSGSRSGSNHAPGPGTAPGPVPGNGATANAAAAAFMQRGAQAPLTFTTATFAQTKFGSTKLKTSSKRTNSSSAYRMSPTEFSNYIKQRAMQQQMHHGHAVVPSAGSSVSAAYGGMDAVSPARSLSPNPLSLAGNQNQSVSGSSADSYYYPNMPINMYPQYGNPRCLFESHFSADVSSMGLYVSGTAGAAVTAVGSVGANKYSTYLEPCYYGNGHANTQQHSQQQTRVGMDRPNSSESCFGLNVDCGSVVLEDSSSSSSAAAAAVAVTIAGDSSAENSPLSTPTLAAVNVGKATSPPTNSTNNSSSHPIQQQEQPSSSSGNGNGNANANANGNNGNNSNSNTKLIDGISSFYGTGSSYQQLLVAN

SEQ ID NO: 19732 - DNA, 13843 bp, DROSOPHILA
gtgggtgcttttccctggacaaaattatatccgaaaaggtggtaatatgactaaaatttgttaccttcaatttagcaaccgatgtaaatatatacatcccatattggtttgggaaaagtgtcgacataaacatgatatactttagttaaaagcaagttaggattgaaatatttaaaatatcagtttaaagcttttgaaaacttttactttcttgctttgttgtagttttattttagtcattttaaatatagtttatttataaatcatagtctaacttaaatttgcaatatcaatatgatattctgaaaaagttatgttatatattaatagtaactaaacctcataagatcatcgtgtgaaatcataatgcctactttgtggaaatcctagctaagtaaatattagttattttgatagttctcaatatggatttgcgattgttaaggtatttaaacttcaccttgcttttacatcgctcggatgccctgaataattttgcgcgtgactggacgattggaggagtgtgtgggcgtgtgttggttgtgctcgtagtaaaatcgagcctagaagggcttgcgcaatgagtgcatatccttccgtggcacagttttagtacagccccccccctcctcctcctcttccaccactctggccgacaaaacgagtcgctctctttgggctttggctcggacccctcccccccttttcccttttccgaaaactgggacaagaaatgaaagtgcatgagcacgtaacatatgcgtacatacacccagaggtaatatgtatatgtacattagagtggacctagctcgaacaaaaaggtgaaaggtcacacctgtgtatgtacatatgtatgtgcatgtatattcgtcgtgaatagtaagaaatattgtgatactcttactttcccttttttcaaatatttaaatcaagaatggtgaaaaccttttcaatgtttggtagataaagaagtactaaatgaaattgaaggatttttatttatttcatcgcaaaacatttggggtacacatttatacatttattaatatatacgcttagattttgaacgaacatgcatacaaaaatatggatttcctttacattttcgatttttatcagttttataggatttcttttttttaaattggctttccaggaatacctaatatggtacaataatttatttttctagactaaaaaaaaatattagtataggtatcacaaatatatatatttatgtatatatcaatacataatttgtagcgaaatttaatgtttcaaaaggattattgataaactcgttgaaaggaaattgattttgctttattgacggacttggatgggtctgtctcttaggttgagctggaactttgtagaagaaataacacccttcaatgggaggaaccaatgttatacaaagacatcgctcacatttaacttaagtgggatttacatttaattttgattttaatcctcataagtcctcataagctttttagtattaattccattttagttaaatgtgggcgatatgtacgatatttccattaaaaatgcgatacacttagtattaaacactgactattgaatctgtatatgtacatacattgcgatatcgggattataaagataatgctagctttaacgcagccaaaacgattgttgtattgtaggtaaaaataaataaatattaagcacttgcatcgcttgatgcttattaagctctggttctacagtgtgtttcaaaaaaccttgattcctgtttaattgctgtcttgaacaaaaagaaaaaaacactctgtagaagcatcgtcgaaatattacaaacacacacatgtataagttaggaaccagcgcaaattcggtgtgcgctttactagcacactctgtccttaagtatatcttgggattaaagtatatatgtatatgtgacctctgttgcgaaatttcgatcccttcttccctacgggatgaagatagaggtcatcgtcttgatgcgtagattatatataagattgcggcgaatccatttagctttgggtctctccagaacgcatctgttcgcgactttcgcctcgtttgatgaaccagttcttattgttccgcttctgatgtttgtggcgagcgttttctcgctgtagcatcattcgttcatgccactcgccactaccgctatcgttattaggatagcgttccttgctattctcgttggagtgctcctcgttggattttttagagttcttattgtaacatcctcgtttattggatgactgatcgtagcatctagttttacccttctcccgtgagtgatcatctgtacggctgcggcgatcgtgatcttcattccgataccgctgctttctgtcgttcgtgttgtactcttgcttatactttggcctgtaacgctctttcgaaccatccgccagcttcgatgactggccatgggaagttacggtttgtggaccatcatttcttttcgagtgaaaacctttgggatcaacgttttcggtatcctcggcaccggcaaaattgcccagcttctcggtgaccttttcaaacttgtgaaaggctccagactgctgtagcacatcgttgacggcatttccaatctcatctgttaaagaatccaaatgctgcttgttctccacgcacatgccagcgatctcaacgaactgaccatcgtcgcactgaaagggttgcttcaaatcggccttggtgatatccacgggctgaaccgaatcaccatttcctggccaggccttgaaggtcttgcccttggcacgaccagatccctgtcgctgcatcgttgcgtcctgtccagctgcaagatattgcagtttcttcgacatgatatcgatttcggcgcgcagtaaattattttgcagctccagctcacccactcgtcgctccagttcgatcaggggcttctcctcaccgagcacctgccattccggattgcgtagtttgccaacaaaggctagaatggccaaagtggaggccacataaaagaaggcggtcaggccattttgcaccagcggtggcaactgcagatctaatttggagcgcactacgctcttggactccggctgttgttgctccggctcccgctcaggatactccgatagctgctggtcagtgcttatgggggcaatcagttccacgggactagttggtaaatcaccgaaacccatgtcacccaataggggttcgcgcagaaatagattcggtgatatgcgatccgtactctcgcaatcgctgattatcgaaatgccatcagaaatatcatctgcctgaggatcctcggctgcaggcctattgcatctgcttgggatacaaacttgtggatgagttgccatatccttggggaatcattatgctgtctcacctctcgtttttctgcttatccgcgcgactgctcggccttaaatccgtcaacagttcggtcttcgcctccagtccgtcatccttctccttaaccactggcagaatggtccacgaattgagtaccgacgatgaggtgctgctcccgagagactcctcacttaaattgggcccggtcttagtgcgcccaatgtcttcgctgctgctgccctccgactccatcttctgctccgtcgtctgtgaatttaaagagtacacgccatttttagatcgttcattgttttttgttttaaacagaaaaagaaagataatattttctttttattctttgatcatgttataaagaaaatgaaatatttatggttaaaaaagaaacttcaatctgagttccttgctacgctaatgcaactacattttaaattcttctataaatctgtatttacaatgtgagctgtttacccggggctcggctatcaatatactaaagtagctggtttacattctacttttaagaggtccaaagacaacggccccttgtttcccaacacaaagtaggtgtatgtgtacttaattaaatgcccatataatcgaggcggttaatcgcattgttctgttaaaagtgacgcgtaaaagtgtcaaaccaagaagtcagtgagtaaaatagagaaatgacttttgccttattttatcctttattttgacactgacctagttaaagaaaatgttgaagcttccttttaagagtaaacgagagagcagctgacttttcacatgcgcgcttttccgttggcgcaagcgagcaagcaagaaaatacgtcatgaaagcaaatttcggggaaaaattgcaaggtactattttgcttttgcatattagtacttcgaccttgaaatccatatacatacatatgtaggtgtatacgtaaatggctatcttaataggtatatatcagttcaccataaagttaaaaacaatgcatatatgcacatctaagttgtgtgggttataagctgcattcgatttttgtttttagaattcgtaatcagtttggaacttaaacacactcactacacacctttaaatttcaagctattttcgacaaatagcgtagtcaaatagactagacggttaggaaaataaaagcactagctatcttcagcggtaaaaaaaaataaattctttgtgtgctctagagatggaagtagataaatctgtggcgctatcggttcatccgatttgcactagatttttataaccgatttcaatggcaatctattgcggcctcaaaccatggtttagaattttactaacgttcagcagagttacgaaccaattgccagatttcaccatggtgaaatgatttaaactctgaagactcataacattttttctatatttaagcaattacttaaattgtgaaagtatatcgttgctttcctaggcaaacatatcgtacaaacgtttaattgtttattaaaatccattgtaaacaagaagttcactcaacttgactcagtgctttaataaaatgtgttgtaaacaagtatgtgatttcactcaccttaaaattataattgtttttccattatacgcctcacttcaccagcttccgagctgagttcccagtcggaggcgttacccatcctttcctccatatgtcgacttatggtgctgtttcttgatgtgggcatggcttgactcttcataaaacggggtgccggcaccggatgagagaaacgctgacgatgctgcggtgtccagtaaatttggctgctctgctgggccgattggtccaggatgagtggagtggccctgccatcctgcatcatatagccctgggcgggagccggtcggacatagggtagatagtctactagctgggccacctgaacaccctcgcccgtatccaccagtaccaactggttcagcggcaccggcctggtcagtgttccaagttgctggttggataaatactgttcggagacattggaaagcaaactgtttcgcttgctgacatgagcgtaaatgggtgacggcccgtccactgacatgccgctggtgacgtagcgcccctgggcgacaggtaaactctggacacgctgtggcacctgtggtcgagcactagaagtacaagaaacataggagaaaacattgtttttttttttcatttaacggacattagggttatgaggttacttgtaaaggcgtcatggtgtatgtggcagctatatgcttataaaaaattacataccattgatcatcgacagaagcgtatgacacgggcgagacatcggcgttgggcggcgttagatgtcgcttatagatgggctgcagtggcgtcttggcttccggtgctcggttaatgctcttgcggcaaaactccttgaccttttcgagaatctcctcgcgcgtgagtagtccaccgatgcgacgtgatggcatttgctgcgattggccctggttcgccaccctatgccgcattaccactggtgtctgttggcctggatttccagcacttggcgttatattgtccaggacactctgacatcgcggcggctgtttttgcatttgttgttgcctcatcggtgtaccattataaaccattagtggcctgctgcgaccgctgattccggagaaggtgttacgctgcattgagccgcgaacaaagttggtttggtcgggatggactatcacctgggagtagatatcctcattcggtcgttgtctgattgtgtgctgctgctgctgctgttgttgttgtccctggagtggttgtgcctgcagttgctgctgctgatgaagcttgtgataaagctggcgatccgtcacctctttgatggcccgcaattgatcccattgattttggccacgcactggcgtcgatgaggcaacaggacttgcaagagcaggctgctcatgattgaattggctgcgatccactgaagtggatcgatttattcgacccacctgctgtgcttctggccactgacgtctaggattcacacctggtcgctccagtgttgatcttcgcaagttgttgtcaccgtttcgcctttgcaaaattgtgttgtcaccgtttcttatctgcaaactggtgtcaccatttcgcatttgcaaattgatgtcaccatttctcctttgtaaacttgtatcaccgtttctgttcggcaaattgctttcacaatttctgggacttttatcgataccagaatcaatggtcggcgattgaacttgaccattttgccgacgacaattaggactctggcgttccaatagtacacgacgtatctcagttgggacatccgccttgcgacgatagtcctccttttccaattcgttgaaaatactccgtggcgaaggagtttccgatttgggagtagtttttcgtcgagctggaaatatactgtttgagatacgctggagtacatttagcttcttggtgttgcttttgcgcagagccgccagtgattcagccacctgttgccgtcgctcctctgccgtttgcattggcgtcgaagtcctggcgattgtgggtgtcggtgagaatagctcccgcctgggcattagggccagacccttcgagtccagatacgcttggaactcatcggaactaatggtattggtgaatgtgcccggtgatggcgagggtaaatcccccggcgcactcatagccaccggcttgtccggactctgtggcacagaggaactggccgccaactcgtcactggactcacttttcgtcaatggtccatcgatatcgtctagatcatcatccgaggtgatctgtagtttctttaccctctcatcgaatttgcgagcatttttcgttacctcagcgggattgaataaggcactgctttctggatccgaatttgtaccggttcgaatttttaagttggccaactccggatagtttggcttcgagcacttcttaaaagtgggctgcggcggttttattaactgctgagccttctggttctggttgggattctgattctgatggcgggcctgttttcccgttcttgtttccttcaacgtctgtttccgcttgggcaatttgccggttgtctccttgagttcctctaacttaaggcgtgccagcaccgagggatcatagacaaagtacgcatccggattcttgatgtacgttttcacgtacttggattgcttgagcacctcctcagtggtcacaaagtcatccgtctgcgtctgggttcgattaatcttactttttcgagtgttggactcgttcttctgctgctcccgctccttttcgcgctcccgttctcgttcgcgttccctaagttgctgggtcacggttttgcgaacacttagggtcgatcgtttcgttggcaccggaggcggtgtcttcttctcacgcgtatttgctattatgttaccattgcggaatggattcttttgatcgacaatcggttcaccggtggtgaactttcgaatctcttcgtcgttgggattgaagctaaccgatttcttagccttggcactaatgacttcgatctcggtgagatcctccggacttgtcgagctccttaccggactatccttctctttgtcttcctcctccttttccttttcgaacttctcgaagggctcaacgattttaagaggtgctgttatgtagctgtccaagataacttgctccaatttctgtgaatcttggtcaactggtgtatcaatttcctgacctgactttgattcgtttagaggacagattccttctttttcggatgcaatggtgtcagacatttttcgttaaagagcttgggggagaatggtgagggggaaaacgagagggcttggagtggaagagagttgggaattgttgtcgtctgtgcacccaccatcgatatagctgtctagggtctgcacaaggaaatctgcaaaagatatatatatatatatacaatcaacataggaaaataactaatacaaatatttacaaaagtcgtatcttgcttgtttgagtacaaagctcaattcataatatgaaaccagtctaactacatttgtattcaaattcgcaatggaatttcccttataaactgtggtttaggtatcaaatgtacttttaaaaacaaacataacttggctttgttatccatcaactcctgattcttttatatatttgaaaaatgtgaaaaccttaaggcgtctgacttttgaaagtttgttggcgatttatttctttccgcctaattttcggatgtaaaaacaatggaatttcgattcgcagatactggcgagaatgcctagttagggaaataaccataacatctggctgggaatgggaagcgggaatatcacggaattgggcaataccaagggcccacggagcacgacctagtaagatgttttggtttttttggtttggtgggttgctctgaggatgggtcttgtaatgaacggcgcaaaacgtaaacaaatcgcgagggaatgtgtaaaaacaacaaaacatgcacgcaggccacctgatgactgacattgacgataaatgaacaatcgacctcaataaaaggcaggcgcaggcacacatacatatgaaatagcatatgaatgtgagtacgttagagtgtgtgtacaatatacatacaaacatatctacacacacacacacatatgcacggcagtctcggaatatctacgtctcgggaatttcacttgagttgatcatttaattaagcccccccactgacccgcggccccaaaaaaaaaaaaaaaaggtcaaatagccaccaatggcacttgactaggctttctgtatccggcactcttaaaatacaaacacatgagtgccacgcaaagctcttgcaatccagttgtgccacagatttgtatttaccccagatagcaattagtgtaatcgttatgggtgaatgatgatattaaaaaaacatttttcactaatatataaaagttagagaaagaagtggagttttaagcaattgcaatacattttataatcgatcataaaatataaatactttaaagagttgttatttttaataatattcatataatcttaagacttgcaactagaacaactgaagttaagatcgattttcagaaatgcaggaacaagatatcgcatgaaagaatctatttaggcaaaatttggtaattcaaatcgcttattccaatttgactacaaaacatttcccattggaaaaatcaatagttttttattttttttttctgttcgcaacctagttattagcgtttccccagtatcaaattcgcagaagtgcggtttgcgctggcccgaataagcatattgtctactaacccactgacaattggcccacccctcgtgtcaaatgcaatgacaaagtcatcgggttcaggtatctggttggttatctggctagagcagctggtaaatgcagttgcagtaattattgcacagaagattacgtgacacatctgatgagtgagtggcaaatggtgccggtcgccaaccgctgaatgcgggggcatttgattttccaattgatttgaatacagaagcagaagcagaagcaggcggctgtgataatttgaaaacgattgacttttgtagttctccggcgaccgcatgtcggcgtcgtctaataaggcctgaaaaaaaaagggttgcctcatcgtcatcatcgtcatcatcatcatcatcatcatcagcagtaacttgagcaacagactctaaaaagtaactgaagccaaatgtgaagctacgaaagaagccaaccgaaatggtggcaaaaaggcaattaaaaagaaacgactgaacgagagagtgagcagttttaagtaaatttgtatacatatgtagtatactcccgggtctcatgatatttcacacgaattttgataacttagataaggctgatgtaataaattcatttatattataagaagctaaatacccttgaaataaacgaatcagcaaatggaaaaataggcattaaaggtgaatattaaatgttagttcataaagatcatcaaatgaaatagaaaatataacaaaagcaattagaatttaagattcacaatttttcgcgaacgttctaatacgcccgcaggtaggcaacatcttttgcaacatttttgtgctttttggtggctagaggatatccacaattcggctattccgaacataattctttcccggcgcatttttttttttcgctgagcaagggcctcgtcatcgtcttgccaaactcgcatgttggcaagatacacacatatatggatgtacgaatgtacatacatacgtacgaaaggttgtagctgtgagtaattccgaaggttgaggcatactaaaatgcacattcgatcggtgttttgttaaagtaaagcctgttagtacatacgttgttccccgggcagctgcttcgcatcgatcgcttttttattattattatttttttttcgccttcagcttgcaaaagattaagccctctgataagatagcacccattatctaagcaaacacaccaatacacgcgcaagtgtactcgccacagtactcgcttataataatttgaattctaatcagaacggtagagggggatggagagactccaatcagagaccttcccagtcagactgttcgaaaaaaaaaattacaattttccacgttgttaatttatgccaaatacacacgtacatacaaacgttagtgtaagtttttgcatagaatttagcaatggaatgaccgcgaaattgatatgttattattgtgtttaaattgttgtataagtttctaggtttaccataaatggtgcttcataattattttattcagttggcttttttttcccccccgaaagcaggactattcagtatctagagtcaagaagccatttaaagaaaccacgtcaaagccaaaatatttaacacatctgcattgggtttcgaacttgcgaaatttggatgcgctggcgctaacaagattattttgtatgaaaaactgcacccacttaatacatatgtagatatgtatgaatgtatgtatgtacatatgtcttgagagcgaaataaccccttgaacaaatcacacgaaaagttaacgaaatcgtacactgcgtaggttatgaaaaatgttaataaatggttgtatttaataaaaaaaaaacatgtgaaaacaagcaaacattttactgaaaaatatgactattttgaaatattgtatcccaaagagcccaaccctcctcaaatcttataaattcgaatgtgtgtgtgtgtgtgtgctgttgtgtgtttttttagtgtacctttacggtccatagcatggatcgatttatggcataaatttacccttaccaccacggaattgggaattgcatccctaattccgcatggagtctcgttccaaatagattttggattttgtgttcccaaaatgaatcagtgtccgttccgatttgggaagagcccgtattgaaggcaactgtgaaagacattaaactgcagccgctgctctcatttgcttttgcttttttttttctgattggacctaggttttcttgctttttctgcctttttgctttcgtcattgttatggttatttgctgttgctattgccgttgcgcacagttgggttaatatttcgaaaataagccataattgtgtgtctcagccaccattttgtggttttagttgagtttgagtttgtgcttgctttggttatttccttcatttttttttgttattttttacatatatttcttttttacgtttaatgcttagtgcgcctcgttttttccgttggtttggcagctagacggccaaagtgtgagttcggattggagttcattcaccgcgcagtaactgacggatgccaataagaatatcccagatcccagttggtcttgaagaaaacccccaacgttatttcgttttttttttttcacaaactcttgctttaacccgcactcactcacgaatacaacaaaaacaaaaacaacaacaacaacaacaacaaaaagatacaaaatcatacagatacacacactcgcactaacgttcgttcacacacacaaccactataaacaatcggcggtggttgagatccccaaaaacccctcccccaccgaaccaacgaaccaccactgtttttatgtttctctgttttgagtattattaatttcgccgtacatcggtggtacaatgtgtgttacaaagccaaaaagcccgaaaaaaaaataaatgaaaaacagtcgaatattttgtcgtacttgatggtaaagtaaatataacacacagatgcaaaggcggttagacatacagggccaatatacagatactatccgtatatacggtgtgattgtatttgactttatttaacgacaattacctaaacaaacgtgaacaatagaatagcggcggtacgacgacgcgcacttaacaacaaaaagtactccggcgttcgggaacgggaaaaccaaacaaaaaaataacacgtccgctcaccacaagatttcaaagttgactgcgacagcaacgattttttttgcggcaaatggaatccacaatacgatccacttttaataacataggcttctcttaaagcgttgtatttgtattcattgtatctgcagcgctaccggactggcgagatttcgttctggcttaagttaagatttccggctgacctggcctacaccgaaagaaacgggtgaaattggcatatatcttatcatattaattgaatcagaagattgttttaatttcgtatattcttatggctaaagaaatgtttttaaattaaatgtttataacgtaggatgtataaataacaatttgttcttaacaagccactgcaatggtccttgtcgacgaaccaaaaatatacttgccaactttcaaataatgggtatacaaaattatacaggagatttcttaacgtgttgcttattttggttctattttttcaagtaaggatattttaaggcgttgccacaagttcgacctatgatgttgccagcagcatggaataagaatgctgagaattcaaattatgaaatttattaaaagtaagaaatgaaattatttggctcttaaaaaaataaatttaaaagaatgtttagtatgtgctgaatggaaataatggtaatttaacaaaatatactgaaaacacgtcaatttaaaaaatatcacaccttaaaatcgttagccttaatatcggttttttttgccatgtgccttaaaataaatttagataacatttttttgtaaaatgttacatattcaattaagcgtttcgaacccatttggaaccacttcttttaaggctacatgagactttctacaaatattgtatttccgcaatgtaggtttgttacggctaaaacttattgtttaagcaaaatcagtggatatggcaacgctcgtaagaaattatagaaatatgtgaagcgccatccagcggatagtgcaagttctgcaaaagcgcgcgtagtagct

SEQ ID NO: 19733 - DNA, 5836 bp, DROSOPHILA
gacgtgttatttttttgtttggttttcccgttcccgaacgccggagtactttttgttgttaagtgcgcgtcgtcgtaccgccgctattctattgttcacgtttgtttagatttccttgtgcagaccctagacagctatatcgatggtgggtgcacagacgacaacaattcccaactctcttccactccaagccctctcgttttccccctcaccattctcccccaagctctttaacgaaaaatgtctgacaccattgcatccgaaaaagaaggaatctgtcctctaaacgaatcaaagtcaggtcaggaaattgatacaccagttgaccaagattcacagaaattggagcaagttatcttggacagctacataacagcacctcttaaaatcgttgagcccttcgagaagttcgaaaaggaaaaggaggaggaagacaaagagaaggatagtccggtaaggagctcgacaagtccggaggatctcaccgagatcgaagtcattagtgccaaggctaagaaatcggttagcttcaatcccaacgacgaagagattcgaaagttcaccaccggtgaaccgattgtcgatcaaaagaatccattccgcaatggtaacataatagcaaatacgcgtgagaagaagacaccgcctccggtgccaacgaaacgatcgaccctaagtgttcgcaaaaccgtgacccagcaacttagggaacgcgaacgagaacgggagcgcgaaaaggagcgggagcagcagaagaacgagtccaacactcgaaaaagtaagattaatcgaacccagacgcagacggatgactttgtgaccactgaggaggtgctcaagcaatccaagtacgtgaaaacgtacatcaagaatccggatgcgtactttgtctatgatccctcggtgctggcacgccttaagttagaggaactcaaggagacaaccggcaaattgcccaagcggaaacagacgttgaaggaaacaagaacgggaaaacaggcccgccatcagaatcagaatcccaaccagaaccagaaggctcagcagttaataaaaccgccgcagcccacttttaagaagtgctcgaagccaaactatccggagttggccaacttaaaaattcgaaccggtacaaattcggatccagaaagcagtgccttattcaatcccgctgaggtaacgaaaaatgctcgcaaattcgatgagagggtaaagaaactacagatcacctcggatgatgatctagacgatatcgatggaccattgacgaaaagtgagtccagtgacgagttggcggccagttcctctgtgccacagagtccggacaagccggtggctatgagtgcgccgggggatttaccctcgccatcaccgggcacattcaccaataccattagttccgatgagttccaagcgtatctggactcgaagggtctggccctaatgcccaggcgggagctattctcaccgacacccacaatcgccaggacttcgacgccaatgcaaacggcagaggagcgacggcaacaggtggctgaatcactggcggctctgcgcaaaagcaacaccaagaagctaaatgtactccagcgtatctcaaacagtatatttccagctcgacgaaaaactactcccaaatcggaaactccttcgccacggagtattttcaacgaattggaaaaggaggactatcgtcgcaaggcggatgtcccaactgagatacgtcgtgtactattggaacgccagagtcctaattgtcgtcggcaaaatggtcaagttcaatcgccgaccattgattctggtatcgataaaagtcccagaaattgtgaaagcaatttgccgaacagaaacggtgatacaagtttacaaaggagaaatggtgacatcaatttgcaaatgcgaaatggtgacaccagtttgcagataagaaacggtgacaacacaattttgcaaaggcgaaacggtgacaacaacttgcgaagatcaacactggagcgaccaggtgtgaatcctagacgtcagtggccagaagcacagcaggtgggtcgaataaatcgatccacttcagtggatcgcagccaattcaatcatgagcagcctgctcttgcaagtcctgttgcctcatcgacgccagtgcgtggccaaaatcaatgggatcaattgcgggccatcaaagaggtgacggatcgccagctttatcacaagcttcatcagcagcagcaactgcaggcacaaccactccagggacaacaacaacagcagcagcagcagcacacaatcagacaacgaccgaatgaggatatctactcccaggtgatagtccatcccgaccaaaccaactttgttcgcggctcaatgcagcgtaacaccttctccggaatcagcggtcgcagcaggccactaatggtttataatggtacaccgatgaggcaacaacaaatgcaaaaacagccgccgcgatgtcagagtgtcctggacaatataacgccaagtgctggaaatccaggccaacagacaccagtggtaatgcggcatagggtggcgaaccagggccaatcgcagcaaatgccatcacgtcgcatcggtggactactcacgcgcgaggagattctcgaaaaggtcaaggagttttgccgcaagagcattaaccgagcaccggaagccaagacgccactgcagcccatctataagcgacatctaacgccgcccaacgccgatgtctcgcccgtgtcatacgcttctgtcgatgatcaatgtgctcgaccacaggtgccacagcgtgtccagagtttacctgtcgcccaggggcgctacgtcaccagcggcatgtcagtggacgggccgtcacccatttacgctcatgtcagcaagcgaaacagtttgctttccaatgtctccgaacagtatttatccaaccagcaacttggaacactgaccaggccggtgccgctgaaccagttggtactggtggatacgggcgagggtgttcaggtggcccagctagtagactatctaccctatgtccgaccggctcccgcccagggctatatgatgcaggatggcagggccactccactcatcctggaccaatcggcccagcagagcagccaaatttactggacaccgcagcatcgtcagcgtttctctcatccggtgccggcaccccgttttatgaagagtcaagccatgcccacatcaagaaacagcaccataagtcgacatatggaggaaaggatgggtaacgcctccgactgggaactcagctcggaagctggtgaaacgacggagcagaagatggagtcggagggcagcagcagcgaagacattgggcgcactaagaccgggcccaatttaagtgaggagtctctcgggagcagcacctcatcgtcggtactcaattcgtggaccattctgccagtggttaaggagaaggatgacggactggaggcgaagaccgaactgttgacggatttaaggccgagcagtcgcgcggataagcagaaaaacgagagatgcaataggcctgcagccgaggatcctcaggcagatgatatttctgatggcatttcgataatcagcgattgcgagagtacggatcgcatatcaccgaatctatttctgcgcgaacccctattgggtgacatgggtttcggtgatttaccaactagtcccgtggaactgattgcccccataagcactgaccagcagctatcggagtatcctgagcgggagccggagcaacaacagccggagtccaagagcgtagtgcgctccaaattagatctgcagttgccaccgctggtgcaaaatggcctgaccgccttcttttatgtggcctccactttggccattctagcctttgttggcaaactacgcaatccggaatggcaggtgctcggtgaggagaagcccctgatcgaactggagcgacgagtgggtgagctggagctgcaaaataatttactgcgcgccgaaatcgatatcatgtcgaagaaactgcaatatcttgcagctggacaggacgcaacgatgcagcgacagggatctggtcgtgccaagggcaagaccttcaaggcctggccaggaaatggtgattcggttcagcccgtggatatcaccaaggccgatttgaagcaaccctttcagtgcgacgatggtcagttcgttgagatcgctggcatgtgcgtggagaacaagcagcatttggattctttaacagatgagattggaaatgccgtcaacgatgtgctacagcagtctggagcctttcacaagtttgaaaaggtcaccgagaagctgggcaattttgccggtgccgaggataccgaaaacgttgatcccaaaggttttcactcgaaaagaaatgatggtccacaaaccgtaacttcccatggccagtcatcgaagctggcggatggttcgaaagagcgttacaggccaaagtataagcaagagtacaacacgaacgacagaaagcagcggtatcggaatgaagatcacgatcgccgcagccgtacagatgatcactcacgggagaagggtaaaactagatgctacgatcagtcatccaataaacgaggatgttacaataagaactctaaaaaatccaacgaggagcactccaacgagaatagcaaggaacgctatcctaataacgatagcggtagtggcgagtggcatgaacgaatgatgctacagcgagaaaacgctcgccacaaacatcagaagcggaacaataagaactggttcatcaaacgaggcgaaagtcgcgaacagatgcgttctggagagacccaaagctaaatggattcgccgcaatcttatatataatctacgcatcaagacgatgacctctatcttcatcccgtagggaagaagggatcgaaatttcgcaacagaggtcacatatacatatatactttaatcccaagatatacttaaggacagagtgtgctagtaaagcgcacaccgaatttgcgctggttcctaacttatacatgtgtgtgtttgtaatatttcgacgatgcttctacagagtgtttttttctttttgttcaagacagcaattaaacaggaatcaaggttttttgaaacacactgtagaaccagagcttaataagcatcaagcgatgcaagtgcttaatatttatttatttttacctacaatacaacaatcgttttggctgcgttaaagctagcattatctttataatcccgatatcgcaatgtatgtacatatacagattcaatagtcagtgtttaatactaagtgtatcgcatttttaatggaaatatcgtacatatcgcccacatttaactaaaatggaattaatactaaaaagcttatgaggacttatgaggattaaaatcaaaattaaatgtaaatcccacttaagttaaatgtgagcgatgtctttgtataacattggttcctcccattgaagggtgttatttcttctacaaagttccagctcaacctaagagacagacccatccaagtccgtcaataaagcaaaatcaatttcctttcaacgagtttatcaataatccttttgaaacattaaatttcgctacaaattatgtattgatatatacataaatatatatatttgtgatacctatactaatatttttttttagtctagaaaaataaattattgtaccatattaggtattcctggaaagccaatttaaaaaaaagaaatcctataaaactgataaaaatcgaaaatgtaaaggaaatccatatttttgtatgcatgttcgttcaaaatctaagcgtatatattaataaatgtataaatgtgtaccccaaatgttttgcgatgaaataaat

SEQ ID NO: 19734 - protein, 1520 aa, DROSOPHILA
MSDTIASEKEGICPLNESKSGQEIDTPVDQDSQKLEQVILDSYITAPLKIVEPFEKFEKEKEEEDKEKDSPVRSSTSPEDLTEIEVISAKAKKSVSFNPNDEEIRKFTTGEPIVDQKNPFRNGNIIANTREKKTPPPVPTKRSTLSVRKTVTQQLREREREREREKEREQQKNESNTRKSKINRTQTQTDDFVTTEEVLKQSKYVKTYIKNPDAYFVYDPSVLARLKLEELKETTGKLPKRKQTLKETRTGKQARHQNQNPNQNQKAQQLIKPPQPTFKKCSKPNYPELANLKIRTGTNSDPESSALFNPAEVTKNARKFDERVKKLQITSDDDLDDIDGPLTKSESSDELAASSSVPQSPDKPVAMSAPGDLPSPSPGTFTNTISSDEFQAYLDSKGLALMPRRELFSPTPTIARTSTPMQTAEERRQQVAESLAALRKSNTKKLNVLQRISNSIFPARRKTTPKSETPSPRSIFNELEKEDYRRKADVPTEIRRVLLERQSPNCRRQNGQVQSPTIDSGIDKSPRNCESNLPNRNGDTSLQRRNGDINLQMRNGDTSLQIRNGDNTILQRRNGDNNLRRSTLERPGVNPRRQWPEAQQVGRINRSTSVDRSQFNHEQPALASPVASSTPVRGQNQWDQLRAIKEVTDRQLYHKLHQQQQLQAQPLQGQQQQQQQQHTIRQRPNEDIYSQVIVHPDQTNFVRGSMQRNTFSGISGRSRPLMVYNGTPMRQQQMQKQPPRCQSVLDNITPSAGNPGQQTPVVMRHRVANQGQSQQMPSRRIGGLLTREEILEKVKEFCRKSINRAPEAKTPLQPIYKRHLTPPNADVSPVSYASVDDQCARPQVPQRVQSLPVAQGRYVTSGMSVDGPSPIYAHVSKRNSLLSNVSEQYLSNQQLGTLTRPVPLNQLVLVDTGEGVQVAQLVDYLPYVRPAPAQGYMMQDGRATPLILDQSAQQSSQIYWTPQHRQRFSHPVPAPRFMKSQAMPTSRNSTISRHMEERMGNASDWELSSEAGETTEQKMESEGSSSEDIGRTKTGPNLSEESLGSSTSSSVLNSWTILPVVKEKDDGLEAKTELLTDLRPSSRADKQKNERCNRPAAEDPQADDISDGISIISDCESTDRISPNLFLREPLLGDMGFGDLPTSPVELIAPISTDQQLSEYPEREPEQQQPESKSVVRSKLDLQLPPLVQNGLTAFFYVASTLAILAFVGKLRNPEWQVLGEEKPLIELERRVGELELQNNLLRAEIDIMSKKLQYLAAGQDATMQRQGSGRAKGKTFKAWPGNGDSVQPVDITKADLKQPFQCDDGQFVEIAGMCVENKQHLDSLTDEIGNAVNDVLQQSGAFHKFEKVTEKLGNFAGAEDTENVDPKGFHSKRNDGPQTVTSHGQSSKLADGSKERYRPKYKQEYNTNDRKQRYRNEDHDRRSRTDDHSREKGKTRCYDQSSNKRGCYNKNSKKSNEEHSNENSKERYPNNDSGSGEWHERMMLQRENARHKHQKRNNKNWFIKRGESREQMRSGETQS

SEQ ID NO: 19735 - DNA, 6629 bp, DROSOPHILA
tatgttgagcatatcttctataaacaaaaaacaaaaaaaaaaaacacaaaaacaagaggctaatgcgaaaccatagcaaaactaaatgctggctcaacagtgggcggtaataatatatgtaataatataatgacatgtgatcttaaaagggccatacaatattgatataacatagttacacctctcattttatcgataataatcaaaatatagcagtatctacttgtaaacaaaataaaacgttgaaacgttgaataaaagacttgctttttgtatgaatacaaaagctcattttgtacaatcgagtcgtttattattgaaagaagtatcaacacaacgtttatcattgaaatgcgattttgtttaaacacttaatgctacgttttcagaacaggaatcatcacgcatacatagctacatcttaatgtatgaatgtcctagctatcgagagttgataacccaaccgaaacgtatttctaaaatttttgacaatatataaaaatttattatttctaagggactgccaaccattaaaatactttgtatttcctaataattatctatacaattcgaatttacattggaacaattttaaatggtttcagcgactttggttagaaaacaatgtatcattagatacataataatgatttttggtaactacatttaatcgccataaatgttccgttttactcttatttacatttcatttgtttttagcatacaaaatcaattttcgtttcattttaaaactaaatggtatgtaccatgtcatgaaaatgtccatatatattaatctatcctataaatttacagttgtttcacccatgtcatcattattggccatacatgtacatacatacatggatttatggaccattagttgggctagcttagcatcagggacttaccaattattttggcatgtaggaaacatttagcataatactatgtggcaggagcgctggcggggatcactggatctggatgggatcgatcatcacctggcctgctgttgctgttgctgctgttgcttttggcgattgaaatcggcggcaaactggacattttcgggactgctgtggaagagctgctccattagccgcgtgctgcccagggagtttgccttggtgcccaggcacatgttgtactgcggcgcatccagctgcacgtcgcagctgatgtcatggtaaatgtggaccagcgttggatccggtgcacggaagacactcaatctgcgccactgctcagcggcctcgttgtagtccatggccagttcggcggtgttggctaggaagccccgttgcctggtgcctacgcgcacgatcttctccaggaatttgacgtcctccaggccccagccggtgatgtccttatcgaatccgttgatatcctcatcgagtatgtccgacttgtagatggcacagatgccgaacccaaattgccggaaatagccacgttcgtcgtcgatcctgggggtttctccctcgtcctcggatcccccagcgtcaccgcttctcctctgcggatcatactgactgaagacgatggggaggtaaacctgtttgccccgctgcgtgtgcatcctcacgcgctgcagcgtctccacctcgaagaccatgtccacgtcgataaacagaatgatgtcctcctgacgaatgtacgaggatctggcggccacgtccagggcaacgccacgggaaaaggcgctgcttctttgaatccagttcacctgctggtagacatgccgggcgtgcagatcatggagcagctgcaggtgatcgcccagctcgtccggtgacccgaagatcaccaccaggaggtcgcagtgctgttcgccacgcacgcagacgcgctcgtaggtgcgcaggaagcgctcgaatgtacccaaacgaccggcgatgggcaggacgaacacgatcttgtcctgcgtcggtgacagcagtccactcggcatcgtgaagtggctgctcaagcgggccattccgttctggaacaggctgcccaggagacctgtcgtcgaaaaagggcagtaacaaaatccatgtaagttatctctccaagatgttaatggcccacatgggtatagatatctgaaatagaacataatactcactttgctgcagggtgacattgtagaagtcctcgtccacctccttgacaaagatgcccgtaaaggcgcgctgaacataaagatgccttcgcaccggaacggtcatcttcttgccccggtacttcttgtagatgagcagcagatcgaggatcatgtcctggccgtggagggcgtccagccgatggtatccgtagagcagttcccggaactcgatgacgcgaccccgttgcctggaatagttgttgatgttctccatcacctcggtgatggcatcctccagtccctcgcgcatcgccgagtcgatcttctgcttgggattggcggaacttgccgagtacaggctgcgggcgatgaaggaccagtccagcaggtcgtcggtgcttgcgggcacgaatttattcagttccggactgattcctgtggatgaaagtgaagagaatgggattagtgaacggagtctccgacttatgaaggcaatctacgtgttatgcatatcattcacttggaactgggccaatgcaaatgtgctctaatggaaacacgccccaccaggtggtgcttgttaattttccggtggcttggcttgatactccccaacggagttggcctttaaaacgaaagtctgacggcggcgacagtcagatcggattcggttttccccggccaaaaatcccgagtcaagatgttgctccaattgaggcgattggcgatcctgttcctgctccacgctctcatccccatccttgcgctatctgttcccatggtggagcaagtgcagccggcggacgagctgctatcgtcgcattggctaagacaggcgcagtctcagttgcgcgaacgtctggccagaaccaaggactccatcgccgacgtccgacaggccaagaatgtggtgatgctcctgggcgatggactgtccatcaccaccttaacggccgctcgcatcctaaaggggcaacgtcgcggcggacgcggagaggatgcacagctggccgtggaacaattccccttcagcggactgagcaagacatactgcatcgacgagcagacaccggactccgcctgcacggccaccgcctatttcggcggtgtgaagacgcacagcggcacagtgggtcagagtggcagtggtgagcgcgtggactccgtactccagtgggcacagcgagcgggcaaggccacgggagtggtgaccaccacccgtttgacggacgccagtccggctggtgcctacgcccatgtgagcaggcgtggcgaggagctggagattgcgcgacagctggtggaggaggagccgggacggaatcttaatgtcatcctgggcggtggtctgggaaaatttgccgatgagcgacgggatggaaaggatctgctggctcagtggcgtgaatcgaatcccaatggctgcttctcgcgatccctgaaagagctgaggaactgcaccgatgctaccggtacactgctgggtatcttcagcgacagccacatgtcatatcacttggccgccagcaaggagctgccgcgactctgcgacatggcagcggcggccattgaaaaactggagagaaagtctcaggaggatgggaatggttacttcgtgttcattgagggcggacggattgatcatggacaccacgaaacccgggtgggctacgccctcgatgagatggtcgagttcgatgcggctgtggagacggtgatccagatgaccgatccgcgcgatactctggtagtggtcaccgccgatcattcgcatacgcttagcatgtcgggatacgcgaagcggggcacacccatcctgggcatggatgcacagcagcgggatgtgaacggggtgccatacagcaccctcaactatgccatcggcaagtggcagagtctggacaaggatggacgtcgggagagtcccagcaagacattgagtcccagtaagtaatcgcgattgtaccgattgtagttgcttcgaataacccgtttttaatccttgaccagcatcctacacacccagctatattcatggaagaaagggcgtgcattctggcgaggatgtggtcgtgtttgcaatgggcccgcagtcgcatctgttcggtggcgtcatggagcagaatctgctgccccatataatgggctatgccgcctgtctgggcaatggcctcactctctgcaaccaggacaaggatgcggatatgattgcctgattttgcgaagtttttcggataaatttttgttttctgttctaaataaatgttcttgtagtgcatgccttactctgtacctttgtatctttgtaatattctaacttagtatctttccatctaactcatgtatctttcgatatatgtatctctttggccaagcatctagctaagtatctttaatctgtacaacccactcaatatattgtgatcctggaagtgcctctaactttgtatctgtttatctttgtagcttgctaagttagttagtatctttctatctaccttatgtatcttatgtatctttaaattgtgccacccacctaatatgttgtgatcctggaagtgccttttggtggaatcgctttcgggtgacacactgggcaacatgtaggtgctctcgtccggaacctccagatatttggccatccgcttgatatcccgatgcagcagcagcgactcctgacgcatctcctccgctttcaaaccctggacataggagtgcaggcggtacatgagcggcgcctgtttgatgggatgcagggtgatggcgttgtggatctccttgcgcttcagtttgcccgtgtacgcatttcgtccactggagttgtgccgcaaaatgtactgcatctggatatttgaaaaaaaggaaatgtttcatttaaaggcgagtattttaaagtacaaagaactatatatacttataacaatggatctaattggttgttctttgaatccaactattgggattgcccacctcgtagttccaagtgcagggtatgccggcgaacttctggacacaccgccccacctcgacgtcctcgtgggtgctgtagaggttcttcaggcagctgggtatgtgtggcgccacgcggcgcagagtctcactgctgaggatcacccccggtccgcccatgcagaagttctcgtcgaactcgagagacagcaggccgaactcctcgctattgcccttgcccgcctggccgatgaactgcggcttggagctgtcgatggagcgcaggaagcgctccagcttgtccggctccatgtagacatcgtcgtccgcccggatgaaccactcgaagcggtcgatgtagtgctcgtacatgtagtacagcatcatgaaggacttcttctgcggcggatagcgatcgtccacgttctttagccccaccacgggcaggtcatccgagtagctgccctccgaactgaagaaggccatccggccgggcacctccttgccccacgtatcgtacaccgctcgcgctctgccctccaggaagcttttcgccgtcatcacgcccacaaagactagattccgctgcgaattctgtatggtgtcctcatcccgcagtccaatgatatccgccggcgtcttgagattcgtcgggcgcaggctgcatcgcttcacgatctccagcgccaggtagttcttcagcatggtgccgatgcagaggcccagggcgatgccaaagaagccgatgatcagcgtcttccgcttcgtcatcgtgtgctgcagcatcctggatatatatatacaatatatatatatatatagagtatatcacatatatgagtatagccccgctaattcgaatccaattccaagtgcaatggcattggtgttcagtgggcgctgctcatgggaattcctgtgcgtgaaaaaaagaaaaggggagcgatctataaattaatggctcgtgccagcagccggaaatattacgcatacactatgtatgtctgcgctgggaaaaatattatatcaaatactattaaaaagaacatacaattttcactgaatatttcattaaggaaatatgtaaagcaaatacaaatatacaaaaaatataaaatatttatttgcataaataacaatacgtttgaacagaagttagtgaatacatgtgaagcccaagaggctaaacaactaatctgccgaacacgtaacccctaaaagtttcatagttttgctattttgtttacagaatacatatcaatacaatcagttattttctcaggaatccgatttagtgtaaatacctaaaagtcgaattcatttccactcgctgcgtgagtgaaatggaaatgggcatggaatgggaattgaaaatggaaaatggaaatttgacgttgaagtggctccgcaaacatttgagttcgtgcggcatttccctggaattgttttccattagcctcggatgcaccggtgtccggtgcccccgcttcattgcccccggcgtcgatcttcgcgagacgcggacacttgagccgagattgtgatacaagatgcgagatgtgccgtggagaatctagatctattt

SEQ ID NO: 19736 - DNA, 2391 bp, DROSOPHILA
cggaatctagtctttgtgggcgtgatgacggcgaaaagcttcctggagggcagagcgcgagcggtgtacgatacgtggggcaaggaggtgcccggccggatggccttcttcagttcggagggcagctactcggatgacctgcccgtggtggggctaaagaacgtggacgatcgctatccgccgcagaagaagtccttcatgatgctgtactacatgtacgagcactacatcgaccgcttcgagtggttcatccgggcggacgacgatgtctacatggagccggacaagctggagcgcttcctgcgctccatcgacagctccaagccgcagttcatcggccaggcgggcaagggcaatagcgaggagttcggcctgctgtctctcgagttcgacgagaacttctgcatgggcggaccgggggtgatcctcagcagtgagactctgcgccgcgtggcgccacacatacccagctgcctgaagaacctctacagcacccacgaggacgtcgaggtggggcggtgtgtccagaagttcgccggcataccctgcacttggaactacgagatgcagtacattttgcggcacaactccagtggacgaaatgcgtacacgggcaaactgaagcgcaaggagatccacaacgccatcaccctgcatcccatcaaacaggcgccgctcatgtaccgcctgcactcctatgtccagggtttgaaagcggaggagatgcgtcaggagtcgctgctgctgcatcgggatatcaagcggatggccaaatatctggaggttccggacgagagcacctacatgttgcccagtgtgtcacccgaaagcgattccaccaaaaggcacttccaggatcacaacatattaggtgggtggcacaatttaaagatacataagatacataaggtagatagaaagatactaactaacttagcaagctacaaagataaacagatacaaagaatcagtccggaactgaataaattcgtgcccgcaagcaccgacgacctgctggactggtccttcatcgcccgcagcctgtactcggcaagttccgccaatcccaagcagaagatcgactcggcgatgcgcgagggactggaggatgccatcaccgaggtgatggagaacatcaacaactattccaggcaacggggtcgcgtcatcgagttccgggaactgctctacggataccatcggctggacgccctccacggccaggacatgatcctcgatctgctgctcatctacaagaagtaccggggcaagaagatgaccgttccggtgcgaaggcatctttatgttcagcgcgcctttacgggcatctttgtcaaggaggtggacgaggacttctacaatgtcaccctgcagcaaagtctcctgggcagcctgttccagaacggaatggcccgcttgagcagccacttcacgatgccgagtggactgctgtcaccgacgcaggacaagatcgtgttcgtcctgcccatcgccggtcgtttgggtacattcgagcgcttcctgcgcacctacgagcgcgtctgcgtgcgtggcgaacagcactgcgacctcctggtggtgatcttcgggtcaccggacgagctgggcgatcacctgcagctgctccatgatctgcacgcccggcatgtctaccagcaggtgaactggattcaaagaagcagcgccttttcccgtggcgttgccctggacgtggccgccagatcctcgtacattcgtcaggaggacatcattctgtttatcgacgtggacatggtcttcgaggtggagacgctgcagcgcgtgaggatgcacacgcagcggggcaaacaggtttacctccccatcgtcttcagtcagtatgatccgcagaggagaagcggtgacgctgggggatccgaggacgagggagaaacccccaggatcgacgacgaacgtggctatttccggcaatttgggttcggcatctgtgccatctacaagtcggacatactcgatgaggatatcaacggattcgataaggacatcaccggctggggcctggaggacgtcaaattcctggagaagatcgtgcgcgtaggcaccaggcaacggggcttcctagccaacaccgccgaactggccatggactacaacgaggccgctgagcagtggcgcagattgagtgtcttccgtgcaccggatccaacgctggtccacatttaccatgacatcagctgcgacgtgcagctggatgcgccgcagtacaacatgtgcctgggcaccaaggcaaactccctgggcagcacgcggctaatggagcagctcttccacagcagtcccgaaaatgtccagtttgccgccgatttcaatcgccaaaagcaacagcagcaacagcaacagcaggccaggtga

SEQ ID NO: 19737 - protein, 788 aa, DROSOPHILA
MTAKSFLEGRARAVYDTWGKEVPGRMAFFSSEGSYSDDLPVVGLKNVDDRYPPQKKSFMMLYYMYEHYIDRFEWFIRADDDVYMEPDKLERFLRSIDSSKPQFIGQAGKGNSEEFGLLSLEFDENFCMGGPGVILSSETLRRVAPHIPSCLKNLYSTHEDVEVGRCVQKFAGIPCTWNYEMQYILRHNSSGRNAYTGKLKRKEIHNAITLHPIKQAPLMYRLHSYVQGLKAEEMRQESLLLHRDIKRMAKYLEVPDESTYMLPSVSPESDSTKRHFQDHNILGGWHNLKIHKIHKVDRKILTNLASYKDKQIQRISPELNKFVPASTDDLLDWSFIARSLYSASSANPKQKIDSAMREGLEDAITEVMENINNYSRQRGRVIEFRELLYGYHRLDALHGQDMILDLLLIYKKYRGKKMTVPVRRHLYVQRAFTGIFVKEVDEDFYNVTLQQSLLGSLFQNGMARLSSHFTMPSGLLSPTQDKIVFVLPIAGRLGTFERFLRTYERVCVRGEQHCDLLVVIFGSPDELGDHLQLLHDLHARHVYQQVNWIQRSSAFSRGVALDVAARSSYIRQEDIILFIDVDMVFEVETLQRVRMHTQRGKQVYLPIVFSQYDPQRRSGDAGGSEDEGETPRIDDERGYFRQFGFGICAIYKSDILDEDINGFDKDITGWGLEDVKFLEKIVRVGTRQRGFLANTAELAMDYNEAAEQWRRLSVFRAPDPTLVHIYHDISCDVQLDAPQYNMCLGTKANSLGSTRLMEQLFHSSPENVQFAADFNRQKQQQQQQQQAR

SEQ ID NO: 19738 - DNA, 1257 bp, DROSOPHILA
tggaggagattaactacgaagcggatgagaatcgctatgtgcgcatcaagcaggagctaatgggtggcgatgagtccttggcggaggagtccagcgacaagactgccaatcacaataataataataacaataataataatattaacattaacaatagtgtgcgcctcgaaagtgacaatggattggaggcgagcgagctcgaggagcgcgaaccggagccggaaactgaaatagaacccgaacacgaacacgaacacgaaccggaaccggaaacggaggtagaggtgcccgaggtgccaatcgataaggagaaccccctaaagtgcaccgcctgcggtgagatattccaaaatcactttcatctcaagacgcaccaccagagcgtccacctcaagctgcaccacaagtgcaatatagatggctgcaatgcggcatttccctcgaaacgcagccgcgatcgtcacagttcgaatctcaatttgcatcgcaaactgttgtcgaccagcgatgatcatggtttactccatgcacccgtaatgcccgcaacggatccgctcctggagctaatgagtctcaatttgaataacaacaagagcggcttccatcactcggcgatggtgggctcatcggcaggcggtgctggtggtgtaaatccggcggcggttggcagcatacaggcggagattctggcccgcatttgtgccggtgcccatgcccatggactgaatgtaccgctctgtttcgaggctttgcagcatcgtttcgccgttggacatggccacgctggttatccactgatcgccggcgatggctcgccaccaagtccccgcctatttttgaatcacggtggcggcgcgagtccgcttctgtttgccggactgccgcgcatgccgagattcccccaactgacgccccatatgctggccgccagtgctggcaatacagctgctgccgccgccgccgccgctgctgccgccgccggaatgggcggactaagtcccttttgtcgacgcacctcctccgattcaaattcacagcactcgataacgccaccgccgaagagatcccgatcgcagtccagatcaccggatcattgtgtacatccggcgcatgccggtgataccacgggcattaccgaagattcgggccagcggcaaagtcccgatcgcatatcatgaccatgtacctcgtattatgccaaggcgttggcattttatcactaagagtcccccatgtcatgcggtgcacacactttaa

SEQ ID NO: 19739 - DNA, 257 bp, DROSOPHILA
cttttgtcgacgcacctcctccgattcaaattcacagcactcgataacgccaccgccgaagagatcccgatcgcagtccagatcaccggatcattgtgtacatccggcgcatgccggtgataccacgggcattaccgaagattcgggccagcggcaaagtcccgatcgcatatcatgaccatgtacctcgtattatgccaaggcgttggcattttatcactaagagtcccccatgtcatgcggtgcacacactttaa

SEQ ID NO: 19740 - protein, 48 aa, DROSOPHILA
MPVIPRALPKIRASGKVPIAYHDHVPRIMPRRWHFITKSPPCHAVHTL

SEQ ID NO: 19741 - DNA, 1817 bp, DROSOPHILA
aattttcgtctcccgaccacgaatacgcatacgcatctgtatctgtatctgtatctgtaaatgtatctgtatctgtatctatatatctatatctatatgggacctcatgttttttacccggcgaggacacgagtgtgacatttttatgtgtcgcttgggaaaattgcccagcattgccctcgttccccccttttcgttatgtttttttttgcttttgctgctttttttttcttgttggtagtgcaacattttgttcggcatttttgcgtaattcaatcgaacatccacgaaaatgctgaatttgtttttcaatttggcaaggtccgttgaatccgtagaatatttggctgcgattcgtaacagatcgcgtaaagagctctaaaatcgatattaatcatgcgtggaaatgccataaattaggcgagcaacccaatcattttcatttcgcatttttagtgccacttttccttgcgattttccgcagcttgtagcgaatgtcgacgatcattagtcaattttctcagcaagatcacacggaatttcttggattcgcgcatttcaattggcatgttttaaggattacttaataggcgcactaaatataaagaatatatgctacaataatatttaagaaagtcttcacttaccgccacacattcacacttgatgcagtacataactccgaagggtggacccaaatccgcataccaggtggaccccaattcgcgcaaaactttgccaaactggcattcggtgagtttcatgttgcgctcttcctcttcattgggcacgggcacatccaaggctacatccgtatctgaaagatggagggaatacaaatagagaataagatgatgctgggcgataaggtacgaccttaaatggaatttagatagcaacaaatgcttcaaagcaaccgaaccgccgccagccattcaccatccatccatccatccttccatccagccagccagccagccaaccaactatccatccacaatttgtggacacaattccggcattcaaccaaaattccagttgaatgggtgaatggtgaatggctgaatggacgaatgccaggggatcatcatgaatggcaatgcaactatcaggtagagatcccacctccgaactaagaccttccatttccacctctcgcttccacccaggtggcattcattaatcgtgcataaattgagggcaggtagaaggtagagtttctcgaacgggaagtctaacctacatctaactagggaagtgctttgtatttgagcggactctggggttctgaattcccggaatccacatgacacgctcatttggcgtgaaagtgggtggacacatttccgctgtcccgctgattgacaccaacggcagagtctgcgcataaatcaccatcatcgaatcgaaatcagcatcggatttggaatcggaatcgaaatccgaatcgaagaatctcagtcagttcgttagaagtggcagttcagcgacaaaagctgattaaagatggagaagctgaggagggacgactgcggctctaaagctgaagactggacctctgattcgatgatgccgcattggcatttcgattattttatgctgctccttcttcttcaactcaaatccccggactttaagccgcaaaaaaataaaaataaggagaaataaagaaaaagatatatacgaaaaaaaaaaaatcaaggaaaaagggaatgaactgaaagagaacttcggcccggcatcgcataatgaagggcgacaaatctgacaccttgtatagcattttattgagagccccgccgcaccagggtctcttc

SEQ ID NO: 19742 - DNA, 3713 bp, DROSOPHILA
atggccaacaagctgaggaaatcgaacgccatcgaatgggcaacggccaccggcacagtaccgctcctggaaaggagctgctgccacagcgaggacgccgcactggagccccaagcgagcaaaaccagccatagagaacaagcccccatcctgcgccacctgagccaactgagccacctgctcatcatcgccggactgctgatcgtctgcttggcgggcgtgacggagggccgccggcatgcgccgctcatgttcgaggagtccgacacgggcaggcggtccaaccgaccagcggtcaccgaatgccagtttggcaaagttttgcgcgaattggggtccacctggtatgcggatttgggtccacccttcggagttatgtactgcatcaagtgtgaatgtgtggcgatacccaagaagcggcgcatcgttgcacgcgtccagtgtcgcaatatcaaaaacgagtgcccgccggccaaatgcgatgatcccatctcgttgcccggaaaatgctgcaagacctgtcccggcgatcgaaacgatacggatgtagccttggatgtgcccgtgcccaatgaagaggaagagcgcaacatgaaacattacgctgcgttgctaacgggccgcacctcctatttcctcaagggtgaggaaatgaagtccatgtacaccacctacaatccgcagaatgtggtggccaccgcccgtttcctgttccacaagaagaatctatactactccttctacacctcatcgcgaatcggtcgtccgcgtgccattcaattcgttgatgatgcgggtgttatcctggaggagcatcaactggagaccaccttggcgggcactctcagtgtctatcagaatgccacgggcaagatctgcggtgtctggcgacgagttccacgtgattacaagcgcattctgcgcgacgatcgtctccatgttgtcctcctctggggcaacaaacagcaggccgagttggctctggccggaaaggtggccaaatacacggccctgcagacggagttgttcagttcgctactggaggcaccacttcccgatggcaaaacggatccccagctggccggagccggtggcacagcgatcgtgtccaccagcagcggtgccgcctcatcgatgcatctcaccctggtcttcaatggtgtctttggtgccgaggagtacgccgatgcagcactgagtgtgaaaattgagctggcagaacggaaggaggtgatcttcgatgagattccacgtgtgcgcaaaccctctgccgagatcaatgtcctggagctgtcgtcgcccatttccatacagaatcttcgactgatgtcgcgtggcaaactcctgctgaccgtggagtccaagaagtacccacatctgcgcatccagggacacatcgtgacccgagccagctgcgaaatcttccagaccctgctggcgccgcacagtgccgaatcctcgaccaagagcagcggtttggcgtgggtctacttgaacaccgatggatctctggcctacaacatcgaaacggagcacgtgaacacccgggataggcccaacatcagtttgattgaggagcagggcaagcggaaggccaagctggaggatctgacgccgagcttcaacttcaaccaggccattggtagtgtggagaagttgggtcccaaggtcctcgagtcgctctatgccggcgaactgggcgttaatgtggccaccgagcatgagacgagcctgatccgtggccgcctagtgccccgtccagtggccgatgctcgggactcggcggaacccattctgctgaagcgacaggagcacacggatgcacagaatccacatgccgtcggcatggcctggatgtccattgacaacgagtgcaatctgcactacgaggtgacgctcaacggtgtgcccgcccaggatctgcagctgtatctggaggagaagcccatcgaggcgattggagcgccagtgacgaggaaattgctcgaggaattcaacggctcctatctggaaggcttcttcctcagcatgccatccgccgaactgatcaagctggagatgagcgtctgctatctggaggtccattccaagcactccaaacagcttctgctgcgcggcaaactgaagagcaccaaggtgccgggtcactgcttccccgtctacacggacaacaatgttcccgtgcctggcgaccacaatgataaccatttggtgaacggagagaccaagtgcttccactccggacgcttctacaacgaatcggagcagtggcgcagtgcccaggattcctgtcagatgtgcgcctgtttgcgtggccaatccagttgcgaggtgatcaagtgtccggctctcaagtgcaagtccacggagcaactgcttcagcgtgatggtgaatgctgtcccagctgtgtgcccaagaaggaggccgccgactattcagcgcaatcctcgccagccaccaatgccaccgatttgctgcaacagcgacgcggctgccgcctgggcgagcagttccatcccgccggtgccagttggcatccattcctgccgcccaatggcttcgatacgtgcaccacctgcagctgcgatcccctgaccctcgagattcgctgtccccggctcgtctgcccgccgttgcagtgcagcgagaagttggcctatcgtccagacaagaaggcatgctgcaagatctgtccggagggcaagcagagcagttccaatggacacaagacgacgccgaacaatcccaatgtgctgcaggatcaggccatgcagcgatcgccgagtcacagtgccgaggaggttctggccaacggcggatgcaaggtggtcaacaaggtgtacgagaacggccaggagtggcatccgatcctgatgtcccacggcgagcagaagtgcatcaagtgccgctgcaaggactccaaggtgaactgcgatcgcaaacgctgctcccgctccacgtgccagcagcagacacgcgtgaccagcaagcggcgtctgttcgagaaaccggacgcagctgctccggccatcgatgagtgctgctccacccagtgccggagatcgaggcgccaccacaagaggcagccgcatcatcagcagcgatcctccagctgagcggctccacgtgacggatgggatcccaatccagtatcagatccttggcggcaggggagcgaaccaatcactcactcactcaccaccactcagtgtactcagtgtgcaccacccaaacacacacacacacacacacaaccacacaacactcacacccacatctacacagacacacagacagccacaaaagcgagcgcgcacacagacttgtgcaaggagttgcatagatcgttgttgctatcttatcatgtggcagcaatgagaacttgtattatatatatgaaaacggaggagaaaacgtaggagagaaatctcacaaaaaatatatatatcttatggaggaaaacggagtaatagagagagagagagagggaaggagagagctaatgagatccttggaaaaggacattaaaaccagtgcagtttgctttaaattctccagcgcagaattttctattgaaagcattttctgaatttcttttcgcagttaccccacccgtgtaacccaatcccctcccctccccaaccaacaaacaaccaaaaaaaaaacaaaaaacattaaaatacaattttaatttattacaaaacataaaaca

SEQ ID NO: 19743 - protein, 1038 aa, DROSOPHILA
MANKLRKSNAIEWATATGTVPLLERSCCHSEDAALEPQASKTSHREQAPILRHLSQLSHLLIIAGLLIVCLAGVTEGRRHAPLMFEESDTGRRSNRPAVTECQFGKVLRELGSTWYADLGPPFGVMYCIKCECVAIPKKRRIVARVQCRNIKNECPPAKCDDPISLPGKCCKTCPGDRNDTDVALDVPVPNEEEERNMKHYAALLTGRTSYFLKGEEMKSMYTTYNPQNVVATARFLFHKKNLYYSFYTSSRIGRPRAIQFVDDAGVILEEHQLETTLAGTLSVYQNATGKICGVWRRVPRDYKRILRDDRLHVVLLWGNKQQAELALAGKVAKYTALQTELFSSLLEAPLPDGKTDPQLAGAGGTAIVSTSSGAASSMHLTLVFNGVFGAEEYADAALSVKIELAERKEVIFDEIPRVRKPSAEINVLELSSPISIQNLRLMSRGKLLLTVESKKYPHLRIQGHIVTRASCEIFQTLLAPHSAESSTKSSGLAWVYLNTDGSLAYNIETEHVNTRDRPNISLIEEQGKRKAKLEDLTPSFNFNQAIGSVEKLGPKVLESLYAGELGVNVATEHETSLIRGRLVPRPVADARDSAEPILLKRQEHTDAQNPHAVGMAWMSIDNECNLHYEVTLNGVPAQDLQLYLEEKPIEAIGAPVTRKLLEEFNGSYLEGFFLSMPSAELIKLEMSVCYLEVHSKHSKQLLLRGKLKSTKVPGHCFPVYTDNNVPVPGDHNDNHLVNGETKCFHSGRFYNESEQWRSAQDSCQMCACLRGQSSCEVIKCPALKCKSTEQLLQRDGECCPSCVPKKEAADYSAQSSPATNATDLLQQRRGCRLGEQFHPAGASWHPFLPPNGFDTCTTCSCDPLTLEIRCPRLVCPPLQCSEKLAYRPDKKACCKICPEGKQSSSNGHKTTPNNPNVLQDQAMQRSPSHSAEEVLANGGCKVVNKVYENGQEWHPILMSHGEQKCIKCRCKDSKVNCDRKRCSRSTCQQQTRVTSKRRLFEKPDAAAPAIDECCSTQCRRSRRHHKRQPHHQQRSSS

SEQ ID NO: 19744 - DNA, 4492 bp, DROSOPHILA
ggaaactccttgacaatgtttgagatggtggaagatatgtggcttttgaggcgctcagacacgctgctccacagatcgcttaaatgccacacacacttggtcaccacaagcttgggcgaaattaattcaaattataataccgcagttactgacagcgtacaaatatacacaaattgtgaagagagacttttatgcagacgataaactattgctggcagcaaataagaatacaaatgtgacattaaataaataaataatgaaaaaggtgacttaagtgccaggcagtaaaaaaagagacatattattaggcaaatacgtttttctacaatgaaacgaaacgcttttacggtcaagaatttgtttttgctcgctttttattgtgtcttttcgtatgaactttaaacatttttcaaagtttttgaccatttacgaaatccattctctatttaactattactactattgtaatattaaataaaacagtttttatttttctcttcttgcagccaatcaactgaagtccatagcacagcactcaacacttggaaacctaaatgccgcatctagtctaatgtttggtcaaaagtctacagattaattgttgttcctaagccgccgcttgatgaatattggccacgagaagcatccgccgcactttcatccgcatccgcaaccgcatccgcatcctcgcgccgccgctgcctctgaagttcatcgtttagccgccggcggttcggttagtccgccaccgccaccgtcgacgtcgtcatcgttgttgtaccacctgcccgccaacaccaacgccgccaccgccgccaccgtcgccactgtatccgcctcctatcgccatccactgcaaggtcatgagagacaacagaaccagcatcaccacccctaccagcatcagcaccaccaccactaccatcagcaccacccacatttgccaaccggtggagggaacgtgcacctgagccgcgaatcatcacccgcttcaatggtgatgacccccagccgccgcagttcgccgcccctgccgccgctgcccttgacgacgcatcccatccatccgcactcgcattcgcattcgcatccgcatccacatccgcatccgctgcccctggcgctaccgttgcgccatccactcgccctgaatgcaaacgccggcggtcaccagtcgccgtcccgctcctccggcagcgtccagcagacatcgtcgcacgcacaatcgtcggcgcaatcgatgagcgttcacttctcgcagctggcccatgcccagctgcatttgcagaatcaattgcaacagaagctatcggcggcggctagtaggaataataataataataataataataacaataacaatagtagtagcaccggatcgggcactggaacgggcaacagtacgcccacgcacgatccgaatcccatgaatccgctgagtgatttgcagaacatgcaaccgtttgactttcggaaaatcagctcggcagcggcgctgggtgccttcggtggtcccttgccgttgccgcaaagtcccacggaattcggacaacaccatcatcacagtcagcagcagcagcatcagcaccacctgcatcggaaccagttcttcaatgcaatggccatggcctatcacctgccaccgccaccgcctccaccgccgcccgattctagatccccaccatcgccgccaccaggtgttggccagtatcaacatcaggcgggttctggttcgggctccggatcgggatcgggttcgggctcaagttcgggtgcaggatccgttgatgattccgctggtaagcagcaacggaatagcgataaggtatccgcttccggatcatgttcaagttcgcagcgtatgacccgcctggccttatcctccaatatgcgatcgagccggaagacgccacactcaccgggcggaggaggtgcgggcggaaatggcggatccgttggcggcggcggtggcaagcggcaatggggctcgatgcccgccaatttgggcacccagttcatcaatccggtgacgggcaaaaagcgagtgcagtgcaatgtctgtctgaagaccttttgcgacaagggtgctctaaagattcacttttcggcggtgcatctcagggagatgcacaagtgcacggtggatggatgcagcatgatgtttagctcgaggcgatcgaggaatcgccatagcgccaatccgaatccaaagctccattcgccgcatctgcgacgcaagatctcgccgcacgatggacgcagtgcgcaaccgcatccgcttttgcttcaggcgcccaatggtctcatggcgggactggcaccattcggcagctttccgctgctgacgccgccaccggatttgcggcatcatgcgatgggtggttcgggcgcgggatcaggagcgggagtcggtgctctggagttgaaacacggacaggattatctgcagagatcgtatttggatgcgggacgattcgagggacagcgacgtaaactggcgatggagaacgagcacactgaagatgaggacgacgacgagatactggaggtaggttaaatagcctgtatatattcatacatatgtatacgttggaaaactctctcaaaatattactcatccgacatgttgtccatatatatgataaaacatagtacatgcatattcttaatattttaaagcttggttgtttgctttttaactttgtttatagtttgcaacatattattcaataacattttccgttgctcttccgcaggttggcatccacatggccggcgacgatgatgacgacgaggctgacggcgatgaggacgaagatgacgatgatcccgatggcatcgttgtggttggcgatgagattgatagcatgccgctggaccacgaaaacgataacgataatgagaatgagaacgatgagagcgacgagcgctccacatcggcggtatccagcctgagtcaaaccaaagagcaatccagtccgggcaaggttgtccagtccggccttgaggagtgccacacatatgcccatgcccacgcccacgccctcacgcacggtcacgcccactcgcttgggcacgcccatgccctcgcccaaatggcggccaataaacggaaacgcaagagccagaatccagtccgatgtcctgtgcaatcggatgagaattcgggcgagaattcaatcgactacgatgtggccgccgatctgtccattaagaaggtgcgtctgcccgcgcaggccgccgcatccgccaaagaatcggaggtgggtgagtccaccaagtcgataccatcgccacccctcacgccctacggtgatctcaggccggtgggtctatgcattaagacggaacaggatcacgagcaggaactggatcaggagcagggtcaagaacgtaagcgggaacaggagcaggaacctgaaccagatcctgtagctacggcatccaaatcagaaatgaaactggaggagcaggaaacgaggccagctgacaaggaggacgacaacgaggaagatgaacaggtatcgccgccggtggtcaccacactagatctatcacgggcagcggctgccatcaaattggagccactggaggagattaactacgaagcggatgagaatcgctatgtgcgcatcaagcaggagctaatgggtggcgatgagtccttggcggaggagtccagcgacaagactgccaatcacaataataataataacaataataataatattaacattaacaatagtgtgcgcctcgaaagtgacaatggattggaggcgagcgagctcgaggagcgcgaaccggagccggaaactgaaatagaacccgaacacgaacacgaacacgaaccggaaccggaaacggaggtagaggtgcccgaggtgccaatcgataaggagaaccccctaaagtgcaccgcctgcggtgagatattccaaaatcactttcatctcaagacgcaccaccagagcgtccacctcaagctgcaccacaagtgcaatatagatggctgcaatgcggcatttccctcgaaacgcagccgcgatcgtcacagttcgaatctcaatttgcatcgcaaactgttgtcgaccagcgatgatcatggtttactccatgcacccgtaatgcccgcaacggatccgctcctggagctaatgagtctcaatttgaataacaacaagagcggcttccatcactcggcgatggtgggctcatcggcaggcggtgctggtggtgtaaatccggcggcggttggcagcatacaggcggagattctggcccgcatttgtgccggtgcccatgcccatggactgaatgtaccgctctgtttcgaggctttgcagcatcgtttcgccgttggacatggccacgctggttatccactgatcgccggcgatggctcgccaccaagtccccgcctatttttgaatcacggtggcggcgcgagtccgcttctgtttgccggactgccgcgcatgccgagattccccca

SEQ ID NO: 19745 - DNA, 1008 bp, DROSOPHILA
atgacccccagccgccgcagttcgccgcccctgccgccgctgcccttgacgacgcatcccatccatccgcactcgcattcgcattcgcatccgcatccacatccgcatccgctgcccctggcgctaccccggaagacgccacactcaccgggcggaggaggtgcgggcggaaatggcggatccgttggcggcggcggtggcaagcggcaatggggctcgatgcccgccaatttgggcacccagttcatcaatccggtgacgggcaaaaagcgagtgcagtgcaatgtctgtctgaagaccttttgcgacaagggtgctctaaagattcacttttcggcggtgcatctcagggagatgcacaagtgcacggtggatggatgcagcatgatgtttagctcgaggcgatcgaggaatcgccatagcgccaatccgaatccaaagctccattcgccgcatctgcgacgcaagatctcgccgcacgatggacgcagtgcgcaaccgcatccgcttttgcttcaggcgcccaatggtctcatggcgggactggcaccattcggcagctttccgctgctgacgccgccaccggatttgcggcatcatgcgatgggtggttcgggcgcgggatcaggagcgggagtcggtgctctggagttggcatccacatggccggcgacgatgatgacgacgaggctgacggcgatgaggacgaagatgacgatgatcccgatggcatcgttgtggttggcgatgagattgatagcatgccgctggaccacgaaaacgataacgataatgagaatgagaacgatgagagcgacgagcgctccacatcggcggtgccggtgggtctatgcattaagacggaacaggatcacgagcaggaactggatcaggagcagggtcaagaacgtaagcgggaacaggagcaggaacctgaaccagatcctgtagctacggcatccaaatcagaaatgaaactggaggagcaggaaacgaggccagctgaca

SEQ ID NO: 19746 - protein, 316 aa, DROSOPHILA
MTPSRRSSPPLPPLPLTTHPIHPHSHSHSHPHPHPHPLPLALPRKTPHSPGGGGAGGNGGSVGGGGGKRQWGSMPANLGTQFINPVTGKKRVQCNVCLKTFCDKGALKIHFSAVHLREMHKCTVDGCSMMFSSRRSRNRHSANPNPKLHSPHLRRKISPHDGRSAQPHPLLLQAPNGLMAGLAPFGSFPLLTPPPDLRHHAMGGSGAGSGAGVGALELASTWPATMMTTRLTAMRTKMTMIPMASLWLAMRLIACRWTTKTITIMRMRTMRATSAPHRRCRWVYALRRNRITSRNWIRSRVKNVSGNRSRNLNQIL

SEQ ID NO: 19747 - DNA, 3103 bp, DROSOPHILA
gacagatgcggtgctcagatgaatgtccagcggctgcgcgaaatccgagctgctctggagccggtgggacgccacgtggctctgaccctgaacctcgccctgaaccaggcgccaggcgtttcctaccgagcgggcaagcaattaggttaattgaattccggacaggtgtatctgctgcgtgggggaaactcaccgctctgcagactccacttgcagtacagatgcggctcggcaaagtcaacagctttcaatatctgcccgattatgtgcacctccgccatcaattcatcaactctgaactttatattagtcggcttcttagtcagtttttatcactggcttattcagttgactggcattcggtcaaattttttggtttcgttgttttggcagttgaccgttgtcaaagtaacggaaaagcagggagggtgctgccaactcatgcggaaaggcaaaggaactggttcgcgttgacaggatcaatttaaaaaaaaatacttttttatggatgtaaaatatatttatttctttatgctattatcgaaatgagtttgttttcgcctttcacgtctaccaatcaatataatcgtgatatcattacaatattacgccactattttagttattatttattatttacaggttttgcttgcttatttggtatatagagttcgtcttcttcttataaagtaaatttttgtaatcgaaattctgatcttagatactctaatcaaaaatggaaaataatttgtagtaacgtataaatatatattttcattgtatgtcacagtattggagaaaaattcgcaaaatttctagtttcctaatatgataaatatttaatgagtctttgtttgatcacgatattcccgtattattggcgtcgttggtgaaccgtacttgtggtaccctttttaatggcgacatctcccagaagaaaaaacgatcaaggcggaggtaagtgctcaaatcgcttaaaattgtgtttattaaaagcaccatgcgatttccgctagtaattggcgctagctcatcgcaggacctcgtcactgaccagaactcgggtcgtcgtcaggagcagaaggtctacaccttcagtgaccggccaccacaaccaaagccaccggcaccatccggagtcgttccggtaaaggccgacgacaagtcgaagccgcagaaaaccattcttgaggagcatggcatcatactcggtaaggttattggcaccggaaactatgccaaggtgaagattggcttctccgaggagtacggaaagcgggtggctgtcaagatcatatccaaagtgaaggctccctccgagtacacgcaaaagttcctgccgcgagagatcgaggcggtgaagggtctgcaccacgaaaatctgataactttctatcagagtatcgagaccagtcataggtgagtcactcttgatggtatagaataatgctaatatgaactattcttgatgcacccagggtgtacttgataatgcagctggccgagaatggaacgcttctggactacgttcgtgagcgaaagtttctggacgagccgcagtcacgtacgctattcaagcagctggtgagtgccgtggagtacatccacagcaagggagtggtgcatcgggatattaagtgcgagaatctgctgctggatgagaactggaatctgaaactgatcgacttcgggttcgcaaggaaggatacccgaacctccgacaaccaagtgatactctcgaaaaccttctgcggcagctatgcctacgccagtccagagatcctcaagggtgagtcgcgtatctttaacgtaatttaatgctctaatatcaatataattggaggcgtcgcctatgatcctttcatgtcggacatctgggcctgcggcgtcgtctgctatgcgatggtctttggacgccttccctacgatggctccaatgtgcacatcctgctcaagcgcatcaatcaatcgctggtcttccccaaatccccatcagcttccagcgagtgcaagcacatgattatgcatattctagcaccggtgaagatcaggtacaatattccgcaggtcaaggaggacccttggtattcgcctagcaaatagttgctactcgtttatggtgcagtgcaacaaagctgaaaaatttcaacgtttagaactaacaaatattataatttttcgattcaagtcaataaatatatattattagattagcaaatttaagtggtcagtcctttggttttttccgtattatgagataatcacagttttccataaggcaagagataatgttgcacccttactcacgtcccacatctgagctctgaactttcccctgaattgttcctgcttgttggagcatgcatgttaatgtcccgtaatcacgttgatttcacaatatccttgcgcatcctgctcggggcaatggtggtggcatctcagctcggggcttgctcttcgcaattctgctcggcaatgtcaaaattgtttgtggcagttgccaccgcagctgcgtcgcctgccagcggaaatgccgttgcaatggacacacagatgggaggcgccaggaccttctccgccacccactttctacccccgagtcgccagttgtgtcacacgcaaaactgacaaaacagcaaaaatgacaactgaaatatgcgatgttgggcgaaatttgcgagagtcaaaaggagctggcagccggcgggatctgccccatcctgagagccataagccagctccaagctgagagctctggcgttgtggtttgtgtcacttcaggtcatcatatggatgcaatcgccattagaggtgtacgcttggcccgagttgggccaccaaagtcacagtcattaaaaaagtcatgccccaaatatttatgaaatggtgcatttgtacacagagcaaaatgttatttacacatttccgtaattgcgaagaaataattttaaattaccatatttgcttttatcaactccttactattttaatcacctttgatttctatcagctaagatttttcaaatacatgaatttgtctgtcgcataaactggattttcacgcatttgagagatcttgaaattcatggcataaacgtagcaa

SEQ ID NO: 19748 - DNA, 990 bp, DROSOPHILA
atgcgatttccgctagtaattggcgctagctcatcgcaggacctcgtcactgaccagaactcgggtcgtcgtcaggagcagaaggtctacaccttcagtgaccggccaccacaaccaaagccaccggcaccatccggagtcgttccggtaaaggccgacgacaagtcgaagccgcagaaaaccattcttgaggagcatggcatcatactcggtaaggttattggcaccggaaactatgccaaggtgaagattggcttctccgaggagtacggaaagcgggtggctgtcaagatcatatccaaagtgaaggctccctccgagtacacgcaaaagttcctgccgcgagagatcgaggcggtgaagggtctgcaccacgaaaatctgataactttctatcagagtatcgagaccagtcatagggtgtacttgataatgcagctggccgagaatggaacgcttctggactacgttcgtgagcgaaagtttctggacgagccgcagtcacgtacgctattcaagcagctggtgagtgccgtggagtacatccacagcaagggagtggtgcatcgggatattaagtgcgagaatctgctgctggatgagaactggaatctgaaactgatcgacttcgggttcgcaaggaaggatacccgaacctccgacaaccaagtgatactctcgaaaaccttctgcggcagctatgcctacgccagtccagagatcctcaagggcgtcgcctatgatcctttcatgtcggacatctgggcctgcggcgtcgtctgctatgcgatggtctttggacgccttccctacgatggctccaatgtgcacatcctgctcaagcgcatcaatcaatcgctggtcttccccaaatccccatcagcttccagcgagtgcaagcacatgattatgcatattctagcaccggtgaagatcaggtacaatattccgcaggtcaaggaggacccttggtattcgcctagcaaatag

SEQ ID NO: 19749 - protein, 329 aa, DROSOPHILA
MRFPLVIGASSSQDLVTDQNSGRRQEQKVYTFSDRPPQPKPPAPSGVVPVKADDKSKPQKTILEEHGIILGKVIGTGNYAKVKIGFSEEYGKRVAVKIISKVKAPSEYTQKFLPREIEAVKGLHHENLITFYQSIETSHRVYLIMQLAENGTLLDYVRERKFLDEPQSRTLFKQLVSAVEYIHSKGVVHRDIKCENLLLDENWNLKLIDFGFARKDTRTSDNQVILSKTFCGSYAYASPEILKGVAYDPFMSDIWACGVVCYAMVFGRLPYDGSNVHILLKRINQSLVFPKSPSASSECKHMIMHILAPVKIRYNIPQVKEDPWYSPSK

SEQ ID NO: 19750 - DNA, 3747 bp, DROSOPHILA
ggttgtggtctcgggtaagttcttgatagtcaagtttcttaccatcttaacacaggacatcataagaaatgttttaagtgcgatttgataaatgtttaaaaacaacatgtttaatattgattgtataaactttatgcatagtcttcccaaacatataatagaaactgtttcataacaaattccaaatagttgctatgtttttgcggccccacctcggcattggtattttcctgccagccgcgcatggtcacatcttttctggttgataaattccagggcctgtgaatcataataagttaagtaaaaagtgcagatacaacaaaccgcaggcagcagacaacaacccgacacccagacacaatggcagccacattgaagccctacctgaccgccgtgcgacactcgctgacggcggcgatgtgcctgcaggacttcccctcgcaggtggtggagcggcacaacaagccggaggtggagatctgttccagcaaggagctggtgctcacgcccgtcgtcgtgtcgcgcaacgagcgggagaaggtgctgatcgagccgtccattaactcggtgcgcgtgagcatcgccgtgaagcaggccgacgagattgagcgcatactgtgccacaagttcaccaggttcatgatgcgacgcgccgagtcgttcgtcatactgcgccgcaagcccatcgagggctacgacataagcttcctcatcaccaacttccacacggagcagatgtataagcacaaactggtggactttgtcattagcttcatggaggagatcgacaaggagatcagcgaaatgaaactggcggtcaatgccagggcacgcacctgcgccgaggagttcctcaaacggttctaggtaagtgttccacctaacagccatcgccattgagtcgacgccaacttactctcgcaaatcctttgcaggtgaaggcaaccagtatggacccggtcatgatgctttagtatttccaaatggattcaagaataaagacggattttgtattatttactcgactacaccagttttatatgctatcccgtttggccgcaccaccacatgaccactgcgttctcgtagagaacttccttctgattttgattcacatcggccggcgccggcaactccgtcgtttccgttccgtttaaggtcacgttgtccccttgggcactttggtctgtaaagtggaactgccccgagctggtggctagaatcggcatagccggattgagtgccactccgttgcagcagtctgaatgcaggggcagtacggaaggatctccgtattttttgagatcccaaacattgacgaatccccgtgtgtcaccgctagccagccaattgctgtcggatgcgaggtcgaattgaatacgctgattggtgtccacatggcgctgcaactccaccagtggctgcttgtagttgcgcatgtcccactgcaagatcttatcgcacttgcgagctccactgaacagatgccactccccgttgccaaactctccatagcgcagttgtgtgatgccgcccttgtgccctcccagcgtgaagagaggaccctgcttgtggctacaccgcaagtcaaagtgctggatgtagccatgccagttgccgcaggttagagtgtgcgggtgcgcagtggtctgtgcaatgcaggatatggcaaacttgacagggtaatcgtcgcaaaaacgtccgggtctacggagtagagtttgagttgcattaaatgagcgtacgaaaataagcagccgactcacctgctggtgtcgaagatcttgatgcagcgcttgtatcccgcatagatctgctcgccgtcatgggagaaggccaaggaaatggccgccattacttcgtctacggcatcgtacccactgtagctgcatcgcagggaaccgtcgaaggcatcccacatgtgtatgggttcgtgctgccgcgtggccagccacctgcgtgaaatgggaacggtataagattggggagagcgtcagagagttgtcaactcacaagcaggtttctggttgcaggctgttcatgtgcggataccagacgcagtcgtagacggttccgccctcgggcacgtgcacctccgactggagcttggtcagagagcgtgccggctgcaccgtatctgcggagtagaggtcactgggcatctctataacgtgcatgccgtctaggtgaacgggcaccagaaggcacgtgccgtccggggaccagtagcagcctttggtgtagtgctgagcctccgtggacgaggtccagcagcgtcggcccaactcaacaagtgctccctggaagtactggaggacgggagcaatcgcaagctcctggtcttccggcttcgcctcattgccattcgacgtcagctccaaagtgtcctctatgtcgacgacccgcacgctttcctcttcctcatccccattcgcttcctcctcggcagccaggcttgtctccatgggcacacccgcatgcggcgattcaacggcgttctttggacgcccggaacgcagctttaggatctcctccgccgaaagagtcacgctcagtttgggcaacgaaagatcgccattggacgtgaccatggtgctgctgaagctcacgttgtgattcagcatggatgcctccacatcgcccatgctggtgcttaaattgaccgcttggggaaatatttgttttactcatttccgtgctttcgtttaaaacgtcacttacattcgtccatatcgccacttttaccgctcaagcacagtgtgaccgtgcgaggatagcgcaaaaataagctggccgcttgccaacggtttttaaagtgcatttccattttaaacgaattttcgatcattaaggatttttccaaaacattttgtgttaacataaatataagcaaagatttaaggtacaagccaaccatcatctatgcaactcgcaactgtacaagtttttagacataaaaaacttaataaaaaattccttttttagtttttattctaaaaatctcatacgtccaaacattattctagaggcaaagttgcatggatcctagataaataatccctagataaatcatttccaccagcactagatggccagcgatgcccactgcagctccattgctcagcgcttttgtttgcatccggtagaacatggcggaaatgctcagaggaagcgccacctcaatctcgctggtgtcgaattccaggtcatgccgctggcccagaaccaggcgtgcgtgctgcaggacacgctgatgcggcgctctgccctccaccatagccagatgtgccacatggaactcgtagccaacgctgaggaagatattccgacagctcaggctctgtctcatttcgtcgtagactgcctgaacgggtggtggcatctcgtggacgttctccgggtagcgcacctccatgggcagccacttgtccggctgcggtctgcccagatgggagacgaacaccttggtcacatcctccagctgggtgcagttgtggggcagcagcaggctccatatctgggcctgcaagccctggcagtactcggtgtggttggcgtgtgcctggagcaagggagccgcgtggcggagttcacaacgggtaaggaggtctataccgaagcgcagagcttccttgtggtccagtgcgcgttggcagctgcttcctcgtggcttcctggagggcagggaaagccagtgaaactctttgatattttggttaaggctgtgatagcttattagctgcttat

SEQ ID NO: 19751 - DNA, 1574 bp, DROSOPHILA
cggtaaaagtggcgatatggacgaatcggtcaatttaagcaccagcatgggcgatgtggaggcatccatgctgaatcacaacgtgagcttcagcagcaccatggtcacgtccaatggcgatctttcgttgcccaaactgagcgtgactctttcggcggaggagatcctaaagctgcgttccgggcgtccaaagaacgccgttgaatcgccgcatgcgggtgtgcccatggagacaagcctggctgccgaggaggaagcgaatggggatgaggaagaggaaagcgtgcgggtcgtcgacatagaggacactttggagctgacgtcgaatggcaatgaggcgaagccggaagaccaggagcttgcgattgctcccgtcctccagtacttccagggagcacttgttgagttgggccgacgctgctggacctcgtccacggaggctcagcactacaccaaaggctgctactggtccccggacggcacgtgccttctggtgcccgttcacctagacggcatgcacgttatagagatgcccagtgacctctactccgcagatacggtgcagccggcacgctctctgaccaagctccagtcggaggtgcacgtgcccgagggcggaaccgtctacgactgcgtctggtatccgcacatgaacagcctgcaaccagaaacctgcttgtggctggccacgcggcagcacgaacccatacacatgtgggatgccttcgacggttccctgcgatgcagctacagtgggtacgatgccgtagacgaagtaatggcggccatttccttggccttctcccatgacggcgagcagatctatgcgggatacaagcgctgcatcaagatcttcgacaccagcagacccggacgtttttgcgacgattaccctgtcaagtttgccatatcctgcattgcacagaccactgcgcacccgcacactctaacctgcggcaactggcatggctacatccagcactttgacttgcggtgtagccacaagcagggtcctctcttcacgctgggagggcacaagggcggcatcacacaactgcgctatggagagtttggcaacggggagtggcatctgttcagtggagctcgcaagtgcgataagatcttgcagtgggacatgcgcaactacaagcagccactggtggagttgcagcgccatgtggacaccaatcagcgtattcaattcgacctcgcatccgacagcaattggctggctagcggtgacacacggggattcgtcaatgtttgggatctcaaaaaatacggagatccttccgtactgcccctgcattcagactgctgcaacggagtggcactcaatccggctatgccgattctagccaccagctcggggcagttccactttacagaccaaagtgcccaaggggacaacgtgaccttaaacggaacggaaacgacggagttgccggcgccggccgatgtgaatcaaaatcagaaggaagttctctacgagaacgcagtggtcatgtggtggtgcggccaaacgggatagcatataaaactggtgtagtcgagtaaataatacaaaatccgtc

SEQ ID NO: 19752 - protein, 487 aa, DROSOPHILA
MLNHNVSFSSTMVTSNGDLSLPKLSVTLSAEEILKLRSGRPKNAVESPHAGVPMETSLAAEEEANGDEEEESVRVVDIEDTLELTSNGNEAKPEDQELAIAPVLQYFQGALVELGRRCWTSSTEAQHYTKGCYWSPDGTCLLVPVHLDGMHVIEMPSDLYSADTVQPARSLTKLQSEVHVPEGGTVYDCVWYPHMNSLQPETCLWLATRQHEPIHMWDAFDGSLRCSYSGYDAVDEVMAAISLAFSHDGEQIYAGYKRCIKIFDTSRPGRFCDDYPVKFAISCIAQTTAHPHTLTCGNWHGYIQHFDLRCSHKQGPLFTLGGHKGGITQLRYGEFGNGEWHLFSGARKCDKILQWDMRNYKQPLVELQRHVDTNQRIQFDLASDSNWLASGDTRGFVNVWDLKKYGDPSVLPLHSDCCNGVALNPAMPILATSSGQFHFTDQSAQGDNVTLNGTETTELPAPADVNQNQKEVLYENAVVMWWCGQTG

SEQ ID NO: 19753 - DNA, 4681 bp, DROSOPHILA
tctggttgcaggctgttcatgtgcggataccagacgcagtcgtagacggttccgccctcgggcacgtgcacctccgactggagcttggtcagagagcgtgccggctgcaccgtatctgcggagtagaggtcactgggcatctctataacgtgcatgccgtctaggtgaacgggcaccagaaggcacgtgccgtccggggaccagtagcagcctttggtgtagtgctgagcctccgtggacgaggtccagcagcgtcggcccaactcaacaagtgctccctggaagtactggaggacgggagcaatcgcaagctcctggtcttccggcttcgcctcattgccattcgacgtcagctccaaagtgtcctctatgtcgacgacccgcacgctttcctcttcctcatccccattcgcttcctcctcggcagccaggcttgtctccatgggcacacccgcatgcggcgattcaacggcgttctttggacgcccggaacgcagctttaggatctcctccgccgaaagagtcacgctcagtttgggcaacgaaagatcgccattggacgtgaccatggtgctgctgaagctcacgttgtgattcagcatggatgcctccacatcgcccatgctggtgcttaaattgaccgcttggggaaatatttgttttactcatttccgtgctttcgtttaaaacgtcacttacattcgtccatatcgccacttttaccgctcaagcacagtgtgaccgtgcgaggatagcgcaaaaataagctggccgcttgccaacggtttttaaagtgcatttccattttaaacgaattttcgatcattaaggatttttccaaaacattttgtgttaacataaatataagcaaagatttaaggtacaagccaaccatcatctatgcaactcgcaactgtacaagtttttagacataaaaaacttaataaaaaattccttttttagtttttattctaaaaatctcatacgtccaaacattattctagaggcaaagttgcatggatcctagataaataatccctagataaatcatttccaccagcactagatggccagcgatgcccactgcagctccattgctcagcgcttttgtttgcatccggtagaacatggcggaaatgctcagaggaagcgccacctcaatctcgctggtgtcgaattccaggtcatgccgctggcccagaaccaggcgtgcgtgctgcaggacacgctgatgcggcgctctgccctccaccatagccagatgtgccacatggaactcgtagccaacgctgaggaagatattccgacagctcaggctctgtctcatttcgtcgtagactgcctgaacgggtggtggcatctcgtggacgttctccgggtagcgcacctccatgggcagccacttgtccggctgcggtctgcccagatgggagacgaacaccttggtcacatcctccagctgggtgcagttgtggggcagcagcaggctccatatctgggcctgcaagccctggcagtactcggtgtggttggcgtgtgcctggagcaagggagccgcgtggcggagttcacaacgggtaaggaggtctataccgaagcgcagagcttccttgtggtccagtgcgcgttggcagctgcttcctcgtggcttcctggagggcagggaaagccagtgaaactctttgatattttggttaaggctgtgatagcttattagctgcttatcctcgctgctgttctgtggtaacattctggagaggattacaggggcgccagataggtaaccgagtggaccggaagtgggcttggtcagcgattcgttcagagtgacaaactcaacgttgtagcgaagccaaagtggctcgttgtcgtcctccgccagtttggcctcctctagaaaaagctttgcttcgaggatattcgtaaagttgtgaatcagttgcagctccacatgatcaactataacatccagttgggtgtcgttccctcgctccaagcaacgcattgacttattcgctcctctaaggcagacctgtacgatcagcccgtttacttccggttcttctagatcgcggggttttgataggatctcgtagttggaagtctggttcagtaggctccagatgctctcctgcagctgggcggaatccttcattctgcagacgtgcctgatcggctgcaagtgccagactgactgcttcagctgacaattgggactttcgtaggcggcgggcaactctaaggtggccaattgtttagtctctggttgccacaactgcagggtctgcccgaacttgtagtgtccagctgatggacgagactgtgcgtagtccgattcttggtattccaagttatccttccattttctgtactgcgaggtatcgatattcatatccggcggctgcgtctttgttgcttttgtgttgctgcgaaagacgcacagccaaccatcgttgatctggcaggtgggcaagccgtgggtgtactggaaatcctccaggcgcgattcaagctgcgggagcaacgaattcggcaggcaattgaacacttggcgggtttccagaggacaatcgttgtcgcagcagcagttgagatcgcatctgcctgcctgaagatcacaggagcagtagtaaaatgtattgtctccggatacggacagggtggagttcacttcagtagagttcaaaggtagcgccgtcgacatggttggagatgccacagccaccttgggcttctgttggacacgcggtggaaaagtgattgcaggcgtagtggtggtcacctccgcctccggcagcgtgctgatggagctgacagtttcgctgctcggagcaccggtcgtggctggggcttccgttgtagtggacgccgttggcgatattgtggcattgtaattgtgcgagattccaattttaatggagtgtgtgtggtatgtggccaggcacaggacgactagtggcaacacttccttcatggctacttgaactccacgccgtattcgtcgaactttcgaaagattaggtttagctcaacaatgacctttccagaactcagagtttgtaacttgtaactgtgcgagaaatatttactaaatagtcaaccaagtgtaaagaggtttccttaactcaccgctcaacacccgagtagagcagatccgtcttgctgagggccgctcctccgcctccgaaacgctcacgcagcgactgccacaagccgttgggagcaaccttccaggtgccgatctccaggcgatgggtgcctggtgtggacggtacgtgcacaaagccgtagccaacgggccaggactgttgcagtacgttaacggcgtacacttccactagcaggcggggccagccctggacagatgcggtgctcagatgaatgtccagcggctgcgcgaaatccgagctgctctggagccggtgggacgccacgtggctctgaccctgaacctcgccctgaaccaggcgccaggcgtttcctaccgagcgggcaagcaattaggttaattgaattccggacaggtgtatctgctgcgtgggggaaactcaccgctctgcagactccacttgcagtacagatgcggctcggcaaagtcaacagctttcaatatctgcccgattatgtgcacctccgccatcaattcatcaactctgaactttatattagtcggcttcttagtcagtttttatcactggcttattcagttgactggcattcggtcaaattttttggtttcgttgttttggcagttgaccgttgtcaaagtaacggaaaagcagggagggtgctgccaactcatgcggaaaggcaaaggaactggttcgcgttgacaggatcaatttaaaaaaaaatacttttttatggatgtaaaatatatttatttctttatgctattatcgaaatgagtttgttttcgcctttcacgtctaccaatcaatataatcgtgatatcattacaatattacgccactattttagttattatttattatttacaggttttgcttgcttatttggtatatagagttcgtcttcttcttataaagtaaatttttgtaatcgaaattctgatcttagatactctaatcaaaaatggaaaataatttgtagtaacgtataaatatatattttcattgtatgtcacagtattggagaaaaattcgcaaaatttctagtttcctaatatgataaatatttaatgagtctttgtttgatcacgatattcccgtattattggcgtcgttggtgaaccgtacttgtggtaccctttttaatggcgacatctcccagaagaaaaaacgatcaaggcggaggtaagtgctcaaatcgcttaaaattgtgtttattaaaagcaccatgcgatttccgctagtaattggcgctagctcatcgcaggacctcgtcactgaccagaactcgggtcgtcgtcaggagcagaaggtctacaccttcagtgaccggccaccacaaccaaagccaccggcaccatccggagtcgttccggtaaaggccgacgacaagtcgaagccgcagaaaaccattcttgaggagcatggcatcatactcggtaaggttattggcaccggaaactatgccaaggtgaagattggcttctccgaggagtacggaaagcgggtggctgtcaagatcatatccaaagtgaaggctccctccgagt

SEQ ID NO: 19754 - DNA, 2474 bp, DROSOPHILA
ctaagaagccgactaatataaagttcagagttgatgaattgatggcggaggtgcacataatcgggcagatattgaaagctgttgactttgccgagccgcatctgtactgcaagtggagaaacgcctggcgcctggttcagggcgaggttcagggtcagagccacgtggcgtcccaccggctccagagcagctcggatttcgcgcagccgctggacattcatctgagcaccgcatctgtccagggctggccccgcctgctagtggaagtgtacgccgttaacgtactgcaacagtcctggcccgttggctacggctttgtgcacgtaccgtccacaccaggcacccatcgcctggagatcggcacctggaaggttgctcccaacggcttgtggcagtcgctgcgtgagcgtttcggaggcggaggagcggccctcagcaagacggatctgctctactcgggtgttgagcttcgacgaatacggcgtggagttcaagtagccatgaaggaagtgttgccactagtcgtcctgtgcctggccacataccacacacactccattaaaattggaatctcgcacaattacaatgccacaatatcgccaacggcgtccactacaacggaagccccagccacgaccggtgctccgagcagcgaaactgtcagctccatcagcacgctgccggaggcggaggtgaccaccactacgcctgcaatcacttttccaccgcgtgtccaacagaagcccaaggtggctgtggcatctccaaccatgtcgacggcgctacctttgaactctactgaagtgaactccaccctgtccgtatccggagacaatacattttactactgctcctgtgatcttcaggcaggcagatgcgatctcaactgctgctgcgacaacgattgtcctctggaaacccgccaagtgttcaattgcctgccgaattcgttgctcccgcagcttgaatcgcgcctggaggatttccagtacacccacggcttgcccacctgccagatcaacgatggttggctgtgcgtctttcgcagcaacacaaaagcaacaaagacgcagccgccggatatgaatatcgatacctcgcagtacagaaaatggaaggataacttggaataccaagaatcggactacgcacagtctcgtccatcagctggacactacaagttcgggcagaccctgcagttgtggcaaccagagactaaacaattggccaccttagagttgcccgccgcctacgaaagtcccaattgtcagctgaagcagtcagtctggcacttgcagccgatcaggcacgtctgcagaatgaaggattccgcccagctgcaggagagcatctggagcctactgaaccagacttccaactacgagatcctatcaaaaccccgcgatctagaagaaccggaagtaaacgggctgatcgtacaggtctgccttagaggagcgaataagtcaatgcgttgcttggagcgagggaacgacacccaactggatgttatagttgatcatgtggagctgcaactgattcacaactttacgaatatcctcgaagcaaagctttttctagaggaggccaaactggcggaggacgacaacgagccactttggcttcgctacaacgttgagtttgtcactctgaacgaatcgctgaccaagcccacttccggtccactcggttacctatctggcgcccctgtaatcctctccagaatgttaccacagaacagcagcgaggataagcagctaataagctatcacagccttaaccaaaatatcaaagagtttcactggctttccctgccctccaggaagccacgaggaagcagctgccaacgcgcactggaccacaaggaagctctgcgcttcggtatagacctccttacccgttgtgaactccgccacgcggctcccttgctccaggcacacgccaaccacaccgagtactgccagggcttgcaggcccagatatggagcctgctgctgccccacaactgcacccagctggaggatgtgaccaaggtgttcgtctcccatctgggcagaccgcagccggacaagtggctgcccatggaggtgcgctacccggagaacgtccacgagatgccaccacccgttcaggcagtctacgacgaaatgagacagagcctgagctgtcggaatatcttcctcagcgttggctacgagttccatgtggcacatctggctatggtggagggcagagcgccgcatcagcgtgtcctgcagcacgcacgcctggttctgggccagcggcatgacctggaattcgacaccagcgagattgaggtggcgcttcctctgagcatttccgccatgttctaccggatgcaaacaaaagcgctgagcaatggagctgcagtgggcatcgctggccatctagtgctggtggaaatgatttatctagggattatttatctaggatccatgcaactttgcctctag

SEQ ID NO: 19755 - protein, 810 aa, DROSOPHILA
MAEVHIIGQILKAVDFAEPHLYCKWRNAWRLVQGEVQGQSHVASHRLQSSSDFAQPLDIHLSTASVQGWPRLLVEVYAVNVLQQSWPVGYGFVHVPSTPGTHRLEIGTWKVAPNGLWQSLRERFGGGGAALSKTDLLYSGVELRRIRRGVQVAMKEVLPLVVLCLATYHTHSIKIGISHNYNATISPTASTTTEAPATTGAPSSETVSSISTLPEAEVTTTTPAITFPPRVQQKPKVAVASPTMSTALPLNSTEVNSTLSVSGDNTFYYCSCDLQAGRCDLNCCCDNDCPLETRQVFNCLPNSLLPQLESRLEDFQYTHGLPTCQINDGWLCVFRSNTKATKTQPPDMNIDTSQYRKWKDNLEYQESDYAQSRPSAGHYKFGQTLQLWQPETKQLATLELPAAYESPNCQLKQSVWHLQPIRHVCRMKDSAQLQESIWSLLNQTSNYEILSKPRDLEEPEVNGLIVQVCLRGANKSMRCLERGNDTQLDVIVDHVELQLIHNFTNILEAKLFLEEAKLAEDDNEPLWLRYNVEFVTLNESLTKPTSGPLGYLSGAPVILSRMLPQNSSEDKQLISYHSLNQNIKEFHWLSLPSRKPRGSSCQRALDHKEALRFGIDLLTRCELRHAAPLLQAHANHTEYCQGLQAQIWSLLLPHNCTQLEDVTKVFVSHLGRPQPDKWLPMEVRYPENVHEMPPPVQAVYDEMRQSLSCRNIFLSVGYEFHVAHLAMVEGRAPHQRVLQHARLVLGQRHDLEFDTSEIEVALPLSISAMFYRMQTKALSNGAAVGIAGHLVLVEMIYLGIIYLGSMQLCL

SEQ ID NO: 19756 - DNA, 3662 bp, DROSOPHILA
ctagtcaggtgcagcaaaagcgtccacccagcacaggcattcacaagccaggaagtctgcgagcacccaaggctgttcgtcctactactgctccggtggtcagcagcaagccggtcaagagctatacccgctcccgcctgatggacattcgcaacgggatgttcaatgccctgatgcacaggtccaaggagagctttgtgatgcctcgcatcgccacctgcgacgacattgagttggagggaaggcttcgccgcatgaatatttggcgcacctcggacggcacaagattccggacccgctccaccacagctaacttaaacatgaacaacaacaacaacaatgagtgcatgcctgccttcttcaaaaacaaaaataagccgaacctaatcagtgacgagtccatcatccagagccaaccgccccagccgcaaacggagttccaagtaagctagttaaacttatactattctactcaattttgccatatattctatataaaatagacttggttagcttaatggaaaacttatgatttgaaaaggaaaaagtgattgtgacagtgcggtaattgttacagttacacatggcgtcgattcatttgagtacctcgaccatctgataccccttcctttgtaggccaaattgtctttttggtctgctcagaaaagctcttttatgaaaaatcatatttcccgccttttctgcttagaaaaaatcgcttaatcgattaagaacattttccccacttttgcattaggtaacacaaagtcgcattattcctgagcttatctgataaatcaatgattgcattgcatgacctccagaggtctttggcaatcatgctgatcattggctggaccctcgccacagtcaaatcactaatctagaacattttacaactgattgcgaataagtatgaagtaattactacagtcgtattagactatttccttttattgaattctaaaccatctgggattctacaaataccctcgagcgaaatcacttctctagataatgacactttccatcgacctcccgcaacctttgggctgcctgttcgggagtcagatcccgctgggccatggccagcagctcaaatcccaccatgaacttgcgcacggaggcagaacgaagcagcggcggatagtagatggcgtgcagggtccaatgagcactggatgcgtgggcatgctccggcccagtcggtgctccatgccaacccatcgagtaggggaatgaacactggaacagattgtcatacttggtggtcagctcctttatggtcagcgccaagttgtatcgctgttctgcggtaagatcattgatccgcttattgttgttgcgtgagatgagcatggtttcgaagggccaagtggcccagaagggcaccaccaccaaccagtcgcgattctcaatgacaatccgctcctggcgctgcagctcacgctccacatagtcggccagcatgggccgctcgttggtggcgtagtaggcacgcagacgctcctgcttcagttgcggttccgtcggcagaaacgagcatgaccagatctggcagtgcggatggggattggaacaccccatggcggctcccttgttctcgaatatctgcacccacgcgtacttggcgctaagctcgttgaactggctgatccacctagataggcagttagataaaaagtgggtttattattttgagtatcttctgatataaaccataaatcctccacttactcgtcgataacaacgacgatttccgctgcactcatcgtgggcaaagtcagattcgatttgggatggaagcacatcactcggcagttgccacgggcgggagctatctggaacagtggatcatcgttgttgggcggaacgggcaccacctccaccagggccgggaagtcgttctcaaacacataggtgctctcatattccggagtttgctgatcatttacaaaatatacacgtgagaatgcttaaaacatttgcgaggatttagtttggtcgcttacgattccattgggtctggtgacgccagggcacagaggattggtgggatcgaattcgggcagctcgttcttctgcgccttctcctgctgacccgaccaagggcgttgggtgcgatgtgggcacactaggacccattggccgttcaacggatttagacgtcggtgcgggtgctctgcaatgacattcgattttaattaagattgagcagcgataaaccagaccattgatttggaactaattgttgatcaacatatgaccattcgccatagaaactgaatcaaattggcatggtggaacttcttttaaacctaccactggccacaaactgcatcgtgtcgaaagactggcgctccgtatcactccgatcggattatgactacttcagattcacgggacaagcccaatgtcaacctgccgcgttgcgattacagctcctaatgctgctgatattggtgttccgattgtgattctgcttttgcttctgaatccgattccagttgagctgtttttcgcttagcaaagcgcgcttcttcagctacattcctctcttttctctcttcggattattccgctcactctgccggcgagcgtttagtttgagtttggcacgcattccgcctttcagtggaagaattttccatcagccttatctctcccactcagctgggcgttctgatatgggtgtgtaaacagtgtgagcgcgattgtgtgtgccgctagtgatgcgcggtggtcgataagacgtccatagagatggctgtttaatgtttaaataagtatagttatatttatattttatgcagtatctgtttgcctaattattgtgattggaacaaactgtttcctaaagtctattcagctatattgcaatcactgtaatctaatttctttaaaacttattagctaagtaagaggtatatgatagccgagagaattttaaagttttatggaaaaatctacagatattcgaataattatttcaggatccggccattgttaaccaaagacgcattggcagcggtcgcttaaaccattccaagtggggttacaacgacgaagactaccactcgtaccacaatggcaagtcgcagcatatggaggaggtcaactcgaagaacagcaaaaacatgacggtgctgcagttcttcgacaacggcgagatcagcagtcagcctcaaagacggccgaacactcctgtgatggggatgtctatcaatcgatccgagaacgacaccctgcactcgaacgagtccagtgaagatttgagtcgcgccaacgagaactatgtaaagcgcgtaatgtctggattcctggttgtatcgaagcccaagtcacgagatgtcgaggatagacatcaccggcggtacaggaaccagaacgaggagcctgagtggtttagctgtggacccacgtctagactggacactatagagttgtgtgggttcgatgaggacgaggagaaaatgctaaaggagggcaacaaaaaccacggattaggcgaaacagagcgagaaacgtcaaaacaaaaggttagtattatgcacttagttcaatccatgacgcaatctataagataactcgtttcagatggaccataagtacaaatggacgcatgcggagccgatgggtcgaagcaaatacatgcccaaaca

SEQ ID NO: 19757 - DNA, 1376 bp, DROSOPHILA
agataaggctgatggaaaattcttccactgaaaggcggaatgcgtgccaaactcaaactaaacgctcgccggcagagtgagcggaataatccgaagagagaaaagagaggaatgtagctgaagaagcgcgctttgctaagcgaaaaacagctcaactggaatcggattcagaagcaaaagcagaatcacaatcggaacaccaatatcagcagcattaggagctgtaatcgcaacgcggcaggttgacattgggcttgtcccgtgaatctgaagtagtcataatccgatcggagtgatacggagcgccagtctttcgacacgatgcagtttgtggccagtgagcacccgcaccgacgtctaaatccgttgaacggccaatgggtcctagtgtgcccacatcgcacccaacgcccttggtcgggtcagcaggagaaggcgcagaagaacgagctgcccgaattcgatcccaccaatcctctgtgccctggcgtcaccagacccaatggaatccaaactccggaatatgagagcacctatgtgtttgagaacgacttcccggccctggtggaggtggtgcccgttccgcccaacaacgatgatccactgttccagatagctcccgcccgtggcaactgccgagtgatgtgcttccatcccaaatcgaatctgactttgcccacgatgagtgcagcggaaatcgtcgttgttatcgacgagtggatcagccagttcaacgagcttagcgccaagtacgcgtgggtgcagatattcgagaacaagggagccgccatggggtgttccaatccccatccgcactgccagatctggtcatgctcgtttctgccgacggaaccgcaactgaagcaggagcgtctgcgtgcctactacgccaccaacgagcggcccatgctggccgactatgtggagcgtgagctgcagcgccaggagcggattgtcattgagaatcgcgactggttggtggtggtgcccttctgggccacttggcccttcgaaaccatgctcatctcacgcaacaacaataagcggatcaatgatcttaccgcagaacagcgatacaacttggcgctgaccataaaggagctgaccaccaagtatgacaatctgttccagtgttcattcccctactcgatgggttggcatggagcaccgactgggccggagcatgcccacgcatccagtgctcattggaccctgcacgccatctactatccgccgctgcttcgttctgcctccgtgcgcaagttcatggtgggatttgagctgctggccatggcccagcgggatctgactcccgaacaggcagcccaaaggttgcgggaggtcgatggaaagtgtcattatctagagaagtgatt

SEQ ID NO: 19758 - protein, 350 aa, DROSOPHILA
MQFVASEHPHRRLNPLNGQWVLVCPHRTQRPWSGQQEKAQKNELPEFDPTNPLCPGVTRPNGIQTPEYESTYVFENDFPALVEVVPVPPNNDDPLFQIAPARGNCRVMCFHPKSNLTLPTMSAAEIVVVIDEWISQFNELSAKYAWVQIFENKGAAMGCSNPHPHCQIWSCSFLPTEPQLKQERLRAYYATNERPMLADYVERELQRQERIVIENRDWLVVVPFWATWPFETMLISRNNNKRINDLTAEQRYNLALTIKELTTKYDNLFQCSFPYSMGWHGAPTGPEHAHASSAHWTLHAIYYPPLLRSASVRKFMVGFELLAMAQRDLTPEQAAQRLREVDGKCHYLEK

SEQ ID NO: 19759 - DNA, 4185 bp, DROSOPHILA
gaggggaggtgggtagggaaaaggagcgaaagaaggagaagcggcaggagcataataaagacaaaaagtacgtgggtggaaaacaacaaatacagcccaaattgtataaactcacggaacagttatttccctctatgggtggaaaattgttgctgctaattcccttgctgctgttgttgttgttgttgttgccgctgctgcgtaggcgtaacagttgttttgccgatgtgtgtgtgtgtgttctagtataatttgcagcatctgcagtgcaataaattccactaaacgaacattagccactttcaatagaaccaaaaatctcactgcaattaagcaataaccgcgcaagcaatcaatcccgattagttaaaggaatatacgcgcgtacgcacagatttttaaacaatcatccgctttcgccgaaagagtgccggcactcgaaaaatacctccgctttaatcaagagtccgcgggcaattgaaaaagctctcgcttcgcgtgttcacggcgtgtacctacataggtacgcatcaattaggtacctgccgcccactgctttaatcgtaagtgcatttctgatttaaaagtgtgacacgagccttataagtcttataatttatattttatgcaaacagctttacaaatttttaatgtgtagaaagaaactgcgttttattgaatttgagcatcatcaaacttcaaccccaaagaattacacataagtagtttcgtttttgctaccaaagatgctgacgtttattttgcgtattagatatggctttgttacaattttagtaaaagtattttaaaatggaaaggtacaaatctgaactttaataaaacacaaaattgtttaatttaaaaacttcaaatattcaaaaattcctataattcaattaagtaacccactgtgcagcggcttatcgatttcctccgacaatcgattggaccatgttgtttaatttcgcgacatatcgatactatcgtggtagattggccattgaccaacgcgttttatttgctaccggtgtggcttttgtttgcttaaacaattggataatttattgcaatcccggcttaaatgcatatgattgaagaatgcatacatcggatatcagcatgacccaggatcaggatgtgagcacttgtcgcctgtgccaccataatacggatcccaactcgctaaacattttcgatgacaccgtgcagttttgcaaggatgtgtccattgcagaggtttccaagagtctctggagcgttcaggtgagtgggccatttataatccatggaaaaagtgcatgaataacttctccacctacagtacgatcgcaacgaatgtttgtcggagctcatttgctcaaggtgtctggagatcctcgaagaggcattcgagctgcgaaaaggaatgcaggagcgggaacagtccctgcaggagcagctgaaggagatgattaaagatcatccgaagcaccgtccaggcctgaatggcaaccccggagtattcgtacccgaggagggctgcattattgtggaagttgatccagagaatctggcagagagcagtgaagaggaattcgcactcggctccgatggggagtacgaaaactatgacgacgatgatgaggaggaggaggaagactacgatgaggaggacgaggaagatggccagaacggcgaagacgtcgacatgccactgggcatggatgcggcccagatggcggctcaacagtccgttgccaacaacgccaacaccacggaggcacggccaaaacgagcgttcctctgtcaatactgtgatcttgggttcactctgcccgccgagtgtcaagagcacgagctggctgcacacgatcccaacgcaccgtactgctgcaacttttgcaacatcaagctggttacccggcctgctttgatttcgcacataaagacactgcatgatccggaccgtccgtatgtgtgtgctcactgtcggaagggttttgtgcgccgctccgatcttaaaaagcacacaatcgtgcacactggcgtgaggcccttcacatgcaacgtttgctccaagagtttctcgcggaatacaaatctgaccaagcacatgcgcattcatagcggtgtcaagccctttgtttgccagcagtgtccgcgatccttccagacggctgtggaaatgatgcgccacacacgttcgcacggagaggtaaaggctttccaatgtggacgctgtccctactcgttttcgcgcagggataagctaatagcccaccagcaagtccataccaggcgggacatggagcagcagcagcaaatgggtctaattcccccgatggagggtgatctgcagcagcaggcgttgcaggctaaacaaaaggctgccgcacaaaccaaaaactcacgctattaccactgtgatgtctgcgatcgaactttccaacgggagagggacctgcaacgccatcaagctcttcacatggactcgctgttcgcctgcaagacatgtaatcaaggtttcaaccgacgcgagcaactgcagcgccatgagctagaggctcatggtcccagctttacgtgcggaatctgttgcattagcttcctgcatcaaattgagctggagaatcacctcaaagtccatcagttgcagcacaagatggcccagcgggctcaagaggctgctattttacccctaaaaatggccgaaaaggctccagtggctatgacggctccgctagttcaggatccccagctagtgcgtccctcggcagcggaactgtcgttctacagcaacatgattcccacaatgaatctgggcttctacagcgagactcgtcccgaggaatagaacaacatatttacatgtttaataagcttagttgataggtcggaaaagttttgtaggtcaaggctgttttagtcgttcaggtcaacatagaatccattggtgttaatgaatctgtatagtttaagtcatctgactattgtctgccaaaatgtagcttagtggtttttaataaaaggccaaatctgaaacggttttcttcgagatcgtatgactttgtgaagatattatttttcataagatattaaagaaagttttctgctctataaaaaacttcttaaagttaagttatgttaaacctatttaaagtaggtttacttaatatataaataaaatatcaagtaaggtatttgaacattttgtattagcagtcgtctcagaccaacatgttgcgtgcaacaagttgcacgttgtccgatacgaagaaggtcttctccgaaatcttcagagcaactgcaccgctgcagattctttcttgagttcgccccgtacggtagtgcctctcgaccagcgctctcggatcttgatcgcctcgaaatctcgtaatcgcctcgaagtgcgcgtagtgaattgtgctggtgctgacagtgtaacgtaacgtttgatagaataataaataataagtattggagtgggagatccgcaaagaaatgtggccaagctaccataaataaagtgcggatttcaaacgagacgataaatctattcccgaaacgggcacgcaatcgagggaatacgaatccaccttacggttcgcttggttttggttaggttcaggttccgctgagagcggtaagtacgcaattaccttcgccattgccaagggtcacttcgcaggcgatttatgtgtatgtgctgtgtgctgtgctggcccggggtcttgggatgtgtttaggtgttggcgttcccgctgggcgcccacagcacttcccagtaccccatcctcgaccatgaccatctgaccagtccccccattcatgacaaatgaacatgttgccgcggcatgatcagcggtccgcgcagctttcgtttgattgaattgaaatatccacaaggttggtggtgggaccatggacgcgaggcagccgcggaagctttgcatgatttgagtagcaccagcaacttttgtcattcccaaaaagataaggggcacgagaggcagttggtactcgcacataaaagccagctcccagttgccagacatcgagtccttcgtgtcgtcgtcgctttttgtccatttaaaccacaaagaatgcgaggtgttcgcttttgtatagctatggtaacccttctactggttaggtttcaggcttaatcattttataataaatgctatgcttgcacccgcctgttaa

SEQ ID NO: 19760 - DNA, 2127 bp, DROSOPHILA
ttgaccaacgcgttttatttgctaccggtgtggcttttgtttgcttaaacaattggataatttattgcaatcccggcttaaatgcatatgattgaagaatgcatacatcggatatcagcatgacccaggatcaggatgtgagcacttgtcgcctgtgccaccataatacggatcccaactcgctaaacattttcgatgacaccgtgcagttttgcaaggatgtgtccattgcagaggtttccaagagtctctggagcgttcagtacgatcgcaacgaatgtttgtcggagctcatttgctcaaggtgtctggagatcctcgaagaggcattcgagctgcgaaaaggaatgcaggagcgggaacagtccctgcaggagcagctgaaggagatgattaaagatcatccgaagcaccgtccaggcctgaatggcaaccccggagtattcgtacccgaggagggctgcattattgtggaagttgatccagagaatctggcagagagcagtgaagaggaattcgcactcggctccgatggggagtacgaaaactatgacgacgatgatgaggaggaggaggaagactacgatgaggaggacgaggaagatggccagaacggcgaagacgtcgacatgccactgggcatggatgcggcccagatggcggctcaacagtccgttgccaacaacgccaacaccacggaggcacggccaaaacgagcgttcctctgtcaatactgtgatcttgggttcactctgcccgccgagtgtcaagagcacgagctggctgcacacgatcccaacgcaccgtactgctgcaacttttgcaacatcaagctggttacccggcctgctttgatttcgcacataaagacactgcatgatccggaccgtccgtatgtgtgtgctcactgtcggaagggttttgtgcgccgctccgatcttaaaaagcacacaatcgtgcacactggcgtgaggcccttcacatgcaacgtttgctccaagagtttctcgcggaatacaaatctgaccaagcacatgcgcattcatagcggtgtcaagccctttgtttgccagcagtgtccgcgatccttccagacggctgtggaaatgatgcgccacacacgttcgcacggagaggtaaaggctttccaatgtggacgctgtccctactcgttttcgcgcagggataagctaatagcccaccagcaagtccataccaggcgggacatggagcagcagcagcaaatgggtctaattcccccgatggagggtgatctgcagcagcaggcgttgcaggctaaacaaaaggctgccgcacaaaccaaaaactcacgctattaccactgtgatgtctgcgatcgaactttccaacgggagagggacctgcaacgccatcaagctcttcacatggactcgctgttcgcctgcaagacatgtaatcaaggtttcaaccgacgcgagcaactgcagcgccatgagctagaggctcatggtcccagctttacgtgcggaatctgttgcattagcttcctgcatcaaattgagctggagaatcacctcaaagtccatcagttgcagcacaagatggcccagcgggctcaagaggctgctattttacccctaaaaatggccgaaaaggctccagtggctatgacggctccgctagttcaggatccccagctagtgcgtccctcggcagcggaactgtcgttctacagcaacatgattcccacaatgaatctgggcttctacagcgagactcgtcccgaggaatagaacaacatatttacatgtttaataagcttagttgataggtcggaaaagttttgtaggtcaaggctgttttagtcgttcaggtcaacatagaatccattggtgttaatgaatctgtatagtttaagtcatctgactattgtctgccaaaatgtagcttagtggtttttaataaaaggccaaatctgaaacggttttcttcgagatcgtatgactttgtgaagatattatttttcataagatattaaagaaagttttctgctctataaaaaacttcttaaagttaagttatgttaaacctatttaaagtaggtttacttaatatataaataaaatatcaagtaaggtatttgaa

SEQ ID NO: 19761 - protein, 551 aa, DROSOPHILA
MTQDQDVSTCRLCHHNTDPNSLNIFDDTVQFCKDVSIAEVSKSLWSVQYDRNECLSELICSRCLEILEEAFELRKGMQEREQSLQEQLKEMIKDHPKHRPGLNGNPGVFVPEEGCIIVEVDPENLAESSEEEFALGSDGEYENYDDDDEEEEEDYDEEDEEDGQNGEDVDMPLGMDAAQMAAQQSVANNANTTEARPKRAFLCQYCDLGFTLPAECQEHELAAHDPNAPYCCNFCNIKLVTRPALISHIKTLHDPDRPYVCAHCRKGFVRRSDLKKHTIVHTGVRPFTCNVCSKSFSRNTNLTKHMRIHSGVKPFVCQQCPRSFQTAVEMMRHTRSHGEVKAFQCGRCPYSFSRRDKLIAHQQVHTRRDMEQQQQMGLIPPMEGDLQQQALQAKQKAAAQTKNSRYYHCDVCDRTFQRERDLQRHQALHMDSLFACKTCNQGFNRREQLQRHELEAHGPSFTCGICCISFLHQIELENHLKVHQLQHKMAQRAQEAAILPLKMAEKAPVAMTAPLVQDPQLVRPSAAELSFYSNMIPTMNLGFYSETRPEE

SEQ ID NO: 19762 - DNA, 3051 bp, DROSOPHILA
ccacatgcttacccgtcaatttgcgtgcagctcacatgccccaggacatgttcatatccacggacactacggctactacgaataccacccggatacccggacaaaccaaataccctggcagctgagaggaggtcctgcgaggtcggagcacggacaatttgtaacatttggcagacgtcaacgccctgcacaagtgcagaaaaatgaaatcaaatcaaagccaaacgaattgatcagaaaaatgccataattgaatcgcagtgggaacccaccccgcataacaccgaactgtgggcgtggccgtcctttgataactttatgctaatcagagatggccgagaagtctcgaatttcacaggccataagtcaaaagtacgactagggcctacacgcagagaaaatttatatattaaaaggggattagttgataatttttctcaggtttcattggattataaagccaccctttaatatacatacatttttggaggcatatcataattacttaacgataaacctattcaatatgtttatcgggttatatagtatttaactattttaaaaatcgaaacgatccatcctttaagttcctgtgtagttcctgccgcagcacaaaaggtgttgctgaagtgctggaaataatttccgttccgctcctagtgctcatttcgcctattttgtacgtacaaaactaattaatttcccaaaatgcaacatagaagagttgcgggggggaggcgggaggtgccgggcgggtccacgcaggagcggcacaggatatttgtgcaagcaatttccgccgccgaagagagttttgtgcgtaattaatttatgcaaaatacaaatgcaaacaaattgcaaatgttttcgcacaaattgtgcgctgtgcgcccaatttgttttccaaaataattaacttttcagcgggtttaattagaaattttctcaattttcccgctcagccaggaaggccagtgcctggctgtcatccaataaagttatcatttcccagcaagtttttcccgagtggattctactttgtaactgtggtgatgaagggatgcctcacctgtggtctgctaaattacctatggtgctcgctagaagacatatcctgtcgactccaggacagcaatctcctcaaattcatcctggccatcggtgtggccctattggtattgttcaacgtatacacaggatttagcttggccaatagatgtgatgagggatcgaacgatggatgtgcaaatgctggcggcgataattgcagaaggcttcgtggctctccggaatcctacaattatgactgggaccagggacctcatacctgggacactgcgtgcaacaatcagagtcccatcaacatcgatatgaactgtgtggaaatcaactactttgatacaccgttgatatggtcgcactacaatagcattccgctgggcattcgcctggagaacaacggacacacactgatcctgcgagcagcttttccagaacgaacgccctccatcgacggcggcgatctacttgggcgcttcgacttccgagagatctcgttccgctggagctgggccagctcgttgggatcggagcacacactggaccatcatcacagcccgctggagatgcagtgccttcacacagatggcgacggttgcgatggctgctcttctagccagggtgtcctaatgatttcctacatgttcgatctgtccgagcacaatccgtttctcgatgtcctcatccagcatctcgctgctgtcgagcaggccggtcaggtggtggaagtgccaccgtttccacttagctacctcatgtcaccgttctacgacaagttctacagttacaatggatccctaaccgaaccgccctgccaccgtggggcggagtggctaatatatcccgagtccttggccatcagcgagcgccagctgaacgagttccgccagctgagggataggcgtggttcaaggatagcgcgcaatgcgcgtccagttcagccgatcggggatcgaatggtatacctaaatcgctacaggacggggttttaaaacagattggctatagtgtatgtggaaaatataattcgataaaacagaatagaatatgtatatatttttcagctacaaactaaccctttcactttattatggttgagattgaatttatatacagtatctgtaaagacaggaagcaagttgcataactacattgcttataaagatttcttaataagaaacaatggtaacaccaattaactatgtacaaccattattacattacatacgttcatacagtaaataccaaaatccaatttattacataatccttgtggcatggcagtcagtacatgttgtacttccaagttgttactaattggtcctggtttccgccgtatttctgattcggggtcctgctggtcagtcttccgcacaatttactttgggttgccgtttgctgggcaaatagtgtgcttatatagtaattcactaattagtcgttcaaagagcattagcattggcattagcattagccgttgcagggacccgaggtcccgaggacctgagcctgttccgcatcctgtgcgcaaaatcgccgcaggacatggcaatgcgattgtgtgcgtgtgagtctgcgtctgtaatttcgttagtgcagcggaaactgttgcggacatgtttgccctgcgattgggattggtattgagattggcaatgggaatgggaatgggatcggaatgggatgggatgggcacgggcatgggattgggtttttggccctcctgcggcgaagcaccctcatctcctgtcctcctcctcctcctccttcatagcctgctccaccccaccctgcattacagctgctgcttggcaatcagagagttccagtttccaggcttataattatcagttggcgcctaaccatacatacatacatatgcacacacatatagctgaaagttcgaccatgttcggccattggcctgtaattagtttttattgcagagatgagatgaaaggggggcttggagcaacggatccaattcgattt

SEQ ID NO: 19763 - DNA, 1051 bp, DROSOPHILA
atcatttcccagcaagtttttcccgagtggattctactttgtaactgtggtgatgaagggatgcctcacctgtggtctgctaaattacctatggtgctcgctagaagacatatcctgtcgactccaggacagcaatctcctcaaattcatcctggccatcggtgtggccctattggtattgttcaacgtatacacaggatttagcttggccaatagatgtgatgagggatcgaacgatggatgtgcaaatgctggcggcgataattgcagaaggcttcgtggctctccggaatcctacaattatgactgggaccagggacctcatacctgggacactgcgtgcaacaatcagagtcccatcaacatcgatatgaactgtgtggaaatcaactactttgatacaccgttgatatggtcgcactacaatagcattccgctgggcattcgcctggagaacaacggacacacactgatcctgcgagcagcttttccagaacgaacgccctccatcgacggcggcgatctacttgggcgcttcgacttccgagagatctcgttccgctggagctgggccagctcgttgggatcggagcacacactggaccatcatcacagcccgctggagatgcagtgccttcacacagatggcgacggttgcgatggctgctcttctagccagggtgtcctaatgatttcctacatgttcgatctgtccgagcacaatccgtttctcgatgtcctcatccagcatctcgctgctgtcgagcaggccggtcaggtggtggaagtgccaccgtttccacttagctacctcatgtcaccgttctacgacaagttctacagttacaatggatccctaaccgaaccgccctgccaccgtggggcggagtggctaatatatcccgagtccttggccatcagcgagcgccagctgaacgagttccgccagctgagggataggcgtggttcaaggatagcgcgcaatgcgcgtccagttcagccgatcggggatcgaatggtatacctaaatcgctacaggacggggttttaa

SEQ ID NO: 19764 - protein, 332 aa, DROSOPHILA
MKGCLTCGLLNYLWCSLEDISCRLQDSNLLKFILAIGVALLVLFNVYTGFSLANRCDEGSNDGCANAGGDNCRRLRGSPESYNYDWDQGPHTWDTACNNQSPINIDMNCVEINYFDTPLIWSHYNSIPLGIRLENNGHTLILRAAFPERTPSIDGGDLLGRFDFREISFRWSWASSLGSEHTLDHHHSPLEMQCLHTDGDGCDGCSSSQGVLMISYMFDLSEHNPFLDVLIQHLAAVEQAGQVVEVPPFPLSYLMSPFYDKFYSYNGSLTEPPCHRGAEWLIYPESLAISERQLNEFRQLRDRRGSRIARNARPVQPIGDRMVYLNRYRTGF

SEQ ID NO: 19765 - DNA, 4357 bp, DROSOPHILA
tcccaagcccgacagtcactttcataaattcatagcgcagacacgtgaaattgaaaagtgccgtcgagcattaaattaattaataaactttacgcccaactaaaagcagcacgcatcgactgtctggctctgaaaactgtgctacagtatctttcctcttcaatatcaattcagctgctcttttttgcagctttgcagctttgggagttccttctatgggtatgggtacgttcaattcgtgcgaaaggtttggctattaggtgcttaaagtgtaaactgacagacattctggctaagatctgccaggttcaagtcttaaatctgcttaattggccaaaagcggagttaaatcccaagtcttactgatgtcttgcaactggaaatacaagaagttagttaacaattgaatatcttttcttatttatttatgaacacattttatattgatcctcggagttcatgtaaatcagacaatgaattacccgtgccattatcaggtactttccattcgccagaccgatagagttagcttagttttccatatttttctaccgactttataggggcgcacctctaaaagcggcttttgccgcagcttgacagctaaaaagagcaaaaaaccacaggatacacggcgctgacctgcgaaagctacatggtaactgtatagttatgggcccaatgggggtgtggaagtgggaatggtagtggtagtgggagtgggagtggcgctcctgaacactccttaattaatttccatgcgaatgcgggcgccatacgctggccattcgccacaggatgtgtactaagccgtggagccgtggagtcctggtgctatgcaaagttatggcgctgcgagttggcccacagtcggcaacagtgtcagttgccattcacgcttgggactaaccggtttggccggcagctacgcaaaaaaagcaaaccaatccaaacggattcgagccaaaacgaaccgaacccaactggctggcgagtaacgatgggcaacaaagttgtgacatttacggaacaggaattggatgactaccaggtgagcgatcaatcagatgaagttcacttccacacagctaatttctcttcatgcattgctggtccgcaaatcggaaaggattgcacgttcttcacgcgcaaggagatcctgcggtaggccatttgtattcccttaataagacaaaactattccatttcatatggcggcagacaaagcaccattgtttgcagcctcccattgtttgcctctcggcggcaacaaaaagcggaaaacacaagaaaacacccacacacacacacacactcacacgacagacactcagaacacaaagcccatcatatccccgccctttgacccggccaacacatcacattccatacccattcccagggattatcattttggccagtatccacactattgatcagcagcctcgaaaaagtcagcctacttttaaaaaccaaatatagttagagtaaatttaatataatatttgcaagctcgatgaaaaattcatttttaagtttctgaatgaaaagttaagttaactgaagttactcatagtgtattttataaatactttaggtggatgctgtaaaattgctttccagttagtctaacacatttccaactggccagggtatccttaacttcggtcaccgaagacaatcctttatccttgtattgcctttcgttacagggttcacaagcgattccgtgagctgcggccggatctggtgcctcgccaaatgaccgaaggtcaggcctccagtgttaaggtgccctgcgaatgcattgagaagatgcccgagttgcgtgagaatccctttcgccggcgaatatgtgcgtaacaatagccccgaatggctgcataagcaaagctcagcaattcaatgccaaaaaaaaacccagccaaaaggcgtgtacctcggacgctggactacagcaattttccacttttttgcaggcgaggccttctcacgcgatggccagggcaatttatcctttgaggactttctggacgccctctccgtttttagcgagcaggcgccgagggacattaaagttttctacgctttcaaaatttatggtaagttcgcgttagctccgctctcagttgttgcggtcagtgatgggaaaggacaatgaagctgtttaaactatcagcatgcgattcgcctagaaattacgtatacgactagttgcacgtctatagctgcgatttcattataaggcactatatttttattaacgatctgcctaccacatatatagatggagctaagacttttttagactttaagttactgaataaattgtttgccatctctgaactccatcttcattgcagctccagctgttggccagcattttgtgcctttgtttatgcatttccgcagcccgtgtttattgcctttggcgaacttgccctcattgcgtgcgtgtgtgtgtgtgtgtgtgtgggcccctttttgcatttggactttacgatggccgaaatggcagagaggagcatgtggaagatggccctggccgccaaacgtggcacacaactcgtggtgactcgcggccgggcaatttgtggcgccttttctaggcagcagctattgttgctgtcgcagggccaaagttcaaggacagccataaattctaataagcattttaattgaaatttaaattagaatcccgaaaaatgccatcgtaaatggagcaaaagttttcgtgcaaattgattgtgcacttgacacacgaaattaatggcccgaagtcggcaatcaatgggatgcaaagtatctcttagttcgagtgcaactgcaagttgctagttttttgttttttttttgctaaactagttgcaaaactcaagttatggagagccagccagctaggctgcactttatttcaatgtgcgttattagattgacacaaattgaaacgtgcagcaagcgattacctgtgtggcagaaggatgcagacgtggctgactgttgggcaaactcagtttggcacacatcacttgacttttgtgcaagaaaatgtcaagttttgtaagccatctcctcgtccgctttccgaacccactcgcttgtgtctgtgtgtgtacttacgtctggcataactttgcagatttcgatcaggacggcttcatcgggcacgccgacctcatgtcctgcctgacaacaatgaccaagaacgagctgagtccggaggagcaccagcagattgccgacaaggtaatcgaggaggccgacgtcgatggcgatggcaagttatcaattttggagttcgagcacgttatactccgggcgcccgactttctatccacctttcacatcagaatatgaaaccgtctttcgccagcggtgcactgagagaaactaatgccagtatggcattctctagtgttaaataaaatattaatatatcaacagattgccttcactatttgggttacttgtctcaactgcaccaagaagctattcaatttagttatgtattctgcagtgtagtataataaaattacccagctattgatatccaatgtgcatcaatatccctcagtgttttctctattttattaaattgtttatgtgcgcttttgcatcaaatatacataaccgaacatattccataaaagtgccatcagtgtgattaagctgcctgcccagcaggagagcctgtgggtttaggattccgggcttcgattccggttctggttacgggttacgggctatggcaactgggcactggcgatggaactggtactggaactgcagactccactggccaattgtcgtgacaatgtgcatgtcaaatgtcagggagcattataaaatttataagcccatggatgcagtcgggtcgagttgcgacctgcactcctgccccatttcgaccccaatcagtgggagtcactgcgaatggaaatcgtcctgcccccaggacacacactctcgtaaagcaggctcttatcaacgtgggcgtgtgtgtgtgtgtgtgcacactgtcaaagttttataaattttggcaattttcagcttaaacttgtttgacatttgagcatctgcctgtcgccccaatcctattcaattattgtaattgcatctgccagggtttcggggggcaaaacgagcacgagttgtggcaagtggacactcgtctgaccatttgtgaattatgaaaatgaaggaaattctcaactctttgttaaaaacaaagaacaaattagaagtcgtttactaccgatctactgctgaaaaccaaatgggtatgggtatatttacctactggcattgactgtttttatcaccatttatagaaaatctatctctgtgtagctatggt

SEQ ID NO: 19766 - DNA, 621 bp, DROSOPHILA
atgggcaacaaagttgtgacatttacggaacaggaattggatgactaccaggtgagcgatcaatcagatgaagttcacttccacacagctaatttctcttcatgcattgctggtccgcaaatcggaaaggattgcacgttcttcacgcgcaaggagatcctgcgggttcacaagcgattccgtgagctgcggccggatctggtgcctcgccaaatgaccgaaggtcaggcctccagtgttaaggtgccctgcgaatgcattgagaagatgcccgagttgcgcgaggccttctcacgcgatggccagggcaatttatcctttgaggactttctggacgccctctccgtttttagcgagcaggcgccgagggacattaaagttttctacgctttcaaaatttatgatttcgatcaggacggcttcatcgggcacgccgacctcatgtcctgcctgacaacaatgaccaagaacgagctgagtccggaggagcaccagcagattgccgacaaggtaatcgaggaggccgacgtcgatggcgatggcaagttatcaattttggagttcgagcacgttatactccgggcgcccgactttctatccacctttcacatcagaatatga

SEQ ID NO: 19767 - protein, 206 aa, DROSOPHILA
MGNKVVTFTEQELDDYQVSDQSDEVHFHTANFSSCIAGPQIGKDCTFFTRKEILRVHKRFRELRPDLVPRQMTEGQASSVKVPCECIEKMPELREAFSRDGQGNLSFEDFLDALSVFSEQAPRDIKVFYAFKIYDFDQDGFIGHADLMSCLTTMTKNELSPEEHQQIADKVIEEADVDGDGKLSILEFEHVILRAPDFLSTFHIRI

SEQ ID NO: 19768 - DNA, 3048 bp, DROSOPHILA
acctacccacctacgcccacacgctaatgggcgtcggcggactggttatcaacgaacaggacgaggtgctggtggtgtccgatcgttttgcaatgataccaaacagctggaagctgcccggcggctatgtggagccgcgggagaatctcatcgatgcggcaatacgagaggtggccgaggagacgggaatccgcaccgaattccgctcagtggtcagtctgcggcatgcccatggcggcaccttcggctgctccgacatgtacgtggtcatcgccctaaagccactgaatttggactttacgcgctgcgaacgcgagatagcgcgcatccagtggatgcccatcgcggagtatctgaagcatccgcaggtccacgagacgaacaggcagttcgtctgcacctttttggactaccagaagcgcggcctgaccctcacctgtcgcgacgaagtgcatcaggtgctaaagaagaaatacaatctgtattacgtggatcgggagcagccacaggagcagcaggataaaaagaattcgtgagacttgtcggtgcaatggccaaatccttagtgcaatttttataaagtcctttcttccaaaagccagcagcatcacaactgcgcattcaaatgttcacaatgtagtcaataaatgaatttttttgtatataattatatgcatatatcaattaaagctcacacagccttttacaaaagcttttcttttgataccatttttagaaacgccaataatttaaaatatggcattattttgaatatgacgcccaaacatggtaaatacttccttagaaggtaagccaataaggattaaggatgtaagcttcatactttgaaaaatatgtttattaaaaacaaaaatgaaaagaaattattattctctcctgtttttttcaacttattttcaatgatatgcaaaaaccagaagtcgcacaaatgagacgaaactcgcatacgtaatgattctaaaaagttgtggtttgatgtactataatttccaaacgaaacataggccatttattgggtcaagttgattttaaactctttgttgtacgaatgccatctatagacccgtggcctcggatatcggccagatgcggcagagcacgcggctccggatgaggcccaccggaatgggtccgtagtagcgggaatccgagctgtttcccttgttgtcaccctcaatccaaacgtgtccgcgcggcacatagtccttgaccatcacgggcttcttcttgtcatccgaattaccactaaactccgcctcaatgggaatgggcttctggattagcacctgatcaccggaaacggccacgatacgcttgcaaatgaactgatcggctttgatgggcgatatggcgatgactatgtcgccgggctggtaggttcgccagtgtttcgacaagcgctcggtgagaagaacgttgtccgagtgcagggtgggctccatggagggtcctttgcactggaaatggttgcattaatgtgagtgtacgtacttttccgcaaaagaaggatatcaagtggaagttacacaaggtggaaaaacaagtggagagtaccttaatgcattcacacgaactatgtgatgctggcacatgttgggcaagtatacccgcccaggaacttcatcctagacgccttaccaggacgaaatcgccaatgtactcgaaggtgcagtgtgtgattgccgcgtaggccaccgtgtagcgcatcaggcgacccagacgggagaggattttcatgtcggcgattccggcgttggctgctccacatgcgcccctaatcagagcatctcccgtgtccaacgacctggtattctctcgaaaaaagagctcctccaaaatcgaatgtttatgttgtgtaaaaatcagggctgcacaggcggcgcagctgagcggccagccagggatgtgccaacgataattttgatgtctaacgataaattttgtgtggcgcaaatttcaaaaatcgatggcccaaaaggttaaactaaaatttagcgcatagaaccacatatatttattttcacttttcaattttgactaagtctgccaggcctggcatgtatggtacatatatgttaatgtttcaaatacatctaacatccatttgtcgtatatatttcatgcaggtctccaattacattctttaacttacgattagaaatacattagttacattgagagagttgctgggacaaggtggttagtcaaacccaaaacgtgcacagtgagataaatcctggaaatagacactcattcatagtatatcggcctgcatttacgcattggcatatatatacatatatagcgtgtaaactacgctaactaaaggcaaaataaatatgcaacagctactgactggaacgaatcgcttaaatttcaattcaaaaatctattaaatacaaattgtcgggtgatttcaccacccgtctaactaaaatatatcaaataaaatcaacaatcattgcaatagcgcattaaaaataaattaaattcctactacggcctatttggttgcctaatgcccatatttcatctgatcgcaattcgtcttcaaaattctgtttttttagcttggaatcaagagttgtttcatttagtactttctgttgatagaactgtcgctggaagattgatcccggatcgcatcccattttcactccactttcttgccgctcaccggctccgacttctggcgccgctcctgccgctcgcgtacatccacggccgccagatcgatgcccgccacgtaggcgtgcatcaccgagatcagggccttgagcacggcaaagggacccgtgaggaaggcgagtatcttgaagagcgatgcgccgaatactgcaattgaagtccatcaacggattagatacgtttcgccagctgaaatgcaaagcatgtgcgtgtgcgtatactcactcagcgggccgtaggtgaaatgcaagaggtacaagcacacgtaaaacagctcattgacgcagcacatgaatgtgagtatgtccttctggtaatacaatcgcattatgaagttgt

SEQ ID NO: 19769 - DNA, 867 bp, DROSOPHILA
aaagtgaaaataaatatatgtggttctatgcgctaaattttagtttaaccttttgggccatcgatttttgaaatttgcgccacacaaaatttatcgttagacatcaaaattatcgttggcacatccctggctggccgctcagctgcgccgcctgtgcagccctgatttttacacaacataaacattcgattttggaggagctcttttttcgagagaataccaggtcgttggacacgggagatgctctgattaggggcgcatgtggagcagccaacgccggaatcgccgacatgaaaatcctctcccgtctgggtcgcctgatgcgctacacggtggcctacgcggcaatcacacactgcaccttcgagtacattggcgatttcgtcctgtgcaaaggaccctccatggagcccaccctgcactcggacaacgttcttctcaccgagcgcttgtcgaaacactggcgaacctaccagcccggcgacatagtcatcgccatatcgcccatcaaagccgatcagttcatttgcaagcgtatcgtggccgtttccggtgatcaggtgctaatccagaagcccattcccattgaggcggagtttagtggtaattcggatgacaagaagaagcccgtgatggtcaaggactatgtgccgcgcggacacgtttggattgagggtgacaacaagggaaacagctcggattcccgctactacggacccattccggtgggcctcatccggagccgcgtgctctgccgcatctggccgatatccgaggccacgggtctatagatggcattcgtacaacaaagagtttaaaatcaacttgacccaataaatggcctatgtttcgtttggaaattatagt

SEQ ID NO: 19770 - protein, 166 aa, DROSOPHILA
MKILSRLGRLMRYTVAYAAITHCTFEYIGDFVLCKGPSMEPTLHSDNVLLTERLSKHWRTYQPGDIVIAISPIKADQFICKRIVAVSGDQVLIQKPIPIEAEFSGNSDDKKKPVMVKDYVPRGHVWIEGDNKGNSSDSRYYGPIPVGLIRSRVLCRIWPISEATGL

SEQ ID NO: 19771 - DNA, 3775 bp, DROSOPHILA
cccaggaacttcatcctagacgccttaccaggacgaaatcgccaatgtactcgaaggtgcagtgtgtgattgccgcgtaggccaccgtgtagcgcatcaggcgacccagacgggagaggattttcatgtcggcgattccggcgttggctgctccacatgcgcccctaatcagagcatctcccgtgtccaacgacctggtattctctcgaaaaaagagctcctccaaaatcgaatgtttatgttgtgtaaaaatcagggctgcacaggcggcgcagctgagcggccagccagggatgtgccaacgataattttgatgtctaacgataaattttgtgtggcgcaaatttcaaaaatcgatggcccaaaaggttaaactaaaatttagcgcatagaaccacatatatttattttcacttttcaattttgactaagtctgccaggcctggcatgtatggtacatatatgttaatgtttcaaatacatctaacatccatttgtcgtatatatttcatgcaggtctccaattacattctttaacttacgattagaaatacattagttacattgagagagttgctgggacaaggtggttagtcaaacccaaaacgtgcacagtgagataaatcctggaaatagacactcattcatagtatatcggcctgcatttacgcattggcatatatatacatatatagcgtgtaaactacgctaactaaaggcaaaataaatatgcaacagctactgactggaacgaatcgcttaaatttcaattcaaaaatctattaaatacaaattgtcgggtgatttcaccacccgtctaactaaaatatatcaaataaaatcaacaatcattgcaatagcgcattaaaaataaattaaattcctactacggcctatttggttgcctaatgcccatatttcatctgatcgcaattcgtcttcaaaattctgtttttttagcttggaatcaagagttgtttcatttagtactttctgttgatagaactgtcgctggaagattgatcccggatcgcatcccattttcactccactttcttgccgctcaccggctccgacttctggcgccgctcctgccgctcgcgtacatccacggccgccagatcgatgcccgccacgtaggcgtgcatcaccgagatcagggccttgagcacggcaaagggacccgtgaggaaggcgagtatcttgaagagcgatgcgccgaatactgcaattgaagtccatcaacggattagatacgtttcgccagctgaaatgcaaagcatgtgcgtgtgcgtatactcactcagcgggccgtaggtgaaatgcaagaggtacaagcacacgtaaaacagctcattgacgcagcacatgaatgtgagtatgtccttctggtaatacaatcgcattatgaagttgtcattcaccttgtgcgagctgcgtccgaccacaacgctcctgcaaaaagacaaagccacgagtcattagtttccttccattccttgacagtccagacgtccagcatcttgctctttcccctgccccacttacgtctgcatgaagagccagtgacaggccacgtcgatggcgatggacagctggaaccagaacatgtaccggggatagaagtaggccagggtgaccagtaggccggtggtgccgcagcgatcggtcaactggtctagcatggcgccaaagcgagtgcctgtgaggtaatcgagtatttagtaaagattccatagtaccatatgataattactaatattttgatatacatattttggttggagtaccctttcgttaagactctaaatcatcctgctagcatacaacaaatccaagtgcaagatcatacctttcagtttgctacactactatatcataaacattgcatggtatctgcaatttgtttcttagaaggcttctatcctaatgtttttcctcctatattgctaactacattgcatagttccaaggcaatattagccatgctttctatctattcttcagccccacgtcatccatcgattggctggatagccgtgaccatatcgggctctttagggcgtgcctacaattccacaatatcggcagataaccagtacggaggagacaggtgtttgcaatgcgctagcggccaaagtgcgcgcacaaatcaaatacagacatatagctggcatgagctggcatttcgatatcaagggcgatcgcatggttaatgcttactttggttaaaggctcgggctgcttgtccatcgacggcgtccaggagggcggaggttacataacaccagccggagatcacatagttggtggacatgaaccagaaggcgatcagggccagaacgatgcgggcgtagcctggaaaagatcaatataaatcagcacatatgcgtgcatcatacgtatagaatcattggaggtgactcaattgggttggacgaagcggctcttatcgctgaacttgcgcttcgcattgcactagctgccaaacagcccctattaatccaattagggaacactagaatcgctattattgcgccgcataaatcgaacatgcgatttgtttacctagctggagcacggaataaaacctacaaacagccactcaccgatcagatttggcacaaagatgaagacgttatcgtgctcggcaattgtcattttgtttcgccactttggtttttcgtttattttgcgatcttctagctttgcggcttgtttttatccaattaaatgccaaaagtgctgcagaaaaaacagtggaaacagaatttgctgtatctggtgtgaccgcagcgtgacctttggaaaaaacaaacaaagacttgagagaaaataccgaactatactggccaacaagatttcagatggtttccactgacacacatctgtttctagtttctatttttctcttccaatagaaatttagtaattagtatatcattttaaatgtatcaaatacaaattaaaggtcactagattattaacatgagctaccaaaaccgggcaactagtgtagttgcttgttaaatgagttttgacagcgatttgcgtgccgttttgatacattttcgctgccgttgagcagtgtaaatggatctttgcataccgcttctaagctagtatattcctcagcgggacatggcatggtcacaccgcccgcgataaagttttcacaaataataataaaaacacaatacaggcgaaaatataatgcacaagtagcgcgacccgaagtaacctgcgcggagaaccacatgctgtagcatggataaactccgcggcggcagtctgggcggcggcggatcctccagcggcgcgccatcgacggctccgggccatgagcaccaccaactggagcagtatcagtaccccaaaaacctgatcgagcaatatctaagggcctccagcaagatcaagaagttcgagcgggccggcttcttcaagtgagtagctacggcccaagtatgggcaatcagataccttgcagatcattgcgtttgattagcaagtcattgcccaatttatcgcttttcctccatcttcaaactatgtttagaaatacgggtgtattagaagccctcgaatcacggaatacaatctcaatactccactgtttctctaattcccagacgctttgcgcccagcgtggtcgatgtgcaggcggacttccagcgactggcctacagcttcgaggagtcgggcatacagcagtatgcggccatgtgccacattggctatgccaagtgcgagtcctacggcggcgcaccgcagc

SEQ ID NO: 19772 - DNA, 832 bp, DROSOPHILA
caaattctgtttccactgttttttctgcagcacttttggcatttaattggataaaaacaagccgcaaagctagaagatcgcaaaataaacgaaaaaccaaagtggcgaaacaaaatgacaattgccgagcacgataacgtcttcatctttgtgccaaatctgatcggctacgcccgcatcgttctggccctgatcgccttctggttcatgtccaccaactatgtgatctccggctggtgttatgtaacctccgccctcctggacgccgtcgatggacaagcagcccgagcctttaaccaaagcactcgctttggcgccatgctagaccagttgaccgatcgctgcggcaccaccggcctactggtcaccctggcctacttctatccccggtacatgttctggttccagctgtccatcgccatcgacgtggcctgtcactggctcttcatgcagacgagcgttgtggtcggacgcagctcgcacaaggtgaatgacaacttcataatgcgattgtattaccagaaggacatactcacattcatgtgctgcgtcaatgagctgttttacgtgtgcttgtacctcttgcatttcacctacggcccgctgatattcggcgcatcgctcttcaagatactcgccttcctcacgggtccctttgccgtgctcaaggccctgatctcggtgatgcacgcctacgtggcgggcatcgatctggcggccgtggatgtacgcgagcggcaggagcggcgccagaagtcggagccggtgagcggcaagaaagtggagtgaaaatgggatgcgatccgggatcaatcttccagcgacagttcta

SEQ ID NO: 19773 - protein, 193 aa, DROSOPHILA
MSTNYVISGWCYVTSALLDAVDGQAARAFNQSTRFGAMLDQLTDRCGTTGLLVTLAYFYPRYMFWFQLSIAIDVACHWLFMQTSVVVGRSSHKVNDNFIMRLYYQKDILTFMCCVNELFYVCLYLLHFTYGPLIFGASLFKILAFLTGPFAVLKALISVMHAYVAGIDLAAVDVRERQERRQKSEPVSGKKVE

SEQ ID NO: 19774 - DNA, 8412 bp, DROSOPHILA
tattttaaaaataaacaatatcaaaaggcaaacagcagcgctccgttaatgattttaaatgacgcaattggaagacttattattcggactgataaaaaccgatgtgaccgcgcgcctacaaaacgtattatatataaataaaagccaatcgatctggctttaagtatatttatcagccagcggctgaccattgtcaagtgacgactgagatggttgtgatatagtgttatcagcgttatcttatcaccctacagggcaaacatcagtgtttacgtaaatcctaaagtatgtcatatgccccatctgataattttgagaaactgtatagcaacatcttttttgtgattttgctatcgtaatcttgtgtcaatatatcgccaagtgtattaaaaataaaacggatttgcttttctgactactttcatttgatttttattgaaaaggaattgaaagtgttttgtgtctcttagccgtctcaatttatttccttaaatttcaatcttcgcaattattatatcataagcttacaagttaaccgaagttacgattttctgttttccaaatgttgcacttttgtcgtctatcaaaatgtgatgtatatgtatataggcttcacttttgactaagttattaataaatatggtaaattctgaagctagctgtaaatatttagatttttggtagacaaaattggtctgttttcggttacatgttacatagcggcagactcaaaaatgattcttaaattttctttataaatttgtaatatctagggattcgtttgttaattcattggaaatggcagtttggattaattgctgtaaatttgttgcatttgattgatttactatttactggtcagcgccaaatttactggtcagcgccaaacgagattcaggctggtttagttccatcctgtccattgagttcccatcttggtggtttagctttacaatcttacgtctaactttcatcgtaaagtgcataaaaagttattggaattcaaaatttgtatgtttataggcgttgcaagtcttgaatatatattttgtatgctttataacgcggaaaacaagtttaaataatttggatttttaatgacattcgaaaatctgaacctttcacaatcttcactacaacatctggtggtttgcctctggtaggattgtcttagacgagacttatcgtcctcacacacctctgataccgagattcttgttaatcggagattcttgttattgtgtttgctattatgttatgttgtaatagtgtggtacaatttaatcaatgaggagctcatagtgcaccgatccgattctctccttgcgatcgtgtatgatgttgcgagcccaagccctgcactccacgttgatgatgattccgcctgggtgatacaaagtcattgaaaatagggatcttggaaatgcaggcactacttacgtttggggcgctggaagtgcaccgccaccaggggactcaagtagccctcggagttctggtagggatagaagtagccggggaatcccctgattggcaggtagttgacagcaccaatgttctcctggtcggctgggttctcgccctcgcacgatacccaaatggtgtttagctacgcccggaagagaatcttagttagtcttctagatatctggcattacgttcatccaactaccttttctggctgcgtcttctcgacctctgcgatgtaggtcttcaagctggcgggcatgttcgcgggcaagtcattcgatctgttgtagtactccggaatccagccgtagatcttgttcagcttgaggaagatacacggcgcactcttgtggtagctgtagttattctccttggtgcacggcgaccacgtcttgatgtccacgtcgcacacctgaccctttggcggcggctggttgtagtcgcagttgtagatgttctgaccacggccgggtgttagaccaggtactttgtacactgcagggttgagatacaaagattcatgtttagaatgcatcatttttccacaattaggattgaattgaccatgattgacttgatcagcttagttttagattcaacaaagagatctcattcaacgaataaattgatggcattttactgaggcaagcaataagtaagtaaatgcctatgaatatgaaagtacttacccgcaaggaaatcatccagggagtctgtccagtgcttgtagttctcgtgttgggtgcccttgtaccagatcaaagtgctttccacattgtccaccggtggcaggggtcgaaaacctagacctgagagatcacaaaactcgattagtgctgaatccggcgaaatcctttacaattgcgactcacctggatttgtacctatcagggaacggtccagggtccacttgggaatgcgaggatcgagagtttggaagaaggcccacatgcagatggcaacgagggcggctaggactccgtagaaggccacatagaagattccgattttggctgcgatgggaagagagagcaggaaatgtttattgaattacagtgattaaagccgttcctaacagcgatacgcagtcaattgaagcgattgaattaattaattgccactggcccccgcggtcgacatgggttaaaccgataattgacaacgacgccggctcgagagggccgtataaacaaatggggtccaaccccaagctccgccgcttctcaagttcggagtagacgacaatccgacgccgagcttctccactgaatcatcatctaaactttcgcacaattctatatattcccgatactctcctctcttattcatcgactaagagcatgaacagggttccactcaagagcccattatttttatgcgtgtgtgtgtgtgtgtgtgtttgttaagagatcgctcttgatctcagatacttcttggccgacataacctcaatcggaatgggaagtcgattgaccagagagtagttaactaagggagtaacctagccgagctggaggagtttggctccattggatacgctacgtgcagctatgctgagaatttaccttactatttaacgaattttcaagagcggatacactaggtgtgactttgattgaaattttaagatattttctcaccgaaagaattggaaagtaaaattttaataattttctattaaaatcatagatacactatcgatactgtagatacaatgttaataacagctgaagctcaaatgaatgacatgcatatttatttaagcgagaataattaaaaaaatcaatttaaattaaaaaattaaataaattaataaataaaatcttgtcctcgattaaatatcccacttcttgccaagatctctgtcgaatgccaaaagtacattattccgttttcgtatattttcagctctgctttgcccatttcagcataattgcattgcagttgtctatttatagcgagggccttgggccagccaacttttaaatgccaatattggcgtcatgaggaaaacctttcccgtacaattgatgataaagagtgcggcggacacggcttaactggcggcaattgagggcggcaagaagtaagatgccgcatttccacgccctaatttgttcccatttcccagcatcgttacatgcagatgttaatttgttcgtcgcctcgcgagctgtactttaatttttttgatttacgaatgtgtgcaacttgcggcactttagacgctctaatgggcgttactttcgcagcgccgtgcttatgagatacattcccgaatccgactcgcattggctacgatgaaatacgacttttgggcctgatttacagctgtcatatgccagcgaaagcagttttggccggacagcaataaacacggcaataaacaataaacttaccccatgacgatcgatcgcgacccataaccgttccatcctcggtgttatataagaactggcccaatttgaacggtttgggcttcctcaggttgtgcagatcctcgtccacaaaggacggactcattggtactggcttggacatgtttctatcggtgggttttctttggatctaaaggcctgtttgcggttcagttcggttagtgattaattcggaatcgatttaagccattaaaaatatttatttttaaaagtttaaatattcgaaataaagcactcgacgaattgaattgcaaacgagcgtttcagctgaatacgcaaatgtctatttttccgtattgaaaatttcttttcaaacacttgagaatatgtttagcgttgaataaagtccaaatattgcaaaaataattccatgcgaatcaacgcgaacgtattatttgcactgaaactttggtggcactgcgtttggttttatatcgtaaatattgcaccgacaccgaattgtgcggatgtacacacatagtattcaaactatatacactcgtatacatatacagcagtccaggtcctttttgctctcttagtttctctcacttttcacccgacgtttcaacccccctggccgttttggaaatttggcgcctttttcggctctcctggccgaaaaaaatgttgcatccgtcagatacgacctgcaactggttggcatggaatgggctcgaagggccaaacaatgtgggccaaaatggggccagaaggccgtgctactgctggggcggcgacatggtcccatttccgcgtctgctgttgtgatttcaatgccgcattggctttgacccggcactgccgaactggccagatacaaaagtatatgttcttatttatggtgcatgcagtggttcttttcattttgccccgaactacaaccaccgcaacaacaacaacaacaacaacaacaacaacaacaacaccaacaacaacgacaacagaaacagaaaccagcccgctctttgccatcgagcactgaaaatgggaaacgcagcgagtatctgtatctcttaactggcgcgctcttaacgcctggccacatacaaacaaccacacctttttgaagaaatatcggagcgtttcttcaagactctggctgaaatgaattcttttcttttcgtaaattcactagtttttgagcttgtaggtgagtgaattttcaattatcctaaaagatttttgctagctagctaagtgggtttaaactgcactgaacgcaccacaaactctattcaagttgctgtttgcaaacggaacgcgtttcgaccacgttacgaacactccgtgacacgttattccgccgctcaaaaccaatttcagactgaaaaccaaatcgcaggtctgtcgatacgcagccaaacattaagcgactttggcttgagtctgtttggcgtggttttttgctggtccggtttttgtgtgagtcaaacgaacggctctctctctcgagccgagtttgtgttttgttttgttttgagtggaaagtggatagcggggcgggcgcctttggcagcaccgcgttttcgtattcgacggcgagtgcaattcccggatctgggatcggtcgggttttccggaccgagattgggttgcgttctaattgccgtggaaaagctgcctccttgtgcactcgttttaattaggcggtgccggcgattgtcgagcattcattgcaaattgcccggggttcgatcccagagccagggccacactgagagaaaaacccccgaaagttagtcaattttgcaagtgcctcaagtttgtagtgcaatgctctctattaaaagcaagcgattataggcatgccagaaaaattcacattaaataataaatcaaaaaatgtgtttcgctgtcgtattgatttaatgaaaccaattaaaaacagttagggcaatggaaaatctggctcatttaaatatcgctggcacgcaaaaatctaagcatttgacccgattccgctcaaatcgtcgggtggtggggtagaagtgagggaagaactggtttaaatacggccacaggacattcagagaattgggccaaatcgagagttgctatacatacacgcacacagggggtgggtttcacaggagagccctctgttcaactggagttatgttcaagggaccatggaatgaggacgatagcgggcagccaaataggacatcgttcgagtttcaaattgaaagggaaatgtatatcaatatatattgcagatcaaaataatactgcagtttcagattatgttgtcagttttattatacaaaatcacagctgcgtgtattagaatttaaagcgaaaataaatgtattgcatttgcacatgcgaattcaaaagtatttaacaactacgtaaatattcgtgattcagtcaacactttcttaataaataatagtcgtcgattataattgtcgacattttcttaataggcatttcctgctatctaaacaagggcgaggttagagattaatcaaagtgtctcgaaagacggtaagtagttttctagagatttttacatatataggaatattctacaatctcattgaatcaagaccattcaaccattccaagtgatccgaaacaggtgagaaatgcaatgaaaccccaaatcaaacgcaagggaggcctggctactacttcgaccttctgccgaaatcagcggtggttctggagaacgctggcgggttcaccgcagcctgattgcataatggcataattgaccgatattgcggcacaagtggcccgggcatgggcacgggcacacagatctggtcgcgccgaggggccagcgaagcgagaatgcctgtcattgggcgggcaataaaaacggacatggacacgaactggaaagtggcgaaagcggcgggaggccggcaaatagatacatccatccattccacccacccacatccacgataatctgcatctgccgtcagcgctaatgcgacgacaaaagagattctcttgattaaggtcagacttttatcaagactgtcgacacggctgctggcaacaggggccagcacttggggtttacgtaatccgcaatggaagatctccaactcaccccagctgtccatcgagcgtccgaagtaggagttgtcctccgagtcgtagaccatctgcttcagggacttcttcttgggcctctccggtggccgcgagtagtactgttggaatccatctatgcaatcctcggttatggtaggcattataccaggcttcttctttggctggcgcttcctcagttcaacggctaaacggtttcgtgatcgggatcgcgtgggcaaaggttttcgaatcactggattggaaattggaatgtgtaggggtatggatatgtgaggtggatcgtgtatccaactggactcctgggcagttcggtgtagatcccgtgtaaggctcggttggctttggtctatggctggaaaggctgatggttttactctgtaacactttggatatgcgctgcacacgacaagttgacaccgctgtgcgccgcgcgacactgatctgaattcgacaaagaaagaccaagccgaaccgggggttatgtgtctgaaaatctgaaatcagaaatacgcaagagtcaggcttaatcaaatactttatgcatatgtgtgcggaaatacgcgctgcggtaccgaaacgaagcgaattggtatgggtatggggatggggacagggatagagatttggattgggatggtgatggtgatggggatgagatgggatggcataccagccagagttccagttccacgtcgtggaagacgcgagtcgcggcgcgtgacacaattttcatttaattgaagcctaagatggcggtgactatcatgagctggctgcctgacaaatctaaatcccagtaggcgagaaattaactatgccggtgatgatgatgatgatgatgatgccactaattgtcgcatgaaatatggcttcctttggcactgagcgcattttacatttcaagttggacttgaacgattgcctccatttcagttgggcaggtgaactgccgaatgcagaacatccgcgtggataggattgtattcaaaacgcatggaaaagtcgcctcttttaataagtttggtgaaaacgaactgtcgcgtttgagagcgtccttcagagaatctttaaatcaatgtccataaagatcgctgcaagttaaatttgtgagagaatggaaaacttttccaaaagtccatttcgccgaatttcgcggctaacaattgaatttaaaaatttttttttactaatcgataaatttttacattactaatcggtttgtcaactttttagcgccacctggctgaatagccgtggtaccaccaaagacagtagaatgactgtgagtctccgctatgtgttgctcgcttacgccgctaggtgtcgcttagttaaaattataatatttttggagtctttcggagtttttgaaaattgcatgcagttaaataaattaatctaatatatacttactaatacgattaaccaa

SEQ ID NO: 19775 - DNA, 1541 bp, DROSOPHILA
cggcgcacagcggtgtcaacttgtcgtgtgcagcgcatatccaaagtgttacagagtaaaaccatcagcctttccagccatagaccaaagccaaccgagccttacacgggatctacaccgaactgcccaggagtccagttggatacacgatccacctcacatatccatacccctacacattccaatttccaatccagtgattcgaaaacctttgcccacgcgatcccgatcacgaaaccgtttagccgttgaactgaggaagcgccagccaaagaagaagcctggtataatgcctaccataaccgaggattgcatagatggattccaacagtactactcgcggccaccggagaggcccaagaagaagtccctgaagcagatggtctacgactcggaggacaactcctacttcggacgctcgatggacagctgggccaaaatcggaatcttctatgtggccttctacggagtcctagccgccctcgttgccatctgcatgtgggccttcttccaaactctcgatcctcgcattcccaagtggaccctggaccgttccctgataggtacaaatccaggtctaggttttcgacccctgccaccggtggacaatgtggaaagcactttgatctggtacaagggcacccaacacgagaactacaagcactggacagactccctggatgatttccttgcggtgtacaaagtacctggtctaacacccggccgtggtcagaacatctacaactgcgactacaaccagccgccgccaaagggtcaggtgtgcgacgtggacatcaagacgtggtcgccgtgcaccaaggagaataactacagctaccacaagagtgcgccgtgtatcttcctcaagctgaacaagatctacggctggattccggagtactacaacagatcgaatgacttgcccgcgaacatgcccgccagcttgaagacctacatcgcagaggtcgagaagacgcagccagaaaagctaaacaccatttgggtatcgtgcgagggcgagaacccagccgaccaggagaacattggtgctgtcaactacctgccaatcaggggattccccggctacttctatccctaccagaactccgagggctacttgagtcccctggtggcggtgcacttccagcgccccaaacgcggaatcatcatcaacgtggagtgcagggcttgggctcgcaacatcatacacgatcgcaaggagagaatcggatcggtgcactatgagctcctcattgattaaattgtaccacactattacaacataacataatagcaaacacaataacaagaatctccgattaacaagaatctcggtatcagaggtgtgtgaggacgataagtctcgtctaagacaatcctaccagaggcaaaccaccagatgttgtagtgaagattgtgaaaggttcagattttcgaatgtcattaaaaatccaaattatttaaacttgttttccgcgttataaagcatacaaaatatatattcaagacttgcaacgcctataaacatacaaattttgaat

SEQ ID NO: 19776 - protein, 323 aa, DROSOPHILA
MPTITEDCIDGFQQYYSRPPERPKKKSLKQMVYDSEDNSYFGRSMDSWAKIGIFYVAFYGVLAALVAICMWAFFQTLDPRIPKWTLDRSLIGTNPGLGFRPLPPVDNVESTLIWYKGTQHENYKHWTDSLDDFLAVYKVPGLTPGRGQNIYNCDYNQPPPKGQVCDVDIKTWSPCTKENNYSYHKSAPCIFLKLNKIYGWIPEYYNRSNDLPANMPASLKTYIAEVEKTQPEKLNTIWVSCEGENPADQENIGAVNYLPIRGFPGYFYPYQNSEGYLSPLVAVHFQRPKRGIIINVECRAWARNIIHDRKERIGSVHYELLID

SEQ ID NO: 19777 - DNA, 10296 bp, DROSOPHILA
ctttctgaaaaagaacgtggtggcccataacctatccaagggtaaaagcatctaaagttttctaaattattggagtaactaatatagatttcaattcatccagataaagccaaactaatcagagacaatatatatcgaatgtaccatgagacgcaactttggggagctcgacacgcctgaggtgatttaacagctatcaattaattaattaattgctaacccttttttttcttaattcacagcagtaacaattgtaaaagtacctaacaaaatcgagtttcaatcttcgtctcaactaaagctaaacttttgtcttaagtcagccgacacctcgaaactaatcctaactaaagtagcagatcaatgaagttttatctgaaatctggtgtttttactcgcgttgtcgtaaccgtaaagatattaatacgatagtcattcttgtaactggatttgaaatataatgaatgtatggggaaatgcttgtatttattttaacatctataaagacgaatattatataatgttgttaataaattgggatttctaaagacgtcatcgttcaattttcaacgtagctaaacaaattggaatcgcatatcaaaattaagtttggaatcaaaaccagttacaagaacatccgtactgcgaatgataagagggcactttaaccaatactgtacgtgtatccataaattgtgataataatattttgtgattactttatatagacctaaatactatgaaattatgcagtgcatatagttaaaatatcgcagtttaaattgttacaaatcaagatcaataactatgctataactatgtttgtaatgaaagagataatatttcgcaattgtttaatacattcaaattaataaaagtctaacgaaattcaaaaaaatttaattaaaattattataaaatagtttttctttcaacacgtccgcctaaaagtaggtaattgatttttaagaaggaaagtcaacgaaaacacaatatggattcttatattctctgttctttattaaaatgatacaacgcaaaaacattattcgcttaacttctttttatttttttgtgtgaatgaaatatgtttaaaataaattaaaattttgatttgttagtcgcataaataagactggaatttcttagttactgtggttgttgctttaaaaattgcactacttagaggttcttgaatactttccagtttgaaaaaaaaataatcgacattcagcttagatcaaaatgtttcgttctccatgatttgcatacatttaacaattataatttatttagttgcttctttgtacaaattgaacaagcctaggcgatgtgcgggaaacaaagaatttttcgggcatgtttcaacatttataaattaaaactaaatacaactgacagaaaataatgatcgtaattacaagaattcataatgaaataatatgataaatattaataataataactgatagcaatagacaagctaaaagctataacaacaattgcgtgtgtacgatttgaactttaatttcaagattttcgactttctatttctctattaggccagatgttcagagttcaattgacgatcggtcggatcattccttcgtataaatatatacaatacacttgaaaacctaaggtcgctagctcattccatatatatatatatatatctatatctgcatatgtgtatatctctttcagtaaggtaggtggtagttggtctccgacgcggtttgccatatcctcgcccagaatacggctagtatttgctgctgcgatcacaagttggcgacatgattcccattccccgcacttagtccaggaggatctggaaggtcacggagcccttgcgatcgcggacactgccactgtactgaatattcttggcccaggcacggcactccacgtccagcatttgacccttgggcggggagttgaactgcacggccaccagcggactcaggtaacccggctggttcaggaacgggtagtagtagcttgggaacccttggctggggaagtagcggatgttctggaagttctccttgtccttgcccaagtgaccgttgcagctcacccagacttgctgccgctggagtacaggaaggcaacttgagtacagatccagatacaaaacatacattgtacttacctcctccgttttcgtctcattgatcacctttttcagatcatcaggcatatccttctcctccttatcgtacacttccggaatccagccaaagatcttattcagcttcaagaatatgcagggctggttcgtcttgtagccatagttattggccttggaacagccgccaaacagatccgtgttcaccacacacacatccgtgggttcgaggacctgaccgaagccgcagtgcttcatatcccgtccctcggtgtggttgtagtctataaaatgacaggttccagtttaaatgagttccatttactcaatttaaattagctcaccccggaggaagtcatcaatcagctcgatccagtaatcgctctcggccggtttcttgccatcgaaggcgatcaccgatcctcgctcggtctgctcactcaatggacggaatcccaggccgggattggtgcctatcagcgagtcttgcagcttccacttgggttccgtatcgctgatggtggacagaagaccctgcatgcaaatggtgaagagggcggccagaacgatgtagaagattgtgtagaacagcagtagctgacctgagggaaaacaaaacgtattttgtgagataagatccaaactaagtaatatatcaagtgttgattcacgctcattataatgttaaaaaagatatggataataaaactaaggggctaatttgaaccaattttatctcacgcgattaagattggattgtttccccaatttgccaaagtggaaccatactgactctgcgaaactggatgcatgggggatcaggaagtgggaatgggaacgggaacgaaatgagagattggggacagggcttatgcaatctaaacgggcacgcagataatcgaacgcttacggcgggtacagtaaatacgaccagaaacaataaacagataaacccggcatttttcagtatttcaatgtcattaacattgacgactcagctagaattcagtgggccgtttgtcacttccatgtggccagtggacacagagcgccggacatcgggagcccgactgggccaagccccatagcaattgcataaacaagcgccaacatcgacaaaccgaaattgacagcgaacccgaaacaaacgaacgattccactgtcagtccattggagctcaaatttcaaaacaaattaatcgtatgaatgaatatcgaatacaatacacggacgccagggtacagtaggtgacaaaggcatggggaaattacgcgttacggggtggatattgaccagttggcacctagctatcgatgggccttggtgggttcttttcaagagaccaggctaagaggtcgattaaaaaccacttgggctagtaaatcactatttggttccttcatatttaagtgccgaataataaatcagttgacaatcgatagtacggataactatcattgcacttaaatacgttaaaatattccaggcaatgttgtatacgtataagctatttgctgaaaaaaaatatatcgaagttaacttcaaaagaaccacaagacaatatccggtcttgaccagttccaacgttccatgacaggagatatcaattggtaatcaatggcctttgccatcgcttggtaacgacttttccatatttgagtttttagttgctcatcaaaatttcagagtacgccaaatggcccggctgcttgttgccaagtccaaatgggaaataattgcgttcaagtacaaggaaatgagtttggcaatgaccacagcgaactcagtcatagacaaatactggggcagacagtcgcattctggtggtgtgacgccagtcgtccaccgtaccaacgaaccaccaatccatctagccaccaccccccattgccaatcccaatcgccgcctgacaaggtgggtcgagcagacggcctgtagcgtaggccaccagtatttaatgtgtaaggaattctggtctacacgctttcgattacatgacggcagagtccccaaacattcttatgtcttcgccgaatgagggaccgccattgcctttcccaccgaaatcgataagtttactccacttcaatggctactagtacagaaatataaaatatatacaatgtatgtctattgcatggtgggcagaactatgtatgcagtgaatgtatttgaaatcatgaatatatttattacatcagttcatttttcactccccggggggcgttattgcattagaagactacatcgtaaaatcatggttactcgcaatttactttttattatcaagtaaaaactctatggcatagatgacaaatgattacttttttttcatgaaggtgacaccatgaaataaataaattataaaacatacaactttctatgtatgctactattcgattagagaatataactgaaaataaacttgagacctggagatgtactctctgtgtaggaggtcagtggaactcaatatggtgttttgaggtgtccaaccatgaagtattctttagccaaaggacatgccgcttcctctggctcgaaacttactcaacttttatataaaagtcaaacaagatgtcgacgggaggtatcaagtttatgcataacagcaaatgcgactcataaagggaactttacttatatgaactggcccccataccaggacattgtgcaaccgctcttggggatggacggagtggtgcaactcggtggcccggcttctataaaaaccctgaacaatcaaagagtgaacgaaggcttcgcttatccgtgtccgtccgtttatttgtccgccagtgcggtaaacaaacttaaaggactcgtgacccatataaagtcgccactcccacccgtgccacggacatccccatcctcattcccatccccgccatcaggaaacccaacccaaaagtgctggaaacgctagtcggtttgcatgaccaacgattgataacctcgctgctttctaggcgtcatccaagtgtaaccaccaaggccagcggaacttaataattaagttacgtgctagacgcacatatggccagaatccaggacaccttagcacaagctgtaaaagccactcgccgagtggcttaatttgcacacttgaccagcaagtcgtcctgttgtgggaaatcgtttaatagccagcacatgtgcaaccgcaattatgtaatgagtgtgtgaccctttcactccgcaaatgtcccacaatcatgaatagaaatgggtgaagcaacaagcttggccatttgaaaccatcatcgcttttcaaggtgtcaaatcgcttacttctttaatagaaaaaacttttgtatacaattaatcataatttaatcaatgaaattatttactcaagtaatcgcaccgtattatgcaaatccttactcagtttttttctgtgtgtttggaagcaacaattatgacgccatcgtgccgcaagtctcggccacgaagaaaaacacagaacgaagtggaataagacggaggatgcaacttgttggtgtctgtcgccatctaccccgaatcgcatccagccagattgtgtgggtcacgtcacccccattaccactaccattaccatctccacctccatcccaatctccatctccatgcccactgccagtttcaactcctgtcccgttttgtcctcattgccaataagccgtctccgtggcgccgctttatttgttgctgttcgccgcaccctttgtccatgcgtcaccactacacatacatacaaacttacacacacacccacacacacacacacacacacattcgaatactattactagcaccagcacacccaggatccttggccatctttcttttcgccgtctgtgtgcttggggcctatagcatactttgcggcattttaagtgaattaatttcacatgttaacgaggggaagccccgatggccccgcccacggcaaacattgcaagcgtttagtttgctgattatttttgggcctaaatacgggcgtgacggggtttattctcgttctggccacgttcttaatcgaagaattacccaaagagcagcaacaaatagatttgtcacgtttttgtttgagtacttaactaaagactaaaaaatttagctttttttatgatgattaggaaaactagcatgtgaatatttatactggcaaaaaaacgaattcgatatgcgaaagggaaatagttgaaaacccaagtataccaaagtaagaacttcgaaaaagaaagcgaagaatttcagaaaaggcttatctaattgtatagtattggatcgaaaaagaaatagcttctatactgatgattaaaaaactaatttaattttaaattagcttaagcaaattaggctagtttcctgcgctttaattgaattgtgtattttatcgcagacttgtcgctatcgtgacaattagttagcagcatgtcaatgtaagcagactgaggggcgtggcgggggcgattaatggggaaatcggatgtagccggcgaaatgcggttctagccggtttgagccagatttagaaactggctagggcagtgattgcctgcctttcctgctgctttgcggttacatcgatctgatacgctgatttcattacagaaatgcaacagagtcaaaaatcagaagaaataaaacttaagctcagttcggtaaagcaatacaaaatacaatgcatataatactatgtaagcaattattatcattatataaccttatttccaacattttgaagccaaatgcgatgtagagaattaaaatgtgtagcaaagcgaaagcatttcgaaaaccaaaaaagtaatcatgaacccactgaaccggttctctgagaaggttcatccgcacctaaaaaaaaaaaaaaaatacaaccggcacgaacctaaacaagttctcattgcgttaattaatggaaagcaaagcttagccaaccgtccaatgctttgccttcatttgaaatcggaattaatcggatggcgatcgtaaatcaaaatcagcgttttcgatctgctgtgatttttgtttgttttctgtctgtttagaattttgccacactgctttacattgtttatggggtcgttgccattttatttttccactaatgtcctgcacatgacttaaattaccgagcattaggcagtgaaaaatcaaaggacatgcaccacgaatttgtgcttaatgataggaattagccgaaggcaggccaaacactttacccactgtatattcagttctgcaaatagtttcatatattaaatagatatgcagccatatggcttttgttgtagcaggtgtgtcaatagttcttaagttctttgccgattggactgagaattagtataaaatgtcggaattagcataaaaagttattagagctcttcgggggtacacctttggcgtcaatgtaaataaattatacatcaatttaaacattcgataaacttgaagcgaacttggccaacttaatgaaaagcaaacaaatgacgtcaagggaacttttcattcgagctaccgataagcgaagtactcagaaaattgctaaacactatttaaaattggtagtgtttcagcagttggttctgcgatcggcatatttttcagatatatgtacattgatattgtgagagcgttaaatctcactatgcctctcagtgcgaaaccttgaatctgtttacagaacccattataagacggcaaatattattggcgataaaagcaaagtgctctctactcaccacctcatccctcacgttttccccaattcccctccctttgggaacgtggatccgtgtccattttcgaaagtcaagaattcgcattaacgttgaaatatgctagcctaattaaaaaggcaattcaacaatttagtagattgaacgtgtgtagccaaatgaacacacatatgtttaatgttcgattctaaaactttctagattcttttcacttagccattatcacattgccagcggttgctcaaggtgattgtatttcttaataatatttttatgactgccttaagaaatcccacttcatcatgttgtctcgtaatgagtttatctattttatggcgttgactaaacattttcgagacaccgcaacggagatttccgtagttgcttctttacctcatcccgtttcccacactatgactcgccaaatcgactgataagcctgtaaatacgaccgcacgctcctcatatatagtttccattaccatatgacggacaagtgtctagttatatacaataaacaatcgcatttttgtttctatgtgcttggagcttggagtggatgcagatatctcatcggaggggcatgcagataagtactggagtgcctatactgcatggaaatttgggaactagcattcaaacattcaaattatatatttttcgagttaaaactaattctaaaatgttaaatgtatgtatttaaaaaccacaaacagactcaatggatagaatagaaatgactcacagtggttttagtcttatcctcttgatggaacctaattcttaatctttttcaggcattcattttgaagttgtctactgattttgtttgttattcagtagagttgtaaagaacttactccaactttttccggtgcgtccgaagaaggtgccttcctggggattgtagatcatttccgagaaggtttgcttcttcgctggctgcgggaattcgaattcgcctttggcgccctttccgttattctttgacattgcggcgctgttctttcgcacttgtttacggttagcttttcagtattcgattcgattcgaaaatttggtttatacttttcgttgatgacgtggacggcgcgaaggctacgaaaactgatttatgtatacgttgtgctgtgtatatgcgatgattcagcagactcgaaactgaattctcatttattttcgcactcgcagtactcttgaatatttttgaaaaacgtgtaattatgcaattatttgcgcctcgactgctcgactggtcttagagttaggaaaataagttagaaccgattttgggcgaaataagccgaatcagaagcacaaacaaacgggctgggagccacgagaagttgttgccaactcttggtttccctgcttcctgcgactgcgaatggcgatgcgtgctgcgtgttgcgctctcggcgaaagatcaccaactaaccgaacgcagccccaagtcacccagcaaggcgaaaactcagcaccagtgttcttcgcccctcaacactcacacaggctcaccacgcgcctcgctctttctctctcgttctctctatctcttgcgttctcgcaacaaaagcttcaagataagagtgattgagcactgaggaaaacggggtacattttcagataaatagttaaggtaaaaagcaaagaagacttttctgaccaaattgactcttaagatcgtcaagatatgtaggtatttctattatttccgatattaagcagtctaataacgcattggtttcccatttcaagctcatgtgagtgatatcttagaaagaattctgttgcaagcgattcctacaggacattactcatccgcaatgtgggctgacgtctttgtttaaactctcagatgttattgggtatacgaaacgtgacccaaaaaagcattccacgtatctagggtcaattttcttgcagtgtgacgtcgacagctgttgaacgtattcgacactttgccaagcaacatgaaaaaggccaaagcaaaagcgttggaccaggggggaggttatgtggctaaggtgtgagtgtgtgtgagctgggggtttcgtgtgtgttttacctcttaatgttctctctatctctctccatctccttagctggctacgcaaatagaataaatgattgagtgcagacagtggccagacaacaacacacccgagggcagttgcttgggccatgcaattttcgccagtgcagctaagtgctttgcattcaaaggctgtggagcctagaccgcacttcaccctctaagaatgtgatacgctcctgctttataaatattaaaatacaaagcacaaagaaaatcacacgcatactagcacaagtcgcactctctctctctatctcccgttctcccactctggcgttgacatgcgcggagagttgagtacattggctccactacacactccacccacgc

SEQ ID NO: 19778 - DNA, 2184 bp, DROSOPHILA
gatctttcgccgagagcgcaacacgcagcacgcatcgccattcgcagtcgcaggaagcagggaaaccaagagttggcaacaacttctcgtggctcccagcccgtttgtttgtgcttctgattcggcttatttcgcccaaaatcggttctaacttattttcctaactctaagaccagtcgagcagtcgaggcgcaaataattgcataattacacgtttttcaaaaatattcaagagtactgcgagtgcgaaaataaatgagaattcagtttcgagtctgctgaatcatcgcatatacacagcacaacgtatacataaatcagttttcgtagccttcgcgccgtccacgtcatcaacgaaaagtataaaccaaattttcgaatcgaatcgaatactgaaaagctaaccgtaaacaagtgcgaaagaacagcgccgcaatgtcaaagaataacggaaagggcgccaaaggcgaattcgaattcccgcagccagcgaagaagcaaaccttctcggaaatgatctacaatccccaggaaggcaccttcttcggacgcaccggaaaaagttggagtcagctactgctgttctacacaatcttctacatcgttctggccgccctcttcaccatttgcatgcagggtcttctgtccaccatcagcgatacggaacccaagtggaagctgcaagactcgctgataggcaccaatcccggcctgggattccgtccattgagtgagcagaccgagcgaggatcggtgatcgccttcgatggcaagaaaccggccgagagcgattactggatcgagctgattgatgacttcctccgggactacaaccacaccgagggacgggatatgaagcactgcggcttcggtcaggtcctcgaacccacggatgtgtgtgtggtgaacacggatctgtttggcggctgttccaaggccaataactatggctacaagacgaaccagccctgcatattcttgaagctgaataagatctttggctggattccggaagtgtacgataaggaggagaaggatatgcctgatgatctgaaaaaggtgatcaatgagacgaaaacggaggagcggcagcaagtctgggtgagctgcaacggtcacttgggcaaggacaaggagaacttccagaacatccgctacttccccagccaagggttcccaagctactactacccgttcctgaaccagccgggttacctgagtccgctggtggccgtgcagttcaactccccgcccaagggtcaaatgctggacgtggagtgccgtgcctgggccaagaatattcagtacagtggcagtgtccgcgatcgcaagggctccgtgaccttccagatcctcctggactaagtgcggggaatgggaatcatgtcgccaacttgtgatcgcagcagcaaatactagccgtattctgggcgaggatatggcaaaccgcgtcggagaccaactaccacctaccttactgaaagagatatacacatatgcagatatagatatatatatatatatatggaatgagctagcgaccttaggttttcaagtgtattgtatatatttatacgaaggaatgatccgaccgatcgtcaattgaactctgaacatctggcctaatagagaaatagaaagtcgaaaatcttgaaattaaagttcaaatcgtacacacgcaattgttgttatagcttttagcttgtctattgctatcagttattattattaatatttatcatattatttcattatgaattcttgtaattacgatcattattttctgtcagttgtatttagttttaatttataaatgttgaaacatgcccgaaaaattctttgtttcccgcacatcgcctaggcttgttcaatttgtacaaagaagcaactaaataaattataattgttaaatgtatgcaaatcatggagaacgaaacattttgatctaagctgaatgtcgattatttttttttcaaactggaaagtattcaagaacctctaagtagtgcaatttttaaagcaacaaccacagtaactaagaaattccagtcttatttatgcgactaacaaatcaaaattttaatttattttaaacatatttcattcacacaaaaaaataaaaagaagttaagcgaataatgtttttgcgttgtatcattttaataaagaacagagaatataaga

SEQ ID NO: 19779 - protein, 309 aa, DROSOPHILA
MSKNNGKGAKGEFEFPQPAKKQTFSEMIYNPQEGTFFGRTGKSWSQLLLFYTIFYIVLAALFTICMQGLLSTISDTEPKWKLQDSLIGTNPGLGFRPLSEQTERGSVIAFDGKKPAESDYWIELIDDFLRDYNHTEGRDMKHCGFGQVLEPTDVCVVNTDLFGGCSKANNYGYKTNQPCIFLKLNKIFGWIPEVYDKEEKDMPDDLKKVINETKTEERQQVWVSCNGHLGKDKENFQNIRYFPSQGFPSYYYPFLNQPGYLSPLVAVQFNSPPKGQMLDVECRAWAKNIQYSGSVRDRKGSVTFQILLD

SEQ ID NO: 19780 - DNA, 5609 bp, DROSOPHILA
atttcgtgatttctttgtgtttgcttacaaaactttttttttttttgtttttcgctggagtttacaattccaatttgttaaatatcctataatatctgtttgtttatgtaatttgtaaattttcatatatgtatgcatgtacgtttcatgtaatacccattaatccttcctaagcctgttacaatttccatttactttgcattgtgttttaaatcgaatcgaagaatatttaattgtcttgttcgaatccgcgagcaactaaatcacggttccgatttgggagggcagtttaacatcgtttctcacacaatttgctgcgactactattcgcttaatcattcatacgtctgttgttgtagtttagattttttaatttttaaatatatagttaaggcttaaataaattacaaaaaaataaagtacacttttcattttttatatatatgtttacatgaaacctagcgaagaattaaacgaaattatataagcgcaagatcacaagcagttttgtatatagttggttggttgtatttataagttatagttctttctgcctgtccacttcgtaattgtatatatttataattttataactttaattcgacacgtaaaaagaaaaaattcagctaaaatttgtgtgttcctgttgagttgtcaacggttgtgttacgcatggttgtgattggataggtttggattgggtgttcggttcgttctagttttattgttgattattttactggttggccgatcgaattgtgacttcactatagcgtagagtaaacgcaaaactaatttcgcacagaatggattgcagcgaacgggcagcccaatagccggatgtcgcccgccgcctattgaagagaagggatagcggtctgaatgtcctttcggttgagggatgcgtttggttgtgtgtttgggtgttttggatgcgcgactgtgtgtgtgcgagtgtgtggccgttggcagctatctatccactggatatgggatatatctactttcccgccttggccttcttctcgttctcggaggtgatcttgttcttcagatgatccttgtagtccagaatgccgcccttccacttggttaccgtctccttttcgcatacccaaatctcctcagccacctggaaacaaaagaatgcgcgattacaaacgtgataactattcgtgaaggaaaagttagcttacctgattaatcagacggaaatcgtgactaactagcaccatgccgccatcgaaatcgttgatcgcatccgcgagcgcatcgattgtctccatgtccaagtgattggtgggttcgtcaagtagcagaagatggggcacctgccaggcgagccaggcgaacaccacgcggcaccgctggccatcggagagctggcgaatcggacacacctgctggcgaccagtgaggccgtagcgaccaataatcttgcgcatctcctccttctccttgacgtcagggaaggcacgcatcatgtactctagcggactggcatccaaatcgagcagctcgtgcagatgctggtggtagcgggcgatgcgcagatgggagttcttgcggatcatgccggaggtgggcaccagatcgccataaagcagcttcagcaacgtggacttgccagctccgttgggtccaaccaaagcgagacgtgtgtctagatcaattccgaactccagatttttgtagatccacggtgtctcatcgttgtatcggaaattcacgttctacggcatacatttcattagttagaaacctttaaccattaccaaatcatttaaataaaaaaccaacctgaaccataatcacgggtggcggcaccttgccgcacgatgggaagtaaaagttgagcaccttatcgtcggacaccttctctgtgagtccctgagcaaccatcttggccagcgtcttctccttggactgcgcctgtcgcgccaacttggcggaaccgtgaccgaatcgagcaatgtagttcttcatgtgcgaaatctggtcctgttcccagttgtactgcttcatctggttttccagcagttccatgcgtgtgcgcacaaaggcctcatagttacccgtatagtacttgagtcgcttgcccgtcaggtgaatgatgtttgtgcagacaccgttgaggaaatcctgcgagtgcgagatgagcaccaggattcgcttgtatgtcttaagctcctcctccagccacacacaggcgtccaaatccaagtgattcgtcggctcgtccagcaacagcagatggggcttcacaaacagcgcgcgggccaaggcgatacgcatacgccaaccacctggagggcaggggaaatataacaaattcgttacacttgacgaaagaattcgtgcacaaggagagttctacacacctgagaagtccttggcctgtttctgttgcatggccttgtcgaagccaagaccgtgaaggatgcgggccgccttgacctctgccagatcggcggacatatcgtccagccgctcgtagatgtcgatcagctgctcctgagcatcatcttcctcgctcatggccagctcttcggccagcttctctagcttaatgcgctcctcatccacctccatgacgcactgcagcgcactctttgaactggccgggatttcgcgcgtcaagtggaagatgtcgatgtgcggcggtaccggcacctccctgccgccaagcacggccagcagcgaggacttaccgcatccgttcaggccaatcagaccgtagcgacgcccgcaattcaactccagcatggtgtcctgcagcagctcggagccaaagaacgtgatcgaaaagttggcgatcttgacgtcacgggaacgcggatgcaccgccagcgatccggtgcaggatcgggcctccgcactgatccgggcctcctcctccagcttggcgcacagcttctcctcctcggtcagttcgcgttccgggacaccattggccttcttggtggagggtatctgttggatcttcttgttgcgcgcatccttcttcttctgcgcctcccgtttcttcgcggcggatgacattattccggctgcaaatttacgaaatcggtatcttatttagggggattttgttgtgagtgttattcagtcgttgccagtaatgacagtatgatcaaactatttttttttttagttctatattttttgaaaatgttttatttttaagtagtagtccctggaaagggttacacatttcccacaaggtcgtagaaccggaaaaggtttcaagttatgttgtggttgattgccttatctacgaaagccagacacaagatcgtcatttttttcgttttgattaccttaccgattcagtattcccgatctaatcgtttaaacgtgtttacaccaattttaggattttttttaaataaataaataaagctgaaaatctaaaccctttcaatatcgattcgccgttagctagtggaaataaatgcagctttgccattcgcacttagacattaaaaattttatagtcaagtacaagatatcgattgaaaattgtttgctttgcacactcaaaagttctattgttctttgtttgtttccctttgtgagctacctaaagaagtccacattgcctagttttgaagtcataaatcaaacaaagtggtacttgttgtcaacatatcctaataaattataaaattatcgtatttatataaaatacatttgatggacattttgcagatccttggaagcattgtgcccggtcttttcccgccattatttctatgggcagcacagttcaattaacaggatcacgttcaaggccacctggaattcgctctctgtctctttacctcccttgctcaccacccacacttgcatacacatagatcacgtgtaaccaactgtttcaacaaagaacaaataaaatctgaactcaattttaaaattagacagcgtcagcaaaaactcaaaaatttccactgtgctgtctgcgctccactgtgccgcattctgcctccctcacacgcgctctccctctctttctctgttgccgaggggcatatttcttcctcttcttcgtacggccgggatgtctgaatgggatgcatgattcactgggacacactgttcacaatggagcccattgatggcagttggaagttgcaggaaacgcggaaaaactgcattgcacgatctgctgtcaccatcaattgcccccacctccatcgcacccacacacacctggccgatgttacagcacgcacacacggacacaaacacaggcaaagacacacagtcaggcagtcgcagaaatggtaaaattgcatgtgtgttgcgctgcgcacattattgaattttccacggcgagatgacgacgacgacggtgtgcaattactcaccttggcgtcgattggacttgactgacaatcaaggatgatgggcgagagcagtgcaaaggagtgtcctttgaagttcgcgaaggataacggtacggcgacgtctacggtaacggaacgtaacggaacagatcggttcggttcggatctcgcacacacacacgcacgcacggagcagctgctgaaaagtgcctgctgcctgttaccgttttcggtagaaaaagagagagacgactgaacggaacagaacgggagaaaggctccacgtggtggcgatggcgtttggcacggaacccgcgaagcgggagaggattcggtcgccaatgcgttaaggtcacactggcacacgggcgaggggcacactggcagggccagcggatcagctagtatcgctacgattcaagtcttaaataatttgtaaaatgaaagaaacatataatatttaatagcataaataagtttaatttcataaaagcaatagttttgattcgctcaaagctgaatgcattatatatttctatgtaatataatattgatatgctgtattcagtacaaagaaattgagacactgagacaatttcataaaaatttgaaatacttgtcaaacttattcttttaagtgtttccaaaatatctataaatattaaatagcttgaagtgaacgttagaatatttgttttggacactaaacgatatatcagcagataacgccttcgaaattcggtcacgtccaagtcccgcatcgtctggcctcactaaccaagtgtaaacaaaagttgtgttgtgaagttgttttcctttggtccaaaaaggaattggtcatgtcgaagttgagcgacactaagatcccgatcacggagttcctggaggcataccgtcgccagccgtgcctctacaacacactgctggactcgtacaagaatcgtgtgtcccgggaggaggcctacggagcgatcatccggtccctgaagataccccaactgacagtgtcggacataaagctaaagatcaagagcgtgcgtaccgtgtactctaaggagctgcgcatctggatgcgtgagaaggagctgggcaggacctacgaaccaaagttgttttggtttaggttggccgactcctttctacgctccgtttccctctcccactgcaaaagggtaggatttcacgatgttcttatgtcaatgttaacctctgacccaccaccagcagggaaaaaataacagttccagtgctcaatta

SEQ ID NO: 19781 - DNA, 2080 bp, DROSOPHILA
ttcagtcgtctctctctttttctaccgaaaacggtaacaggcagcaggcacttttcagcagctgctccgtgcgtgcgtgtgtgtgtgcgagatccgaaccgaaccgatctgttccgttacgttccgttaccgtagacgtcgccgtaccgttatccttcgcgaacttcaaaggacactcctttgcactgctctcgcccatcatccttgattgtcagtcaagtccaatcgacgccaagccggaataatgtcatccgccgcgaagaaacgggaggcgcagaagaagaaggatgcgcgcaacaagaagatccaacagataccctccaccaagaaggccaatggtgtcccggaacgcgaactgaccgaggaggagaagctgtgcgccaagctggaggaggaggcccggatcagtgcggaggcccgatcctgcaccggatcgctggcggtgcatccgcgttcccgtgacgtcaagatcgccaacttttcgatcacgttctttggctccgagctgctgcaggacaccatgctggagttgaattgcgggcgtcgctacggtctgattggcctgaacggatgcggtaagtcctcgctgctggccgtgcttggcggcagggaggtgccggtaccgccgcacatcgacatcttccacttgacgcgcgaaatcccggccagttcaaagagtgcgctgcagtgcgtcatggaggtggatgaggagcgcattaagctagagaagctggccgaagagctggccatgagcgaggaagatgatgctcaggagcagctgatcgacatctacgagcggctggacgatatgtccgccgatctggcagaggtcaaggcggcccgcatccttcacggtcttggcttcgacaaggccatgcaacagaaacaggccaaggacttctcaggtggttggcgtatgcgtatcgccttggcccgcgcgctgtttgtgaagccccatctgctgttgctggacgagccgacgaatcacttggatttggacgcctgtgtgtggctggaggaggagcttaagacatacaagcgaatcctggtgctcatctcgcactcgcaggatttcctcaacggtgtctgcacaaacatcattcacctgacgggcaagcgactcaagtactatacgggtaactatgaggcctttgtgcgcacacgcatggaactgctggaaaaccagatgaagcagtacaactgggaacaggaccagatttcgcacatgaagaactacattgctcgattcggtcacggttccgccaagttggcgcgacaggcgcagtccaaggagaagacgctggccaagatggttgctcagggactcacagagaaggtgtccgacgataaggtgctcaacttttacttcccatcgtgcggcaaggtgccgccacccgtgattatggttcagaacgtgaatttccgatacaacgatgagacaccgtggatctacaaaaatctggagttcggaattgatctagacacacgtctcgctttggttggacccaacggagctggcaagtccacgttgctgaagctgctttatggcgatctggtgcccacctccggcatgatccgcaagaactcccatctgcgcatcgcccgctaccaccagcatctgcacgagctgctcgatttggatgccagtccgctagagtacatgatgcgtgccttccctgacgtcaaggagaaggaggagatgcgcaagattattggtcgctacggcctcactggtcgccagcaggtgtgtccgattcgccagctctccgatggccagcggtgccgcgtggtgttcgcctggctcgcctggcaggtgccccatcttctgctacttgacgaacccaccaatcacttggacatggagacaatcgatgcgctcgcggatgcgatcaacgatttcgatggcggcatggtgctagttagtcacgatttccgtctgattaatcaggtggctgaggagatttgggtatgcgaaaaggagacggtaaccaagtggaagggcggcattctggactacaaggatcatctgaagaacaagatcacctccgagaacgagaagaaggccaaggcgggaaagtag

SEQ ID NO: 19782 - protein, 611 aa, DROSOPHILA
MSSAAKKREAQKKKDARNKKIQQIPSTKKANGVPERELTEEEKLCAKLEEEARISAEARSCTGSLAVHPRSRDVKIANFSITFFGSELLQDTMLELNCGRRYGLIGLNGCGKSSLLAVLGGREVPVPPHIDIFHLTREIPASSKSALQCVMEVDEERIKLEKLAEELAMSEEDDAQEQLIDIYERLDDMSADLAEVKAARILHGLGFDKAMQQKQAKDFSGGWRMRIALARALFVKPHLLLLDEPTNHLDLDACVWLEEELKTYKRILVLISHSQDFLNGVCTNIIHLTGKRLKYYTGNYEAFVRTRMELLENQMKQYNWEQDQISHMKNYIARFGHGSAKLARQAQSKEKTLAKMVAQGLTEKVSDDKVLNFYFPSCGKVPPPVIMVQNVNFRYNDETPWIYKNLEFGIDLDTRLALVGPNGAGKSTLLKLLYGDLVPTSGMIRKNSHLRIARYHQHLHELLDLDASPLEYMMRAFPDVKEKEEMRKIIGRYGLTGRQQVCPIRQLSDGQRCRVVFAWLAWQVPHLLLLDEPTNHLDMETIDALADAINDFDGGMVLVSHDFRLINQVAEEIWVCEKETVTKWKGGILDYKDHLKNKITSENEKKAKAGK

SEQ ID NO: 19783 - DNA, 2274 bp, DROSOPHILA
cacaggacactagaaatagctgctggcaacagctaaccaacccaacccagccatcccccagccatcccatccatcccagccatccaagacatccaagccatcagagcccagcaccacccaactattcctatccccactcatttcagcactgagagcttcgccacttttatgcaaataatgtcttccaggaatttttgttatttatagttaagatagcaaaacgtgtggatgtctgggatatatctcaaaaagtgtgtgcattagtagctctatgtctcctgctcgcacacacgctatgtccaagttattgcttcatttcttgagcaaacttcttcacctgccaaaagtggatactttcgaaggatggcaaaaaggtttcctgatgagttgggagttagaagttgggcgttggacgagttttttcgatgtcaaactttaacggaatatctgcaactatcttccggctttctgccactgccacattgccattgccatcgcatgaaagtctggcagtcaaattacattttgtagctcataaaaatgttgtcattaaagtttttggcagctgacttcggattcgttgctctctctcattgccttacattccgattttgcatcttttattggtcataatttaaattggcatttgctttttgtcttaatttggttacaatgattgcgactcggcacagtgacatttgcaaattctcttgagattttctttgactgacattgaaatttgacgaataaatttgattatgggagagaaaaagttctaataaatgtgtaaaagtgtatgtattttatgaacatataaaataaaataaaaacaaatattttgacaacaattatgactaaattgaacgagatcttagctcacaaaattgaaaccctattgtggacattcttcaaattgatgtgtaaattataccattcaagtatcttatgcgtaaaataaacaacatgaatacttttatgaattctttgcaacaagactcacctaattcaacgtagagttttggtcgtatattctcctgccaggcactttgattaccaatcacgaggactgtaagtagtaggaagacttgcatccaaccgtatccgtaaaatttgcttaacttatgtttcattattgttgcttttgccgttgcacttttcaaatgcattttgtggccttctggcaccgatgagcagactgttgccatccttggtgacgagcttgaagtgatccacaacactttcgtttcccacaaacttcagtacatcttcgggacctggaagccggaaagaaaagaggattataaataaattgcaccaggcaatggggagtggatagaagccggctggctgggagacagatgagatggccggatggttttggttcggccagcaaatgcctaattaggcaattaggcggcgttaaaggcgacaaaaggcagttgagaagaaaggaaaatggcaagcggattatctggcagcagcgtaaaaagcagtggaatatttagccacatggcgctgcaaagaggaaccaacgcatatgaagttggaaaaaaggaaatggggaaatgaggcgcggggcatgacgctgggagtcctgtcctgatggcaacattcccacccgctgatatgcaaaaaagggcagctgcacttagaatggcccgtttagcaacagcaacataatcagcagctgcaagtacaatttttgtcgtttgtttactttggttatttgcatctactttatgcagccgttccggaaaacctttgttgccttgccacaaactgcaaccagttcatccatctgtctggccgataaaaagagaagcggttgccacggggattaagccgtaaggtaaactctgaagtttcaataatttatgtagtttcttttgtgaaataataaacgcgctttaagaaatatgcctaagtttataaacacaaaaaaaaaaatgatctaagaacgattatcgaaaatagtaatctcactttaaaacgtttgcctttaaaagaaagtttttaatataatcatatacataacatttttaatgaaatcctttttggattgcatagatcccagtgctttcatctttttatcgcgcatttagtgcttatttcaccaccagccagcattggatcaatgatgttgcagaagctaaaaataatttttcttattttccccaacttttttgcctttccagtgagcttttaacttttaactgcaaatgttcggtcaacctcaaaagagcaaaaaagtttttctcgtttttttttgtattt

SEQ ID NO: 19784 - DNA, 3780 bp, DROSOPHILA
aaggccacaaaatgcatttgaaaagtgcaacggcaaaagcaacaataatgaaacataagttaagcaaattttacggatacggttggatgcaagtcttcctactacttacagtcctcgtgattggtaatcaaagtgcctggcaggagaatatacgaccaaaactctacgttgaattaggtcccgaagatgtactgaagtttgtgggaaacgaaagtgttgtggatcacttcaagctcgtcaccaaggatggcaacagtctgctcatcggtgccagaaacacggtttttaatttaagcatacacgatctcgtcgagcagcagcgattggtctggacatcgccggaggatgataccaaaatgtgtctcgtcaagggcaaggatgaggaggcctgccagaactacatccgcatcatggtggtgccatcgccgggtcgccttttcgtttgtggcaccaactcgttccggcccatgtgcaacacgtatatcattagtgacagcaactacacgctggaggccacgaagaacggacaggcggtgtgcccctacgatccgcgtcacaactccacctctgtgctggccgacaacgaactgtattccggtaccgtggcggatttcagtggcagcgatccgattatctaccgggagcccctgcagaccgagcagtacgatagcctaagtctcaacgccccgaactttgtgagctcatttacgcagggcgactttgtctatttcttctttcgggaaaccgccgttgagtttatcaactgtggcaaggcgatttattcgcgcgttgcccgcgtctgcaaatgggacaaaggtggcccgcatcgattccgcaaccgctggacatccttcctcaagtcccgcctcaactgctccattcccggcgattatcctttctactttaatgaaatccaatctgccagcaatctggtggagggacagtatggctcgatgagctcgaaactgatctacggagtcttcaacacgccgagcaactcaattcccggctcagcggtttgtgcctttgccctccaggacattgccgatacgtttgagggtcagttcaaggagcagactggcatcaactccaactggctgccagtgaacaacgccaaggtacccgatcctcgacccggttcctgtcacaacgattcgagagcgcttccggatcccacactgaacttcatcaaaacacattcgctaatggacgagaatgtgccggcatttttcagtcaaccgattttggtccggacgagcacaatataccgcttcactcaaatcgccgtagatgcgcagattaaaactcctggcggcaagacctatgatgttatctttgtgggcacagatcatggaaagattattaagtcagtgaatgccgaatctgccgattcagcggataaagtcacctctgtagtcatcgaggagatcgatgtcctgaccaagagtgaacccatacgcaatctggagatagtcagaaccatgcagtacgatcaacccaaagatggcagctacgacgatggtaaattaatcattgtgacggacagtcaggtggtagccatacaattgcatcgttgtcacaatgacaaaatcaccagctgcagcgagtgcgtcgcattgcaggatccgtactgcgcctgggacaaaatcgctggcaagtgccgttcccacggcgctccccgatggctagaggagaactatttctaccagaatgtggccactggccagcatgcggcctgcccctcaggcaaaatcaattcaaaggatgccaacgctggggagcagaagggcttccgcaacgacatggacttattggattcgcgacgccagagcaaggatcaggaaataatcgacaatattgataagaactttgaagatataatcaacgcccagtacactgtggagaccctcgtgatggccgttctggccggttcgatcttttcgctgctggtcggcttctttacaggctacttctgcggtcgccgttgtcacaaggacgaggatgataatctgccgtatccggatacggagtacgagtacttcgagcagcggcagaatgtcaatagcttcccctcgtcctgtcgcatccagcaggagcccaagctgctgccccaagtggaggaggtgacgtatgcggagccagtgctcctgccacagcctccgccgcccaataagatgcactcgccgaagaacacgctgcgcaagcccccgatgcaccagatgcaccagggtcccaactcggagaccctcttccagttccagcccgacggctacaacacccaacagtcgtatcgtggtcgcgacaacttcggaacactgcgttcccaccaggtgatgggcgacaattacaggcgcggcgatggcttttccaccacccgcagcgtcaagaaggtttacctttgagacgggagtggggcggctgaaaccagtcagggactaattacccaaaatatggctgtaaacaacacaaacacacgtaacagaagtcttggtcgcgcaagaagacagccgccccgtcatggcattgttctggctcctcgcccgtaatgtccaacagcagcagcagtccggctccgccctccagcagtcccagtccgcaggagagccccaagaactgcagctacatctaccgtgattgattgatatgcaacaccaaatcgatgccactcatccaggcccagtctacgcacgcccagccacacccacagtcgcacccgcacccgcttccgccacccggtccgaccacgcccccagcacagccacgcgccagaagtccaatgatcggcaggacatatgccaagtccatgcccgtgacaccagttcaaccgcaatcgccgctggctgagacgccctcctatgagctctacgaacgccactcggatgcggccaccttccactttggggatgaggacgatgacgatgatgatgagcacgaccacgaagacacctcatccctggccatgatcacaccgccgccgccctacgacactccgcatctgattgcatcgccgccgctaccgccgcctcgtagatttcgctttggcaacagggagctgttcagcatgagtccagccggaggtggagccacacccaccgcctcggcaggccaacgcggcagcagcgccatcacgcccacaaagttaaccatgtttgccgcaccccaaatggccacccaactcaaccggaagtgggctcatttgcaaaggaagcggcgcaggcgcaacagcagctccggcgattccaaggagctcgacaaactggtcctgcaatcggtcgactgggatgagaacgagatgtactagaacgcagaccaacaatgagatagcagaaacactttgattcggaattttaacacctttgcatattttgaatatgacttcaattttaaaatgcgtaattatgttcttattttttaaagaacgctttagagaagttttctgctacctcaaatagtacacacaactcatttctaacgtggcgctgagatataggaataatcactcccccttccctaaaacttaaagtagcaatcgaaaagatcattcattagcgatagaaactggatggggatttacttacacacaaaaagccagagaagttatacacgaagtttatagttatatagcctttatacatactccccgatctgctaagtatacacaagcaagcataacataacatacgtatatatgactctatatataccaatagatttcatagacgattcacatggatcggctacgctaaattagagctgatattgttaattacgattagagaa

SEQ ID NO: 19785 - protein, 771 aa, DROSOPHILA
MQVFLLLTVLVIGNQSAWQENIRPKLYVELGPEDVLKFVGNESVVDHFKLVTKDGNSLLIGARNTVFNLSIHDLVEQQRLVWTSPEDDTKMCLVKGKDEEACQNYIRIMVVPSPGRLFVCGTNSFRPMCNTYIISDSNYTLEATKNGQAVCPYDPRHNSTSVLADNELYSGTVADFSGSDPIIYREPLQTEQYDSLSLNAPNFVSSFTQGDFVYFFFRETAVEFINCGKAIYSRVARVCKWDKGGPHRFRNRWTSFLKSRLNCSIPGDYPFYFNEIQSASNLVEGQYGSMSSKLIYGVFNTPSNSIPGSAVCAFALQDIADTFEGQFKEQTGINSNWLPVNNAKVPDPRPGSCHNDSRALPDPTLNFIKTHSLMDENVPAFFSQPILVRTSTIYRFTQIAVDAQIKTPGGKTYDVIFVGTDHGKIIKSVNAESADSADKVTSVVIEEIDVLTKSEPIRNLEIVRTMQYDQPKDGSYDDGKLIIVTDSQVVAIQLHRCHNDKITSCSECVALQDPYCAWDKIAGKCRSHGAPRWLEENYFYQNVATGQHAACPSGKINSKDANAGEQKGFRNDMDLLDSRRQSKDQEIIDNIDKNFEDIINAQYTVETLVMAVLAGSIFSLLVGFFTGYFCGRRCHKDEDDNLPYPDTEYEYFEQRQNVNSFPSSCRIQQEPKLLPQVEEVTYAEPVLLPQPPPPNKMHSPKNTLRKPPMHQMHQGPNSETLFQFQPDGYNTQQSYRGRDNFGTLRSHQVMGDNYRRGDGFSTTRSVKKVYL

SEQ ID NO: 19786 - DNA, 5011 bp, DROSOPHILA
tattttaaaaataaacaatatcaaaaggcaaacagcagcgctccgttaatgattttaaatgacgcaattggaagacttattattcggactgataaaaaccgatgtgaccgcgcgcctacaaaacgtattatatataaataaaagccaatcgatctggctttaagtatatttatcagccagcggctgaccattgtcaagtgacgactgagatggttgtgatatagtgttatcagcgttatcttatcaccctacagggcaaacatcagtgtttacgtaaatcctaaagtatgtcatatgccccatctgataattttgagaaactgtatagcaacatcttttttgtgattttgctatcgtaatcttgtgtcaatatatcgccaagtgtattaaaaataaaacggatttgcttttctgactactttcatttgatttttattgaaaaggaattgaaagtgttttgtgtctcttagccgtctcaatttatttccttaaatttcaatcttcgcaattattatatcataagcttacaagttaaccgaagttacgattttctgttttccaaatgttgcacttttgtcgtctatcaaaatgtgatgtatatgtatataggcttcacttttgactaagttattaataaatatggtaaattctgaagctagctgtaaatatttagatttttggtagacaaaattggtctgttttcggttacatgttacatagcggcagactcaaaaatgattcttaaattttctttataaatttgtaatatctagggattcgtttgttaattcattggaaatggcagtttggattaattgctgtaaatttgttgcatttgattgatttactatttactggtcagcgccaaatttactggtcagcgccaaacgagattcaggctggtttagttccatcctgtccattgagttcccatcttggtggtttagctttacaatcttacgtctaactttcatcgtaaagtgcataaaaagttattggaattcaaaatttgtatgtttataggcgttgcaagtcttgaatatatattttgtatgctttataacgcggaaaacaagtttaaataatttggatttttaatgacattcgaaaatctgaacctttcacaatcttcactacaacatctggtggtttgcctctggtaggattgtcttagacgagacttatcgtcctcacacacctctgataccgagattcttgttaatcggagattcttgttattgtgtttgctattatgttatgttgtaatagtgtggtacaatttaatcaatgaggagctcatagtgcaccgatccgattctctccttgcgatcgtgtatgatgttgcgagcccaagccctgcactccacgttgatgatgattccgcctgggtgatacaaagtcattgaaaatagggatcttggaaatgcaggcactacttacgtttggggcgctggaagtgcaccgccaccaggggactcaagtagccctcggagttctggtagggatagaagtagccggggaatcccctgattggcaggtagttgacagcaccaatgttctcctggtcggctgggttctcgccctcgcacgatacccaaatggtgtttagctacgcccggaagagaatcttagttagtcttctagatatctggcattacgttcatccaactaccttttctggctgcgtcttctcgacctctgcgatgtaggtcttcaagctggcgggcatgttcgcgggcaagtcattcgatctgttgtagtactccggaatccagccgtagatcttgttcagcttgaggaagatacacggcgcactcttgtggtagctgtagttattctccttggtgcacggcgaccacgtcttgatgtccacgtcgcacacctgaccctttggcggcggctggttgtagtcgcagttgtagatgttctgaccacggccgggtgttagaccaggtactttgtacactgcagggttgagatacaaagattcatgtttagaatgcatcatttttccacaattaggattgaattgaccatgattgacttgatcagcttagttttagattcaacaaagagatctcattcaacgaataaattgatggcattttactgaggcaagcaataagtaagtaaatgcctatgaatatgaaagtacttacccgcaaggaaatcatccagggagtctgtccagtgcttgtagttctcgtgttgggtgcccttgtaccagatcaaagtgctttccacattgtccaccggtggcaggggtcgaaaacctagacctgagagatcacaaaactcgattagtgctgaatccggcgaaatcctttacaattgcgactcacctggatttgtacctatcagggaacggtccagggtccacttgggaatgcgaggatcgagagtttggaagaaggcccacatgcagatggcaacgagggcggctaggactccgtagaaggccacatagaagattccgattttggctgcgatgggaagagagagcaggaaatgtttattgaattacagtgattaaagccgttcctaacagcgatacgcagtcaattgaagcgattgaattaattaattgccactggcccccgcggtcgacatgggttaaaccgataattgacaacgacgccggctcgagagggccgtataaacaaatggggtccaaccccaagctccgccgcttctcaagttcggagtagacgacaatccgacgccgagcttctccactgaatcatcatctaaactttcgcacaattctatatattcccgatactctcctctcttattcatcgactaagagcatgaacagggttccactcaagagcccattatttttatgcgtgtgtgtgtgtgtgtgtgtttgttaagagatcgctcttgatctcagatacttcttggccgacataacctcaatcggaatgggaagtcgattgaccagagagtagttaactaagggagtaacctagccgagctggaggagtttggctccattggatacgctacgtgcagctatgctgagaatttaccttactatttaacgaattttcaagagcggatacactaggtgtgactttgattgaaattttaagatattttctcaccgaaagaattggaaagtaaaattttaataattttctattaaaatcatagatacactatcgatactgtagatacaatgttaataacagctgaagctcaaatgaatgacatgcatatttatttaagcgagaataattaaaaaaatcaatttaaattaaaaaattaaataaattaataaataaaatcttgtcctcgattaaatatcccacttcttgccaagatctctgtcgaatgccaaaagtacattattccgttttcgtatattttcagctctgctttgcccatttcagcataattgcattgcagttgtctatttatagcgagggccttgggccagccaacttttaaatgccaatattggcgtcatgaggaaaacctttcccgtacaattgatgataaagagtgcggcggacacggcttaactggcggcaattgagggcggcaagaagtaagatgccgcatttccacgccctaatttgttcccatttcccagcatcgttacatgcagatgttaatttgttcgtcgcctcgcgagctgtactttaatttttttgatttacgaatgtgtgcaacttgcggcactttagacgctctaatgggcgttactttcgcagcgccgtgcttatgagatacattcccgaatccgactcgcattggctacgatgaaatacgacttttgggcctgatttacagctgtcatatgccagcgaaagcagttttggccggacagcaataaacacggcaataaacaataaacttaccccatgacgatcgatcgcgacccataaccgttccatcctcggtgttatataagaactggcccaatttgaacggtttgggcttcctcaggttgtgcagatcctcgtccacaaaggacggactcattggtactggcttggacatgtttctatcggtgggttttctttggatctaaaggcctgtttgcggttcagttcggttagtgattaattcggaatcgatttaagccattaaaaatatttatttttaaaagtttaaatattcgaaataaagcactcgacgaattgaattgcaaacgagcgtttcagctgaatacgcaaatgtctatttttccgtattgaaaatttcttttcaaacacttgagaatatgtttagcgttgaataaagtccaaatattgcaaaaataattccatgcgaatcaacgcgaacgtattatttgcactgaaactttggtggcactgcgtttggttttatatcgtaaatattgcaccgacaccgaattgtgcggatgtacacacatagtattcaaactatatacactcgtatacatatacagcagtccaggtcctttttgctctcttagtttctctcacttttcacccgacgtttcaacccccctggccgttttggaaatttggcgcctttttcggctctcctggccgaaaaaaatgttgcatccgtcagatacgacctgcaactggttggcatggaatgggctcgaagggccaaacaatgtgggccaaaatggggccagaaggccgtgctactgctggggcggcgacatggtcccatttccgcgtctgctgttgtgatttcaatgccgcattggctttgacccggcactgccgaactggccagatacaaaagtatatgttcttatttatggtgcatgcagtggttcttttcattttgccccgaactacaaccaccgcaacaacaacaacaacaacaacaacaacaacaacaacaccaacaacaacgacaacagaaacagaaaccagcccgctctttgccatcgagcactgaaaatgggaaacgcagcgagtatctgtatctcttaactggcgcgctcttaacgcctggccacatacaaacaaccacacctttttgaagaaatatcggagcgtttcttcaagactctggc

SEQ ID NO: 19787 - DNA, 1249 bp, DROSOPHILA
atgtccaagccagtaccaatgagtccgtcctttgtggacgaggatctgcacaacctgaggaagcccaaaccgttcaaattgggccagttcttatataacaccgaggatggaacggttatgggtcgcgatcgatcgtcatgggccaaaatcggaatcttctatgtggccttctacggagtcctagccgccctcgttgccatctgcatgtgggccttcttccaaactctcgatcctcgcattcccaagtggaccctggaccgttccctgataggtacaaatccaggtctaggttttcgacccctgccaccggtggacaatgtggaaagcactttgatctggtacaagggcacccaacacgagaactacaagcactggacagactccctggatgatttccttgcggtgtacaaagtacctggtctaacacccggccgtggtcagaacatctacaactgcgactacaaccagccgccgccaaagggtcaggtgtgcgacgtggacatcaagacgtggtcgccgtgcaccaaggagaataactacagctaccacaagagtgcgccgtgtatcttcctcaagctgaacaagatctacggctggattccggagtactacaacagatcgaatgacttgcccgcgaacatgcccgccagcttgaagacctacatcgcagaggtcgagaagacgcagccagaaaagctaaacaccatttgggtatcgtgcgagggcgagaacccagccgaccaggagaacattggtgctgtcaactacctgccaatcaggggattccccggctacttctatccctaccagaactccgagggctacttgagtcccctggtggcggtgcacttccagcgccccaaacgcggaatcatcatcaacgtggagtgcagggcttgggctcgcaacatcatacacgatcgcaaggagagaatcggatcggtgcactatgagctcctcattgattaaattgtaccacactattacaacataacataatagcaaacacaataacaagaatctccgattaacaagaatctcggtatcagaggtgtgtgaggacgataagtctcgtctaagacaatcctaccagaggcaaaccaccagatgttgtagtgaagattgtgaaaggttcagattttcgaatgtcattaaaaatccaaattatttaaacttgttttccgcgttataaagcatacaaaatatatattcaagacttgcaacgcctataaacatacaaattttgaat

SEQ ID NO: 19788 - protein, 322 aa, DROSOPHILA
MSKPVPMSPSFVDEDLHNLRKPKPFKLGQFLYNTEDGTVMGRDRSSWAKIGIFYVAFYGVLAALVAICMWAFFQTLDPRIPKWTLDRSLIGTNPGLGFRPLPPVDNVESTLIWYKGTQHENYKHWTDSLDDFLAVYKVPGLTPGRGQNIYNCDYNQPPPKGQVCDVDIKTWSPCTKENNYSYHKSAPCIFLKLNKIYGWIPEYYNRSNDLPANMPASLKTYIAEVEKTQPEKLNTIWVSCEGENPADQENIGAVNYLPIRGFPGYFYPYQNSEGYLSPLVAVHFQRPKRGIIINVECRAWARNIIHDRKERIGSVHYELLID

SEQ ID NO: 19789 - DNA, 6299 bp, DROSOPHILA
cacttagctatccaaatgccagctagagatccactttttccaaacgaaacgcaacgccggcatgcaagtcggcattagcgcgcgcagaaaataaccacaaaataatacagcggaacttctagcgatggcagtagttaggcgatgcgatagtttctacagtgtgcatcctatgttttctggcctttgaggagagctgtggcgaaatgttaaggtggtaacacactgtaagttgtttttcgtattattttttattatttattttatttttattatttatttattttgtaataatatttgtgtaatattgtaaatattataatataaatattattataatattaatattaattattatattataataatattataatattataataattattatattatattattataatattaatattaatatatattaatattataatataattatatatatatataatataatataataaatattgtaatatttatttttgtaaatccttcccaaagaagtggacattataacatcgaaataggtcagtcaatagcttataataataatataaaaatagttgttaacagtttgttgtcgctagaatttacaggatctgcttagtaagagtataatatatacactattaacaatgaaaaaaaaatgtacctttatagttcctaaatttagaaaaaaattttaattatttaaatttttcaaagtttgtatctggcttacatctggtgtttatttttaagcccagcaagattatactggaagatatcttttcaactgagtttaatgtgataaaatggacaaaaatgtattcccttttaatacatttttcaacatagctactatctttcgattaaactttgtatttatttcattgacattaattaaaacttaatgttatgtcaggcaagtgggatgttttagcacactaaaacgggatttgcgttttattcgttttcatgtagtatggccacactgcggccatcgtataaaagcccgcgctctccaaagcgaatgcactaatttttccaagtgtgtgaagcggacagtttgtgttgtgttcgactgctataagcgaaagataattttaagttaaaagttcaaaagcctaaaacaaatacaaaatgagggaaatcgttcacatccaagctggtcagtgcggcaaccaaatcggcgccaaggtaagttttcccatttgcattttccattcattttccatccagagtacagttgccaaaatggcgtcatttttgcacgacttcgctgtccatgtggcaaaaatttgtattgaggccggcattttcacactcacacatttgcatttatgtataccaagttgtgtgcgtgtgtgtgtcgagtggtctttttgagtcccggcatctgtgtttgtatataccgcatatttgtccgatttcgcaaagatgcttgaaaattgttgttctactctggcatttggggtccaaaatttagaacgaaagtttgttacgcccgaatttccgatcgatataatgctttagggccattgacattcgcatatgtacttcgtgcccatatgtatgtacatatgtaagtaattatagttgggtgtgtctgcaattacaccgacgctggtggctgtgtgtatgcctgtgtgcgtgttgcatgcatgagtcattttctcttgggcgaaagactttcatagtttttcaccggttgtgaaagccatttcactgcccagatggtgaagggtacttttctatcgtcaaaacacgatagcttttctacacgcacataagagcttgctgctcatttgtatgtgtgagcgtcggccggttttttcatttaatttttttttttttgccgctatgcgtcttctaaagagaaaacatgacgtcattttaacctaaaatggctgaaccggtcgtcgttgaacggttcgcagaacgtataagagttgatcttatacgtagatgggatataagtatgtagatatatgtgttcgtaggctgcattagctgttctattgattttcatgcattccacactctgctccctacttaaaattgcgctacttcggcggcttctctatcttatcatggaatgaaacaattttctattttttattcatgactatagtatagacagatttcggttctctttcggccattatgtgccaaaatgaaactttacttttagcagtaggaattgggagtctgcaaggtgagatgatgaccttatatagaggaatttgccatctgtttgtctctatcccagtttcctctcgcacacaaaaagcaacgaaaccgagaagggcggtgctgcacatgcgtgtgggataacggggcacaggacacgaaggtgatgttgatgatgacgaatctttctagtccttgcccgaaaaatcaatacccacatgctgggcatgggcccatgagccgaaaacaaccctcggaaacgccttaaaacccgagcagctgcaacatcagaattgttgtgcccaagtatggctctcaatatctctctctctcgctttcgacccgaccggcttacaaatgtgtatttctatatttatatatacactttatatacatagaatccggtatgacggtgtcatttcgctaaacgagtgtcaaccacgcatttcctccaataccagtgtagcgacttatttcggttaattgtttttatttgtttacgcgacataaacaacgaccatcgcaaaaagttcaggtgacgtaatgccctgaaaaacagacgatttatgcgccagatggtcggtagttggagcactgagctgcagttttaacctctcagcaaacagacaacgccaacgcctctctccaactggtacccactgctcctcccactcctcctccgtttccctcttgcagagacgagagtgggtcgcgagacccgaacaaccggtgatgtaagccgcatcggaagcaggggggctttttggggtggcagagcccggctctgaggtcgccggcattgcgtgggggcagcacgtagacatatagacagacagacagatagtagttatacagctcagttccagcccacgcccgaagattcgagtaagatcggtcggcggaacgcaatgacagctgcgcctcgagatccgaaacgaaaacccacgccagatgacgttatcgttggtgtggcgatggtgctgctggtcgtggtggtggaaacgcaccaaaaatggcagcgaataagttatgttaatcggagctcggcccatacacagagtttatgatggcgtacatgggtggcctaaaccacgtagccgagcccagacatgtgtatgtacatcggctgcttcttgtgcccatttattccaatcaataaagagttatatatagactgactttccataacccatcacacattttgttcgagaaggtttctgtatcgaagttatctgtataagttaagagaaaaacaagaaaataagattgcctttcacatgcatcaactttcactgggtatggaagaaaaattttaagcaaattacttgcagaattggaaatgagtttcagtgattagtaaaagttttcttcaactgcagtactcttgtgcaaataaaagttaccgttgcttaagcataaacttcttttgtgatttatgtgaagcagtcaaataaatactagctgtatatatgtatgcagcagatggtctaggctttgagtaattttactaccattgattttctgtgatgactcattggccaagtcattcatacattttcttaagactgagttagaaaacaccccctagtaatcgattttcctgctgactcatgttcacaagaaatgctgtacagcacctgcaagtcctaatcgcactaatcccaaattctttacttccatttctcatttgcagttctgggagatcatctccgatgagcatggcatcgatgccaccggcgcctaccacggtgacagcgacctgcagctggagcgcatcaatgtgtactacaatgaggcgtccggtggcaagtacgtgccccgcgctgtccttgtcgatctggagcccggcaccatggactctgtgcgatcgggacctttcggccagatcttcaggcccgacaactttgtgttcggccagtcgggtgccggcaacaactgggccaagggtcattacacagagggtgctgagctggtggactcagtgctcgatgttgtccgcaaggaggccgaatcctgcgactgcctgcaaggcttccaactcacacactcccttggcggcggcactggctccggtatgggaaccctgctgatttccaagatccgcgaggagtaccccgacaggatcatgaacacatactcggttgtgccgtcgcccaaggtgtcggacaccgttgtggagccctacaacgccaccctgtcggtgcaccagctggtcgagaacacggacgagacctactgcatcgacaacgaggctctctacgatatctgcttccgcaccctcaagctgacgacacccacatacggtgacctgaaccatcttgtctccctgaccatgtccggcgtaaccacctgcctccgattccccggccaactgaacgctgatctccgcaagctggccgtcaacatggtgcccttcccacgtcttcacttcttcatgcccggcttcgctcccctgacctcccgaggatcccagcagtaccgcgccctcaccgtgcccgagctgacccagcagatgttcgatgccaagaacatgatggccgcctgcgacccacgccacggacgctaccttaccgtcgccgccatcttccgtggacgcatgtccatgaaggaggtcgacgagcagatgctgaacatccagaacaagaacagctcctacttcgtcgaatggatccccaacaacgtgaagaccgccgtgtgcgacatcccgccccgtggtctgaagatgtccgccaccttcatcggcaactccactgccatccaggagctgttcaagcgcatctccgagcagttcaccgctatgttcaggcgcaaggctttcttgcattggtacaccggcgagggcatggacgagatggagttcaccgaggccgagagcaacatgaacgatctggtgtccgagtaccagcagtaccaggaggccaccgccgacgaggacgccgagttcgaggaggagcaggaggctgaggtcgacgagaactaaattcgaatcggaaatcaatcgaattctcgatcaatgttttgcgaaaaaaaatgaaacgagaacaaatgaattcagttgtaaaagatttgttctcttaacaacgtaatcaataaagtcggatccaattttgttcacaagtctaaacaattatggtttttgttggggtttcttataattaataagagagatatcaatcattttacgaggattatgagactgcgttttgtagtccaagaaagctgattaatgtttagagtgttggtataaatgttaataggctcattaatgtaggttttgacaaaagcgaggtatttgtacattttctcattgtattatttggattcacaaatttatgtttatttaatcgggtttctcccagctaaaaacaatagaaatcttttcaccggctgtgtttgttttggacatggttatgttgtgatgattgataatttcattcacattagtttatttatagaccttttttatttattgacaatgatttgccctacctacctcaactttcgagcaaatgctgcataaacaaaagtaattcgcccttgaagaggacatgacatgatattttcagcgtaggaagtgggcctacgtaccattgtggttcagacggccttgtatgcaataaatctaattaatatatatatatatatatattatggtagtcttaacgctacggtttcccacacgcgattttcatgaagctggagtgtaagttttttgtttttattcaaaacttaaaaatccactttgcatgtgtcataaataatgagtcatgaatcatacccttaattcactttaataagcataattagttcgttgaaatatctctattaactacttctgcggagtagataaacgtgatttgctgttttaatgcgcatatgtattaacaacatattaaatgcacaattaaactgtggtcataataaattattaatatttagcagtgattaaaattcattcttaaaaagaatattggctaatttaatagttgtatggttcttatcttaaaattacaagtttttgatctaaatatattattattaatatataaaataggaattaaaacataattttgcaataaaatatttaaaaatcgataatttatcgattgacaacactgcgc

SEQ ID NO: 19790 - DNA, 1613 bp, DROSOPHILA
ccgcgctctccaaagcgaatgcactaatttttccaagtgtgtgaagcggacagtttgtgttgtgttcgactgctataagcgaaagataattttaagttaaaagttcaaaagcctaaaacaaatacaaaatgagggaaatcgttcacatccaagctggtcagtgcggcaaccaaatcggcgccaagttctgggagatcatctccgatgagcatggcatcgatgccaccggcgcctaccacggtgacagcgacctgcagctggagcgcatcaatgtgtactacaatgaggcgtccggtggcaagtacgtgccccgcgctgtccttgtcgatctggagcccggcaccatggactctgtgcgatcgggacctttcggccagatcttcaggcccgacaactttgtgttcggccagtcgggtgccggcaacaactgggccaagggtcattacacagagggtgctgagctggtggactcagtgctcgatgttgtccgcaaggaggccgaatcctgcgactgcctgcaaggcttccaactcacacactcccttggcggcggcactggctccggtatgggaaccctgctgatttccaagatccgcgaggagtaccccgacaggatcatgaacacatactcggttgtgccgtcgcccaaggtgtcggacaccgttgtggagccctacaacgccaccctgtcggtgcaccagctggtcgagaacacggacgagacctactgcatcgacaacgaggctctctacgatatctgcttccgcaccctcaagctgacgacacccacatacggtgacctgaaccatcttgtctccctgaccatgtccggcgtaaccacctgcctccgattccccggccaactgaacgctgatctccgcaagctggccgtcaacatggtgcccttcccacgtcttcacttcttcatgcccggcttcgctcccctgacctcccgaggatcccagcagtaccgcgccctcaccgtgcccgagctgacccagcagatgttcgatgccaagaacatgatggccgcctgcgacccacgccacggacgctaccttaccgtcgccgccatcttccgtggacgcatgtccatgaaggaggtcgacgagcagatgctgaacatccagaacaagaacagctcctacttcgtcgaatggatccccaacaacgtgaagaccgccgtgtgcgacatcccgccccgtggtctgaagatgtccgccaccttcatcggcaactccactgccatccaggagctgttcaagcgcatctccgagcagttcaccgctatgttcaggcgcaaggctttcttgcattggtacaccggcgagggcatggacgagatggagttcaccgaggccgagagcaacatgaacgatctggtgtccgagtaccagcagtaccaggaggccaccgccgacgaggacgccgagttcgaggaggagcaggaggctgaggtcgacgagaactaaattcgaatcggaaatcaatcgaattctcgatcaatgttttgcgaaaaaaaatgaaacgagaacaaatgaattcagttgtaaaagatttgttctcttaacaacgtaatcaataaagtcggatccaattttgttcacaagtct

SEQ ID NO: 19791 - protein, 447 aa, DROSOPHILA
MREIVHIQAGQCGNQIGAKFWEIISDEHGIDATGAYHGDSDLQLERINVYYNEASGGKYVPRAVLVDLEPGTMDSVRSGPFGQIFRPDNFVFGQSGAGNNWAKGHYTEGAELVDSVLDVVRKEAESCDCLQGFQLTHSLGGGTGSGMGTLLISKIREEYPDRIMNTYSVVPSPKVSDTVVEPYNATLSVHQLVENTDETYCIDNEALYDICFRTLKLTTPTYGDLNHLVSLTMSGVTTCLRFPGQLNADLRKLAVNMVPFPRLHFFMPGFAPLTSRGSQQYRALTVPELTQQMFDAKNMMAACDPRHGRYLTVAAIFRGRMSMKEVDEQMLNIQNKNSSYFVEWIPNNVKTAVCDIPPRGLKMSATFIGNSTAIQELFKRISEQFTAMFRRKAFLHWYTGEGMDEMEFTEAESNMNDLVSEYQQYQEATADEDAEFEEEQEAEVDEN

SEQ ID NO: 19792 - DNA, 3399 bp, DROSOPHILA
cgggacccacaaaaactggagaaatcgagaaaaaagtgcaggccgggcgagcgagcaaaagtgcaaattgcaatgaatatttcacgcgaaatgggacttgatggggataaatttcgctggcttgttggacgaattggcgggccggttgagaatcattaatatcgccaacagcaggtgacaactgccagctgcactatcgtcaaatccattagtgttccactttgttttagccatgtgaagaaggtgccagcacgctcacttacaagccacacacaagccacaaacgccattcgaccggctatatccacccactttcaatttatgttcggaacagaactagaatccggttatagttaaagggtatccacgtaatacttgccataaataataaacgccctgcatgtgaggcactcttgaagaaatgactaagttgggagctgccagtgagcttcagctggaattgaaagccagttccgggtcaagtggatcagcagctagttgtgcatcgtcctcgagtgcaaattggattacccatcaaacggcaagagaggaacaaaagccaatgcctgacaggatgcttaccctcagtgtgcggaatcttttggtatgttggcttagatttgttcaaaaatatgaattctacttaacaaaacaaaaaggagaggcctcgatgtgcctcgactatcagagcctaaaattcctaaagaacatatatatggaattccctatgtatattgagtaaaactagtagtttaaatactcctttaaatactattgtatataaataaggcattattactattctctataaattaaattatcttgaatatgagcaaaatcactacaatgcaatggaaacaacatacatttgcaatttgatagaaaattttaatgaacgtcaatgcttcaatatatggtggatgtagatatttctttggactttggcttactttaaaagaaaataggaaatcgtactgtcatgatccgggcagtgtcttgactagtcggcgtgaaggtgttgttggcgcttggcgcgcccctttcccagctttttggacctaagcttggccatgtgcgacataactaggtagctgcccggtatgatcagcagcattaggtatatttttaggaagagaaccatgtcaaaggtgatgttccagggattaggcatttccacggtaaaccgtttcgtctcttcgatgtagggaatattgcgcaatacgataatgccctcgcaaaggatgcccataggatagagcggtatccagatggtgtatctcagccaggtgagcagacccacttcgcggcccagcaattgagccaagtagtatggatatctggtggggtaaagttcagtagataagacatttatccatattccgataaagtcgccgcacactcaccgcaccaattcgaccagagaccatattataaaaacgtagaaaacgacgggtttggcatacatgcgcggttccatgtcgatcatgagaaaaaggataaagtttcgtccggacacctggaagaagggcaccacaggactgcccttggtgtaaccgaacatggggtgcatcacctccagatactgcaggagctggataaacttgaaggcgttgcccacattggcgtaggtttttcctatgctatcgacgccatcgcgatagtaaagtactcccattacaaccataatatacagatagcccacgaacatggccaggttgtaaaagatcatgtacaccttcttggttttctctgtggaataagcaaacgggcgtcgttatcaaatgatgaatgcaaatggcgtaaaatctatctaacccttaatgtagcccagctcgcgcttctggagatcggcgtactccttctcgtagtcctggcgcacatcgcgcggcttctcctccacctcgacgtcgtcctcggtgcgccagcgatcgaagtcgatcttgagccagtggggcttctggggtgtggccaccaggcggggccaccattccggctccagtttgcgtatctgaagttcaatcttgttgtcgctgaccacgaaggtggcattctcatcgtcgatcagggcgtagaagtgcagctcgaacttgtaggcattcactccacgagctccgtggccgttggcactgaaattcaccgaaaccggcgaaaagtccgcaatggcgccctagaaatacatttttatttaacattattgatttttcacttgtgatgggcagttgtacctatgcaaataaatgctcacctaccttggcatctttaagatccactttcagtaatagagtttgcttggtctgcgaccagtagacaaacggactgagattcgccatttggtcttatcaaacgaatataaacatctccaaaccgaaaataacctttgattacgatgcgaatgcgttttgcagcactgcctgtgtgaccacacaaggggtgttggatatacctcaagtctggtatatttcagataccgaaagcatatctccgctagttggtggggaacttggatggcatggtgtggaactttgcttgcgttggaatttgatttctaactggaacttatgccgttattttttaatttcccaacggaatttttcttaatacattaaaaaaaattagttttctttaaatgctgaaaacaaaatattttacatttttaagaacatttaagtcatcaatgtgaaaattttatataactcaacaattgcagtttaataaataatttttataagaaaagtttaattttggccgacttttttaacaaggacaataatatccttaaaaattagtttctaagctacaataaagagatagctttaatttttataaaaataagtccaacatatttttgtgtatttttctatcgtgagaatttcgggtcattttgatttatgggccgccaccgcgaaagtcggaagttgtcagacaacggggcaaaaacaaagccgaataagcgggaaatcctcggaatcgtcgagaacctcgactggttgtgtgtgctcgtgggagtgtgttttagggtgtcaggcatatatatacatgtatatatccctgttgttctgccagacatggccgcactgctgttgttctttgagcttccttccgttttcaagcgggttgcgttgctaaaacaaaaggcgacaacttgtcaggcttgttttgccattggattttgtaactagatcgagcacaaatgaaatggagcatacgtgggctaggactaggactgcaggaatcgccattgctaatcccgatgggtattactattttctacatctctttcgcagccatcgcaaccagcacaatcccatatcattttgcacactggcgtaggccaagaatcgggcggcggaaaagaaaatgttgcgatttctcaagaaccgctagacacggcgtccgccc

SEQ ID NO: 19793 - DNA, 1185 bp, DROSOPHILA
aacgcattcgcatcgtaatcaaaggttattttcggtttggagatgtttatattcgtttgataagaccaaatggcgaatctcagtccgtttgtctactggtcgcagaccaagcaaactctattactgaaagtggatcttaaagatgccaagggcgccattgcggacttttcgccggtttcggtgaatttcagtgccaacggccacggagctcgtggagtgaatgcctacaagttcgagctgcacttctacgccctgatcgacgatgagaatgccaccttcgtggtcagcgacaacaagattgaacttcagatacgcaaactggagccggaatggtggccccgcctggtggccacaccccagaagccccactggctcaagatcgacttcgatcgctggcgcaccgaggacgacgtcgaggtggaggagaagccgcgcgatgtgcgccaggactacgagaaggagtacgccgatctccagaagcgcgagctgggctacattaaggagaaaaccaagaaggtgtacatgatcttttacaacctggccatgttcgtgggctatctgtatattatggttgtaatgggagtactttactatcgcgatggcgtcgatagcataggaaaaacctacgccaatgtgggcaacgccttcaagtttatccagctcctgcagtatctggaggtgatgcaccccatgttcggttacaccaagggcagtcctgtggtgcccttcttccaggtgtccggacgaaactttatcctttttctcatgatcgacatggaaccgcgcatgtatgccaaacccgtcgttttctacgtttttataatatggtctctggtcgaattggtgcgatatccatactacttggctcaattgctgggccgcgaagtgggtctgctcacctggctgagatacaccatctggataccgctctatcctatgggcatcctttgcgagggcattatcgtattgcgcaatattccctacatcgaagagacgaaacggtttaccgtggaaatgcctaatccctggaacatcacctttgacatggttctcttcctaaaaatatacctaatgctgctgatcataccgggcagctacctagttatgtcgcacatggccaagcttaggtccaaaaagctgggaaaggggcgcgccaagcgccaacaacaccttcacgccgactag

SEQ ID NO: 19794 - protein, 371 aa, DROSOPHILA
MANLSPFVYWSQTKQTLLLKVDLKDAKGAIADFSPVSVNFSANGHGARGVNAYKFELHFYALIDDENATFVVSDNKIELQIRKLEPEWWPRLVATPQKPHWLKIDFDRWRTEDDVEVEEKPRDVRQDYEKEYADLQKRELGYIKEKTKKVYMIFYNLAMFVGYLYIMVVMGVLYYRDGVDSIGKTYANVGNAFKFIQLLQYLEVMHPMFGYTKGSPVVPFFQVSGRNFILFLMIDMEPRMYAKPVVFYVFIIWSLVELVRYPYYLAQLLGREVGLLTWLRYTIWIPLYPMGILCEGIIVLRNIPYIEETKRFTVEMPNPWNITFDMVLFLKIYLMLLIIPGSYLVMSHMAKLRSKKLGKGRAKRQQHLHAD

SEQ ID NO: 19795 - DNA, 2385 bp, DROSOPHILA
agtatgcagtcaaagccggctgcaccgcaacgacctcccagcccagcaataaacttattagggcattaatgaaaaaaaaaaaactatcactaagtgaaagttaattaagttagattaagatttgaacacttattgttagtctcttaacacaaagggaagattcaataaataataaaaaaattattaaattaaaaaaaaaaaaaaaaaaaaaaaaaaagggaagtaagtaaatgacttaatccactattacattgtggaacttacacattgatttaattacaggttcctgcagtgcaaaagttcaccgtttcaacatcatcgcctaaaatcctaactcaagtgggagccataagaaaacaattgcaggcagcacgattctttgacgatgaagttgatccggatgattattaatgaggtgtcaaccactcgttttcagaataacgaaaatgattggattgacagctcttttaaaccgagcaaaacgaatttaaatatttttgatgtcttcacatttgccattattatttcacacttatttcattttgtaaacaactcatgtagttataactttatagtgagctggttccaagtgcttcggctgtttcattcagcgactctaatacataaggcataaagtttgttaacgtttattaatcttattttaacagaaatctattaactgaaaatgtttaaacgagataaagtcaacaattaaagaggaacttaccggaattttctaacaagttgttaaatttcttaaaattatgtatttaggtatggatcaataaaacaataattttattgaagctaatcaaatttttgaaaaacgacgagctttgatcaattaattattaatgtttttagttcagctattaggcacgctattatcccccaaattgaaacatatgaagttttatgattaaacataaatatttttcttttatttttttctgcattgcttttgtcgttgatcaggggttagtgaagtctgtggatcatcctaccactggatgggctgaggagcgtagacgggggcgtactgcgagtaggcaccggcggatccatagctgggagctggggcgctgcatggcactggggccaggttgggctggcagctgaacaggtagttcttggggcaaggaggagccgggatcgagaccggagcggcggcgtaggatggagcagctggggcggcgtaggcctggggagcggcagccggagcggagtaggatggagccggagcagcggcgggcttgccgtagccaccaccgtacgaggagccgagcatcttatcctccttatcggcggcaacgaaagcggccagcaggcagatggtggagacgatggcgatgcacttcatgttgattggttgatgatttcttagactgttggtagcagactgcgatgcttctggcttcgacacttgcggtttatatacccgatgcaatgccatcaaaagtgcagatgcaagcactgaccaagttttcagtttacccaacgacccctcgaagtcgacgtgagtggcgctttttttgcacggccaacagaaagcgaaaagaacaaacatttcctctactttttttgggccactgaacttgttgagtaaacaatttgtcgcatgccaaaaatgtaaattaatgaagtaacggaactaaaaattgttgaagcaccaagaattgaatgtacttagctttgcattgagctacattattttactgaacaattgaaataaatgtattaaaataaatattatatgtgaataaattatttatatctaaaatatttatttagttcaatgagcttaatttttcacaagaatttgtaatcgcgtgccgaatatgcggtcattgcaaaaaatattcgtttatagttttgcctagcaacaattgttttttcataaaccttctttatgaagttctttcaaatctgttggttaagtaacctttttgcttctttggaaaaatttgaagacactttttcctaaaaagtttttaaaaataattgtatagctgtgtatagttaaaagttctttatgtttttttaaatgattaattcatttctttaaagttttcaaaaattatgaataaaaaaactattttctaatttcatatttctggaaaaaatccatagataatccgtagataataagaaaaagctttattaggctttgtaagataaaaaaacctcgacttaaatctattttaaatataaaaaaaaattgaaaatttgtgacctatataataggaatacagcagtcataaaatgctttatttcaattcaaaaatcgatgttgcttttatatttacattatccaaagcaatacattaaattaaccaaagggcttgagtttaattttatctcgtcaaaatgaaactcgcttcgcaa

SEQ ID NO: 19796 - DNA, 385 bp, DROSOPHILA
tctaagaaatcatcaaccaatcaacatgaagtgcatcgccatcgtctccaccatctgcctgctggccgctttcgttgccgccgataaggaggataagatgctcggctcctcgtacggtggtggctacggcaagcccgccgctgctccggctccatcctactccgctccggctgccgctccccaggcctacgccgccccagctgctccatcctacgccgccgctccggtctcgatcccggctcctccttgccccaagaactacctgttcagctgccagcccaacctggccccagtgccatgcagcgccccagctcccagctatggatccgccggtgcctactcgcagtacgcccccgtctacgctcctcagcccatccagtggtag

SEQ ID NO: 19797 - protein, 119 aa, DROSOPHILA
MKCIAIVSTICLLAAFVAADKEDKMLGSSYGGGYGKPAAAPAPSYSAPAAAPQAYAAPAAPSYAAAPVSIPAPPCPKNYLFSCQPNLAPVPCSAPAPSYGSAGAYSQYAPVYAPQPIQW

SEQ ID NO: 19798 - DNA, 3105 bp, DROSOPHILA
aaatgttaataggctcattaatgtaggttttgacaaaagcgaggtatttgtacattttctcattgtattatttggattcacaaatttatgtttatttaatcgggtttctcccagctaaaaacaatagaaatcttttcaccggctgtgtttgttttggacatggttatgttgtgatgattgataatttcattcacattagtttatttatagaccttttttatttattgacaatgatttgccctacctacctcaactttcgagcaaatgctgcataaacaaaagtaattcgcccttgaagaggacatgacatgatattttcagcgtaggaagtgggcctacgtaccattgtggttcagacggccttgtatgcaataaatctaattaatatatatatatatatatattatggtagtcttaacgctacggtttcccacacgcgattttcatgaagctggagtgtaagttttttgtttttattcaaaacttaaaaatccactttgcatgtgtcataaataatgagtcatgaatcatacccttaattcactttaataagcataattagttcgttgaaatatctctattaactacttctgcggagtagataaacgtgatttgctgttttaatgcgcatatgtattaacaacatattaaatgcacaattaaactgtggtcataataaattattaatatttagcagtgattaaaattcattcttaaaaagaatattggctaatttaatagttgtatggttcttatcttaaaattacaagtttttgatctaaatatattattattaatatataaaataggaattaaaacataattttgcaataaaatatttaaaaatcgataatttatcgattgacaacactgcgctgccagggacgccaaaaacagtgtgcacagtgtgtattgattgtgtgtgtgtgtgcgtaccgtgcggcggtgtgtgggtgtcactgactgatatttgacaagtaagataaaatataaatattagggcgattttcgcgatccgtgctaatcccatcaacgatttgccgcccccaactcagatgatagcaatggacgagcagcgcggcgacaagatctacggcggatgcgagggtccggacgccatgtacgtgaagctgatttcctcggacggccacgaatttgtcgtcaaacgcgagcacgctctcacctccggcacaatccgggcgatgttgtccggaccgggtcagtttgccgagaacgaggccaacgaggtgcatttccgggagataccgtaagtagtttggctccaccaaaggcacagcccagtggctccgccggcagcagagcgcttacctgcacggcgaccagtcatcgcaagtctgtgtgacctaatgaccggcgacaaatttgcacagatgtacggtacataccctagacgtacgcagttacatgggtacatgcatgtacgtagagcaaagtccacggattacagatcgctcggtatgattcaaatctgaccgttttacacgtaatctcgggcacaactacgcgcattagattagcacacagttcggcatcgattgcgcctagaaatcagattgatggtgttatttctgtgtatattctgattgatctgtacctaaagtctataatagcagtcaaattatgcggcaaaaagccagtcaactcataacttcttaagctaaaccaacttataaatccaaatgcttaagaattcgtgcatttgtgttctgtttgtttaagtattattgtttgagtggtattcatatactatcaaaagtcgtttctttaactattaacgttattaattcttttcagatcccacgtcctacaaaaggtctgcatgtacttcacctataaagtgcgttacaccaacagttctaccgaaatacccgaattcccgatcgctccggagatcgcattagaacttttgatggcggctaatttcctagactgctaaagaaaataatattggttaatttgaatttacattatttacaagtgaacgaagaagggccagactgcgtaaagcttaatttgcccatgttaatttggtaataaaacgagaagattgtccctgcgagaaaataaatttctgttgatttcctaaacgatcagttttgtaatgcgcttttttttcgaaaaaacattgatttttattaaacatcaagacaaaaacaaaagtgcagagcgtcgcagttctatttggagtgcttggacctggatttggcggcatttttgttgttcagcatggcgaaacgcatttgctggatgagccattggacaccctcgcccagaccttcgccggatatagcgctgctggagcagatgtgccagggtttgtcctttatgttctccaatctgagagctgcatacagatgatatattataagcaacatgtagttattaacttttgagtaaccaaagcgaagcacctgctgctattttcacactggatagcgagtcctccatgtccattttgttgccgtagaagagaattggcacaattcggttgcacaagtccggatgctgtagcaccagatccaactcatccttgaccaccactaaaattgaaacattgagcgatagacgggcgttgttaatttgcatattcaataccaaatctcatgcgatcgctggaatcaataacgtagatgatgccgtggcagttcttaaactggtgctcccacagattcctgtatcgcgtcgcaccggacatgtcgattgccttaatggaaacacctgacatgcctactccaaggggatacatatagtcatagttgatgattccacggccacttactgtaaaactgttccaccatgaagccaactgtgggcaccacaatggatgtctgttcgctggactttttgaaatgattaattatcgaggactttccgctgttgttcagtcccagcaccagaatcgtcatcttatcctttttaatctttatcaaatcggccaaattgtgcaacattcccattttactggcggacgggcatcaattttattttgtttacggcgattttcctgacatgtttggccctgcaaaggactttcaattgccatggcaacccgcttggtgttggcatcgatttattgaaacttat

SEQ ID NO: 19799 - DNA, 557 bp, DROSOPHILA
ggcgattttcgcgatccgtgctaatcccatcaacgatttgccgcccccaactcagatgatagcaatggacgagcagcgcggcgacaagatctacggcggatgcgagggtccggacgccatgtacgtgaagctgatttcctcggacggccacgaatttgtcgtcaaacgcgagcacgctctcacctccggcacaatccgggcgatgttgtccggaccgggtcagtttgccgagaacgaggccaacgaggtgcatttccgggagataccatcccacgtcctacaaaaggtctgcatgtacttcacctataaagtgcgttacaccaacagttctaccgaaatacccgaattcccgatcgctccggagatcgcattagaacttttgatggcggctaatttcctagactgctaaagaaaataatattggttaatttgaatttacattatttacaagtgaacgaagaagggccagactgcgtaaagcttaatttgcccatgttaatttggtaataaaacgagaagattgtccctgcgagaaaataaatttctgttgatttcct

SEQ ID NO: 19800 - protein, 117 aa, DROSOPHILA
MIAMDEQRGDKIYGGCEGPDAMYVKLISSDGHEFVVKREHALTSGTIRAMLSGPGQFAENEANEVHFREIPSHVLQKVCMYFTYKVRYTNSSTEIPEFPIAPEIALELLMAANFLDC

SEQ ID NO: 19801 - DNA, 4208 bp, DROSOPHILA
tttctctttttttttaatctatttacgtttttcgcaattttggaacagacaaattaaaattttaagtcatttacaatggaagctactcttattggatcgatttcgcgcctaatttgaaacgaaagtcatatttagtccaccagcggatccgcttgctgcagctcaaaatcctcctcttcattgatttgtagtttctccttgagctttccaacaaatgggtacttcatcttgtaccgctgttcccactctcgtaatgtgttcatttggttgcgtgagaggtcgctcaaatcatcaaaatcctcgctgtccttcaagtcctctggtgaattgatcaaaatcctcgaaatatcccgaccggcatagtttggattaacgccatttcgtccgtaatagtgaacggatcgcgagacatcgtagatgttgaaaaggatggccactaggatgcgaccgtccgcccgtgtgccgtcatattcccgaagttcccgaaccgtaaagtccttccgcagtggcggaagatccacttcctgattattatcatcactgaagtctggttcctcgcggctcagacgacgcgcaaaaaatcccaacttgaggaacacgacgatcgacatgatcaaaagggtgacatcgatgggtgtttccttaagggaattgtaaagtttgcagtaccagctggtggtgtgttccatgcccttggagctctcagccatcctggtgctttcaattccagagtgtgaatgaatgaagtgaaaaattgtatgcaaactcccctaacgactgccttgtactgactgccctttgttaattgattgaagtattcagttaggccttctttttctgaaaatttaagtaaacaccaataaatcaggggattcgataccgataccggataccttttactcagctaatcgcattaccccttttgcgataccttgaaacttgtggaacatccacatcgattatattacactctttaattgtagtatagctattgaaacttattatttaaattgctttattgaaatgcataaatgggttatacaatattgtaagaaaatgctggtcaagttataacaaggaaatcaaggaatgggctgatgcatttcgaatacagtgcgctccatggcgaatgtgcgcttggaacgctgtatggcgacattttccattgcttcgttgaactccagaagagccttgctgaattccgaatcgctctcgatcatcctgaggaatatggtcgcctcgtcctcaaccttcggctccatctccttcttggcctgacccttcttcttcttggcctccagcttttccctggacttgcgttcctcctccaagaagatggtggtcaggcgcttcttcaacttgatctcttcctcgcgagcctccagaagtttgcagcgctgtatctcccgttcaaacatctgaactttcaggaaatacattagaaaacattgggatctggaagagatgataatcatcactcaccgacatcatgagagacttctccttgttggtggcacttcgcataccctcctccaggcggagcatcaggcaatcgccgttggccaggctcacggttagcattgttccatccggcttgaacaccagatgggtaacggcgtacttgtatttgatggtgagaatcggtcgtttgtgagacatcagcaggtcccaaaactccaagttgcccatgttgtctccgatgcagaacagcgagcagcgtcccgtgctccaggcaccgctcagcaactgatttggccggcggaagtagaaggtactggggcagttctttacttcctccgaccagatccgcacccgccaatcgcccaccaccaagaagttctttacaaagaacggattacgcattacacagcgaatgggaccggcaaaaagttgataggcagcaacgatagtatcctgcggagtggtgcccttgcgattgcctacgaacaagtaacccatatcggtgcagaatatgaagcgcactggtatggtgtactcgaactcgagaaaagttacgccatgtgcatcctggcgattttgaactgtctgggggtccggttcggccagcacctcatgaaccggcataagaagatcccgggtatcccagtacttgatggacccatccagtgatcctgagtaaaactcagtgttgagtttcgagtgcacccagcagatggccgttgtggcctcgcgatgacacgcctccaggggacacatgctcttgggaccaccctggttctcggttagccagaagccgacctgaccctcctgtagtccacccaccatgtagctctcatcccgcaggcacaccttggcaacccgtacgactctcctagaatcgtaatgggcagccggtcgggtggcatcatccaagttccaaatgtagaatgcatgcggattatcgttgccaaaatcgggcagcgtgtttagctgttttgtgtagtccggtgtcaggctcattcgattggaatagaacaggagaaactgattgggatcgttgtttagccattcgcacgtcatcagcctacgcgatgggatccacagatcatgaaagacatgggtacccctggcagcgatcttcatgctgatgccgcggcccaaatcctccggtagatccacaaagaagtcctcgtagatgttgacagcattgttggccgaactgatgtccattgcggcgtgcatcaattggttcacctcgatgccccaggagtcatcacgctcgacttttttgcgatagcgcattgtggactcctcgtccataatgttcacctccttgacgttccagccgccttcgtagtgattcaagccatgggaatccagggtcacgttgtgtgtcaacactgaagatgctgcatactgttcgctcagctgggtccgttcgttgatcggattgcgcagtatgtacttgaggcgcaaccgtccactcggctgcacactgaggatcatctcgttgcggtctgtgaagaggcactgcctcccgaaccggcgacgctcccgcgagaggatgaactgattgcccaaggttcccattgcaatcgactatatatataatatatatatcaaatatatataatttttttttatataacagatatcataagaattgggaagatagtgattatccctgagtgctactttttggaacgattgtaggtattagggcttaaataatgtcactggataaaaaacgaagtaattttaacgtgtttgcttcttgaacaaatctatgaaattgaatgaaaccgtgggtagagatatacttttatatctgacttattagtcatggataacgtgtattttaaatatatgtacactttcaaagcttgtaactaaatactattaagaaatatagtctacaatataaaattaaatttattagttacaatagcatttttacgtatttatcttgtagttcctgcgaaatttcttaaaatagtgcaacttatttttatattacattaaatatattttaaatccaaaaatgttaattaacagtgaaataacagtttccggtgtgtaattttacagcagtcgggtgaccattttctaaacgcgttagtgtgcctgttgcgggtagtaacaggtagccaagatgcggtcacatcgcattgttagaacgcggaaaacattcaactttttcgaaagcaacgcctaatttatccaattaaatagtgcgtaaaaagtacagagcaagctttgttgcgttggcattgaatgtgcgaaagcgaattgaagcattttgcaatatggtgagttgcaggctatgccaattggattatgtactttgtctattttgataagcctgtgcacaaatctgttgatttagaaatggatctgcaagaattcctttccctggaacgccaacaactggagaaggatcgccagcggctgggcacccaaaatccctgccccgccgtccagctaatgaagtccaacgactttaaagtgcaatgtcgcagggccaaggagtttaaggagtccacggagtccaatgaactcgccacacaatcgtcttccttggcaaccggcggccaaaacgaagaacttcacttggacttgcacgaggaggaggagcaaccgcaggatgacgagcagggtgtgctgccctcccacccctcgaagtccaccaaggagctcgcgaatcagcgccagctgctcgtcggcagcgctcgtccgtataagtcgccagatgcgtcgatgcgacgcaa

SEQ ID NO: 19802 - DNA, 2144 bp, DROSOPHILA
aacacgttaaaattacttcgttttttatccagtgacattatttaagccctaatacctacaatcgttccaaaaagtagcactcagggataatcactatcttcccaattcttatgatatctgttatataaaaaaaaattatatatatttgatatatatattatatatatagtcgattgcaatgggaaccttgggcaatcagttcatcctctcgcgggagcgtcgccggttcgggaggcagtgcctcttcacagaccgcaacgagatgatcctcagtgtgcagccgagtggacggttgcgcctcaagtacatactgcgcaatccgatcaacgaacggacccagctgagcgaacagtatgcagcatcttcagtgttgacacacaacgtgaccctggattcccatggcttgaatcactacgaaggcggctggaacgtcaaggaggtgaacattatggacgaggagtccacaatgcgctatcgcaaaaaagtcgagcgtgatgactcctggggcatcgaggtgaaccaattgatgcacgccgcaatggacatcagttcggccaacaatgctgtcaacatctacgaggacttctttgtggatctaccggaggatttgggccgcggcatcagcatgaagatcgctgccaggggtacccatgtctttcatgatctgtggatcccatcgcgtaggctgatgacgtgcgaatggctaaacaacgatcccaatcagtttctcctgttctattccaatcgaatgagcctgacaccggactacacaaaacagctaaacacgctgcccgattttggcaacgataatccgcatgcattctacatttggaacttggatgatgccacccgaccggctgcccattacgattctaggagagtcgtacgggttgccaaggtgtgcctgcgggatgagagctacatggtgggtggactacaggagggtcaggtcggcttctggctaaccgagaaccagggtggtcccaagagcatgtgtcccctggaggcgtgtcatcgcgaggccacaacggccatctgctgggtgcactcgaaactcaacactgagttttactcaggatcactggatgggtccatcaagtactgggatacccgggatcttcttatgccggttcatgaggtgctggccgaaccggacccccagacagttcaaaatcgccaggatgcacatggcgtaacttttctcgagttcgagtacaccataccagtgcgcttcatattctgcaccgatatgggttacttgttcgtaggcaatcgcaagggcaccactccgcaggatactatcgttgctgcctatcaactttttgccggtcccattcgctgtgtaatgcgtaatccgttctttgtaaagaacttcttggtggtgggcgattggcgggtgcggatctggtcggaggaagtaaagaactgccccagtaccttctacttccgccggccaaatcagttgctgagcggtgcctggagcacgggacgctgctcgctgttctgcatcggagacaacatgggcaacttggagttttgggacctgctgatgtctcacaaacgaccgattctcaccatcaaatacaagtacgccgttacccatctggtgttcaagccggatggaacaatgctaaccgtgagcctggccaacggcgattgcctgatgctccgcctggaggagggtatgcgaagtgccaccaacaaggagaagtctctcatgatgtcgatgtttgaacgggagatacagcgctgcaaacttctggaggctcgcgaggaagagatcaagttgaagaagcgcctgaccaccatcttcttggaggaggaacgcaagtccagggaaaagctggaggccaagaagaagaagggtcaggccaagaaggagatggagccgaaggttgaggacgaggcgaccatattcctcaggatgatcgagagcgattcggaattcagcaaggctcttctggagttcaacgaagcaatggaaaatgtcgccatacagcgttccaagcgcacattcgccatggagcgcactgtattcgaaatgcatcagcccattccttgatttccttgttataacttgaccagcattttcttacaatattgtataacccatttatgcatttcaataaagcaatttaaataat

SEQ ID NO: 19803 - protein, 627 aa, DROSOPHILA
MGTLGNQFILSRERRRFGRQCLFTDRNEMILSVQPSGRLRLKYILRNPINERTQLSEQYAASSVLTHNVTLDSHGLNHYEGGWNVKEVNIMDEESTMRYRKKVERDDSWGIEVNQLMHAAMDISSANNAVNIYEDFFVDLPEDLGRGISMKIAARGTHVFHDLWIPSRRLMTCEWLNNDPNQFLLFYSNRMSLTPDYTKQLNTLPDFGNDNPHAFYIWNLDDATRPAAHYDSRRVVRVAKVCLRDESYMVGGLQEGQVGFWLTENQGGPKSMCPLEACHREATTAICWVHSKLNTEFYSGSLDGSIKYWDTRDLLMPVHEVLAEPDPQTVQNRQDAHGVTFLEFEYTIPVRFIFCTDMGYLFVGNRKGTTPQDTIVAAYQLFAGPIRCVMRNPFFVKNFLVVGDWRVRIWSEEVKNCPSTFYFRRPNQLLSGAWSTGRCSLFCIGDNMGNLEFWDLLMSHKRPILTIKYKYAVTHLVFKPDGTMLTVSLANGDCLMLRLEEGMRSATNKEKSLMMSMFEREIQRCKLLEAREEEIKLKKRLTTIFLEEERKSREKLEAKKKKGQAKKEMEPKVEDEATIFLRMIESDSEFSKALLEFNEAMENVAIQRSKRTFAMERTVFEMHQPIP

SEQ ID NO: 19804 - DNA, 2954 bp, DROSOPHILA
agccgtcgttggtcacaagcgcaagctggaggctcaggagacgtctagctccgttccagaaaagcgggtgaaactcatggagcaactgagcacagagagtgagagcgacgagccgggcggatctgcttccaagcggccaaagaggattacacgaaaagaaccatcccttgaagtggccaatgcaacgctggaagctacacgggatgcgattgccatgcgaccacagccttggatccgggtgaatgcatccctcaatcgacgcgtcctcgatcgctggctgggcgccgttctcagcgagtgcatcgctcgcgtcggctgcaccgtgcacagtttgtttctgaggttcctgcacttggtgccggtggacgtcatgttcctgctggagcttctgcacgatttgggttgtatacaactcatggagatgcgacctcacaaagtgcatgtggaatcactgctggatgatgagcatgaagacggcgatgagcagccagtcacggagctctacgatcccatgcagacctatgttcaagtgcatggcaatgcaataggcaggctcaccaactttattggcctaaaaaagtacagcactgagtttatttaggattcggcagaggttttccctgttagtagtttaggttgcactaattcaatgacttttcttagattgtaagatcaaattccattgatttcgttttgtctctgattacgattgttagtttctttttttctataaactgaagtcttcagttcgtttatcaattatttttttatcctgtccaacctattcattttacatagttttttatacgttcataaataaacgtaagttaactaactgatagtgaagttgttgtggtttaatctgctattttaggattttcaataggattttggcaactgcaaacatttttatgcgatttttatactctcagtctaacttcggatattcaattggttatattttccggataataataaaagtctaggcttaaaccgcagctatggttcgaaggtatatatttgccttttaataaacatgacaatttaaaactctgtcatctggtcaaaactgatggttaaagttaagttgatgattcatgacgtacacaatatgatattcctttcttgtgtagcttccacactgtaagccaagcttgatagaaagaacacgcgacagttttttttttggtcaccacgaattcgcattcgcggcgtttgtttaattttcaattcacgagtggttccttaaatcctggactaactttagcacatcactaccggcgaaaggtgtttaccgcttgcctccgacgcggggagcagccttctgcgtgaccttggcggccttctgcttgggcgccgacttcttagcgggagcgggggcagcagccttcttggcggccttgacggcacgcttctgctccttggccaccttgatggcctggtcgcgctgcgccttgcgcacctcgggcttcatgttacgcttggccagaatctcggccagcgaggcaccgacgatggcgcgctggaacttctgggtgcggcgggtgcgcttcttggaggcctcctcctcgattcccttgcggtgcttccggcggtacagcacggtccacgtaaccttgcggggattgcgcttcatcaggtaggagcgctcgcacttcttgtccaggaaggtgaacgactgaaagcgtaatcaaagttcattagccatcctccatcgctagagcatcttcgccggaaactcaccttgccatcgatcttgaccatggtcttgccatgaccggggtagattttgtacccgctgaatgcgcacaagccaattctgtaaatacaaacactctcattagcaggggcactgtttactattgccgaaatggggttagacaatgccgaataccacaattaaccgagcatttcaacgcttttcattaacgtacttcatcttgctggcgtagaaacacgaaaagaaaagaaaacggaagtggaaacgaaaagctgagccaaattagtgtggctgccacgggcagacgaaaaaacctaaaaaataccaccacgtgccgaaggcgtgctgttaactgcgcgctgttaggcgcacagaattgaaaaattaaaatattaaggttattctttttgtatttttatttgttgtgtgtgctataatacacacataatacaaaacaatatacaaattattgcaatggaaaaaccccaaaactttcaattaagaactaagagaaattgaattttaaaattgtatgcaacttttctgtacttttctctttttttttaatctatttacgtttttcgcaattttggaacagacaaattaaaattttaagtcatttacaatggaagctactcttattggatcgatttcgcgcctaatttgaaacgaaagtcatatttagtccaccagcggatccgcttgctgcagctcaaaatcctcctcttcattgatttgtagtttctccttgagctttccaacaaatgggtacttcatcttgtaccgctgttcccactctcgtaatgtgttcatttggttgcgtgagaggtcgctcaaatcatcaaaatcctcgctgtccttcaagtcctctggtgaattgatcaaaatcctcgaaatatcccgaccggcatagtttggattaacgccatttcgtccgtaatagtgaacggatcgcgagacatcgtagatgttgaaaaggatggccactaggatgcgaccgtccgcccgtgtgccgtcatattcccgaagttcccgaaccgtaaagtccttccgcagtggcggaagatccacttcctgattattatcatcactgaagtctggttcctcgcggctcagacgacgcgcaaaaaatcccaacttgaggaacacgacgatcgacatgatcaaaagggtgacatcgatgggtgtttccttaagggaattgtaaagtttgcagtaccagctggtggtgtgt

SEQ ID NO: 19805 - DNA, 774 bp, DROSOPHILA
ttctacgccagcaagatgaaaattggcttgtgcgcattcagcgggtacaaaatctaccccggtcatggcaagaccatggtcaagatcgatggcaagtcgttcaccttcctggacaagaagtgcgagcgctcctacctgatgaagcgcaatccccgcaaggttacgtggaccgtgctgtaccgccggaagcaccgcaagggaatcgaggaggaggcctccaagaagcgcacccgccgcacccagaagttccagcgcgccatcgtcggtgcctcgctggccgagattctggccaagcgtaacatgaagcccgaggtgcgcaaggcgcagcgcgaccaggccatcaaggtggccaaggagcagaagcgtgccgtcaaggccgccaagaaggctgctgcccccgctcccgctaagaagtcggcgcccaagcagaaggccgccaaggtcacgcagaaggctgctccccgcgtcggaggcaagcggtaaacacctttcgccggtagtgatgtgctaaagttagtccaggatttaaggaaccactcgtgaattgaaaattaaacaaacgccgcgaatgcgaattcgtggtgaccaaaaaaaaaactgtcgcgtgttctttctatcaagcttggcttacagtgtggaagctacacaagaaaggaatatcatattgtgtacgtcatgaatcatcaacttaactttaaccatcagttttgaccagatgacagagttttaaattgtcatgtttattaaaaggcaaatatataccttcgaaccata

SEQ ID NO: 19806 - protein, 155 aa, DROSOPHILA
MKIGLCAFSGYKIYPGHGKTMVKIDGKSFTFLDKKCERSYLMKRNPRKVTWTVLYRRKHRKGIEEEASKKRTRRTQKFQRAIVGASLAEILAKRNMKPEVRKAQRDQAIKVAKEQKRAVKAAKKAAAPAPAKKSAPKQKAAKVTQKAAPRVGGKR

SEQ ID NO: 19807 - DNA, 6633 bp, DROSOPHILA
gacccacgatttctttaatcgtaatttgatggaaaacggcacgttcgacactctgatcccccggctaatcgatgtgagttgctttcccaaaacaaacttttcttaggaattgcactttttaatttaaagttataaaaggacctcatatactttgtaatacactccattaggtttaacgaccagcataaaattcttaaaactaacttttccaattttcaggttgctggcactctgaaccacaagcttcctgtcctgctggctctgaatatgaacaacaagcacaatccggacaacacgttcctctactcgttcgattatgcgggcgagtttaatcgttacaaggaaatggacgaggagaccaacttgcagagtcccttcaaggcgggcgtttcgctcaccgacgaggccctctacctgtttccctaccccgagcacgtgactcgtctcagtcgcccggatcagtcgatggctcaccggatggtggagctttggacaaactttgtgatcagtggtaatccgttgggatccgctcgcgtcggctactggccgccgatgaccacgctctacgggccatacatgaggatcgacgatacgatgacaattgggggtaactacttcacggagttctccgccacgttgagcgatgaggaacaggggcacagtctgatccgcgaagtatactatttgcgaagccgcagccgaaagcgagctctaaacaaacgtcgaaaacagctggccaaatcgaatgcaagaaggttgcaaaatccgaaactcggcgggcgcaagagcctagttaagcggccaaaccgcaataagatacgtttttgaccaatatttaaaaaagaatttataaaaccaaaagttatgatgtaagcgataattcaaaaatgtatttattcaaaaacaatagctttcgatatacatatttctatagatatatagaagattattatgaaaggtggtttcacatgattataatatggaccattgatttggtaacttagttccgagaattgcgttccctctctgcctgaatgcggtcctcctcctcctgttgggccctataacgttcctcctccaatttttcttgttcctcttgctcctcgcgaagcttggttgcggcctccaggtaagcctcatagctggggaaatcctcaaccttgagaacatcctgttctgctgcctcttcctcatctggtgatctctcgtactcctccccttggtcctcgtcaggctgttcctctctttcctgttcaacctgatcccttcgctgttgctcgcgctcctgttcctcggcatagctgcggtcgccatcgtaggcttcgtagttgggatgggttggctgttcctctggcaaactttgttcgggatgctgttgattttcttgaagcaatgtttcttgctgctgtcgctcacgctcttgctcctcggcatagattcgatcacgttcagcatttttctcttgtagggctctactatattcttcgtagctagggtattcttcaggaccaggttcctgctgtccacgttcctgctgctcgcgttcttgctgctcacgttccaattgcaattgatattctcgctcttgctgttcctgctgctcgcgacgcagttgctcctgctgttgttgctcgcggtcttcctcactgaagttgcgattggcatcggtttcggggagattttcgttgccttcaggaccatattgttcgtatgagggatatggtagccgtccatcttccggattatcatctggctgtggctcttgtaccggataaccccacgggtttactggttcaggattgtattcgggctgttgttctggttgctgttgctctcgctctcgctgctgacgttctagctcctctcgttctcgttgctctcgctcttgctgctcgcgttcatactgttctcgttcttgttgctgacgaatacgctcttcgagctctcgctgctggcgtaatcgttcttcttgctctcgctgctgacgcagtcgttcttcctgctctcgctgttgacgaattcgctcgtcttgctgctcacgtggctcctgctgaggataacgctgttggtctcgcagctgctgctcccgcctacgctgctccctctcacggatgaactcttgctgacgagcttcctgtgccctgacgtattccggatccgcaggatgccaattcggatgctgctgagaaggcctgttttgccaattggcgtacgggttgtaggcgtatggacggctggtagtggtggttgttgttgttgtggtggtcgtggtggtaatcggaggtgaaaagttagtcgtcggcttatagatcactctataatttggcaagtaaattccctcgccaaagtgtggatctagttcaagcggactttgctgattgtttgtgaagcgtaggaaggggccgtactcggaggtagcctgcggccatacaccagagctaggattgggcacgccagtagtagcaaagttcacccacattgtgaccaaggcacgagacagcgatctgtccaaggggttcaggcgactagcctcgggtggataggggaataaatacacgctgtcatcgctgagcgaggcatctactccgaagggaagagggttggacaggtgtccgaaccgatggtgctctccgcggtaatcgaaggtatacaggtaggccggcacggagcggtatgactgactgatggagttaatcacgggggcacgatacaggatgtagttgctcagctcgagcagaccaggagccactgtttgcagactagccgtctgttcttggatcggagtaaagatctcgcgcagtgcccactgcttccagaggcggtgctcgctgggcggtgcggtgtgccgcaggacaacgtcgatgtagtcactcacattgcgagactgcagtcgtgcgagctgatcatagattcctggatttaaatggaaacaaattcaatcagctattgggcttaaaacattcaaaatataaaactttttaaaatatatttgttacacctccaaataaaaataaatcttaaagcacttatgcttatgtcgaaaggctatctgattactctggattttttttggaaatacccaataatataaatataatttaattgtcattttaaactagttctaatcagcttgacctcgagaatagcaccttatcagcaaatgtgtctctcaatcgagctcttccgaaatagattagctccatcgtgaaacgcaacattgacgttatgtttggactcgtatacatgcataagttattattgcacattttggccacttgaacttaatagctcaacaaaagtacttacgcgacacgatgaacgcactggcgtcctttgtggccccgataatcatgggcagtgcaaggctgctgttggtggctagtgaggctgggtggctgggtaggaagcctagagggtcgccaaccaccagtttgaagccacccagttgggtgagcccgagatgctcgttttgaagaagcagctgctcgaaggccgccaccagctgggaggtgggcagtcgggcgaggcaatcgtataggggcttaagtccttgtgcggatgggttaatggatggtggtgggcagcgagcaagacgggcgaaggtactcaaggtgtcaagtggctggttgtcaatcaggtaggggttcaaggcggtgcccgactgcaggatcagctgctggaagagattgccggcacgaccgctaaggctcaaggcgtgtgccaatgttgcgccaccagcctgacccactagggtcacctgtcccgcattgccaccgaagtggaccacattgcgttgcagccactcaagagccaattgcagatcggaaagggcgacgtttccaggaagctcgtcggttaatgcgcttaggaagccgaatggagccagtcggtagttgatggagaccaacagcacatccttttccagaacatagtcaggttgggcctcctcagaaccgccatcgaacagcatttcaccgtgaacaaagaccaaaacgggcagctgattggcgccttcgggtgcgtagatgtccaaggtaaggcaatcgtcgacgttttctccccgcgattcagataacctcaggcgatcgagctccggaaactgggcacaattggggctctggacggtggcattaactcgtccctggtatccaatcggttgagccgcctggaagcgcgccaagccacctccaaccgtgccataccgtatacccaagaaagcgttcactgggcgattggcaatggttttatggccactaattcccaagatctgtccgacttcaggcgcttgaaccacagcttcttggggctgtgcatatcgggtctccgactgccaaggaactggcttcagcggctcggggagccaatcccttctggtatcctcgtcgctatagtcgttatagtcgggccgtagacccacagagtgtgcatggacttgggccccacaaagtgccaacactaggagcaacggcttcatgttgctcactccgccgcgttttaaagagaactgatttccgaatcggattcgacggcctgtaaagctccaagcactatctgtaatcaaaacagccttgggacgatcagcgaggttggcttgataccacattagagcaatgactaggaaagcttatgaaaggtatacaactatatggttttccaacctaaactacttgttaaagactaaaaatataaaaataaacgaagaaataatttagattattctggatgtgttttgaattagtttttgaaccaccctcgatattgatgttttacaaactctactatgagttcatttagttgacaatggaagtagttaaatctactgatagtatctgttttatattgcacttaataaaatattaaaaacatgttaaatggacatatactatacaaactattgaaattgccgagcaaacactttttcaattccagccggtttcttggttgagcatttatgtataagtatagctttgctgcgtctgacggtcttaatctcatccggtcggctgccgatagaggattatctgtgggtcaagcttctcttgttgttgaagtgtatttcgccatgttaaattaagttcaacccatatttatatacaacttaatggaacagttgtggaacccacattgattatgaaacaatttgttaaaatagcaatcttcaaacattaaggtttcttcatttaacgcgttattcaaagtatatttgaaatccttttttttaccacaatagttctgttaacttttaccttttcattatattaatgccttttttacttttaaattctgtaatcatacatctcgcctttcacaaataaggttcacccttcattcccgatctcaacacaatcttcggcggtccagtcatccggtctttgccaccaaatcaggaaaatcactttgtttccagttgtatccgagataaactcgcctttgcaatgtgtttgtatttgtttgccaaaattcataaatatatatctataatattcgatagatacacaactcaacttactttcaattaaatcaatcggaaataagtatgaaggaatttccgaaagcagaccaacttttgaatgtgaacttttattaattaagacccaaaattgttaaggctaatagttgcccatcgagcataataaatgtaattcagtatgattaaaacgcattggggagttcgtaatataatattctctatattttcatttttattaatcattttagattccgttccctccgttttgttttttttttttttaagtttcattttcaatttcttcttttgcttcggcttgttcagtatgtatctataataatgtgttataattaagaatcgtcatttcatctaaatatttcagttataataatacaatataataatcattaataatatgcggttttcattaatcgatttctcttattcgcaatgcatgttcaacttttgtgtggcttgcttttcagaatgtattccgatccgtttggtttgtgtggaattaattgtgtctcggaccaaatctttgagctcgtgtcgtttttatcagcttcagtttgattatttcgtgtctgagaccgactatctcttatgtctcgcagcttactgtacgttcaagtatggaaatcagagttctaggaaagctaaaagcaagtgtatgcatatatacttgagtctatatatgtatatacgtgtttatatatattctttctaggtattttaatctcgattatgctgtggcagtggcccaaataaaacaagaagcctcttaattcaaatccaaattcgaacttaaaagtaatgtgtcaaattacgtattttgtttagcagcttccctacgatttcaactaaccatcgtgcactgagaagtattataaatgcagaagttccttctaggtaggtgcacaatttgaacctggcttgagattgattggtaatggatttgcctgcgttttgtgttaggaacttcttaacaaatttacgactgatgaaactgaaaattgtaacgaattgctcgttttttgtttgtcaaagatcgtttacccaaaaatgcacgttaattaatttgtcactgaatcaaaggtattcactgatttgttgctagcttttgtttcttttgtgttttttttttcttgtatattttgtag

SEQ ID NO: 19808 - DNA, 3205 bp, DROSOPHILA
ttatgctcgatgggcaactattagccttaacaattttgggtcttaattaataaaagttcacattcaaaagttggtctgctttcggaaattccttcatacttatttccgattgatttaattgaaaatgaagccgttgctcctagtgttggcactttgtggggcccaagtccatgcacactctgtgggtctacggcccgactataacgactatagcgacgaggataccagaagggattggctccccgagccgctgaagccagttccttggcagtcggagacccgatatgcacagccccaagaagctgtggttcaagcgcctgaagtcggacagatcttgggaattagtggccataaaaccattgccaatcgcccagtgaacgctttcttgggtatacggtatggcacggttggaggtggcttggcgcgcttccaggcggctcaaccgattggataccagggacgagttaatgccaccgtccagagccccaattgtgcccagtttccggagctcgatcgcctgaggttatctgaatcgcggggagaaaacgtcgacgattgccttaccttggacatctacgcacccgaaggcgccaatcagctgcccgttttggtctttgttcacggtgaaatgctgttcgatggcggttctgaggaggcccaacctgactatgttctggaaaaggatgtgctgttggtctccatcaactaccgactggctccattcggcttcctaagcgcattaaccgacgagcttcctggaaacgtcgccctttccgatctgcaattggctcttgagtggctgcaacgcaatgtggtccacttcggtggcaatgcgggacaggtgaccctagtgggtcaggctggtggcgcaacattggcacacgccttgagccttagcggtcgtgccggcaatctcttccagcagctgatcctgcagtcgggcaccgccttgaacccctacctgattgacaaccagccacttgacaccttgagtaccttcgcccgtcttgctcgctgcccaccaccatccattaacccatccgcacaaggacttaagcccctatacgattgcctcgcccgactgcccacctcccagctggtggcggccttcgagcagctgcttcttcaaaacgagcatctcgggctcacccaactgggtggcttcaaactggtggttggcgaccctctaggcttcctacccagccacccagcctcactagccaccaacagcagccttgcactgcccatgattatcggggccacaaaggacgccagtgcgttcatcgtgtcgcgaatctatgatcagctcgcacgactgcagtctcgcaatgtgagtgactacatcgacgttgtcctgcggcacaccgcaccgcccagcgagcaccgcctctggaagcagtgggcactgcgcgagatctttactccgatccaagaacagacggctagtctgcaaacagtggctcctggtctgctcgagctgagcaactacatcctgtatcgtgcccccgtgattaactccatcagtcagtcataccgctccgtgccggcctacctgtataccttcgattaccgcggagagcaccatcggttcggacacctgtccaaccctcttcccttcggagtagatgcctcgctcagcgatgacagcgtgtatttattcccctatccacccgaggctagtcgcctgaaccccttggacagatcgctgtctcgtgccttggtcacaatgtgggtgaactttgctactactggcgtgcccaatcctagctctggtgtatggccgcaggctacctccgagtacggccccttcctacgcttcacaaacaatcagcaaagtccgcttgaactagatccacactttggcgagggaatttacttgccaaattatagagtgatctataagccgacgactaacttttcacctccgattaccaccacgaccaccacaacaacaacaaccaccactaccagccgtccatacgcctacaacccgtacgccaattggcaaaacaggccttctcagcagcatccgaattggcatcctgcggatccggaatacgtcagggcacaggaagctcgtcagcaagagttcatccgtgagagggagcagcgtaggcgggagcagcagctgcgagaccaacagcgttatcctcagcaggagccacgtgagcagcaagacgagcgaattcgtcaacagcgagagcaggaagaacgactgcgtcagcagcgagagcaagaagaacgattacgccagcagcgagagctcgaagagcgtattcgtcagcaacaagaacgagaacagtatgaacgcgagcagcaagagcgagagcaacgagaacgagaggagctagaacgtcagcagcgagagcgagagcaacagcaaccagaacaacagcccgaatacaatcctgaaccagtaaacccgtggggttatccggtacaagagccacagccagatgataatccggaagatggacggctaccatatccctcatacgaacaatatggtcctgaaggcaacgaaaatctccccgaaaccgatgccaatcgcaacttcagtgaggaagaccgcgagcaacaacagcaggagcaactgcgtcgcgagcagcaggaacagcaagagcgagaatatcaattgcaattggaacgtgagcagcaagaacgcgagcagcaggaacgtggacagcaggaacctggtcctgaagaataccctagctacgaagaatatagtagagccctacaagagaaaaatgctgaacgtgatcgaatctatgccgaggagcaagagcgtgagcgacagcagcaagaaacattgcttcaagaaaatcaacagcatcccgaacaaagtttgccagaggaacagccaacccatcccaactacgaagcctacgatggcgaccgcagctatgccgaggaacaggagcgcgagcaacagcgaagggatcaggttgaacaggaaagagaggaacagcctgacgaggaccaaggggaggagtacgagagatcaccagatgaggaagaggcagcagaacaggatgttctcaaggttgaggatttccccagctatgaggcttacctggaggccgcaaccaagcttcgcgaggagcaagaggaacaagaaaaattggaggaggaacgttatagggcccaacaggaggaggaggaccgcattcaggcagagagggaacgcaattctcggaactaa

SEQ ID NO: 19809 - protein, 1026 aa, DROSOPHILA
MKPLLLVLALCGAQVHAHSVGLRPDYNDYSDEDTRRDWLPEPLKPVPWQSETRYAQPQEAVVQAPEVGQILGISGHKTIANRPVNAFLGIRYGTVGGGLARFQAAQPIGYQGRVNATVQSPNCAQFPELDRLRLSESRGENVDDCLTLDIYAPEGANQLPVLVFVHGEMLFDGGSEEAQPDYVLEKDVLLVSINYRLAPFGFLSALTDELPGNVALSDLQLALEWLQRNVVHFGGNAGQVTLVGQAGGATLAHALSLSGRAGNLFQQLILQSGTALNPYLIDNQPLDTLSTFARLARCPPPSINPSAQGLKPLYDCLARLPTSQLVAAFEQLLLQNEHLGLTQLGGFKLVVGDPLGFLPSHPASLATNSSLALPMIIGATKDASAFIVSRIYDQLARLQSRNVSDYIDVVLRHTAPPSEHRLWKQWALREIFTPIQEQTASLQTVAPGLLELSNYILYRAPVINSISQSYRSVPAYLYTFDYRGEHHRFGHLSNPLPFGVDASLSDDSVYLFPYPPEASRLNPLDRSLSRALVTMWVNFATTGVPNPSSGVWPQATSEYGPFLRFTNNQQSPLELDPHFGEGIYLPNYRVIYKPTTNFSPPITTTTTTTTTTTTTSRPYAYNPYANWQNRPSQQHPNWHPADPEYVRAQEARQQEFIREREQRRREQQLRDQQRYPQQEPREQQDERIRQQREQEERLRQQREQEERLRQQRELEERIRQQQEREQYEREQQEREQREREELERQQREREQQQPEQQPEYNPEPVNPWGYPVQEPQPDDNPEDGRLPYPSYEQYGPEGNENLPETDANRNFSEEDREQQQQEQLRREQQEQQEREYQLQLEREQQEREQQERGQQEPGPEEYPSYEEYSRALQEKNAERDRIYAEEQERERQQQETLLQENQQHPEQSLPEEQPTHPNYEAYDGDRSYAEEQEREQQRRDQVEQEREEQPDEDQGEEYERSPDEEEAAEQDVLKVEDFPSYEAYLEAATKLREEQEEQEKLEEERYRAQQEEEDRIQAERERNSRN

SEQ ID NO: 19810 - DNA, 2915 bp, DROSOPHILA
ctgcgcactagagatgcaaatctcaacttttcggaaataaaattagtatctcagtttgggtacttaagagtatatatcacaaaatgttataaaggcaaataatggtaacataatataatgacggcaacataataacgatattcaccattgtttggaaaattcgctatggtatgctgaacttgatgaaatatgccaatttagcgcgtggttttaattgaattcctggtgatttttcacttttattttaatagatcgttagcatcactggtgggcagccatcaaaggcatagtcggttgcattgcccaaccgcagtgcacgcagttaaaacaaagtgccatttgcataatgccccggctagacaaaaccgaatgaaaaatacggggggaaaaaaacggccgaacaagttgcatgtgtgagcacatctatatgttaaatgggagtggggttatttacgatcccgaggaagggacctgcacttggcgacgcaattatgcaaggcccactctccggtaaacgtgaccaccaacagagtgactctgggactgattgccgggaaagcctgtccctccaccaaagacctggctctggcagattggcactggcggacacgatggcaaaatatgttaattggcattgtaatatgcacattagatgttgccaactactaagcgctcattaaacaagaccaagctcatgctcggccaattacagccggcaggtacatggcaaaaaagtcaccaaggatgggtggcatgtgataaattggtggtatatgaatcgattatgaagccagattgccattccgatgcttggggtatatcgttataaggagtgattatggtgagaaaattaatcaaaaggtggcaagtaacttgtgcagaagtataccacacataatcactataaaatggtagctacttaggaatatatcttaaattcagtttttgtgaatcccagtaggctttggaatatattttagcagtcgtcaaaggcctgaacccacaagcctcattacaccttgacttattccgagcaccagacctaaatgggatagttttgttttccggcttttttgtttttcggtgtgagtttgtgagcttgtaaccgttcgaaattttgtgctttaagtttttgttggacaagtaagttgaaatacgcctggaagttaggaacttgaatgcttattctagtttgcaggtcgctgccatgtttcaccatgaattcgaacgagatcagtgcatcatcgaggaataccaaagacgccccaaaaacgatgtcctccaatggtagtggtgcggtggacggcgtaagtccttgtcatctggccgcaactgcggttgtttccactgccagaggaggcgtcagagaaacgagcagaggacataaggctatccgtgtatttttggatcaccacggtggttaggaaatcgcgttgctctaaaactcgctaatcctggccactgcaaaaattaacttttcgatgaacacatttttgggagctattattggattcagattataatagctctcatatgctgggatacccaacactgggatatcctacactgggtaacctatactttggtaccctataccttggtaccctataatttggtaccctatagttggatacccttcacttggatgccctacacttggataccatacacttggataccctacccttggataccctacccttggataccccaaagcttggataccccaaagcttggataccccaaatatggataacgattgactaggattcgaaatatataggataggtttctaggattaacttggataccccatatttgactgttattaggacggctgttcccaaactcaagaatgaatagattatttaaaacgtcaatctacgttgattaattaaagactttaataagcgtcaaattttcttattttttctcgatttttccagcaaaatgaataatacatgtgcgatttctctgcacaataggctgctcaaacgataatttcatttcagaaaagtagatctcttaatttcactggctttaaggatgtacaactcccgcggcaaaccgcaaaaaacaattacaaaattgttgggcagtcgttggctgtctgacatgacctgaccccgagttgttcgccaaaacatcgagcgcacatgtaaatggaaaatttttcacagacagtttggtgcgtgtaaaaaatttcacttttgatttatgcttcgcttgccgtggcacaaggtgtggcaacaacatttgaaaacatccaggaactggaaaattttgagaacctgaagcagctactgccataacaaaatattctgaatgttgggggtgcatagcagaggatattgcaacatatttgcatagacaaccattagggcaacgacgaccattcagccactcaaccattcaagccatgaatggctattacaccgaatagattatgttttgctatgcacgttagcaaccggctgccataaaattttatctgccaagttaattaagccggcagttaagcccgtagtcggctactgggaagctggcaactcaactcagctgaactcaactcaactcaactatcctggaatgctcctggatctcctgttcatttgcagttgaaaatttaattagttattccatttgcgcgccacactcgcttttcattgcggccattcagacagctacctctcatttgccggtcaacccaaaggattcgcgaaaggaaaatgaaaccgagcttatttttttttttggtctgtggcggtgttggtttcgaaagagaaggccacgaaagtagacacgaatatctgatcaagagtttccacaccttggctgggaaatcagcagaatcgcatcaaagctcacgcaaggaaaacttttttaaggtgcatgcaacagacggagtttcaagt

SEQ ID NO: 19811 - DNA, 860 bp, DROSOPHILA
ccacaagcctcattacaccttgacttattccgagcaccagacctaaatgggatagttttgttttccggcttttttgtttttcggtgtgagtttgtgagcttgtaaccgttcgaaattttgtgctttaagtttttgttggacaagtcgctgccatgtttcaccatgaattcgaacgagatcagtgcatcatcgaggaataccaaagacgccccaaaaacgatgtcctccaatggtagtggtgcggtggacggcgtaagtccttgtcatctggccgcaactgcggttgtttccactgccagaggaggcgtcagagaaacgagcagaggacataaggctatccgtgtatttttggatcaccacggtggttaggaaatcgcgttgctctaaaactcgctaatcctggccactgcaaaaattaacttttcgatgaacacatttttgggagctattattggattcagattataatagctctcatatgctgggatacccaacactgggatatcctacactgggtaacctatactttggtaccctataccttggtaccctataatttggtaccctatagttggatacccttcacttggatgccctacacttggataccatacacttggataccctacccttggataccctacccttggataccccaaagcttggataccccaaagcttggataccccaaatatggataacgattgactaggattcgaaatatataggataggtttctaggattaacttggataccccatatttgactgttattaggacggctgttcccaaactcaagaatgaatagattatttaaaacgtcaatctacgttgattaattaaagactttaataagcgtc

SEQ ID NO: 19812 - protein, 68 aa, DROSOPHILA
MNSNEISASSRNTKDAPKTMSSNGSGAVDGVSPCHLAATAVVSTARGGVRETSRGHKAIRVFLDHHGG

SEQ ID NO: 19813 - DNA, 2804 bp, DROSOPHILA
aagtggcgggaaaatcggaggaaaatcgctggaaaatgaaggcttgcggggcatgccaacaatatgtggagtgtcgagtcttgattggttcgcttattgggcggctgatttgcatttgctaaatagttggacaagtttttgggaaacttatttaggatttcatttacaaaattccgtggggattaaacttgcacaaagcttatatagaatgtgattcagacattaaaaaataatttcgttctatttacaaataaattgatttaacgaaaactaattactttgctggcattatttcataacgaaattccacagattttaagttgcgctggaattcaaattgcacatgtttaatttaaatcccgaactcattaaagccgtttaatttagcattaatgaaaagtgcaacactctggttgactcccctcaaaacccctgacaaatatggccccttttcatgtcagttcaaaccctgattgttagttaacctgcgaggcatttacactttgctggcaaacatttcatgaattcatttgtgcgacagcctggaaaatgtgttgccaaaatgaaaagttacccagccacatgaaggcagctggcggatagaatgtaacgtgattagcagccagattttctgctttaaataaatgatccaccacactatccagtttagtggtgaaaagtccaaggaagatgaagcttccatggattttgatcgctttattttgcggcttgtgcagtggttcaaccgaacgtagaattcggccaaatgaaggaaagattttcgagtggctaggttcaatattgctaccttcaactacgacaacaacttcaactccggtagtggcaacaacttccacaacaacaaggagaaccacaacaaccagcagtacaacgagcagaacaacgacatccagaaccacagtggcaaactttcccattgagagggattgtgttacttgtcgctgtggcttgattaataccttgtacaaaattgtcggaggtcaggagacccgagttcatcagtatccttggatggctgtgattctgatatacaatcgcttctattgctcgggatcgctgatcaatgatctgtatgttctgacagcagcccattgcgtggaaggtgtaccaccagaactaatcacgttgcgatttctcgaacacaatcgtagtcattccaatgatgatatagtgatacagagatacgtatccagggtgaaggtacacgaattgtataatccgcggagctttgataacgatttagcagttctacggcttaatcaaccgcttgatatgaggcatcatcgtttgagacccatttgtttgcccgtacaatcgtacagttttgatcacgaactgggtatagttgctggttggggagctcagagagaaggaggattcggcaccgataccttaagggtaagaaaaccgattgaagcttgaaatgggaacaatataacattaagaaatttaggaagtggatgttgtggtgctgcctcaatcggagtgtcgcaatggcacaacgtataggcctggacaaattacggataacatgatgtgtgctggatatatctctgagggtggcaaggatgcctgcagcggcgacagtggaggacctcttcagaccaccttcgatgagcagccgggtcaatatcagctggcgggtatcgtttcctggggtgtcggatgtgccagaccacaatcgcctggggtttacacccgagtcaatcagtatcttcgctggctgggctccaatactccaggaggctgtcattgcatgccataccctgaggaagattactgaactgaatcagcagatgaatagttttttattgtagcaccttaaaaatattaaaaaaattaagataactgtgcagcaaactcatggttaaactgctttttcaataacaatttatgcacccacttttaactaatttatgcaaagtgcacacaaatttgcaaccaagcagcacatcgatcaaaagttgctcaccaactttttggctagattttagcaaatgttgcataaagtacttggaaaacgctcagctcatatcccggggagcacatccatatccataaccacatccttaactgcagccattggcaaataaaaaagcaatttaaaactgggttacaacacttgaaggcaagctatttggatccttttacctttttggtgaaaagtttgccaagcagatggaacgaggccatatctcatacatataaatcccgatttgctggcgaatattttgtgcaattttgattgttatgcattttgcatttgtgcaatcataaaataactccctacctgctagcaaaaatgggaagaaagcccaaggacacgccaaactcacaggagcaagtttcactgcatttggtggctagttctacagtccgtatatagcttatttacaaagttggatttgaaaaaggcatacagataagcgcaaagtttttaacaaatgtacaacaaattatttactcaggggaactggtaaattgagtttcgatttgttggtaattgagagttaaggttagtaagtttgcactaccaaaaagaaaagttctgaatttgaattccaattgaagaaacttttaaaattagtaaatcctaaaacgcttttgattaagagtaatggccaatcagtgatgatattagtggaaagttttttaggatataataactcttaaatgccattgtttttatgattccactttattagatccgtaactatatggcccacagtcaacacctcgtttcctttggcattttcccaccacaagacaaattgccaaacctt

SEQ ID NO: 19814 - DNA, 749 bp, DROSOPHILA
gtcaggagacccgagttcatcagtatccttggatggctgtgattctgatatacaatcgcttctattgctcgggatcgctgatcaatgatctgtatgttctgacagcagcccattgcgtggaaggtgtaccaccagaactaatcacgttgcgatttctcgaacacaatcgtagtcattccaatgatgatatagtgatacagagatacgtatccagggtgaaggtacacgaattgtataatccgcggagctttgataacgatttagcagttctacggcttaatcaaccgcttgatatgaggcatcatcgtttgagacccatttgtttgcccgtacaatcgtacagttttgatcacgaactgggtatagttgctggttggggagctcagagagaaggaggattcggcaccgataccttaagggaagtggatgttgtggtgctgcctcaatcggagtgtcgcaatggcacaacgtataggcctggacaaattacggataacatgatgtgtgctggatatatctctgagggtggcaaggatgcctgcagcggcgacagtggaggacctcttcagaccaccttcgatgagcagccgggtcaatatcagctggcgggtatcgtttcctggggtgtcggatgtgccagaccacaatcgcctggggtttacacccgagtcaatcagtatcttcgctggctgggctccaatactccaggaggctgtcattgcatgccataccctgaggaagattactga

SEQ ID NO: 19815 - protein, 238 aa, DROSOPHILA
MAVILIYNRFYCSGSLINDLYVLTAAHCVEGVPPELITLRFLEHNRSHSNDDIVIQRYVSRVKVHELYNPRSFDNDLAVLRLNQPLDMRHHRLRPICLPVQSYSFDHELGIVAGWGAQREGGFGTDTLREVDVVVLPQSECRNGTTYRPGQITDNMMCAGYISEGGKDACSGDSGGPLQTTFDEQPGQYQLAGIVSWGVGCARPQSPGVYTRVNQYLRWLGSNTPGGCHCMPYPEEDY

SEQ ID NO: 19816 - DNA, 4935 bp, DROSOPHILA
tgctgactcaacacgaaacaaaaattaataataaattggggaatatgttatgtggttccaattcccttgacattgagctcacaaaagcacaataatgaagagaaatattttatctctcttcgctttctagcttccttacacggtggggtttcccaaattcgtctatagttaaatgcagccaaattgtggaattatctgttgcgattagtgaggagtttttggcactgaagcatcaccaatgctttctcccgcagctcgcgatgatgatgattgatataatacctcgtactgtgaattccagtagcgaagagaatttctggaatcaattaggtaaaatttaaaatttaaatcagttcccgcatctttcgagaaattaattttgcctggcgctacccgcactttcatcgtcgtgagaaagacaaaccaagttaatggacgatgtcccatgtttgactgacttttggacaaatcagaagttcgagccagcggctgctcttaaagatttcccttttacttaagacgatcaacccagcagctaaaaccggagcgatatctattcttgcacttggaaaaacttctaaggtaatggaccaacaaaaaaattgcgagctcttaacttggttaacttggagtatataaaaaatacaattagaacgaagtgtatgcaaggtatattatttatgagatattttaaaaatgttcggtagaagccaaaaatcaaatgttgaaacaagttttatttagggaacattgttttctgtgtatctattagcataaatcagtggctctagcctctgggacgccgcatcatttgcagttcatttcgcgtttcgttttagccagtttccgtttgcaaactcttcatttggctatttcggtcagaagtggggtgaaacttcgggtcacagcggactaaaatctattggtccccgatggccacagatcagttgcgatcggttcctcaaagcgagtgttggttcggttcgcgaaatcctctggaatgcagctcttgtggtggcaaatagtttccctgctcctagtactccaatccgtggtggagtctagggttcgtggcaggcaatatgatgaggagaaagacactattgtcgagctgcccactttgggcagcatccagggaaagattctcgaaactgcctggacgaaacgcgaagtgttacagtttgtggatgtcagatatgcggaacctccgacaggactgcatcggtttaaggtatacaagtggatattaatacttatccattaattaaaacattaataaaatatattgaaattatatggaaaagtgatcagtgaaaatagaagaagcttgaaagtgtgtcagcagaacaaaagtgattaagccatatacattaacattatgcaaaaaattaaaatcatcggtatgcaaaataaggctgacgcagaggaactccgcgaaaaattccaaatagaaatgtttgattttattgagcgtctggcttatatggcattttaaaactttcaaaattatgttaatgtttttagcagcaataaataagcaaaacaaaaaagattctaagagaggaacaacaaaaaattaaacgaatctctcacgtctccccgacggggaattgaaccccggtctcccgcgtgacaggcggggatactaaccactatactatcgaggacttggcatcaatttcgtaaaatcctaatatttaccctcggaactcttcgtttgctgatcttatcgaaaaaaatagaatacttgcaagataaacgatagctgagtcatagaagaacatttataaataaaagcttgattaatcaattgtaaatacattaaataaattcaagacttagttttgtcttttgacaagacttatttatttatgaactctttttggctaaaaactgattactgataagcaatggaattattaatggaattttagtattcttttttaaaaatttatgcttctaaacctgtttatgcaaactcagtaatcatataattatgctattcataggcgcctcgaccgattgaaccgtgggaggatgtgatggatgccactgcggaaaagattggctgcccgtcggtggtgtcgatggactcgctccgcaggttggatgacgtcttagacgtggaggactgtctgacaatgaccataaccactccgaatgtcacctcacgactgcccgttctcgtttacattcacggcgagtatttgtacgagggcagcaactccgaggctccgccggactatctgctcgagaaggatgtggtgctggtcacaccccagtaccgccttggacccttcggctttctttctacgaagacagatgagattcctggcaacgctggcttcctcgatattttcctggctttgcagttcgtaaagcactttatcaaatacttcggcggtgacccttcgcgggtcacagtagctggacaagtgggtggagctgctattgcccacctgctcacgctctcgccagttgtgcagcgcggcctgtttcatcaggtgatatatcactcgggctcagccattatgcccattttcctcgaggaggatccgcgaaagcacgctcaggaaatcgctaagaaggccgactgtaaaatggtgacggtacgagatttgaacacctgcctaatggagctgacggccttggagttgctcactgcctttatggagcacgcggtacgtgaaccttttacgttcaacatttggctagttactttctgtaaagcctttaacctgataataattttatgatacagaagttatgaaataatcattattattacttccatttcgtataacctctcattagctggaaaaatctgaccttggcattgggcacaccggcggcatacagttcaccatcggcggacccagtggtgttttgcccaagcatccgtacgatctgatgctggaaaccaacttttcctatcctgcaatgggcggttgtcccaaaaatgccggatcccgagtgctcaacgagattgttgacaatgactttgagggaaagataccggatgatgaatacaatacgtacaactacatcgaccacgtgatccgacaaacggtaggcaccgacaagacgatgctcctcaccagcttcgtgacccacgatttctttaatcgtaatttgatggaaaacggcacgttcgacactctgatcccccggctaatcgatgtgagttgctttcccaaaacaaacttttcttaggaattgcactttttaatttaaagttataaaaggacctcatatactttgtaatacactccattaggtttaacgaccagcataaaattcttaaaactaacttttccaattttcaggttgctggcactctgaaccacaagcttcctgtcctgctggctctgaatatgaacaacaagcacaatccggacaacacgttcctctactcgttcgattatgcgggcgagtttaatcgttacaaggaaatggacgaggagaccaacttgcagagtcccttcaaggcgggcgtttcgctcaccgacgaggccctctacctgtttccctaccccgagcacgtgactcgtctcagtcgcccggatcagtcgatggctcaccggatggtggagctttggacaaactttgtgatcagtggtaatccgttgggatccgctcgcgtcggctactggccgccgatgaccacgctctacgggccatacatgaggatcgacgatacgatgacaattgggggtaactacttcacggagttctccgccacgttgagcgatgaggaacaggggcacagtctgatccgcgaagtatactatttgcgaagccgcagccgaaagcgagctctaaacaaacgtcgaaaacagctggccaaatcgaatgcaagaaggttgcaaaatccgaaactcggcgggcgcaagagcctagttaagcggccaaaccgcaataagatacgtttttgaccaatatttaaaaaagaatttataaaaccaaaagttatgatgtaagcgataattcaaaaatgtatttattcaaaaacaatagctttcgatatacatatttctatagatatatagaagattattatgaaaggtggtttcacatgattataatatggaccattgatttggtaacttagttccgagaattgcgttccctctctgcctgaatgcggtcctcctcctcctgttgggccctataacgttcctcctccaatttttcttgttcctcttgctcctcgcgaagcttggttgcggcctccaggtaagcctcatagctggggaaatcctcaaccttgagaacatcctgttctgctgcctcttcctcatctggtgatctctcgtactcctccccttggtcctcgtcaggctgttcctctctttcctgttcaacctgatcccttcgctgttgctcgcgctcctgttcctcggcatagctgcggtcgccatcgtaggcttcgtagttgggatgggttggctgttcctctggcaaactttgttcgggatgctgttgattttcttgaagcaatgtttcttgctgctgtcgctcacgctcttgctcctcggcatagattcgatcacgttcagcatttttctcttgtagggctctactatattcttcgtagctagggtattcttcaggaccaggttcctgctgtccacgttcctgctgctcgcgttcttgctgctcacgttccaattgcaattgatattctcgctcttgctgttcctgctgctcgcgacgcagttgctcctgctgttgttgctcgcggtcttcctcactgaagttgcgattggcatcggtttcggggagattttcgttgccttcaggaccatattgttcgtatgagggatatggtagccgtccatcttccggattatcatctggctgtggctcttgtaccggataaccccacgggtttactggttcaggattgtattcgggctgttgttctggttgctg

SEQ ID NO: 19817 - DNA, 1878 bp, DROSOPHILA
atgcagctcttgtggtggcaaatagtttccctgctcctagtactccaatccgtggtggagtctagggttcgtggcaggcaatatgatgaggagaaagacactattgtcgagctgcccactttgggcagcatccagggaaagattctcgaaactgcctggacgaaacgcgaagtgttacagtttgtggatgtcagatatgcggaacctccgacaggactgcatcggtttaaggcgcctcgaccgattgaaccgtgggaggatgtgatggatgccactgcggaaaagattggctgcccgtcggtggtgtcgatggactcgctccgcaggttggatgacgtcttagacgtggaggactgtctgacaatgaccataaccactccgaatgtcacctcacgactgcccgttctcgtttacattcacggcgagtatttgtacgagggcagcaactccgaggctccgccggactatctgctcgagaaggatgtggtgctggtcacaccccagtaccgccttggacccttcggctttctttctacgaagacagatgagattcctggcaacgctggcttcctcgatattttcctggctttgcagttcgtaaagcactttatcaaatacttcggcggtgacccttcgcgggtcacagtagctggacaagtgggtggagctgctattgcccacctgctcacgctctcgccagttgtgcagcgcggcctgtttcatcaggtgatatatcactcgggctcagccattatgcccattttcctcgaggaggatccgcgaaagcacgctcaggaaatcgctaagaaggccgactgtaaaatggtgacggtacgagatttgaacacctgcctaatggagctgacggccttggagttgctcactgcctttatggagcacgcgctggaaaaatctgaccttggcattgggcacaccggcggcatacagttcaccatcggcggacccagtggtgttttgcccaagcatccgtacgatctgatgctggaaaccaacttttcctatcctgcaatgggcggttgtcccaaaaatgccggatcccgagtgctcaacgagattgttgacaatgactttgagggaaagataccggatgatgaatacaatacgtacaactacatcgaccacgtgatccgacaaacggtaggcaccgacaagacgatgctcctcaccagcttcgtgacccacgatttctttaatcgtaatttgatggaaaacggcacgttcgacactctgatcccccggctaatcgatgttgctggcactctgaaccacaagcttcctgtcctgctggctctgaatatgaacaacaagcacaatccggacaacacgttcctctactcgttcgattatgcgggcgagtttaatcgttacaaggaaatggacgaggagaccaacttgcagagtcccttcaaggcgggcgtttcgctcaccgacgaggccctctacctgtttccctaccccgagcacgtgactcgtctcagtcgcccggatcagtcgatggctcaccggatggtggagctttggacaaactttgtgatcagtggtaatccgttgggatccgctcgcgtcggctactggccgccgatgaccacgctctacgggccatacatgaggatcgacgatacgatgacaattgggggtaactacttcacggagttctccgccacgttgagcgatgaggaacaggggcacagtctgatccgcgaagtatactatttgcgaagccgcagccgaaagcgagctctaaacaaacgtcgaaaacagctggccaaatcgaatgcaagaaggttgcaaaatccgaaactcggcgggcgcaagagcctagttaagcggccaaaccgcaataagatacgtttttga

SEQ ID NO: 19818 - protein, 625 aa, DROSOPHILA
MQLLWWQIVSLLLVLQSVVESRVRGRQYDEEKDTIVELPTLGSIQGKILETAWTKREVLQFVDVRYAEPPTGLHRFKAPRPIEPWEDVMDATAEKIGCPSVVSMDSLRRLDDVLDVEDCLTMTITTPNVTSRLPVLVYIHGEYLYEGSNSEAPPDYLLEKDVVLVTPQYRLGPFGFLSTKTDEIPGNAGFLDIFLALQFVKHFIKYFGGDPSRVTVAGQVGGAAIAHLLTLSPVVQRGLFHQVIYHSGSAIMPIFLEEDPRKHAQEIAKKADCKMVTVRDLNTCLMELTALELLTAFMEHALEKSDLGIGHTGGIQFTIGGPSGVLPKHPYDLMLETNFSYPAMGGCPKNAGSRVLNEIVDNDFEGKIPDDEYNTYNYIDHVIRQTVGTDKTMLLTSFVTHDFFNRNLMENGTFDTLIPRLIDVAGTLNHKLPVLLALNMNNKHNPDNTFLYSFDYAGEFNRYKEMDEETNLQSPFKAGVSLTDEALYLFPYPEHVTRLSRPDQSMAHRMVELWTNFVISGNPLGSARVGYWPPMTTLYGPYMRIDDTMTIGGNYFTEFSATLSDEEQGHSLIREVYYLRSRSRKRALNKRRKQLAKSNARRLQNPKLGGRKSLVKRPNRNKIRF

SEQ ID NO: 19819 - DNA, 4948 bp, DROSOPHILA
taggcaaatgtgagtcacctgccgttctgctgatcgaccaggtgttctcgcgtccacccacaagtttttttggttgttcttcaagatgttctctacaaaacatgcatacttcgcttttgagtacttcagcatttcaatgcaattgtttgcgcgtttatgaactagttgtagtccaatgcattttaatctaatctaattttacgtttaccacagtaatatattaataaaaaattaacaaatgtaatttgcataaaccaaggagtctgtcaactcgaattcgaacgcaacatgcatgcttatgtacaaatcttttgtagactgtcacatatggactaaaaatagctgccgaacattgtgtcatttgagataaattgtatctatagatctctgtaccagttgtaaccaatccataaagtctacttaagtctgttgaagctgtatgaggagtaattcactcatacaatcgaaaacgttgtattagatatagcctagctgtacgcaatttgtcagcaaatataaacagatgttaaaagaaagttgttatatgaaccattttaggatacagatgtctggcccaaaggagattagcataatgcaatatctcatcgtgtggagatactcagtgaatcttgctcagtgggagaaaatgccctaggggtcaatcgtagaacaggttgcgcctggctctattttactttcatgtcaacgagcataatcccatttagatcgcgggcttgcctttcggcaatacattgccaaagtttgaatttagattaggtgtcgatgaatattcagcgattggaatcgcgaaaagtaaccatgaagttaagaggaagattggagcggagagtgctaacttgaccccattttattcgaaatagaacccgtgcccggtcaagtgtcactcgaagatggcgagaaagtcttcttggcgggcaaagatctcggatagcttacagttcgcttccatctacccacagcagcggatcgaaataatataatggcgcggtttagtggagttgtactgctcctggcaatcgtccttcttgccgtttttgtggcacaaggcctggcagagaagaacgccaataggcagaagcagcagaagcccagaccgggaaatcaaaactttggtatccagaaaaataagcgtccaaagccccaaaaagtgcagaaacagaagcccaacaagcaacagggtcagaatggtcaagagccaaaggtatttaccacaacggttcctgatttgggcaggctccgtggacgaactctcaccaccgattggacagggcagaagataatgcagttcttggacattccctacggcaaagcagagcgattcagggtgagttaatattgttattatcgcaagattaataggtacatgcatttcttactattttttgagacctttgatgttggtaaatttaaccactcataacttgtattatatttgactcaaaagtatcaacgtcctcgatagtatagtggttagtatccccgcctgtcacgcgggagaccggggttcaattccccgtcggggagaatgcgaaagcattttttttaagtatttgaattaaaatactattggttatggatcacgtaaaatttaacaaggtatttgtttttttttattagtttcatatattaataatattgttccactaagcataagttttgcttataattttgaagttataactttattcttaataaccgataaaacaataagtcctttcgaggcacattaatgtaaatgcatataaaacgaactgttgttaaaaaataaaattgaaaattcgtttaaaaaataaatgctttcaacattctccccgacggggaattgaaccccggtctcccgcgtgacaggcggggatactaaccactatactatcgaggacgttgaacggcgcctgccaaataccggaaacgaaatgcgtgtgaagtacatttgctaattccaatttgaatcaaatggtataacaagaaatttaagaatatatatgtacaagtagttaataataatatttttgtttcatttacagccagctgagcccgcaccttcctggaagggcgtccttcccgcccatcgaccacacgccggctgtccatccattcaggatctgattgtgttcgccaagctggaggaagatggcttcgatgtggaagactgcctgcgtctgtcagtgaacaccaaggcggtgagttaatttccaacacctaatattgccttttacaagaattaatttagaaaagttcatttaccaatataatcctgttttcattacagatggagggcaagtccctgccggtgatggtgtacatccatggcgatttcttctacgacggtgactctgtggaggcagctcccgggtatttgttggagcacgatgtggtcctggtgtccgtgcgttatcgtctgggacccttcggctttctgtccacgctgacggacgagatgcctggcaatgcagcggtcacggacatcatcctggccctcaagtgggtgcagcagcacatcgcatccttcggcggcgatccacagcgggtgacgctcttcggccaagtgggcggagcagcattggtcaacgtgctcaccctgagtcctgcggttccggccggcctcttccatcgcgtgatctatcagtctgggacggcactgtcgcccgccttcatcacggatgctccactgggcgccaccaaggccattggccggatcgcgggatgcaaacagtccactaaggtggatcagctgaacaagtgtctaaaccgtctaaacgcaactatgcttctggccgccttcagcgtccacggcgaaaatcaaccatccttgtccggcggagcctacggtggtgtacagctggtgatcggcggaccatctggcattctgccggagcatccaggtcgtctgctggccgccgagaagttccaggcctatcccacaatgggcggtagcgttaagcatggaggcaccttcatgctgagaggtaattcaacatatatttcttcaagattgttatattatctatactattatgactaaacattacagacatttttgcggatatctttaatgaaaccattttggacgacacgatgaccggaaggcagtacatcgacaccattatcgaacaagctaatggagccgatcccagtggatcgtggaaggagttctccgacgaggagatattcacgcagaatgatgttaagaatggcacctttaagcgtctgaccccagggctgatcgatgtaagtatattccgacttatatgtgatacaacaataattataatagatcaaatctcttttcttatccagctttgcagcactatttccctgaagaatcctgtattattggtcctgcaggccaacgcaaagaagcttcccaatagcacttacctgtacagcttcgactatgagggcgagcagaatcgctatgccacaggtgaggatgaggccaactttgtgcccttcgacatgggtgtctcactgaccgacgacaacctgtacctgttcccgtggccacgattcctggccttgaactccaaccgcgatctcaaggtggctcgtcgcatggtggccctttggacgtccttcgcaacaacgggagttccccaagcacctggactgcccgcctggccagcgatgaacgacgagacgggaccctacatgaagatcgatcggactgtcagtttcggggacaattacctggatgagtaccgcatcgccgtggaggaggcaaagcacggctataacctggtcaacgacgagtactacgatctgcaggaagcccttttggcggccagcaaactggatagtttgaacgatgccaacgaggaggatgaagaggatcaggacgatgctgagggacagagagctgccagtcaaactggtggccaaaactgggtcttcatcgctaggaagtcaacgcgcgtccagaaacagtagagtttcccagcctatcaacgtaacttgtccctttatttatttataacataaacattctcaataaacatacgtgagaccaaaaatacaagaaattttaaatttcaaatcaatataaagctgttttgtggaaatttttgggcttaataaaacattaatggattatcctatattttgttgagccagctttaaattatatttgtgcactaaaaaaaagcataaattatttacttgattgcgaaccttacatgagcgcggcgaatctgctttgatttaaaaaaatgctcaaaacatagttcagaacttgctttcttcattggccacataaatcatcttttgccaggtgaacaaaagtctggcttcgagccaaattcaaattataattcattagggaacataataaagttttagttaagcgtgacaactaatttgttctatggtccatttattttgctagttttgcatcagaattgacaggtcatgatgagaaaaaatcatcgccttgctttaaatttacgagagttaatttctggagttaattgcttaaaacgctgtcgattttcttttaagaaatccggatttgaagaataataatttgttgacacagagttatatttacaatatgctgactcaacacgaaacaaaaattaataataaattggggaatatgttatgtggttccaattcccttgacattgagctcacaaaagcacaataatgaagagaaatattttatctctcttcgctttctagcttccttacacggtggggtttcccaaattcgtctatagttaaatgcagccaaattgtggaattatctgttgcgattagtgaggagtttttggcactgaagcatcaccaatgctttctcccgcagctcgcgatgatgatgattgatataatacctcgtactgtgaattccagtagcgaagagaatttctggaatcaattaggtaaaatttaaaatttaaatcagttcccgcatctttcgagaaattaattt

SEQ ID NO: 19820 - DNA, 2025 bp, DROSOPHILA
atggcgcggtttagtggagttgtactgctcctggcaatcgtccttcttgccgtttttgtggcacaaggcctggcagagaagaacgccaataggcagaagcagcagaagcccagaccgggaaatcaaaactttggtatccagaaaaataagcgtccaaagccccaaaaagtgcagaaacagaagcccaacaagcaacagggtcagaatggtcaagagccaaaggtatttaccacaacggttcctgatttgggcaggctccgtggacgaactctcaccaccgattggacagggcagaagataatgcagttcttggacattccctacggcaaagcagagcgattcaggccagctgagcccgcaccttcctggaagggcgtccttcccgcccatcgaccacacgccggctgtccatccattcaggatctgattgtgttcgccaagctggaggaagatggcttcgatgtggaagactgcctgcgtctgtcagtgaacaccaaggcgatggagggcaagtccctgccggtgatggtgtacatccatggcgatttcttctacgacggtgactctgtggaggcagctcccgggtatttgttggagcacgatgtggtcctggtgtccgtgcgttatcgtctgggacccttcggctttctgtccacgctgacggacgagatgcctggcaatgcagcggtcacggacatcatcctggccctcaagtgggtgcagcagcacatcgcatccttcggcggcgatccacagcgggtgacgctcttcggccaagtgggcggagcagcattggtcaacgtgctcaccctgagtcctgcggttccggccggcctcttccatcgcgtgatctatcagtctgggacggcactgtcgcccgccttcatcacggatgctccactgggcgccaccaaggccattggccggatcgcgggatgcaaacagtccactaaggtggatcagctgaacaagtgtctaaaccgtctaaacgcaactatgcttctggccgccttcagcgtccacggcgaaaatcaaccatccttgtccggcggagcctacggtggtgtacagctggtgatcggcggaccatctggcattctgccggagcatccaggtcgtctgctggccgccgagaagttccaggcctatcccacaatgggcggtagcgttaagcatggaggcaccttcatgctgagagacatttttgcggatatctttaatgaaaccattttggacgacacgatgaccggaaggcagtacatcgacaccattatcgaacaagctaatggagccgatcccagtggatcgtggaaggagttctccgacgaggagatattcacgcagaatgatgttaagaatggcacctttaagcgtctgaccccagggctgatcgatctttgcagcactatttccctgaagaatcctgtattattggtcctgcaggccaacgcaaagaagcttcccaatagcacttacctgtacagcttcgactatgagggcgagcagaatcgctatgccacaggtgaggatgaggccaactttgtgcccttcgacatgggtgtctcactgaccgacgacaacctgtacctgttcccgtggccacgattcctggccttgaactccaaccgcgatctcaaggtggctcgtcgcatggtggccctttggacgtccttcgcaacaacgggagttccccaagcacctggactgcccgcctggccagcgatgaacgacgagacgggaccctacatgaagatcgatcggactgtcagtttcggggacaattacctggatgagtaccgcatcgccgtggaggaggcaaagcacggctataacctggtcaacgacgagtactacgatctgcaggaagcccttttggcggccagcaaactggatagtttgaacgatgccaacgaggaggatgaagaggatcaggacgatgctgagggacagagagctgccagtcaaactggtggccaaaactgggtcttcatcgctaggaagtcaacgcgcgtccagaaacagtag

SEQ ID NO: 19821 - protein, 674 aa, DROSOPHILA
MARFSGVVLLLAIVLLAVFVAQGLAEKNANRQKQQKPRPGNQNFGIQKNKRPKPQKVQKQKPNKQQGQNGQEPKVFTTTVPDLGRLRGRTLTTDWTGQKIMQFLDIPYGKAERFRPAEPAPSWKGVLPAHRPHAGCPSIQDLIVFAKLEEDGFDVEDCLRLSVNTKAMEGKSLPVMVYIHGDFFYDGDSVEAAPGYLLEHDVVLVSVRYRLGPFGFLSTLTDEMPGNAAVTDIILALKWVQQHIASFGGDPQRVTLFGQVGGAALVNVLTLSPAVPAGLFHRVIYQSGTALSPAFITDAPLGATKAIGRIAGCKQSTKVDQLNKCLNRLNATMLLAAFSVHGENQPSLSGGAYGGVQLVIGGPSGILPEHPGRLLAAEKFQAYPTMGGSVKHGGTFMLRDIFADIFNETILDDTMTGRQYIDTIIEQANGADPSGSWKEFSDEEIFTQNDVKNGTFKRLTPGLIDLCSTISLKNPVLLVLQANAKKLPNSTYLYSFDYEGEQNRYATGEDEANFVPFDMGVSLTDDNLYLFPWPRFLALNSNRDLKVARRMVALWTSFATTGVPQAPGLPAWPAMNDETGPYMKIDRTVSFGDNYLDEYRIAVEEAKHGYNLVNDEYYDLQEALLAASKLDSLNDANEEDEEDQDDAEGQRAASQTGGQNWVFIARKSTRVQKQ

SEQ ID NO: 19822 - DNA, 3279 bp, DROSOPHILA
aaagtttaatttgactctgctaattcgactccatttgtatttttttcagaagacttgcttgaagaacaacaagattgattacatcaagctgctgggcgaaatcgccacggagaaccagttcgaggtgacctatgtggacatagaggagaagaccttctctggccagttccagtgcctggttcaactgtccacgctgcccgttggcgtttgccacggcagcggaccaacagctgccgatgcccagcggcatgccgcccagaatgccctcgagtacttgaagatcatgaccaagaagtagggggtgcagccaactgaatagcaaaatctgaacgcacaccacgaccacgatcacgagtatttgatgagagcgattaccgagtggatacgggataactaatgcaccagtctaattgcttttctttccactttttggctcaatgcagtggcgatgttacatatatatatatatatattttgtttcttttccaccgattcctttgattaggcagttgtatttgttaactgcatatgtaaatgttcatatatgtactacacttaccgatgaatgtatgtacgcttgcaaatacagacaagcgtgtaatcgatattggaatcttctagtcgctttcaaattctgaaaaacgtaaaacggcagataaaactaggtttaaggtagactacgtgctagtttgcgaaggaaaaaggcttatgaatataatcggtatttggtaatcgctacttttgcagttttcttttccttgggctgaaaaactttgtaaactccgaattaaagggcattgatgaattgaaattaatcaatccaactttagaaatattctgtgaaaacatcttttatgatatggaattatttaactacaaattagttaggaaataaattgacaaatataatactgaagttatagtagccgtggctttatttaaataggtaattttgtgcttaatctaaagtagtattctaagtaatcataaaggattgcatctatttcttctttctgtcctgcgtacacttgggacagaaccacttgccctttggctttgtggtgaggccaacacaagcgaagtgaaaccactcgatgggacactaaaatggtagagtgaaagatctagaactgaccacagagtacatcaaaatcgaatactcacgtcgggattgtcgcagccaatcatctctccataggacacctggtggcataggcaatatgtgggctcattgggatcgacgggcatgtccataacgtcgctgggatgagtggcggccgtgtggcacgattccttctcagagtcatcaacctcgacggttttctaaatgggtatgttagcaaaatgagtaagaatggggtttcgacgatagtggaggcgtgcatgtacataagtgaaaatgcaaacgatatggaaaacagtggataatgcaggatttctatggggataatctataaaagtaaagagtattctatttagggtcaatgaaaactgggaaacagtaaacatactaaagttctaacaatgtatagatgagaatgtggatggtttaccttttgagcgccccccttgcgagtttctttttcttgatttaccttggactttttctttttgctaccttgcccggcattgctgctcgaattgacactggaattggcgttagattggttgttgccgcgcccagtttcctcatccgaggatgcggactttttctttttgcccgtcgtcttgctgtccttggtttttttgcgaccttctgtacaaatggaatcaaaggaaggggtcagcttgtggaagaatagatactttggaacagtcttactcttggccaccacttcctcggatttggcacgcgtggatgaggccttctcctgaatctcaccctcgaagcgtgctaaatcgttgtccagtcgccgtatctgcttgtccactagttcgtaggtctgaatggccagctgcaccttgtcgtcgctgtactccttggcctttccgaacagtgccttgatatcctcctggcgctccctcctctcatcctcgctcatggccccgttctcgcccagcttgcgcataaagtccttggcatggctatcgatgctcttcatcgctgtttgtgctcgatcgtctaattttcgcatcagcttaaaatttctctccagctccgttggcagactttccaatcctgtttgtaaatcgtgaataatatatgttttcgagtgttttccatgcttaagaatcttcttaccgtctaaatagttctctaggtatatagccgatgacattttcggtgtcaaatatcggatttaacaaagaatatggagtgtgtaagctaaattccagcgtctgtttacgatagcaacagctgtattgttgtacatgggatatttagggatgacagctcgctttttaaagttatcgattactttacagtggttaaaagcataacccaaaacaattgggcagtgcttaaatttaaaaattaaaagaaaaaataaaatatttacattaagtagatttcggatcggattttgtggtagttatttgctaaatctttgaaaaacttttagttacgactgcgcaacagctgtttttaagtgtggttacaactttatgatggttggcaactctacatctagtataatcacaatcaaaaacactaatttgttttgatagctcattttaaaggtaaattaagttttgaaaaatgagcgccagttccggaggatcctggattaatgccatctacgatgaggtagctctggagggtctggagggagtgacattgccctgtaagagatttccatgccctccacacatcaactccaagttatttgtttatgcttttagatctctgggatcttctggccaggcgactggagtttttcccctctccgctgcctgaccgcatccgggaacagacgtggaccttgctgctacgcacgccgcctcacaagatcgagttctttgaactgccggcggaaagaccactaatgccctactatgatcgcctcaacgacatcgacgagcagctgggattgcccgtggtgcccgagcagtgtccgtacatgttgttcccggccgcctatgtgcaagagggcgacattaagggtaattgcaacgacttcaagacacgtaagctgatcccttccagcgatctgcattctcttaatgccgctcaagcaacggaacagtgggcgggcaggctcgtagtggtggcctcccaagagctgcgggagacagcactcacgcccgaaagcctcctgatgcccaagaatctgccac

SEQ ID NO: 19823 - DNA, 987 bp, DROSOPHILA
atgtcatcggctatatacctagagaactatttagacggtaagaagattcttaagcatggaaaacactcgaaaacatatattattcacgatttacaaacaggattggaaagtctgccaacggagctggagagaaattttaagctgatgcgaaaattagacgatcgagcacaaacagcgatgaagagcatcgatagccatgccaaggactttatgcgcaagctgggcgagaacggggccatgagcgaggatgagaggagggagcgccaggaggatatcaaggcactgttcggaaaggccaaggagtacagcgacgacaaggtgcagctggccattcagacctacgaactagtggacaagcagatacggcgactggacaacgatttagcacgcttcgagggtgagattcaggagaaggcctcatccacgcgtgccaaatccgaggaagtggtggccaagagtaagactgttccaaagtatctattcttccacaagctgaccccttcctttgattccatttgtacagaaggtcgcaaaaaaaccaaggacagcaagacgacgggcaaaaagaaaaagtccgcatcctcggatgaggaaactgggcgcggcaacaaccaatctaacgccaattccagtgtcaattcgagcagcaatgccgggcaaggtagcaaaaagaaaaagtccaaggtaaatcaagaaaaagaaactcgcaaggggggcgctcaaaagaaaaccgtcgaggttgatgactctgagaaggaatcgtgccacacggccgccactcatcccagcgacgttatggacatgcccgtcgatcccaatgagcccacatattgcctatgccaccaggtgtcctatggagagatgattggctgcgacaatcccgactgtcccatcgagtggtttcacttcgcttgtgttggcctcaccacaaagccaaagggcaagtggttctgtcccaagtgtacgcaggacagaaagaagaaatag

SEQ ID NO: 19824 - protein, 328 aa, DROSOPHILA
MSSAIYLENYLDGKKILKHGKHSKTYIIHDLQTGLESLPTELERNFKLMRKLDDRAQTAMKSIDSHAKDFMRKLGENGAMSEDERRERQEDIKALFGKAKEYSDDKVQLAIQTYELVDKQIRRLDNDLARFEGEIQEKASSTRAKSEEVVAKSKTVPKYLFFHKLTPSFDSICTEGRKKTKDSKTTGKKKKSASSDEETGRGNNQSNANSSVNSSSNAGQGSKKKKSKVNQEKETRKGGAQKKTVEVDDSEKESCHTAATHPSDVMDMPVDPNEPTYCLCHQVSYGEMIGCDNPDCPIEWFHFACVGLTTKPKGKWFCPKCTQDRKKK

SEQ ID NO: 19825 - DNA, 2590 bp, DROSOPHILA
gagtagaaggggttcttgagcacgtagtctgagtacagctcgtaaacctttcgcagcagcagatcaatgccattgagacccgtttccgagattataatgaacttgattccggtcagcgtttggaagcagtgcagcgtgaaagtgtccgcctctaggatctcgatgccggaactcttgggctccggactcagttggctggcgatggcgaacagcgggtagaacatgctggccagaaagattttctcgttggtggtcatctttggccggctgaacttcaggttaatgggatagttctccggtgcatccagtgtcgtcctcacatcgcgtccatcatccagggtgactccattgacgggcataccgttgaccgccaccaggacatggcccactgttcgtaagcatatattaaggtggttatgtttctaaaattcacagacacacccaccatttattccatcctttctgttgaacgagaccgataccttcttggaatcgtagtccagcaccaagtccagagggtatgtaaaggtcttctcgtgctcaatgcgtggcacattgttgtccaggttgaatataaggccacccgatttactaactatatagacgccatatataatcatttcttactattactaattctaagtttcctaggaatgtttttatattttatgcgaattagcgatggtagtgccagccagctgtttgccgcggaaccagttccagttccggcttagttgccattaacagtacattaacattgcgccttaacagttgggtccatcgaagaaattataattattaggataaataaaccattaaattattataagaagcattatttaaaatttaggaataaaatgggaagtaaactctttagccagaatactaagaatacttaaaaaatatttacaagttcaaccaaaaatctagttctaccagggcggagtagctctttaaactgattccatcttgcctatcgcgttcatttaactagttcacggccgaacagctgtctcggcattagaattaaaaataaacataattgattttctgcccgaaagtatacgtaaacgcgtaggcgctcccacctggcagtgcacccgattgaccgacttgcaacctccacggccaccgatgggctccgacgaccagagtgccggggacaggatccagaagggattccagatcaactatatgattctgcgggatgccgacagcggaaaaataatctggcaggagaacaaggacttctcggcaccggaccaggagcatgaggcccgagtgccggtgaaaatactcgacatgcgtgccgtttcccgggagatcaacttcagcaccatcgagtcgatggagaactttcgcctggaccagaaggtgctcttcaagggccgcatcatggaggagtggttctttgagatgggattcgtgggtgccaacaccaccaacacctggcagtcgacaatcgaggcggcacccgaatcccagatgatgcctgccaaggtcttgaacggcaatgtgactatccaaaccagtttctacgacaacgagacactcatcaccaaatcggttgtgcgcctgtactacatttaggcaaatgtgagtcacctgccgttctgctgatcgaccaggtgttctcgcgtccacccacaagtttttttggttgttcttcaagatgttctctacaaaacatgcatacttcgcttttgagtacttcagcatttcaatgcaattgtttgcgcgtttatgaactagttgtagtccaatgcattttaatctaatctaattttacgtttaccacagtaatatattaataaaaaattaacaaatgtaatttgcataaaccaaggagtctgtcaactcgaattcgaacgcaacatgcatgcttatgtacaaatcttttgtagactgtcacatatggactaaaaatagctgccgaacattgtgtcatttgagataaattgtatctatagatctctgtaccagttgtaaccaatccataaagtctacttaagtctgttgaagctgtatgaggagtaattcactcatacaatcgaaaacgttgtattagatatagcctagctgtacgcaatttgtcagcaaatataaacagatgttaaaagaaagttgttatatgaaccattttaggatacagatgtctggcccaaaggagattagcataatgcaatatctcatcgtgtggagatactcagtgaatcttgctcagtgggagaaaatgccctaggggtcaatcgtagaacaggttgcgcctggctctattttactttcatgtcaacgagcataatcccatttagatcgcgggcttgcctttcggcaatacattgccaaagtttgaatttagattaggtgtcgatgaatattcagcgattggaatcgcgaaaagtaaccatgaagttaagaggaagattggagcggagagtgctaacttgaccccattttattcgaaatagaacccgtgcccggtcaagtgtcactcgaagatggcgagaaagtcttcttggcgggcaaagatctcggatagcttacagttcgcttccatctacccacagcagcggatcgaaataatataatg

SEQ ID NO: 19826 - DNA, 590 bp, DROSOPHILA
gccgaacagctgtctcggcattagaattaaaaataaacataattgattttctgcccgaaagtatacgtaaacgcgtaggcgctcccacctggcagtgcacccgattgaccgacttgcaacctccacggccaccgatgggctccgacgaccagagtgccggggacaggatccagaagggattccagatcaactatatgattctgcgggatgccgacagcggaaaaataatctggcaggagaacaaggacttctcggcaccggaccaggagcatgaggcccgagtgccggtgaaaatactcgacatgcgtgccgtttcccgggagatcaacttcagcaccatcgagtcgatggagaactttcgcctggaccagaaggtgctcttcaagggccgcatcatggaggagtggttctttgagatgggattcgtgggtgccaacaccaccaacacctggcagtcgacaatcgaggcggcacccgaatcccagatgatgcctgccaaggtcttgaacggcaatgtgactatccaaaccagtttctacgacaacgagacactcatcaccaaatcggttgtgcgcctgtactacatttag

SEQ ID NO: 19827 - protein, 151 aa, DROSOPHILA
MGSDDQSAGDRIQKGFQINYMILRDADSGKIIWQENKDFSAPDQEHEARVPVKILDMRAVSREINFSTIESMENFRLDQKVLFKGRIMEEWFFEMGFVGANTTNTWQSTIEAAPESQMMPAKVLNGNVTIQTSFYDNETLITKSVVRLYYI

SEQ ID NO: 19828 - DNA, 13767 bp, DROSOPHILA
tgtttttatttaaagcaaatataccggaattttggctgtgtgtagtttttcttttccagaatttttcctcttttcattccattgcctctagcaatttcctctccaagtcggcacattttatgcctttaattacgcgcagaactaaaaaattgctagtgggtgtaattgtaaaaaatcgggtcagcaataatgcacattaattatggtttattgttgctgcaagtgtgtcatcgtgtaggaatcgaatgaagtagtcggttcgtttttagttggttcgggttgcatttttttggctgagccaagaaattgtttttcgatttatcttagtcgtgttgacattatttatttatctttagcatttttattcgcacggggaatgttacaacaatttgaaggttaaaatttgtggtatttgtacgcaccacgcctaaagatttaaagagcaacacacaatttggtttgtttattttggtttctcgctctttcgtttcgtgatcgagatagctagtagttccttcttttcgttttgattttcgtggcattaattttgggttttctaaaaagccaaatggatctaaaaatagtttcaccgattctcgtttatgctgccgctgcttcagcacgtgtatatggggaaaaatacggatgtacatatgcgtttttcccctaaaatctagaacttattttggccaaaattagaaattaactaaagtggaaatatgcggcagtccattctgtcgccccgccactttctctgctttccccaaaaatactttttgacattcacagggaaacctgtcagttttccgctctctgagagtcattccatatctctctctattggttgcattgcattctcttcgttttccactctctcttgtttgccaccccctttttggtgctactgccctgcagtttttaaggtcagtcgaaaattttccagctgagcgtcaagttgaagaagaacttattctaaattcgggaaaaaccctttttctccatttaattgcagcattttaactgaaatcatgactgaagttgagcaaccgccacagaatggcatagatcccactgccggcgaagatgatgacaatagcaaagcacgtcccgcggatattgaacaggtaagtgcaggccgtcgaagtcccaactggataacaacccctccaccaaacactcaccaccaccactttactttctcctcctccaggatatgcgcgaaatggagcgtcgcaagcgagtcgaggctataatgggctcgaaactgttccgcgaggagctggagcgtatcgtggactcggcgcgcgatggaggtgctggcgctagtggaatcctgcagcagctgtcggacattgtgggcgtaccagtgtccagggtgggcagcgtcttcaagagcagcaactgcatggtgccaatcaacgatatacgcggcgtcgagtccatgggctatgccaagggcgagaagatactccggtgcaagctggccgccacattccgtctgctcgatctgtacggctggacccagggtctgggggcacagatcaccgcccgactcaaggtcgatcaggagtacttcctggttaacccatacggcctgctttaccacgagatcactgcctcagcgctgaacaaggtggatatgcaaggacagattgtggagcagggcaccaccaactttggcggcaacaagagtcgtaagtggctgacaattgaacctataattgaatatatcaaatatatatttatctgtttttaactgccttgcagactttgtcctccattcggtggtacatgctgcccgtccagatattcgatgcgccatctatatcggctgcagtccagtcgtggctatttcctcactaaagacgggtctattgcccttgaccaaggatgcctgtgtgctgggcgagatcaccactcacgcttatactggtctattcgacgaggaggagcgcaatcgattggtccgcagccttggtcccaactccaaggtgattctgttaactaatcacggtgctttgtgctgcggagagaccatcgaggaagccttcttcgccgcctgtcacattgtacaggcgtgtgagacgcaactgaagctgttgcccgtcggtttggataacttggtgctgattccagaggagtcgcgcaaggccatttacgagcagtcgcgccggccgccggaggatctggagaagaagtttgccgccgtcgccgctgccgaagatggtgctgctactgctgaaaaggatgcagccgaagcagtacccaaggttggcagtccgcccaagtggcgtgtgggtggtgctgaatttgaggccttgatgcgcatgctggacaatgctggctatcgcactggctatatctaccgtcatccactgatcaaatcggatcctcccaagcctaagaacgatgtcgaactaccgccagctgtttcatcactgggctatcttcttgaggaggaggaactcttccgtcaagggtaagcgaatgcacttaaattgtacctaaacaattccctaataaaatctatttacttttaggatctggaagaagggagatattcgcaaaggcggcgatcgcagtcggtggctcaactcgccaaacgtttaccaaaaggtcgaggttctggagaccggcactccggatcccaagaagattacaaaggtagaaatcattactttcgaagatatgaagcaaaccaaaaccaccaaccttaaggagattgagggaaaatagttgaaattgttggacaccgaatccttcaactctttacagacattccacttgctatccccatatataatttccatttcgttagcactcagttttagtttcaactttgccactaagctgcaactatattcacgcataaaatttttagagtttaagtaaatgaaagtaatcaatatacaaattctatatatttatatactttggaaatagaattaaaactcgggctaaaccaaaattattttacgtgctttgctagcaagcaaacaaatattgtgtaatgtgcattaatcaaataaataaaataaacaagaaataaaaatttgcatagatgattttgtgcctcatttagggatttcgctgcctcaaaaacaagacaatagcgctaaaacaatgcaaagaaagagaaagaaatttgctatgaatactaatcactatgtaataaataaaacattttttaatttaccgaatcaatgatttcatatttaaccgcattatttttcattcataaaatttttctttgcatgttttatggtatctttcttttattctctttgtgattggttttcattgttattcaaggcacaaaatcatttatgcttgttattttagttaatttatgtttatttgatcattgaaaagtttgatatctaggaacatattcttatgtatgttaaaaataaacatttcgaaaaacacttgcattggaatgcctacgatgtaacattaattttaagactggtgtaaacgaattcacataagatcacacgtgtaaaaatctatcgaacagttgaatgggaatgtttgtttataattaagaatcttcccatattgatatgaatcttagtattcactccacattaaaatcaaatttctttctctttcttttctatttgcattgatcccaccccaccctcaacacacaacacataatttacaatataaaacaaaatatgacagtgggtggctgagggttcccccacccactcaacgccagtgaggatagaagatccactccagtttgtgcctgcaggaaccaatccaagggaatttaagcgtgtccagcaactagtcagtattataatactcttagtcccaatgaactttgttaacaagtggaagctttttcaaacagattaaggacaaccgccgggcagataagatttcagccggaccacagtcgcatattctggagggcgtgacatgggacgaggcgagccgactcaaggatgcaacggtctcgcaggccggcgatcatgtcgtcatgatgggtgccgcctccaagggaatcattcagcgtggcttccagcacaatgccactgtctacaaggcaccgtatgctaagaacccattcgataacgtcacagacgatgaactcaatgaatacaaacgcacggtggagcgcaaaaagaaatcggtgcatggtgaatgtaagttagcaatcatacaaaaccaataaccaaatagttacttataatgcatacaacaacttttgcagataccgacacagacttttcggaatccgaagcggtcctgcaggcggggacaaagaaatacccacaaagcgaacccgagaccggtatgttaactatttagaaactatactgattactggaaactaatattatgtggatattctagagcaccaggtcattgagatccaaacacagcaagcgccagtgccaaggcaggcggaagtcgtgctgagcgatggtaagtccagttttgtactaaaaaatgtgatctacttgtttttaatttttatatatgattaaaattacttcaatcatgcacactataaaacatttcaagtacacttgtccaagagttttgtcttacaagtcattatgtgatcgaaattttatagttctattttttatgttccgttattttgtttatctcatttttatttcttttgttttacttttgttttttgttaactatttgtttaataatttattaataatttaggtctttaagatgctgctatatttaaaacgtattttgcgtagtttttaaataataataatttccttgtagtattattttcctagttttttttttttggtattcttattttatttgattcctaacatttattaacatttttatgccatttccctcttttcgtttttttgctgtattttcgcattataaatttaccaaccacacacaaacgcctaaaactacacacatttcaatggaaaccaacactttcaaattacttaatgaagtcaacaaaaaaattcttgtagcaattgatactatcacaacttcctttctgtaaaatcctcaaaattatttgctgttttgttaaaaatcttaagcttctaattagttatgttttattagttaaatattgtgcaatataattcacatttacacaatacttccaaggaaccaactgttgtacggcgttcataaaatgatttataatttcaacgttcaacaatacgacagcacatcaatcccaaatgttacaacaaaaagaaactttttatagtagaaaagctgcagttttagttaatcctttgttttacaaaattttcgtttaattttccgaatttggcaatttgtaaatcaaaatttgacctttccattatttttacataggaaaaaagaacaaaaccaaataaattggcaaattgaacaggaaaaatgcgaattaaaagcactagttagtattgatatgaaagcgaagtgtgtgtaggctaaaaataaaataaaccaaaaatttataacaaaacgaaagaccagcaaccaacaacaagaagcaaccgaagttctcaacagaacacaaaaattctactactacactaccacaactactacatactaccttttctactactacttctgcggctgctgcgctctataacacaaaataaaaataactaaataatatgcagtttaaaaagaaaaacccttttgagttggaggtgagtgcagccccaaaggtttagtgtgtagtcaaaaaaataaaaaaaaataaataaaaaatcaagaaaatagtttatagaaaaaatgttcagcataacaaaaacataagccacctgcacactaaaccacattcaacatgtcatatcaacttttgctgaatgctcttagttgaatcacaatatgcgctgttagccaagaaattaaattgcagcttgctgttttgttgggttttctccgtgttaaccgcaattttccataaatttttgttttaaactgcagctgttttctgttgattgcttctttagttgcccagcagccatttcgtacattagtgaacacaactaatccgtataccataagtttaaggcatgcttgatcgatactaaactctaaaactcatgcaacactacgtatttatagtttaaggcaactgattacgtctgtctcacaattgtttagcgatttacttgcgatcgtctgtcgctgaatatgattttataattttatttctcaatactattttagccacacttagttttataaacggcgaacgctctcacacagccacaaatcgcaagccgccaactggccgaggtaacgaacaagacccatttgaaagatactccacagtacttacatccttcaatgtactcaggctaaacgcccattgtatataatatcgttgaaacattataataccccatataatccactagcagttcgttgttaatggtgtatactcaatataacccttatataatccacaagcccatggcaaattattgatgcaccacaactaaacactagctatagtttgaggttgatatttaccattgaaataatttattgcggttttcttagttcattacattggttttgggtgaaacgatacatcgtcaactcttttgcacaggaaactcgttgttttaattcaaatgcccttaaaaactgctcgtttttccaagctcgagatatttttaataggtcagacttaagtacaaccaaaaatgggatatgtttttcagatttatggatctgtaatccagtacgtattggcattatgtatgtatttcgagagccgcacttatctaagatgctggctccggactttttatagattgtcacatatacttacaatttttcggcttttcttacctcccacacctgcatttaatgtcgctttaactagacgatagtaagaataatgagtatggagacgacatggagaaccaattatatgagcggaacaggaacgtacacaataacagcaagtgtcgacgtgatctgtttgcaacaaagcgcagggatccccatccatcaccggagcgtctgtatacctatgtctatgctacagctgcctctgtgggccagtgcgtccaaccggaggtgtgttccgctttgttgcgggctctgcatagcgagcagttgggctacctggcgagtagctatcgcggaggagctgggaactcaaatgccaccaccgccagcacatgcactataaccagcgtcacgggctcctctaccgcatcgcgcagaccattgcaaaatgtgaatattatgtatccgcagccgtatcgcacgggctcccattttggattcaattcaccacgccagcagccacgcactgagcataagcatgtgcccagggagcgagactataatgccttgggctaccgaccgatgcaacgagggatcagttacgaggagatcttcgccacacctcgctatgaacagttgtgccaggtgtgtttcgacaaactactgcgccttaagcccgagctgcaaaggattggcagtggcacggctactagtagttgtgcggaggagcaggcaagtacagggagcactcccttgcaacgccgccaattgccgactttgcctgagttatgcgatcatcgtagggaaatggaaaagttgccagaacctccgagggtccaacgtaatgcgtacacacagacacagaagtgttctccatcctcttccacctataatttccttagtcaaatcgaaaagtttaacttctcggaagaatcgacggacatagattatactccacgccccattaacagtgaaagtagcctgttgggactgattgtggaacaggcaacctcgagtgctggagcgagtgccacaagtgctccacctcaaagaatttactgtgcagaacaagtggacattacagaagtgtggagttttgggcgttggttggaaccccaggaccatatgatagcgagtaatgcagatgagttttcccaacagccgctgaccgagcattgcatcacattggagtttaatcaacaatattcgactggcgacaatcaggtcgatcgccaattgatgacacgcgaagagcgtcagcgtcgaaagtctgagttccaggagctttggcaagatcatgtcgagtactttgaatccaaagaacagatgcatacccatgaaaatatccaggaagtcgcgactcttagtgcttatgattgcttagaccaggatataggcgagattgaagacggattcaatgatggaacaatcgctgatgcaagtgatgagttaccgaacattctgcagatgttcgaggatagtcttacattagccggcgaaaacctagaaaagctggtggaaagtaccaaaaaactacaagcaattcacagtgaaacatcaccagcctcttccaatagttccctagccgaagtttgtaatctctttcggtcgagaagtttcgagagcattcctgctatcgatgatactgtgtctgtacaggaaccactttacgatttgcccataaattcaagtatcgaagaagatgacggactgcaacataattttgtacaggaggaaaagcgtgacgacgaaaaacctcttactcccatttcaacggagccagaggaaccttcggataaggagaaggatcttgtcgacgagaaagacatagacgaaaatgaaaatcacgtggaggctgagttccaaaaggctcttggcgaaacaatgcaagtaaccgtccttatgccaatggaacacaaaacccccctgaaagatacagatgaaaatgatcgtttggttgagactgagatccgagatcctcaagaagttagctccttagagacagataaccagtttttcacaccgctggaacgcgaggttctgcatcggatcgagaaagaaagacttgacgaggcggagcctatatttggaaagattgaccatagtattcgcaacaagatgacgccaaagaagctgcaagacttggtcagcgaagagatatttcgcacacaaacgcatgtatacacgaatctaaggacaccgatatcgaagaatatacagcatgacaccactttgactcccagtggctcatccctgtcagctcataatatcagtgcaccgtgcagctcaatggcgcacactcatctagtcacccgaccaacaccccgaatgtcgcgatcctggtccgaagatcagcaaagtgaggatgacgatcaaaagaagaacgaagcgggagaacggggatacattgacaatgacactcccatagatcgagtcatctcgtctacaacatttgtgtgcagaagaagtccaaccagaaagcgcaactttattcaggagaatattcgcaatgccagcagaccacgaattgcagccggttcgattagaaaacataaaagcaacatcgtaacttcccctagagccaaatcaagcccatcctcggtgtatacttttcagtgtggccaacgggatagcggagcacgcctatgggttgccttgccaacgtctccacgtggtcaaaacgatgagaaatcgtctactgcagctcgggctttgtacaccgttcggggtaatcccccatcaccatttgccaaacgtcgtagacccttggttatccttccaccaatgcgtaataaaaataaagcccataatcgcgagatgagctcatctaatgaatctctgcacagaactctttccagtagcacgttcaatgtggacgatgatgaagatcctgcaaattcggataacatttcaatgagtacctttcagttggaggaaggtcaagaagtatcatctcctgcaactcaggataataggaatgggactaacagttctgtgtactacagcgcaaacgataccacgcgagaagagagagaatcttcacagccaagcagggacgaagcagaagagaatcttggagtcatggaatttatgcccgaatcaattccacttttggaaataccagatatctgtaaccaactcgatgaagacggatcatcgttagaactcgcacgcttagcaggcggatttgaagtgggtacaacagaagacgaccaagtcgaagaagtggaacaacagaagaagagcatagataacgaatccaaaaatgttctgcctatgggaatagaagaaattaatggcgttcaggacagcatttgttccatgcaggcggatattgataaggatgatattgttaataccgatgatcaaccctcgacttcaaaagcggcaatgaaaaaaattcgcatatatggtggtgcggagcccgaagagactcctcattgcgaagatgaggatgtggtgacgctggaaacggtttgcattgtgcgtggtctggagatgtttgtgcgagaggtggagcccataaagcaagagacttcagaggaactatcagagcttgggggactttttgaaaatgggttaattgatgaaggtggcgaggaggccatgtcccagtagcagtgaaaccagaagttgatgaagaatttatgaaaaaatattgaggaacgaaaggataacactaactttgaacacttttttttttgaacattttatattcgtttatgattttaacattgcttgtcattaccattttttgtactatttttcatatatttaacattgtaacattgaaaactttcttcttttgtaatgtaatttatagaaccattaaaaatgtgtgaattattggttttgtactcagcaaatttatgttaagttataaagggtatggtgtttatctttacaattatgggttaaaaaaaatcgaacattatgggtttatattaataataagacattgtttaaatttaattattagtagtaaatattccatcataatgtcttagaatatgtcatccagtgtttcacgtcccttgtcctgcgtccagtgtgtaaattatgttggtcgtgataatttttggaggttcaggtgctcagaatcatacttacattactttctatatccacatcacccgccatttgatatatatcgattctagcacttgtctctcaactggctcaaaagtatgcgttcctttattcgcctggccaatacatgtatgcctgcatgaaaatggctccattaatgcataaggtttatgttatacacaaggtcgagcccgtcagcaagcacaactatccgccagttaacgatggcaatatgagtattcatcacaacgaaagtggagccggattcatggcccaagagtccagcgttattagtagcacccccgtacgcaatgccttggcatctgtatcattgccggaagagaggaatcattctattttgggcttatcatcgactccgtatcgcaccatctcgcatttcgggttcaattgtccgcttattacgtcaccaaccattctcctgcatcccgaacatcgatccatttggcaacgggtggccgagcagcgcgagaaggttgtgtccttcatagatctcacaacattgagcttggacaaccgcaagctgctcaatgtggtgacatcaacgcatccaacccagtgccaatcgcaatcgcaatcctttatctctgagaagcacattcagctggaagttacgccaccgaagcgaaagcagcgtgtctacagcgccaccatcagcagtggtctagacgacagcctcgatgagctggactccctgatgagtggcctagccatcaatatgccgcgcagtcgggagcaggacagcggtctgtaccgcagctacacctttctacccagtaatcatgctctgcccaaggatacagatgccaataatagggatcaaacggatcgggagcgaccagaagcggagcaggaggaaagttttcactgcgcaggcgacagtggtattggcgattccaccggcaggcgtccgcgtctggccaccaccagcaatgattcgtctattcaagaggccgaagcctatacccagggcaagcacgtcaagttgaccttgagcagctcacccacgccgacggccacacagtcacctgcaaccatcgaaattcttatcaacgtatcgctgcgcaatgccgagtgcgtccaaacggtccagacccatgagcaggagtttcgcgccaagttggagcgagtaatcgacgaggagatccactatatttcgcagcaactcgcatttaaacagcgacaggcagagttgcatgaacaacagactacatcgcgggctccaatcgctacgccttctttcacaactatgcatccgccggcaccggcttcttcatcatccatggttcaccgcagcaactcggcaccagaactgtgccacacctatagctatgtggccgtgggcgatttgtcgaccaaacaggatcaagcctctccccaactgccagcggagggtgagccgttgaatgatatactcagtagtttggagaaggaactggagcgtctgctgaatagcgtggtgacagcccacatgctgcacaacaaggccatcatacacgagtgccgggctcgcttctcgcagctggccgatggaattgtcagctcgtagatacatattatgattttgatggaaaatttacatcttcgcttttgttgtgatatttgaaaatcgacaacagtgaaatgattgtataaagcaactagattaagtttaatgatgataatttggaaatcttcaaatcgaactaatgcattttttacttctttgttctcttaatttaaatgttaagactgtaacttaagcacaatatgaaaatgcaaagttaaaactgaatctgagccaaccattgtacatttaaacatctgtgaaattgttaagtttaatttttgtcgaatcttgattttcgtttcatatttttataattaaaatataataaatatagttttcattatgtttaatgtttttaagaaagttttaggttaagtgttcatacttacgaaacattaatttcaatcagttaactttaatcagcgcccaggtaaaataatttcatttattatttatgtttgtgttttgtactgcatgtctgcttgctttttaacatatattgctgatcctgctgcatgtcctcgtgtttgaatagcgaatcctaaactccatctatgtacttatacatccacaccaatcaaaacatttaatacatgtacatgttttagttagattattattcgtgcgtgtctcatatggtgaaagtaattacgaaattaatatcaaatattttgtgtgcgtccactgagttacatttgtaggagacccatgccaaattacactgctatacaaattactaacgacattttcgacccttttgcaacaggtgaaaacgtacaaaatggcgatcattcggaggcacacttgagcaccttctcgcagagcagtaaagaggtaagtacatccgaactgatcctgcgatccaagatctacggatctcttcttcaactcgaacactcacaagcagtaagctgggtggtaagcgattagcaagtagagttgctacatcgacaagacaaccagttttaaacaacatcatcatgcattgagctaacctcatttgatttactaaccgaagcgcaaccgatattctcactgcaaatttctattacggttccaggatgtctccacggacggatcccccaagaaagacaagaagaagaagaagggtctgcgcacaccatcgtttttgaaaaagaagaaggagaagaagaaggccgaggcctaagctgaccatcagcgtgatccgtaggagtagcaatcttgaccaacctcccaccatcagcgggaaccgagaaaaataacgacaatgataccacgagaaaatggaaactttagccagatcagcaaaagaagcattatataaaaaaaagagagaggcctaaacaagcaacggatgagca

SEQ ID NO: 19829 - DNA, 3842 bp, DROSOPHILA
atttaattgcagcattttaactgaaatcatgactgaagttgagcaaccgccacagaatggcatagatcccactgccggcgaagatgatgacaatagcaaagcacgtcccgcggatattgaacaggatatgcgcgaaatggagcgtcgcaagcgagtcgaggctataatgggctcgaaactgttccgcgaggagctggagcgtatcgtggactcggcgcgcgatggaggtgctggcgctagtggaatcctgcagcagctgtcggacattgtgggcgtaccagtgtccagggtgggcagcgtcttcaagagcagcaactgcatggtgccaatcaacgatatacgcggcgtcgagtccatgggctatgccaagggcgagaagatactccggtgcaagctggccgccacattccgtctgctcgatctgtacggctggacccagggtctgggggcacagatcaccgcccgactcaaggtcgatcaggagtacttcctggttaacccatacggcctgctttaccacgagatcactgcctcagcgctgaacaaggtggatatgcaaggacagattgtggagcagggcaccaccaactttggcggcaacaagagtcactttgtcctccattcggtggtacatgctgcccgtccagatattcgatgcgccatctatatcggctgcagtccagtcgtggctatttcctcactaaagacgggtctattgcccttgaccaaggatgcctgtgtgctgggcgagatcaccactcacgcttatactggtctattcgacgaggaggagcgcaatcgattggtccgcagccttggtcccaactccaaggtgattctgttaactaatcacggtgctttgtgctgcggagagaccatcgaggaagccttcttcgccgcctgtcacattgtacaggcgtgtgagacgcaactgaagctgttgcccgtcggtttggataacttggtgctgattccagaggagtcgcgcaaggccatttacgagcagtcgcgccggccgccggaggatctggagaagaagtttgccgccgtcgccgctgccgaagatggtgctgctactgctgaaaaggatgcagccgaagcagtacccaaggttggcagtccgcccaagtggcgtgtgggtggtgctgaatttgaggccttgatgcgcatgctggacaatgctggctatcgcactggctatatctaccgtcatccactgatcaaatcggatcctcccaagcctaagaacgatgtcgaactaccgccagctgtttcatcactgggctatcttcttgaggaggaggaactcttccgtcaagggatctggaagaagggagatattcgcaaaggcggcgatcgcagtcggtggctcaactcgccaaacgtttaccaaaaggtcgaggttctggagaccggcactccggatcccaagaagattacaaagtgggtggctgagggttcccccacccactcaacgccagtgaggatagaagatccactccagtttgtgcctgcaggaaccaatccaagggaatttaagcgtgtccagcaactaattaaggacaaccgccgggcagataagatttcagccggaccacagtcgcatattctggagggcgtgacatgggacgaggcgagccgactcaaggatgcaacggtctcgcaggccggcgatcatgtcgtcatgatgggtgccgcctccaagggaatcattcagcgtggcttccagcacaatgccactgtctacaaggcaccgtatgctaagaacccattcgataacgtcacagacgatgaactcaatgaatacaaacgcacggtggagcgcaaaaagaaatcggtgcatggtgaatataccgacacagacttttcggaatccgaagcggtcctgcaggcggggacaaagaaatacccacaaagcgaacccgagaccgagcaccaggtcattgagatccaaacacagcaagcgccagtgccaaggcaggcggaagtcgtgctgagcgatgcacttgtctctcaactggctcaaaagtatgcgttcctttattcgcctggccaatacatgtatgcctgcatgaaaatggctccattaatgcataaggtttatgttatacacaaggtcgagcccgtcagcaagcacaactatccgccagttaacgatggcaatatgagtattcatcacaacgaaagtggagccggattcatggcccaagagtccagcgttattagtagcacccccgtacgcaatgccttggcatctgtatcattgccggaagagaggaatcattctattttgggcttatcatcgactccgtatcgcaccatctcgcatttcgggttcaattgtccgcttattacgtcaccaaccattctcctgcatcccgaacatcgatccatttggcaacgggtggccgagcagcgcgagaaggttgtgtccttcatagatctcacaacattgagcttggacaaccgcaagctgctcaatgtggtgacatcaacgcatccaacccagtgccaatcgcaatcgcaatcctttatctctgagaagcacattcagctggaagttacgccaccgaagcgaaagcagcgtgtctacagcgccaccatcagcagtggtctagacgacagcctcgatgagctggactccctgatgagtggcctagccatcaatatgccgcgcagtcgggagcaggacagcggtctgtaccgcagctacacctttctacccagtaatcatgctctgcccaaggatacagatgccaataatagggatcaaacggatcgggagcgaccagaagcggagcaggaggaaagttttcactgcgcaggcgacagtggtattggcgattccaccggcaggcgtccgcgtctggccaccaccagcaatgattcgtctattcaagaggccgaagcctatacccagggcaagcacgtcaagttgaccttgagcagctcacccacgccgacggccacacagtcacctgcaaccatcgaaattcttatcaacgtatcgctgcgcaatgccgagtgcgtccaaacggtccagacccatgagcaggagtttcgcgccaagttggagcgagtaatcgacgaggagatccactatatttcgcagcaactcgcatttaaacagcgacaggcagagttgcatgaacaacagactacatcgcgggctccaatcgctacgccttctttcacaactatgcatccgccggcaccggcttcttcatcatccatggttcaccgcagcaactcggcaccagaactgtgccacacctatagctatgtggccgtgggcgatttgtcgaccaaacaggatcaagcctctccccaactgccagcggagggtgagccgttgaatgatatactcagtagtttggagaaggaactggagcgtctgctgaatagcgtggtgacagcccacatgctgcacaacaaggccatcatacacgagtgccgggctcgcttctcgcagctggccgatggaattgtcagctcgtagatacatattatgattttgatggaaaatttacatcttcgcttttgttgtgatatttgaaaatcgacaacagtgaaatgattgtataaagcaactagattaagtttaatgatgataatttggaaatcttcaaatcgaactaatgcattttttacttctttgttctcttaatttaaatgttaagactgtaacttaagcacaatatgaaaatgcaaagttaaaactgaatctgagccaaccattgtacatttaaacatctgtgaaattgttaagtttaatttttgtcgaatcttgattttcgtttcatatttttataattaaaatataataaatatagttttcatta

SEQ ID NO: 19830 - protein, 1156 aa, DROSOPHILA
MTEVEQPPQNGIDPTAGEDDDNSKARPADIEQDMREMERRKRVEAIMGSKLFREELERIVDSARDGGAGASGILQQLSDIVGVPVSRVGSVFKSSNCMVPINDIRGVESMGYAKGEKILRCKLAATFRLLDLYGWTQGLGAQITARLKVDQEYFLVNPYGLLYHEITASALNKVDMQGQIVEQGTTNFGGNKSHFVLHSVVHAARPDIRCAIYIGCSPVVAISSLKTGLLPLTKDACVLGEITTHAYTGLFDEEERNRLVRSLGPNSKVILLTNHGALCCGETIEEAFFAACHIVQACETQLKLLPVGLDNLVLIPEESRKAIYEQSRRPPEDLEKKFAAVAAAEDGAATAEKDAAEAVPKVGSPPKWRVGGAEFEALMRMLDNAGYRTGYIYRHPLIKSDPPKPKNDVELPPAVSSLGYLLEEEELFRQGIWKKGDIRKGGDRSRWLNSPNVYQKVEVLETGTPDPKKITKWVAEGSPTHSTPVRIEDPLQFVPAGTNPREFKRVQQLIKDNRRADKISAGPQSHILEGVTWDEASRLKDATVSQAGDHVVMMGAASKGIIQRGFQHNATVYKAPYAKNPFDNVTDDELNEYKRTVERKKKSVHGEYTDTDFSESEAVLQAGTKKYPQSEPETEHQVIEIQTQQAPVPRQAEVVLSDALVSQLAQKYAFLYSPGQYMYACMKMAPLMHKVYVIHKVEPVSKHNYPPVNDGNMSIHHNESGAGFMAQESSVISSTPVRNALASVSLPEERNHSILGLSSTPYRTISHFGFNCPLITSPTILLHPEHRSIWQRVAEQREKVVSFIDLTTLSLDNRKLLNVVTSTHPTQCQSQSQSFISEKHIQLEVTPPKRKQRVYSATISSGLDDSLDELDSLMSGLAINMPRSREQDSGLYRSYTFLPSNHALPKDTDANNRDQTDRERPEAEQEESFHCAGDSGIGDSTGRRPRLATTSNDSSIQEAEAYTQGKHVKLTLSSSPTPTATQSPATIEILINVSLRNAECVQTVQTHEQEFRAKLERVIDEEIHYISQQLAFKQRQAELHEQQTTSRAPIATPSFTTMHPPAPASSSSMVHRSNSAPELCHTYSYVAVGDLSTKQDQASPQLPAEGEPLNDILSSLEKELERLLNSVVTAHMLHNKAIIHECRARFSQLADGIVSS

SEQ ID NO: 19831 - DNA, 4024 bp, DROSOPHILA
gttgtctggaaaagttcgcgtcactgactattggagcctgatggtcatcaagccctttcgcggtttccatgagccaggcctccactttgtcctcacgtacttcgacgatccgggcatacccataccgcagaatattaagtcctgggttactcagaaacaaatgcccgagttcctcaccaagatgtacgtggccaccaagaactacgcctgctcacgggccatcaagatgaaggacatgtttcacggattcgcgcttatcaatgacgaatatacggctaatgagcaacgcggcagttggttgggcagtttgagccggcgcaaggtcaatagtaaacccgaagcaggtcgttaactcctttaccattatatacctggctgctcccgctcccatgagacctccctgcccaacagagccacgtatcaaaccatccgaaagcccagttccatcttatgttcatcccttcgatcggctttaaaattcaggcgagagaaatcgaaaccattgaacatcagagcaagtgtgcaataggtggaagttttgctcttaacatgagtgccactttgatgagaaacttaaaaataaatatatacctatattagctatatggctaaaccaaaatattttaagtttagaaattgttttaaacgcaaatagaaattattgaaattaattgtacaataaaagaaacgaaaatagacacccagagactgaagtctacaaaaaagcaatgtcttgcataactattgatattttacggcattaattttcattcatgcataacattatctacaccagatagtaacactcgtgcttatcaaataattggtcaagcattatcttgaattaccttttttcaattacaatttctcacccgaacttcggctattcttatcgtgcactgtatacaaatcaaattggcttaagaggattacactaatctgatatggtatttaacatactaatttatatttttaattaaattttattattttattatagagggataagcgcagtaaaaatgaaattatactattagttataacataatttattagtatgctatatagttacaaaatgcgcatacattctataaaatattcgatagtctagacgacattcaagctgattgtaaactgaacggaacgaatacagtttatggtaatacaaaaagtgagattgcaaagtgttgtgggagaagcatcgttatactttgcaacagcgtatcacagctctgtgcggtccgctgaggtaggcgggttgttcatataggcgataaagtccttgctggtgcgtccgccattgtaatccagcttggttttgaggtaagagaagtacagaatggtgggatatccgcgtacgttatactttgcgcagagcgcggcaagctttgtgcagtcgatggcgacaaacgctatccgaggatcatcctgtaaggccgtggcagccgctgtaaactccggttttgtgtgcttacagtgtccacaccctgaagacggttagtctttagtagagctttaaatatgtttaacaatcaagcggcaaaacttacagggtgcatagaacatgaccagcgcatgctttttcctcttcagcgtcgaactgaagttgtcgtcatccagaaataggacttccttgctgtcctcctcctcctcccaactcttttcgggtggcggaggcggtgggggctccttgggatctctcataaattcaacaattttcgatgcttcgcgtacatttacttcaaacttaaagacgccattcgagaaaaacttaacagttggatagcccttgactttgtatttctctgcgattgacggctccttcgttgcatccaacgcagccaaaaggccgggaatctttttctgcttcatctccagagcggccttttcgtattccggtttcatgcgcttacagtgtccgcaccagggtgcatagaacatgaccagggcggacttctcgtccttcagagcgggctcaaaaccctgcgaggtgagatggacaatctccgagttggtatccgccgaccattcgggttccttgggctttggcgttggcttggcatttggattgagcataaaagacaccaaagcctccttgttgttctctccttcgtatgtaaagcgcagcttgccgttttcaaagtaaatcagggtgggaaaacctgtaaatgtatcgtttaatttaaaactaagcaaaaattgttaacttaccagttatgttgaacattttgcgtataggagcgttctcctgtcgctctacattcatagccgccagaatataaccgcccttagttttcaactccgtagacgcttttccgtactctggcttcattttcttgcagaatccgcaccacggaacatagaacatgacaagcatgggccggatatccttgcgtaaatgctttgtgaaggatgcggcatcgctgaagtgcaggacatccttgccggctggatcctcctcccagggcaaatcgccggagggatcacgcatgaaagtgatcatggagctgacgctcagctgccggtcgtagtccttgtggaagtcgccatccttgtagtgtttaatggcgtaggggtccggcgataccttcaacttcttgcacagtttcttgcgatcctgctgtccgcaatctagcagcaacattgtcccggttccccgtatcgcctccgccgcctcacggaatatctttagctcagcagcagcggacttcgcactggtcacgtagagcgcgaggacattgttcttggtgcgcagcagcttcttgaagtccttatactccgcgatgtcatcctgcaccgccgaggttttcgattttgcggcaacaagtgccaccagcagaagaaaaacaaactgaccggttatccacatcaggcggcttgaactttacacctacaggtaacaattgacctaactgatgctatactagttagtgcgctctaggtaattgcatgtttaacacaacattaaagcgtcattcttattttacaaaaagaaaaaccgcaagtagaagacgtggactagttgagaaacctatcgataggcaactttgaaggagatggcaataacagcttggatcaaagtgccggctattcgaaaaacacctgtaccatcaccaaccagtgctgacgcttagcaagcctagcggccaaataacttaaaattaatattaaaggattaatactaaatataaatatattggaaaacaattgcaaatacatgtgcactaaaatgtgcactgtactaaaatattaatgacgaacagcttttaagtcaggtacagctgttgatttattaaaagattaattgaaagctaatttttattaggttaaaaatagccatatccaaagagcttgcgactatcgatacgccgattagcagcgcctgtacgtggcaggcgacaaccctatgccagctctgacacattaacgaagcgaagaagaagagcagcggaggcagcaaaagagtttttttggtctcgccgcaattaattagtgttttcgcagacagccatagttggcccaaaccgtggaagatgcctctcaaactagacatcaagcgtcgcctgacgtcgcgctcggatcgggtcaagtgcgtcgatctccatccggcggagccgtggatgttgtgcgccctatacaatggccacgtacacatcatgaactatgagaaccagcaaatggttaaggacttcgaggtctgcgacgtgcctgtgcgctccgcccgtttcgtggcacgcaagaactggatcctcaccggctcagatgacatgcagatccgtgtgttcaactacaacaccctggagaaggtgcactcgttcgaggcgcactcggactatctgcgctgcatcgcggtgcatcccacacagccgctggtgctgaccagcagtggtaagtgaacggcggggtggtgtgactcccatttcgtcacccaatgtttacctagtgcaccagctgggaagtatgcttcggtttcgtgtcttattcctgtttcctctttattctatagatgacatgctcatcaagc

SEQ ID NO: 19832 - DNA, 1912 bp, DROSOPHILA
aactagtccacgtcttctacttgcggtttttctttttgtaaaataagaatgacgctttaatgttgtgttaaacatgcaattacctagagcgcactaactagtatagcatcagttaggtcaattgttacctgtaggtgtaaagttcaagccgcctgatgtggataaccggtcagtttgtttttcttctgctggtggcacttgttgccgcaaaatcgaaaacctcggcggtgcaggatgacatcgcggagtataaggacttcaagaagctgctgcgcaccaagaacaatgtcctcgcgctctacgtgaccagtgcgaagtccgctgctgctgagctaaagatattccgtgaggcggcggaggcgatacggggaaccgggacaatgttgctgctagattgcggacagcaggatcgcaagaaactgtgcaagaagttgaaggtatcgccggacccctacgccattaaacactacaaggatggcgacttccacaaggactacgaccggcagctgagcgtcagctccatgatcactttcatgcgtgatccctccggcgatttgccctgggaggaggatccagccggcaaggatgtcctgcacttcagcgatgccgcatccttcacaaagcatttacgcaaggatatccggcccatgcttgtcatgttctatgttccgtggtgcggattctgcaagaaaatgaagccagagtacggaaaagcgtctacggagttgaaaactaagggcggttatattctggcggctatgaatgtagagcgacaggagaacgctcctatacgcaaaatgttcaacataactggttttcccaccctgatttactttgaaaacggcaagctgcgctttacatacgaaggagagaacaacaaggaggctttggtgtcttttatgctcaatccaaatgccaagccaacgccaaagcccaaggaacccgaatggtcggcggataccaactcggagattgtccatctcacctcgcagggttttgagcccgctctgaaggacgagaagtccgccctggtcatgttctatgcaccctggtgcggacactgtaagcgcatgaaaccggaatacgaaaaggccgctctggagatgaagcagaaaaagattcccggccttttggctgcgttggatgcaacgaaggagccgtcaatcgcagagaaatacaaagtcaagggctatccaactgttaagtttttctcgaatggcgtctttaagtttgaagtaaatgtacgcgaagcatcgaaaattgttgaatttatgagagatcccaaggagcccccaccgcctccgccacccgaaaagagttgggaggaggaggaggacagcaaggaagtcctatttctggatgacgacaacttcagttcgacgctgaagaggaaaaagcatgcgctggtcatgttctatgcaccctggtgtggacactgtaagcacacaaaaccggagtttacagcggctgccacggccttacaggatgatcctcggatagcgtttgtcgccatcgactgcacaaagcttgccgcgctctgcgcaaagtataacgtacgcggatatcccaccattctgtacttctcttacctcaaaaccaagctggattacaatggcggacgcaccagcaaggactttatcgcctatatgaacaacccgcctacctcagcggaccgcacagagctgtgatacgctgttgcaaagtataacgatgcttctcccacaacactttgcaatctcactttttgtattaccataaactgtattcgttccgttcagtttacaatcagcttgaatgtcgtctagactatcgaatattttatagaatgtatgcgcattttgtaactatatagcatactaataaattatgttataactaatagtataatttcatttttactgcgcttatccct

SEQ ID NO: 19833 - protein, 510 aa, DROSOPHILA
MWITGQFVFLLLVALVAAKSKTSAVQDDIAEYKDFKKLLRTKNNVLALYVTSAKSAAAELKIFREAAEAIRGTGTMLLLDCGQQDRKKLCKKLKVSPDPYAIKHYKDGDFHKDYDRQLSVSSMITFMRDPSGDLPWEEDPAGKDVLHFSDAASFTKHLRKDIRPMLVMFYVPWCGFCKKMKPEYGKASTELKTKGGYILAAMNVERQENAPIRKMFNITGFPTLIYFENGKLRFTYEGENNKEALVSFMLNPNAKPTPKPKEPEWSADTNSEIVHLTSQGFEPALKDEKSALVMFYAPWCGHCKRMKPEYEKAALEMKQKKIPGLLAALDATKEPSIAEKYKVKGYPTVKFFSNGVFKFEVNVREASKIVEFMRDPKEPPPPPPPEKSWEEEEDSKEVLFLDDDNFSSTLKRKKHALVMFYAPWCGHCKHTKPEFTAAATALQDDPRIAFVAIDCTKLAALCAKYNVRGYPTILYFSYLKTKLDYNGGRTSKDFIAYMNNPPTSADRTEL

SEQ ID NO: 19834 - DNA, 2717 bp, DROSOPHILA
cggattgggtctgcgcaatcctgccgatattacgctcaacgagtacaaccggagcgagggtagcagtgccgaggagctgctgcgacgaactccactgaagatccgggctcccgagatgctaaccgcacccgctggttatggaacgggtgcgtagtagattgattcgaagcaagaagacatttcaataatatattttatatactatttcagaaccctgtcgcatgacacttaaacaggagccagagactggttactagaagaataacgaacggtgcaatatgcagtttgcaataggacaccccttaagcacacaacccatacacatacaggccctctcttgctgtactccccaccaagtgctatatagagatgaaattgaaatgaagaacttacttaattgttatgccttgaaccattttgatactttttattagtcctaagtaggtattttggaaattgttgcttaatttttaatgtttaacgcagttgcaatatatttttggagtcatattttgctcaagaagtttattatatacaattatactatatatatacaccatttagcatgtactgagtttgttggttatttggttatcttatacttgtgcgtggatcacaaaacattcatataaggccatgcaatatattgttttaggttagggtgttgtctagattatgctgaaagtgtaatatatatttaattttaaacaaagaactatttttatatgaatatgtataatatacaaactatttctaagatggctgaatgaataaacaaaatcaaaataaacactggagaatatgaatgtaaatcgtttactgcggcatttttactagtaataaatattactataatttataatttatgccatctctttcagcaacaactttaaatatccaaactgataaagcgatatatgttcctatgctcccacttagaacgtaaccctgatcctgcatagaaaaaattcaataacgtattacaaagactaactaacgtttatttatcgatattgctaatgcccgtcttctcgacctgggcgaggagctcttggagcttgttgtcgaagagctcgcatcgaatgggcatctccagggagtagaaggggttcttgagcacgtagtctgagtacagctcgtaaacctttcgcagcagcagatcaatgccattgagacccgtttccgagattataatgaacttgattccggtcagcgtttggaagcagtgcagcgtgaaagtgtccgcctctaggatctcgatgccggaactcttgggctccggactcagttggctggcgatggcgaacagcgggtagaacatgctggccagaaagattttctcgttggtggtcatctttggccggctgaacttcaggttaatgggatagttctccggtgcatccagtgtcgtcctcacatcgcgtccatcatccagggtgactccattgacgggcataccgttgaccgccaccaggacatggcccactgttcgtaagcatatattaaggtggttatgtttctaaaattcacagacacacccaccatttattccatcctttctgttgaacgagaccgataccttcttggaatcgtagtccagcaccaagtccagagggtatgtaaaggtcttctcgtgctcaatgcgtggcacattgttgtccaggttgaatataaggccacccgatttactaactatatagacgccatatataatcatttcttactattactaattctaagtttcctaggaatgtttttatattttatgcgaattagcgatggtagtgccagccagctgtttgccgcggaaccagttccagttccggcttagttgccattaacagtacattaacattgcgccttaacagttgggtccatcgaagaaattataattattaggataaataaaccattaaattattataagaagcattatttaaaatttaggaataaaatgggaagtaaactctttagccagaatactaagaatacttaaaaaatatttacaagttcaaccaaaaatctagttctaccagggcggagtagctctttaaactgattccatcttgcctatcgcgttcatttaactagttcacggccgaacagctgtctcggcattagaattaaaaataaacataattgattttctgcccgaaagtatacgtaaacgcgtaggcgctcccacctggcagtgcacccgattgaccgacttgcaacctccacggccaccgatgggctccgacgaccagagtgccggggacaggatccagaagggattccagatcaactatatgattctgcgggatgccgacagcggaaaaataatctggcaggagaacaaggacttctcggcaccggaccaggagcatgaggcccgagtgccggtgaaaatactcgacatgcgtgccgtttcccgggagatcaacttcagcaccatcgagtcgatggagaactttcgcctggaccagaaggtgctcttcaagggccgcatcatggaggagtggttctttgagatgggattcgtgggtgccaacaccaccaacacctggcagtcgacaatcgaggcggcacccgaatcccagatgatgcctgccaaggtcttgaacggcaatgtgactatccaaaccagtttctacgacaacgagacactcatcaccaaatcggttgtgcgcctgtactacatttaggcaaatgtgagtcacctgccgttctgctga

SEQ ID NO: 19835 - DNA, 660 bp, DROSOPHILA
atgattatatatggcgtctatatagttagtaaatcgggtggccttatattcaacctggacaacaatgtgccacgcattgagcacgagaagacctttacataccctctggacttggtgctggactacgattccaagaaggtatcggtctcgttcaacagaaaggatggaataaatgtgggccatgtcctggtggcggtcaacggtatgcccgtcaatggagtcaccctggatgatggacgcgatgtgaggacgacactggatgcaccggagaactatcccattaacctgaagttcagccggccaaagatgaccaccaacgagaaaatctttctggccagcatgttctacccgctgttcgccatcgccagccaactgagtccggagcccaagagttccggcatcgagatcctagaggcggacactttcacgctgcactgcttccaaacgctgaccggaatcaagttcattataatctcggaaacgggtctcaatggcattgatctgctgctgcgaaaggtttacgagctgtactcagactacgtgctcaagaaccccttctactccctggagatgcccattcgatgcgagctcttcgacaacaagctccaagagctcctcgcccaggtcgagaagacgggcattagcaatatcgataaataa

SEQ ID NO: 19836 - protein, 219 aa, DROSOPHILA
MIIYGVYIVSKSGGLIFNLDNNVPRIEHEKTFTYPLDLVLDYDSKKVSVSFNRKDGINVGHVLVAVNGMPVNGVTLDDGRDVRTTLDAPENYPINLKFSRPKMTTNEKIFLASMFYPLFAIASQLSPEPKSSGIEILEADTFTLHCFQTLTGIKFIIISETGLNGIDLLLRKVYELYSDYVLKNPFYSLEMPIRCELFDNKLQELLAQVEKTGISNIDK

SEQ ID NO: 19837 - DNA, 23468 bp, DROSOPHILA
gaatagtgcgcgcagtaattagctttcgcaagtgtcaaaaaagcttggcaatccaagcgtagtgctaccagatcgtatgtttttatcacagtctggcagccctccaccgcgatcactgaaaattgacgtgatggaaagtcacacgcacaccacagcaattgcacttttactctccgcgaatcgctttgttgctattttcgcgtgactcccttttgaactttgccaaacagaatattagcaacaaaatgtgatattatcgcatcttgttttgctcacgcgttttccgcttttcgcaacggctgtgtactgtgcgttgatggtgccatttccaatttgtatctttcgttcgatttggcgactttgatttcagtcgccaatcgtcaatcgctgcgccgggttctcttctccaccagtttgaatttgaacgtgggtgtgcgagtgtgtttgcgtgagagagcgggttcaatcaactgcagtttgcaagtcgagcacattccccgcccctctccctacaaaaaacaccacatttatgcaattaatgcatattaaacttataaagtgaacggaatttttgtttggcaaaaacaactacgtaacagccatgttctagtgtgcgtgtgcgaggcagagagctagagagagagagagagagggagagaaaaaagagagagtgataagtgagcgcttttgtaacggaacacagaagccgtagttgaattccagtgacgttggaagaaacaactgcaaaaggcaaaaacaaagacaatgtttataagctgtatattccgctttgattgatataaatgaatatatgcagtgcgccagttatacaactgccctgcaaaagtcactcattaaataaaaaacgcccgagatgaatttcacagcggcggcaacaagtgcaataatagtaaaaaatcaaaagccaaacaacgaaatctctcccaaaaaaacgaagaagcgtgtcgcggtgccaaaaagaaaacaaaaatagaaaaatacacaacaaaataatacggagaaacgttaattataacgagccacaaaatcgcataaagaaatcaacaagtgtgtgtctgcctttttttccatattcgctttcattcatgcggtcaactcaacaataacaactcaaaatagcaacaacaacaataacaatatcaacaagagcagcagcagtcgctgataaaagccctgcagctaaaacaacaacaaaacaacaaagatagttagaaagaacatcgtctggccattgagctttaagtaagtttattgagttcttagttactgccttcaagtcgcttaactcaaccagttgccaacattggctacgactatttgcttagcatttgagtaggacaagcttttcggcttaataaacagtgcgttgcaaaactgtaatgatggggatcctaatcttaaacagtatacgaagtattggcatcaagtggataatatcacaaatttacaaaaaaattatataaaattttattggatgaaatatcaaaatttgatatgatcatatattatatatattccaagctagatattacaagtttccaaatcaacaagtacagaatttatcgcaacttaacattatatgcataaaatagaaatgtgtgtacacggcctatcttgatagcactaatatttatcttctagaaaagtattaaattatagtaaaacaagagaatttacgatctaaaagcaagcaggtttaaaaacaatctctgtgcacagtatattatgcagtaatttaatgacccacgaaagagtaaacaatctaggtatgcaatccattatggagacatttgaacatttgtaggttaaataaattcaaattaaaaccctttaatgacgaatcgcactgtactttggcgaagtcaatcaagcgcagaacgcccagacacacgtgtgctgcatgtaaacagagcggctagctaatgacagatctcgatgggtggtgatggggagaggtctccgaaagggcattatcatccgggttggataatcacagccagcagatacgttgggtaaccagattagcgacgattacttgccagtggtcaaggtcagctcctgaaagtatgctaaataaatgaggaggaaacacatttatagactattttaatgtatcctcaaatattttaggccaccgagggttagatatgtttaaaaaaaaatgtacataaatgacataaaattcagtagcactccgtttatttaacattcacagcaaggttagagtgtaaaaagtgtatgataaactggcattttaaataggcatattaagcacacaaatacagatacatttcaaatttctcatttactcttcttcagttggggcacattttgaacgttagaccagatttaaacaccaattaataattggtaagaataataataatttttaagaatacgccaaatatttcaacagcccacagtcttataaaaagtgactcaatacatcctagaacttggaaatcctggccgtgttaagggcctccgtcatcagtcttccgaaatcggagtgcaccatggtgaacagtttcactgcccgctcctgaaggaactggctagcttcggtcagatgctcggacaagttgcgaactagccgcttgcggccgcagttatccagggtgtaggtccagaagtcggtgacctgactgaaattgtcctcggtgtcaccgctcataaatcgatagacatctccgctcaacggacagcacgtctgcaggcccaaggcccgcggactttcccttggtccgcaaaaggaattggggaagtagttgggagccccgttctgattgtcagtcactgtcatagcaccatccctctggaagttgcgaacattcacgcggtacggacaattcaccggtatctgcatgtagttcacgcccaaacgatggcgctgcgaatcgccgtaggcgaagaggcgaccctggagcatcttatccggcgatggctcgatgcccggcaccatgtgggccggactgaaggccagctgctccacctctgtgaaatagttggtgggattgcgatctagaacaatcttgccaactggaagcagggggaagtccttctggggccataccttggtcacatcgaacggattgaaacgacactttttcgcctcctcgttgagcatcacctagtggttataaatgagctctcgatctaggtactcgattatatagacctatataattcctacctgaatgtacattgaccaactgggatagttgcccttcttgatcgagttgtacagatccctgatggcatagtccggatcgtgggacatcagctcctcgcatcgtcgggcgtccaggttcttgatgccctggtccgtcttgaagtggaacctaacgtattgcgtctccccactggcattgatcatgcggtaggtgtgcacaccgtatccgtgcaggtggcgatagccatctggggttccccgatcgctaaagtacatgagcagggcatgcagggtttccggacgcagggtcatgaagtcccagaacatgtccggatccttcaggtgggtctggggattgcgcttttgggcatgaaccaagctggggaacaacatgggatcccggacataatgcacgggcatgttgcaacccacaatgtcccagatgccgtcgtcggtgtagaatttgacggcaaatccgcgctgttcacgtaccgtatccgcagatccctgttcaccgcaggccaccgagaatctcatcgcgacggcagttcgttttctaaccttatcgaatatggaggctgcacagaattttgaaatgtcatgggtgcactcgaagtaaccaaaggcgccggctcccttggcgtaggccacccgttcgggaatccgctccgagtcgaagtgcatcacctcgtcgaggaactggaaatcctgcagcagggcaggaccccttggtcccaccgtctgtatggcatccttgacgccaactggagttccactggatgtcgtgatctccctttgcacctcggagtcattgttcttatagtcaatcaattgatttgacgccgtatcgcgtgaacacatttttcaattttgtctttggtcttaaaatttctaaaaaaaaatttattttcaaaaaaaatatttcacacagttgatttcaactgctaacaaaagcgttgtgagtgattttgcttgtcaattgtgtgatcccaaaatgaagtgtaaatcgaagaagacaagacgcgatgtaaatttataaacaaattatattgatatgtataagttagaacaacaatatatttacatatgtatgcgactttaatttacctatacttagattgttatttaatagaatcggagtattaaggtaaacaaagtatatcagctttttcccggaaatttataagcttataaaagagttctatttgtgttgttttcggcgccatttcggcgaatcgtgaaagtcaccggggttcaaaggtcacgaattgacaatgcaaacgagggggtctacgtcagctgccccctgataagcgataagagggagaaatcaaagagtgatacagaggtacccagtgcaatagaacccatacagtccatggggcttatcggcctttctggcactcgaccgaaaatcgcaaaaactcgcataatgatgagaaacaataaagggccgataaacagaaattctgttttcgcgttatcgcaaacagtcaattctctttttttacctgtttttttttcccttttttattttgcgagaatgagtgttttttatctgctagtcaataaagcattgaagattatgatttctggtattttttggagctttacgtgtacgtgttaccttttggactgttttgatattcgaagggggagtgtacgtagagctttgctttataaaagtattactatccctagtacaggtgtgtgtcgggcatattgctgatatgggatcgtaaaacaaaatgacacctccccccccaccaaaaatatctgatgggggaaatgtaatgtgaagcgtttggttgtcggccactcgagttgacacctacattgtgtgcacaaacgacaaatagccattttgtatataccgttttgtagatttacaggtgatacttcgctcgattagcgggtcatcattaaaaatttaatatgttcggcccgccttctgttgttttagccagtagtagattgaaatacgacagcttatcgattgccttttccacttacagttgccggtcattacttcattactatgtgattggatcttcccgacccacttgtaaataaaaagtaaaaatactggttatgaagcatgatgaagcatccgcaggatctgagtgtcacggatgaccagcagttaatgaaggtgaacaaggtggagaagatggagcaggagttgcacgaccccggtaagtttgcaattgcagtaacttagataaagcatatatagatataagatcctctctctaaacatgtgacaaaaagctgaactcaataatatataaatttttaaatttacttatataagttgaaatattttttgtactgtcataatgacgttttccataacttgctactgattgatagttggtagtgcagcttatgaaggtaataatactttattaagtaaatagtatagcaaacagctcgaaaagacattgaacacgtgccactggtggtggccaattcatgtccgattttgacagacctgtggtggtattataaatagaacgccatggccttgataagaacgcttttcaaacgataagcctgcaatcattataaatgtttataaatttgtttattgatttggaaaatttactgacactgtgccgcctgctgcaaccgtcgaagatggaattgaagttacaattgaaacgatagggttaccgataaatcaaaaatgcgagtaaatagcgagtaaaaacaaaggaaacgcgcacaaatttaagcgatgtgaaacgtaatcgtaatgtttaacttaaccccaaagggttaagtatgcgcaatggcaaacacacggtgcgactaaatactgtggcttatatgcacatacatatatgcccagcttacaacaaaacaacgtctccaagttgttgaatatttatagagacgataagcccgactgtctacagttttagctttagctcagccttttttaagggggcttgtgtcaccttagtcgctgtgcgtttactttctggttttttttaccttagccgcagttgaaggcaaattcgaacctatttatgcctcctgtaattccccggttttatgcatggcagaggttcacgggccccgacttcatccatacatatatgtatatataggtatgtatatataccatataaggcgaggaccgactctcccgaccggctgatatgatatgggggttatcgcccagacgcgaactccattgatttgtattcgccttcgcaaatcttcgtcgttctgcgatccattggggttttttttatttcttgaatggttcttttggttttgggtcaagcggcataattaaaaaaactgttttccgttatctaagatgaaatagtcgcactggcattggcagacgaactaacaaagtaacccacatgggtctatatttgttctgcctttttatatgatatccgctttggacattcattaatttccatggttagataatgcaagaagtgccttgcgtcacatacgatataaagtaaacaaatatgtcactttgcttgaggtctagagtcgtttcgcaatcgtctatcatatatacatacatacatgtatgggataataaagataagcccgtttcatattgctttcacacatcacatcaatggtggtcaacgcataagtggccaagaagtggtgataaccttttagaaatgtattaaaaatatgtcacaatgcataataaaactttaataagtgttgtttttatgcaccttgcatattttttaatgactaccttttatttaataagaactgctgatagcggcatttaacgtatctctaaaactaaaatcgcattacttcatggcgtttgggtaaaagctttccgagtcgagtatcatctgctttcagtgaacccatttccgaggctcactccttacacaatccacttggccggactatcctcacacttgaactaattctccaattagtcggagctgcgggcaggcagctttattcaattgcgatgcttattatatcttattgtttcacgcaggagaatcgccgctgcgagtatctcacagatacgggaaagcgagcgaagcactcagtcgatgtggacacatttcacttaaagttgtcgccgctaaatgaagtgtaaatagtaaattgcagtcaaacattatgaaaacctaccacaatcgtcattattgcgatcgtcatcattgcattcattcatacatacatatgtatgtggctgtcaggcaacggcgagtgatcgtaatgatgatcgccatgaaggcgatgacgaaccgcacatgcaagtcacatgtgtgtcccatggctcgttcttcgctgtgttgtctctataaaaatgtatgcaaataaaataataagtttcgcaaaaaaaaaaaactgacttaacgaagcacccagcttcgaagatcgagcgaagaaatgcaatggtagcttgccatcggcgctggctaattttcataattccctggaaattgcacgctgcaacaagggtcgccacatgtggccgggaaaagcgacagccatcagcccgaacatgacatgcattttatttcaattctatcttttccactcttactgactgcgacttttctccggctacatggtacgttcgtgcattattttcatcaccaccacaccccaggaaacgtatctctcagatagcaacggccggagttgctgtatttcgagttcgtatccacaattgtggggacaacacttgttctgtgcggctgtgattcactacttggatgcaatcggttgatatcgaataagtttgtcgttgcattcaaaccaaaacatatgcgtcatgtcctgatcaactcgctctctctctacccacagtcagattacagatggttgctgctggtaaacatattttgtaattgcacttaatgcaatctctcaaccccatttcgagggatcatccagatgatgttttgcatcaatgcaacagagagagacgacgccatcggttaatttggaataacttttacatatggatatatgtttaattaaactgaaataaagcatacccaaaaaaatggattttcttattagcagctctccttaatgaaatgagacaatcttttaaaaacaaaaattaaaatttaatcctttgtgtgtatcaaaaccatttatattcaattactattcgctgcgaacagcaattagccaactcaacccctttgttcccaacagaatcgccgaatcataatcatatcaagtttccgcaagcccaacgtttatgtgatgtccgatgatgacgccaaacgggcggcattcggaatggattcctcattcgaatccaaagtgcaccgtgagtgggcaactgggtctggcgtggagctacgtttcgtcacagaaattccggcgtataaagtacgcctgacgacgaccagctgactgcgattgtgcatggtgtgtgctggtgttgaatgacagcgaattatattcaattgaatcagaagtatcaatcagcgctgcggcccaagaaacccaaaagccaaaacaaatcatttgaagagccaaccgtcatcggttttccaccagtatctctttcgaatcggaattttccgactgctttttcagcattccactgataggcgacggagaagcggctggtgccttgaactgcttagcctaaggcgcttactaatcgacacagccaagactatggaatcaaaaacgacgacctactataatgcctccactatataatatatctgaatctctatctctttccgccgctgtctgaggggacgaggctgcagctccggctgtgataagcaactacggagataccagactgcctgtttgccaagctgaaagtgaagtgatctacaaatagaataatagagaaacacatttcacctaagctagaaagctcttgagttgttaaagcagcctatgagtgtttgaagatcataaccaatttatcagattaggaaacagcaagtgaaatcttaggatgcaatccgtataagtcaggttgtatatatctcccaacgtcacttctacaagtaaacattgaaataaaactttttaagaaagtaaaatatatattttttataaaattcaatttcaacatgtagttgtctttagtcaagctcaattacattttaaaataaaataattgcatattttatgtttctactttcaaactttattattaaaatccaaatatttctcaacaccttccttgcgtgcatctcgagaggtgccggaactcaataccttttttcggagtgcccaacttttggtaatctaaatctgaactgtgaaaaaaataagcaataaaaactatttatttaatgaaagctcaaaagcacacacagccccgaaaacaaatacccagagatatggttttattatatgtgccattaaacaatttgaattatatactacggagtactgtgcgttcgtgtgtgtgtggaatccgcttaatctagtctgataagaccggcggtactagcgcgtcgatcttatgcgcatgcccccgattcgcggcgatccaaagcgatccaagcggatccgaacgatccgatccgatacgatacgatacgatacgatccgatccgagctgaagtgttaacaattttgccaagacgactgctccgctgcaatattattaatcacggcggcaagaacagcaacaacagtctagtcagaatagccagaattatatttattaaagtttctgtacgatcgttgggctcggtcagcttcgagccagccgagcgatccagagctttcgtagtcgcttcgtcggggccgtcggcttctatatctacaacaaataatattaagacagttagtacgtgttgagaacattatttgaggtttagtcagtgttttgcactaggcggtaataatacaggcgccgcaggctcacacccttttacctttttactaacaataaaaaaagaaaataaataagacaagccggctttaaccaatccaacttgccaatcaaaacattattcaagagcacctgtgcggcactgggaaaggattcgcgcaaagaactgtgatatttttaaacaattctacacgccgcccaatttgtatttatttatttaatccgctcgcatgtaaatatatatatacatacaaaatatatatatatatatattgtatcgaaccaattgccgacggttcggttcgcttcggtttttttctgggcagtgcggtgttttccctcgctccttaactttcatcgcttcagctattttcggttttaatttgtgcaaatatttaactttacttaagtgtgtctctggcccctcaccttagctggcttcaaaataaaatcgacaacaacaaaaaaaacaaaacagagagaattatacaaaaaatgctcaccaacaataacaacaaagtcggcaacagcgacaaaagcagcaaccgtttgtgaaaaactcaatttgcccaagagtgtgaaggattttcaaatatttaccctcgtctacgatcttcattaactgcgtaccaggaactagggacgcgtctcccacactttgtacaattcattgctaccaaccggatcggttttatatatatacacatcatttcaatacgtgaactatcagccagagattaaagcaatctaaatgtacgcctcaatgttgcccagtttgctaaatatgaaaacggagaatctgactagctcaagctacgacgatgcatttcttctcgaagaaaatcttctgcacattatgggtgagtgaaaaacttgaggaagaaatatagttttcttatagtcatcaaaaaggtccttgattaaacttaagataggtttctgattatattgcatagcacacttttagactgaaaatatgaagtagaagtgaaaataacaaatacgtaatttggcaacctactccagatttcctcatcttaataaataacttgttatgcagcaatgaaatactttatagattacgcagattacggcgattagaagtaatctcaaaccaatgggggtaatgggccttgttggtggttaattaaaaatgcgtagttttggcgataatcgactttcataggtaaaaatatcacatttaaaaaggaatctgcaggaattaccccaaatctcaaatttcatcgagtcatgctgagaaagcattttgcaaaagttaacataataacacgtttgtcgagaataatgggatctttcaacagggaacacagattatatacttaaattaaaggttatagctttgtgaaatgtgacaaatttttttacttctagctttagctttaatgggtatctaaaggtctagactgaccatctctgcaatgtgtttcgttcccagagtttaacgcctctgataagatacacttaattgcgtccatgacaacatcgcaaataattcacagccaaaatcaggcgatacaatttatgtagtagatctctcctcattatgggaccatcgattcgcgatttgtggggctaaacaaacaattgcactgtaattcattcgttgccccactcgcgatatggattttatctctgatgatatctatctggccgcagattactgataccgtcgtgtgcaagccattcatggggggtaaggggtttaatcgtggcagcctgagcccccctatcacacatagctgaaccataaaaaagcaactttattgcaaggcttatcagcgattatgattctctgcccgtgtgcatctaaggcgataagatttcatcaagagccaagaaacagccaacggcaaatataattagccaacgttgctttggtaatactttaaactgattctttaaatgaaattaacttaaattaaacgatattaaaatgctgtttagctgtccgcagcaatttttccctcatattagccataaattgccatcaatggtgctctaatattcgagcattaatttttttttgttggcttcgcttagaacaattttatacgattataatggatgccttaatttgagattaaaaacattaaaatatatgtttttgtttatttcattgtttgtgcgcgcggcaacgggcgaataaattgtgatgtgattatcaatctaaagatagaataaacctaaaatcactcagccgaattgaaatttattcctatgcttgtttttgcacacgactggttgggttaattatcatttgccattcggtcaatttgaaaacattaacattattgatacatttattactgatataagtagccgtagccccctcgatcctaagtcatcaagggcgatgagcacttggcaacccctccacagtcaacttcaactacaactacgtgtgcgatttgtacttaatttcttgcaattattcagctaccttattgaactaatcactagttctcggatggcagttaactaaccggaaatactacccattccatatgcatatggctatgtataagaaaaggccactcgagatttacatctacagaagttcggtgttatcgttgagtattgtcaaaaagctagaaaatcgagtctgattgaaacacttgaaacacttttaacgccaaaaaagaaaacagataagtcagaaatcgaaagtttgcctgcctaaaatctttacgcttgagaaattaataagttctgcgtgtatgaaccgaatttcattttagcgcagagaaaaccaaattgattttatttttgaggtaggttagcataaacgtaatttatgttggattatgctggtgaagtggtaatataaactctgattcactgttttcacacgctttcagtcacttctttactcatcgtgacttgcagttttattttcgctagaaaaagaggaaagacaagttgtatttatgctaattagtaatataatagaactcctaagctctgacgcatgttgcatctgaaaagatcagaagggactatttttttttaagatatgagccaaaaaaaaagagatttacaaacaaatcaattccaagacgagtaattcagagccaggctttgggtgagctaaacgagtgcttggcgcagtcgagttctaaatgtcatgatacgcggttcaaggcgaggattgctttaattgctctcggctatttgctatttggagatacaaatgtaactgaaacacgttagcgcccaattaagaggccagacggacacggcgaccataacaaacatagttaatggaaattacacttgactcgattctaagtaccaggcgagaagttttactttcagcatcaggtctagagatacaaatactcagatacaatagttagttttagctgtcggcttgccatttgattggtccgtgtgctgcttgccgctttagcttttcgttaataacaatttaattgagacgtttttagtattttaattatagacaatatgagcgcaattattagtcataaaaataatgataatgccaataaaaagttgaatcttacgagacgccgtcgcttttaattggatcaggccaacgaggggaaatcagagaagttgtatgaatacgaacattaatggttctctttggtttccaaaacaaacaacctaacctagcccaactcaagccactgatcgcattcggttagctggaaaaggcactacctatatttgccaggcaaacatgaccaaactgcaatattttgcaaccgcaagatgcttttccaatttcatatcacttataagcaaatatgtaatacaatgaatgccaacacaaaccccttattttccttaaaaaacactcataaaaatcatttaaattacaatgtcaaatagaaaccacttccaccaatacaatataatacatgaaaactatttaatttttcgcagtgcgctattatcactgtttttacaatatttgtactgaatatttcaaatgtccagcgtaaacatccgtggggagatcatccccagttaatggcacaggaatcgtttccaaagttcgcacttgggtgcgaatataatcctataaagatcaccacgtagtttccaggagatgagctcaacaactttcgatgatttcacagatatttccacccacaagtgtttgctccatccaaactctaaattttccccctgttttccccatcgtgatgtaatgctcaagttggtttttcggctttctggtaatgcccgtccgaaatgtatggtgtattttgtttgtataacacgggacttaaatgtactttgcgaatattaaacataacctttcgatggatgggtcaaaatcattagctgaaataacagtagtagctaaagacaattccaacagacttgatttgttttcacggaactacaaatgcaattaagtcgcgtaataaactaaaatcttgccagttcaagcaactttcggaaaccgcgttgattatagccgcactaaagggacggaacagacaaccttcaaagttgcatcatttcggggcgttgtcatgagctcagatcgtgggtgggtgcatgcagctgtgcaggctactgataatattatatatgtaccctccctagatgtttgctttcccaagcgagatttctacctggcaattagacagtgctttgcggcgtctgtcttacgcatatttattgactttgatctctgacagcaatttaaatttaaacgatctaacctaaaacagcccctgaagtggttctaaatgatgaagtaagtgaatgataagtaagtacttatactcagtgcttctgttgatggtaaaatgatttactacaagtatctgtggcaaaccatcttactattttcttggctatctaacaaaagtatctaagaaagtgccaagcaagcatacgatatattaaaattaaaaaaaaatcaattaacataatgtatattccagctattgtatttaaattacatttctttttacactctttccccctttttgcgattttatttacagcgcatgcaagcaaattcgcatgggaataggaatatcgccaaaagccccactgatatctcgctgattcattcttaatttcactccccctctcccctgcacagccatcgatttgttttcaatttctgctaattgctcttgtcgcatgtggacaacgtgtgtgcagctattgtttcggattcggattcggtttcgatttccagtgttttcatgtcgctcgcctatttcaaattgatcatacgccgtgtgtgctatcagcgtcggttcgaagcctcgctgccattaggcacgttattgagtcgctgccgcggagctgcgacgccgataagagtctatatattttcaatatgtgtataggtatagtgctcgattgggggctataaatgtgtgtgcgcccagcagatggggttaggggtttcaaaattacacatttatgtgggctaatggtagtcgttcgcattgccgttgaaaaaaaaaacaataattaaggtctttgctaaattgccctcctcaataatccgtgcatgtgagcgtgtttaagatttttctgatttcgctagcttccctaaagcgagcacagcccaaatcgttttagaaaaataattaggtattatcacagctatttttacctcagtataccatatatatatataatcctaatcaagtcgagcccacaatttgatcgtttaaatggtggtcattagtttatgccgttctaaaaacctaagctataatttactaaagcagcctttaattttaagataaagcctttgcattcggcattctaacttgtagggataatgaaatgtaacaataaagtttataaagatcaaaatatcggttgcttagttcttccagtaggtttatgcgttgcgaacacagagaatatttatactccttttacaattcacaatctcataaactgtttgcttgttatcaaatttcattgtttttctgactaatggctgactaatgcaatgcaattcatacaaaggcctccggaaataaacgtgaacacgtctgtcaatgcattgtttaaaaaaaaagataaattaaattcaattaacaaacaagcgttttttataagtggtattccaaatatattttcacttccatcgctcaagcttatataaagaaatttttcaaaaagaacctaatatatttctaatatatgcttggtaaacaacaacatggtgtccaaaaataaatacaagttttgcgtagttcgagcaaagttcccaccgaacttgtgtttggcagacgaatcatatgaatatgaatatatatgatgtacatatataactcacacatgcctgcgaaacattgtggtcaaaaatccaacttaaaaaaataaattttccaatagtcatatatttaagcagacattcctattattttaagaataaataaataaaaacataaataagtaaaacacaatggtgagagaaggagagatcgctacagcaccgatgtatcggtcaatacgaaaattatcatcgtggcgcgaataattgattctcttattttggaaccgctctccagatccatttatttatactttttggaggctcgtcgtctgcctgttacgagtattgcgttcggcatattaattaaataaatttttagagaacacatatgagtatttatagataaaagttctgctttgcttttatatgatggtcaggtgttcacatttgtttgttttcacgagaaacgtgaaatccctgtatgtatgtacatatgtatgttattgattgctgttttcggctctttcattttatcagcgcatcatccaaataatactattttccgaatcaagaatccgatattttctaatctcagattacgatttgcccacctcagtgtgaggcatcaaaatttttttgcaatactaacgatgacgcggtcggaaaaaaagtgaactctaacgatgacttggctaaaaatataaaaattacaccgcagcctgtttccccctcccgcggagtgtgcgagcgaaacggctgcggtgggcgagagagatggcgagtgtggggcgagacagttttatgcgcgaaatgttagcaaacgagtattatggtttcttatttaccttttttattcgttgctgtttcagtgtatgtttgctttttcctctccaactggtagaacaacaacattaagtgtaagaaaacaacaaatgcacacccataaacagagagataagaacttttggcagttgtattttttacttaaacttctcttggtcgagcaactgctcttatttcgagttggattttcaagcggtgaggatatgtttcaggtgtataatatcggaattgtcggtgtaccgtgattaactgtctgagaatctgtaaacaaagtgaacaatttgctgtttggagtgcaatcatgaaaagtctattcaaattgtaaatgtttgccaatcaattaccttttagagaattccctgcatatgaaaactaataaggcaaatagtggaaaatctgtgggaaccacccactgcgaacgcttcgagataataacagtatttatacacctattaaaatggtaattgaaagaatatttttttaaataattattttaaataattccattctattcaattttcaaaaacaagtattccttaaaatcgactgtacgagcacttttattgttgtttattaaaagtaactactattttccgtcgatgcctattttccgctttactagtatttctattttctctctttctccgtctccccaaatgattttctcacacacgcaaacagtctctcataacgatgtccaaattaaagccggcttttttgtacacattttatttatttatttgtttattcgtttggccgatgtcgttgtcgttgatgttgttgttgttgcttttgctcttgcttctgcttctgtccattaaatgaatttctatctctgcggctgcgtgcctctgtgttggtgagagccccaagtctggttttggggtctcgctccctctctgcgggaaagaaagagaggggtcgacatatgcaaacacagttgaattgatttaagcgtcgattaacgcacacactcaaaacgcacggtgggaattcgagctttttaaaactaaatttagaaacttcagaacgcgtggtgacgtggtgatatattgatatgatcgcacttcagaatacctaaccaactatgttagaatataaaacttccaaaacagaaatgttaataagatttagaggggaaattcattatttattcgtttattaaaaagtatttttttgtaataatattattttcatatccatgtcaaaaagcttacataaagcattatggaacattattaaacagcttttatttgttttcatagaaagagagtaatatttattaacgtagaattttctgaaatcagaccactgtgcggtggcgcagagagagcaggagaggtgccaagaaacaacatacgataccgcgactgaaaaatttcgagtcgtgtgttttttcattaatcagttgcattaaaatggtgcgcaagtccggtagagttaagatttctagtcgcgatcgcgttgccgttggcaacattctgctgcgtggcaaagtgggcggtgggcgggtggcagttgcagcggcagaggaggcagaggcggggcgacgtcgacgcaggcgcgacagcagcgccagccgaactgcatccagtgacggtcagttgttgcttttatttttaatattgttgttatttgtgcagtttctgtttgttgctattgcgcgatttttcgctggttttcacacaatcccaactctatgaccactgtgtatcgtacgttatacagctgcgatcgaaataaaagaaaaactaacaaaaataccagtaaataatttttattggtacatatatacctttttatgaaaaaatagtagtcttaaaggaacacatacacattatttagtatcgacttcatattatatatgataaagaaaattatttctctattagactctgtgcagaaatttcggactgtgtatgtttttaattgctctttgattgcaaagattgtccgtggatttaaaatggcatatccagttgctgcaaaaccttagcgaggaatttgcgtaggcatgatcaaattctaaaactgtgcgtgcgcccagcacccgcagcttcaaaactgtggatctcaccatgacggaacactttttacaacaaagcgatttacatttgaagattagaatattttccattttaaagaagtagaactagttcgactgggctggtggggttatgactttaagaagtatttcaacagtttatattgctcacttatttactgtacatatattaaagtttaaggccgccctcgtaacatttaagactgtgtcaggaatatatgtacgtttttctaatgaagattttgttcatacaactcatcttatgaataacacttttacctgcttttcgttgcagaatcggagagccacataatgcacgcggatgccctggcctctgcctatccggctgcctcgcagccccacagtccgatcggcctcgccctcagccccaatggcggtgggctgggactgagcaacagtagcaaccagagcagcgagaactttgcgctctgcaacggaaacggaaatgcgggcagcgcaggaggcggaagtgccagcagtggcagcaacaacaacaacagcatgttctcacccaacaacaacttgagcggaagcggaagtgggactaacagcagtcagcagcaattgcagcagcaacaacaacagcaatcaccgacggtctgcgccatttgtggagatcgggcgacgggcaaacattatggagcctccagctgcgacggctgcaaaggattcttcaggaggagtgtcaggaaaaatcatcagtacacttgcaggtacacatatgtccttatacgggactagtagggagattaagattttcccaatgccaaatttccagtcagaaataatttgtataattcataacgataaccctggtgggacgtgtcgggacctggcggaaaattctaagtttacgactatctatacgcattcgttactcaacttaaacttctcttggcagatttgcgcgaaactgcgttgtggacaaggacaaacggaatcagtgccgctactgccggctgaggaagtgcttcaaggcgggcatgaagaaggaggcggtgcaaaacgagcgggatcgcattagctgccgccgcacctccaatgacgacccggatccgggcaatgggctgtctgtgatttccttggttaaggcggagaatgagtcgcgtcagtcgaaggcaggcgctgccatggagccaaacattaacgaggacctctccaacaagcagttcgcgagcatcaacgatgtctgcgagtcgatgaagcagcagctgctgaccctggtggaatgggctaagcagattccggcctttaacgagctgcagctggatgaccaggtggcactgctacgcgcccatgctggcgagcatttgctcctcggcctgtctcgtcgttcgatgcacttgaaggatgttctcctgctgagcaacaattgtgtgatcacaaggcactgtccaggtaatgtttttgatactatcaaaacctataagtgaaattggtataacctttgcaatcattctttttccagatccccttgtgtcgccgaatttggacatctcccggatcggcgcccgtatcatcgatgaactggtgacggtcatgaaggatgtgggtatcgatgacactgaattcgcttgcatcaaggccctagtcttcttcgatcccagtgagttatttaacttatttacaaaagtgaccgtttaataattggttcttcaaataactttagatgccaagggtcttaatgaaccgcatcgcatcaaatcgctacggcatcagatactcaataatctcgaggactacatatcagatcggcaatacgagtcgcgcggtcgctttggcgagattctgctcatcctgccggttctgcagtctattacctggcagatgatcgagcagatccagtttgccaagatctttggagtggcccacattgattcattactgcaggaaatgttgttgggaggtcagtatttaaatgttgcaaatatacgtttggaacaatttattaatttaatttttgtgtgtgtgttaataggagagttggccgacaatcctctgccgctatcgccgcccaatcagtcaaatgactaccagagtcccacccacacaggcaacatggagggcggtaatcaagttaactcctctctggactcgctggccacgtccggtggtcctggctcgcatagtctggacctggaggtgcagcacattcaggctcttatcgaggcgaacagtgcggatgattccttccgggcctacgcggccagcactgcagcggcagccgctgcagccgtctcgtcctcctcctctgcacccgcatccgttgctccagcctcgatctctcctccgctcaacagccccaagtcacaacatcaacatcagcaacatgcgacgcatcagcaacaacaggagagctcctacttggacatgcccgtcaagcactacaatggcagtcggtccggaccgctgccaacacagcacagtccccagaggatgcatccctaccaaagagcagtcgcctcgccggtcgaagtgtccagcgggggcggcggattgggtctgcgcaatcctgccgatattacgctcaacgagtacaaccggagcgagggtagcagtgccgaggagctgctgcgacgaactccactgaagatccgggctcccgagatgctaaccgcacccgctggttatggaacgggtgcgtagtagattgattcgaagcaagaagacatttcaataatatattttatatactatttcagaaccctgtcgcatgacacttaaacaggagccagagactggttactagaagaataacgaacggtgcaatatgcagtttgcaataggacaccccttaagcacacaacccatacacatacaggccctctcttgctgtactccccaccaagtgctatatagagatgaaattgaaatgaagaacttacttaattgttatgccttgaaccattttgatactttttattagtcctaagtaggtattttggaaattgttgcttaatttttaatgtttaacgcagttgcaatatatttttggagtcatattttgctcaagaagtttattatatacaattatactatatatatacaccatttagcatgtactgagtttgttggttatttggttatcttatacttgtgcgtggatcacaaaacattcatataaggccatgcaatatattgttttaggttagggtgttgtctagattatgctgaaagtgtaatatatatttaattttaaacaaagaactatttttatatgaatatgtataatatacaaactatttctaagatggctgaatgaataaacaaaatcaaaataaacactggagaatatgaatgtaaatcgtttactgcggcatttttactagtaataaatattactataatttataatttatgccatctctttcagcaacaactttaaatatccaaactgataaagcgatatatgttcctatgctcccacttagaacgtaaccctgatcctgcatagaaaaaattcaataacgtattacaaagactaactaacgtttatttatcgatattgctaatgcccgtcttctcgacctgggcgaggagctcttggagcttgttgtcgaagagctcgcatcgaatgggcatctccagggagtagaaggggttcttgagcacgtagtctgagtacagctcgtaaacctttcgcagcagcagatcaatgccattgagacccgtttccgagattataatgaacttgattccggtcagcgtttggaagcagtgcagcgtgaaagtgtccgcctctaggatctcgatgccggaactcttgggctccggactcagttggctggcgatggcgaacagcgggtagaacatgctggccagaaagattttctcgttggtggtcatctttggccggctgaacttcaggttaatgggatagttctccggtgcatccagtgtcgtcctcacatcgcgtccatcatccagggtgactccattgacgggcataccgttgaccgccaccaggacatggcccactgttcgtaagcatatattaaggtggttatgtttctaaaattcacagacacacccaccatttattccatcctttctgttgaacgagaccgataccttcttggaatcgtagtccagcaccaagtccagagggtatgtaaaggtcttctcgtgctcaatgcgtggcacattgttgtccaggttgaatataaggccacccgatttactaactatatagacgccatatataatcatttcttactattactaattctaagtttcctaggaatgt

SEQ ID NO: 19838 - DNA, 3380 bp, DROSOPHILA
acacaacaaaataatacggagaaacgttaattataacgagccacaaaatcgcataaagaaatcaacaagtgtgtgtctgcctttttttccatattcgctttcattcatgcggtcaactcaacaataacaactcaaaatagcaacaacaacaataacaatatcaacaagagcagcagcagtcgctgataaaagccctgcagctaaaacaacaacaaaacaacaaagatagttagaaagaacatcgtctggccattgagctttaaagcttataaaagagttctatttgtgttgttttcggcgccaatgaagcatccgcaggatctgagtgtcacggatgaccagcagttaatgaaggtgaacaaggtggagaagatggagcaggagttgcacgaccccgggttaagtatgcgcaatggcaaacacacgaatcgccgaatcataatcatatcaagtttccgcaagcccaacgtttatgtgatgtccgatgatgacgccaaacgggcggcattcggaatggattcctcattcgaatccaaagtgcaccgtgagtgggcaactgggtctggcgtggagctacgtttcgtcacagaaattccggcgtataaaattactgataccgtcgtgtgcaagccattcatgggggcaactttcggaaaccgcgttgattatagccgcactaaagggacggaacagacaaccttcaaagttgcatcatttcggggcgttgtcatgagctcagatcgtggctattgtttcggattcggattcggtttcgatttccagtgttttcatgtcgctcgcctatttcaaattgatcatacgccgtgtgtgctatcagcgtcggttcgaagcctcgctgccattaggcacgttattgagtcgctgccgcggagctgcgacgccgataagagtctatatattttcaatatgtgtatagaatcggagagccacataatgcacgcggatgccctggcctctgcctatccggctgcctcgcagccccacagtccgatcggcctcgccctcagccccaatggcggtgggctgggactgagcaacagtagcaaccagagcagcgagaactttgcgctctgcaacggaaacggaaatgcgggcagcgcaggaggcggaagtgccagcagtggcagcaacaacaacaacagcatgttctcacccaacaacaacttgagcggaagcggaagtgggactaacagcagtcagcagcaattgcagcagcaacaacaacagcaatcaccgacggtctgcgccatttgtggagatcgggcgacgggcaaacattatggagcctccagctgcgacggctgcaaaggattcttcaggaggagtgtcaggaaaaatcatcagtacacttgcagatttgcgcgaaactgcgttgtggacaaggacaaacggaatcagtgccgctactgccggctgaggaagtgcttcaaggcgggcatgaagaaggaggcggtgcaaaacgagcgggatcgcattagctgccgccgcacctccaatgacgacccggatccgggcaatgggctgtctgtgatttccttggttaaggcggagaatgagtcgcgtcagtcgaaggcaggcgctgccatggagccaaacattaacgaggacctctccaacaagcagttcgcgagcatcaacgatgtctgcgagtcgatgaagcagcagctgctgaccctggtggaatgggctaagcagattccggcctttaacgagctgcagctggatgaccaggatgttctcctgctgagcaacaattgtgtgatcacaaggcactgtccagatccccttgtgtcgccgaatttggacatctcccggatcggcgcccgtatcatcgatgaactggtgacggtcatgaaggatgtgggtatcgatgacactgaattcgcttgcatcaaggccctagtcttcttcgatcccaatgccaagggtcttaatgaaccgcatcgcatcaaatcgctacggcatcagatactcaataatctcgaggactacatatcagatcggcaatacgagtcgcgcggtcgctttggcgagattctgctcatcctgccggttctgcagtctattacctggcagatgatcgagcagatccagtttgccaagatctttggagtggcccacattgattcattactgcaggaaatgttgttgggaggagagttggccgacaatcctctgccgctatcgccgcccaatcagtcaaatgactaccagagtcccacccacacaggcaacatggagggcggtaatcaagttaactcctctctggactcgctggccacgtccggtggtcctggctcgcatagtctggacctggaggtgcagcacattcaggctcttatcgaggcgaacagtgcggatgattccttccgggcctacgcggccagcactgcagcggcagccgctgcagccgtctcgtcctcctcctctgcacccgcatccgttgctccagcctcgatctctcctccgctcaacagccccaagtcacaacatcaacatcagcaacatgcgacgcatcagcaacaacaggagagctcctacttggacatgcccgtcaagcactacaatggcagtcggtccggaccgctgccaacacagcacagtccccagaggatgcatccctaccaaagagcagtcgcctcgccggtcgaagtgtccagcgggggcggcggattgggtctgcgcaatcctgccgatattacgctcaacgagtacaaccggagcgagggtagcagtgccgaggagctgctgcgacgaactccactgaagatccgggctcccgagatgctaaccgcacccgctggttatggaacggaaccctgtcgcatgacacttaaacaggagccagagactggttactagaagaataacgaacggtgcaatatgcagtttgcaataggacaccccttaagcacacaacccatacacatacaggccctctcttgctgtactccccaccaagtgctatatagagatgaaattgaaatgaagaacttacttaattgttatgccttgaaccattttgatactttttattagtcctaagtaggtattttggaaattgttgcttaatttttaatgtttaacgcagttgcaatatatttttggagtcatattttgctcaagaagtttattatatacaattatactatatatatacaccatttagcatgtactgagtttgttggttatttggttatcttatacttgtgcgtggatcacaaaacattcatataaggccatgcaatatattgttttaggttagggtgttgtctagattatgctgaaagtgtaatatatatttaattttaaacaaagaactatttttatatgaatatgtataatatacaaactatttc

SEQ ID NO: 19839 - protein, 859 aa, DROSOPHILA
MKHPQDLSVTDDQQLMKVNKVEKMEQELHDPGLSMRNGKHTNRRIIIISSFRKPNVYVMSDDDAKRAAFGMDSSFESKVHREWATGSGVELRFVTEIPAYKITDTVVCKPFMGATFGNRVDYSRTKGTEQTTFKVASFRGVVMSSDRGYCFGFGFGFDFQCFHVARLFQIDHTPCVLSASVRSLAAIRHVIESLPRSCDADKSLYIFNMCIESESHIMHADALASAYPAASQPHSPIGLALSPNGGGLGLSNSSNQSSENFALCNGNGNAGSAGGGSASSGSNNNNSMFSPNNNLSGSGSGTNSSQQQLQQQQQQQSPTVCAICGDRATGKHYGASSCDGCKGFFRRSVRKNHQYTCRFARNCVVDKDKRNQCRYCRLRKCFKAGMKKEAVQNERDRISCRRTSNDDPDPGNGLSVISLVKAENESRQSKAGAAMEPNINEDLSNKQFASINDVCESMKQQLLTLVEWAKQIPAFNELQLDDQDVLLLSNNCVITRHCPDPLVSPNLDISRIGARIIDELVTVMKDVGIDDTEFACIKALVFFDPNAKGLNEPHRIKSLRHQILNNLEDYISDRQYESRGRFGEILLILPVLQSITWQMIEQIQFAKIFGVAHIDSLLQEMLLGGELADNPLPLSPPNQSNDYQSPTHTGNMEGGNQVNSSLDSLATSGGPGSHSLDLEVQHIQALIEANSADDSFRAYAASTAAAAAAAVSSSSSAPASVAPASISPPLNSPKSQHQHQQHATHQQQQESSYLDMPVKHYNGSRSGPLPTQHSPQRMHPYQRAVASPVEVSSGGGGLGLRNPADITLNEYNRSEGSSAEELLRRTPLKIRAPEMLTAPAGYGTEPCRMTLKQEPETGY

SEQ ID NO: 19840 - DNA, 4365 bp, DROSOPHILA
aaggatacataacttgctgtaagcttcgcctgatctgctaaaggaatcaaagttttcatctgccaacatcacaatgggtaaatctacatttcaatggcttcatatttttatgcaaaaccgcactctccctttcgcacactcttcacctgtctccctcccgcaatcaaatctcaaaggaattgtcaaagagtgtggattttttgcaccttgtctggtggaaatgggaaaaagggggcgtggcaagccacaatccacacgagaatttcccgccaccgcgagctgcattttaaataaataaagcgtaagggatgttcgttggggttagggtgacgcatccggtagctacatacgtattatccaactttgcactttgaagtttttggggctgaaagggtggcactttttacagcataaatttgggaattatgaaaatttattgttcgaaattgccattggcatgcgtgtgagggcttaatgtataagaaattgataagatgagacgcccatttgggtaacttctaaagagttctattgttcattaatcctagaattgtatgctattgttgtgaatttcacaagggaattgaaaatgtgcatactaaaatcgataacttttgataataatttaatgctcttatgtgtacatatttaattatataaaatgcctttttaactcatagttacacattttaaaataatttcgggcttcagttgtataccctaaaattttaaaatttgcgagtcatcctcttccctttaaatataaagtatttgttcaacagttgaacttactctgtaggttttatttatttattttttaaatgcttttgtatatttcatttttaaaaagttccccaaaagtgaaggatgctgtctcggctagacgagaagccaggagtgtgtatctgctaacaaatcgatatcaagaaacaagctaaattatcgcgagaaacatcggtctccgatgacaaatgcatcgatgccgttttggcatcactagcgactgcggatttgtggtgtggaaatttccgcaaaacaaaaataaaaatagacctcggtgtgccaacttgcaagcgatgcacaaaggggcgcctccttggcgagtgggctgtgccgacgtggcatccggaatggagtggcagctgtccgggaatcccgcattgggagaagaggaagaggctgcaaacaaacaacaacaacaacaactgataagaagtgaaaggtgggcctgcaatcgcaggactattctcctgggatgcatctgcatcattatcttgatagctgttccctcgagcaatgccacccacatcagcggacaattccagacgggcgacttctttcagttcctggcgaaattcggcttcaacaaggcagatctgacacggcgcaatgcctatggatatatctacggcaatgtcacgtcgacggataagtatgcggttcctttgacactcgtcgtcttggacagaaggactttcctcgagttctacggcaaccgcagtcaaaggagccgggaagccgcctgcacagggatgttctcccgcctccaaaggatcgcctacgattccacgtgcaatcctcgtgccaaaagggacttcctgcgtcatgttccctgtcccgtcaatcagctctgcagcgatgaagatgaacccggaaacgtagtcccgggatcgcagttcacctacgttatcaacctggaggcggaaccaaggtgagttatgggtttttctgggcttacaattcggaagataagaattggattgcaaaaaaaaacccaattcatcttcagagactgccattctctctatatattggccttttggtatggagctggctccatgcagataaaatgaaaccttatatctttgtttgtttgttgcggcattcctcttttgtaacggaaaactgagataacatttgatttggaaatgacttggaataattttatttttccatagaagcattgttgttttaactggttaatgtattttgttgtcccccgcgtcgttgacagattttggtacctctccctggtggcctgttatcaaaacaaaagcacctgccagtggcacgcgcacgagagcctgccaaggctaagtaaattggacagcaatctcctcaacacgctgcactacgacatacatctggtcaacttgcatccgaacaactcggccgcacatccacttacctaccagtactcgtacgatcagcagaatctactggagatgtacctggtgttcctgctcgtctacattgttctgctgcccatgcaaatttatgcggtgcggcggcagaagcatccagtgaccaagttgtttaccgtgagtcttctcagcgagttcgtcagcctggctctgatcaccgctcacctgattcactatgcggccaatggagtgggcgagccaagattgcaggcagctggagatgtcctggacatcttgagccgcaccacatttatgttaattctgctgctgctggccaaaggatgggcagttaccagacagcaaatcagcagaacgggatggataattctgatgtccatctgggtgccatactgcgcgttccacgtgttcctttacatctgggatagggtaagatgtgaaataagctttatagactttcattaaaaacaaatgtttttcagacggaagtcgatgtggtttccgacatcgatgaataccagacgtggcccggctggatagttttaatactacggtaggcccttaaagttttttggctgtaaaaatgaacgtgactcactgtttttttaaattgacagcacctcctttatgatgtggtttctttacgagctccgcaacaccatgaagtacgagcactcaacaaaaaaacttgactttctacttcacctgggcgcttccagtttggtgtggtttatctacttacccatcgtggcaattgtggcgctgcaggtcagccccatgtggcgctacaagttgctgcaaggtatcaccaactcggcggactgcatggcctattgtgtgatgacaggtctgttgtggccacatagagccggccaatatctgctcctagcgggcaccaaatatgcgggtgagtgcggttgagatataaccgaactcggacaatttaataaggtaatttccttttaaggcatggatgagttggacgagttcaatgaagcgccacacattgtcagggagcgtgagaggcgtcggaattcgccgcccgatgaaattgccgttggtacggggagtcgggggatggtgctatccactagcattccacattcgctaaacggcgatgcctgcaacgatcttttggaggctgaagacctcgacgcggagctgctcaccgatcttaacaaaaacagtcatattgtggcgtaaatgcaacgggttaattactaggtgtagatgtcaattgtgctaaatgaaacacggaatgttattcatcctaagcataaaccatacatatagctagatttaggtgggttgatatttccaatcttttcactagtactactttctggccgaaaacgatattctgcttttttaactgaagtatttgcttagctattttgagacacagcaagtttcctaaaaagtcgctcccttagtaaacaaatttagttattccaattagttaacaattaagttaacatttaactgacttttgacttgagctgagtttttaaaatcgacccaccattatctcgacacaaatttatctgagtgtatattccatatagtgtgtaaccacttacaacgaagtcagagcgagtgcaagaatgcaccagagattgttgtgtgattttatgtaatatgcttgaatttataattagtttctagttaacgcataggagatcgattcgatacaatacgcttcagcatcatcatttcgttgcggtagtttatgcataagcttacatttaaacaaactaccgactacctactaagataagcaaccaagaggtattttgataagaacaatccaaacacacgagctaaaaccacttgaaattgcaaaacgaaaaatagctgaataaatgaataatttttagataactactttgatttgctttttgataagtagaccgacgaacaacttttattttttacatttgaaccttcaatactctataaaactcattgtaccatacaacacgtgattcatatcaaaattcaagttaaccgttttataaacctattaatttataatttttaaaactgaaaatacaaattttttcatatataagtagttgttttattttattttaatttttttatttagttttgaagttatattttaattaagtaatattacatttaagcatgaacatacttttctacgttttataagaagataaataataatagctaaaaaccc

SEQ ID NO: 19841 - DNA, 1876 bp, DROSOPHILA
cgactgcggatttgtggtgtggaaatttccgcaaaacaaaaataaaaatagacctcggtgtgccaacttgcaagcgatgcacaaaggggcgcctccttggcgagtgggctgtgccgacgtggcatccggaatggagtggcagctgtccgggaatcccgcattgggagaagaggaagaggctgcaaacaaacaacaacaacaacaactgataagaagtgaaaggtgggcctgcaatcgcaggactattctcctgggatgcatctgcatcattatcttgatagctgttccctcgagcaatgccacccacatcagcggacaattccagacgggcgacttctttcagttcctggcgaaattcggcttcaacaaggcagatctgacacggcgcaatgcctatggatatatctacggcaatgtcacgtcgacggataagtatgcggttcctttgacactcgtcgtcttggacagaaggactttcctcgagttctacggcaaccgcagtcaaaggagccgggaagccgcctgcacagggatgttctcccgcctccaaaggatcgcctacgattccacgtgcaatcctcgtgccaaaagggacttcctgcgtcatgttccctgtcccgtcaatcagctctgcagcgatgaagatgaacccggaaacgtagtcccgggatcgcagttcacctacgttatcaacctggaggcattttggtacctctccctggtggcctgttatcaaaacaaaagcacctgccagtggcacgcgcacgagagcctgccaaggctaagtaaattggacagcaatctcctcaacacgctgcactacgacatacatctggtcaacttgcatccgaacaactcggccgcacatccacttacctaccagtactcgtacgatcagcagaatctactggagatgtacctggtgttcctgctcgtctacattgttctgctgcccatgcaaatttatgcggtgcggcggcagaagcatccagtgaccaagttgtttaccgtgagtcttctcagcgagttcgtcagcctggctctgatcaccgctcacctgattcactatgcggccaatggagtgggcgagccaagattgcaggcagctggagatgtcctggacatcttgagccgcaccacatttatgttaattctgctgctgctggccaaaggatgggcagttaccagacagcaaatcagcagaacgggatggataattctgatgtccatctgggtgccatactgcgcgttccacgtgttcctttacatctgggataggacggaagtcgatgtggtttccgacatcgatgaataccagacgtggcccggctggatagttttaatactacgcacctcctttatgatgtggtttctttacgagctccgcaacaccatgaagtacgagcactcaacaaaaaaacttgactttctacttcacctgggcgcttccagtttggtgtggtttatctacttacccatcgtggcaattgtggcgctgcaggtcagccccatgtggcgctacaagttgctgcaaggtatcaccaactcggcggactgcatggcctattgtgtgatgacaggtctgttgtggccacatagagccggccaatatctgctcctagcgggcaccaaatatgcgggcatggatgagttggacgagttcaatgaagcgccacacattgtcagggagcgtgagaggcgtcggaattcgccgcccgatgaaattgccgttggtacggggagtcgggggatggtgctatccactagcattccacattcgctaaacggcgatgcctgcaacgatcttttggaggctgaagacctcgacgcggagctgctcaccgatcttaacaaaaacagtcatattgtggcgtaa

SEQ ID NO: 19842 - protein, 599 aa, DROSOPHILA
MHKGAPPWRVGCADVASGMEWQLSGNPALGEEEEAANKQQQQQLIRSERWACNRRTILLGCICIIILIAVPSSNATHISGQFQTGDFFQFLAKFGFNKADLTRRNAYGYIYGNVTSTDKYAVPLTLVVLDRRTFLEFYGNRSQRSREAACTGMFSRLQRIAYDSTCNPRAKRDFLRHVPCPVNQLCSDEDEPGNVVPGSQFTYVINLEAFWYLSLVACYQNKSTCQWHAHESLPRLSKLDSNLLNTLHYDIHLVNLHPNNSAAHPLTYQYSYDQQNLLEMYLVFLLVYIVLLPMQIYAVRRQKHPVTKLFTVSLLSEFVSLALITAHLIHYAANGVGEPRLQAAGDVLDILSRTTFMLILLLLAKGWAVTRQQISRTGWIILMSIWVPYCAFHVFLYIWDRTEVDVVSDIDEYQTWPGWIVLILRTSFMMWFLYELRNTMKYEHSTKKLDFLLHLGASSLVWFIYLPIVAIVALQVSPMWRYKLLQGITNSADCMAYCVMTGLLWPHRAGQYLLLAGTKYAGMDELDEFNEAPHIVRERERRRNSPPDEIAVGTGSRGMVLSTSIPHSLNGDACNDLLEAEDLDAELLTDLNKNSHIVA

SEQ ID NO: 19843 - DNA, 4262 bp, DROSOPHILA
aggacccagtcgggcggaatcacctctcgttcgaaagcacagccaccggcactgttggcaactacaacgataacacacgttagatacacagacatatgaccatacgttcaatttgtttacagtttcggggctggaaatgccttgtctcgaaaagctccctttgtccacaggctaggaggcggatgccctcgcccagatctttggagcggttttcgtcgaagcgagcacgcagctgcacagcgcggtagcggtagacattgctgatgggcattaagaaacaaccaagatgcacttgctcattatataatatttgggaattctgcgccgagtgcactcaccgtcggtcgtaccacgactctaagttgcgcagtgctcgcttgtacaggctgcacacctggcgcttgtgcgagacgattgccaagggaacttgggccatcgttttttactatattggttaaattgtattaatttgctaccgcagccgaggcaacaacaacaacagctgtcaaaagtccagtgctctaaagccctgcgcctgaaaatatgtgttgcgaagcgaaaaataattttagagaacggcaactctgaaatgaatggaaattcaaaaaatatttatatatttgatttaaattttctatacaaaagcaatggctatctttgcattttatacaagcttttgttattgcaagaaatcgaaatgatcctgtctagagtagatacctataaccaaacacttttaatgcttaaaagccttcttgctaccctattttatttataaaataagactattttgacaaatctgttataattgtatattaattacaattttttttaggaatagttaaagaaaccaagaaagtcagtcccatttttgcattttttgcaattccctttgaatttgcgaggaacaagaaagtaattttgtaaatacatctagcgaaatgctttaataaattataactgttaacaaatactcttaagatataaatataaaatgtcgttagtcctctggctgcataacattcattatgcattgaacaatatgctctggtattttcagaggcgtttcgcacaactcgcccgtttttttgtccagcatgtagatttcgttgagcacacgatcctcgtgctctggatccaaggacgagacgagagccagagatccttccgcaagctcggcgagaatttgttcgatatccggttcggtagtggacggcggaatggggtcatccggcgttataagttcatgatcttggtcttcaatgaagtttattaaatatgtctctgcctttcgattgggcgtctctggggcgggttcgacgtcgctgacatagcttagggtaccatcatccatattgataatagttttatcacgtggcttgtttacatctacgtcatattccaccggatcatccatgaggaggccattgagctcagcctgcagttctccccccgttggcaaatgactactcgtttgttcggttttgatcgttttttcctgcttaatggccgccacatcagacaggctttccgttgccgctggaactgaaaccttgggagatcgtcgcttagcctttggcttacgtttggccggcgcacttccgtcgttctcatcggtctccaactcctttcgccttttggcccaggcgtgcttgccgagctttgtactcgttacgtgctcgttttcgtagacaacatcaccatcgtttagtgcccttgaggccttgctttgctgctgtactcgggaacgctaaatataattaaaaaatgtaatggtgattacagtcagctacaaattatttaccttcttagggtttcccggaagagctcgtgcgatttccctccacttgcgatcattttcttccctttcgcggtcctcctcttccagttgatccttgagctcctgaatgttgaaggccttaggatagaggagtgctttgtttatgagctgcccattggttcgctcttcctttttgtacttcagctttagatcccgacgtgaacgtgttggaaacatttggcacatcagcgagaagtccgtcccaatgatctgcaggctgcggtagaagcggacggtctcatcggaggtccagtatggcgtgcgcttgtggcgtttatagaatccattatctcctgcaaagtataaaattcgttaagtattcaacttttatgtattaactctgcggcgcacccgtagtctcgtccattaggattaacgatgagttggctagcaccttgcgggcctccacctcggccgtggtttcgatctccaatgttttctcatcaatgatcatctcgccattggcatcaagctttagctgaggcactaacatagcggatgtggactctcccttgggttccaatagttgactgactgcgggcttggaatcatcgccaccagactcatccttgatggtcgtcaccgactgtttgggcaccatgggattgttctccggattgtagaagatcatgtccatcatcttgaacgtggacttgtcgggtacacccttattgaaacgggtttcaaagtctcgccgggcatttaaccgctgtccaatttgactttgcgacctatcgtcgcccttcctctgcttgctacctccttcggaataggtggaacaggtggattcggtgcgaatgcgtcccatgcccggactagcgggcggtaggtatttatagggggacggaggcataggcgagtgcacctgctgctgcaaaggagttcccgatgaagaaccgctaagatagcgctctcgccgcgtgggcgtggctggcgactgatagtcgccctcataatcactggccatgggtgagcccacgaagctgttgcgtcgctggccaaataccggagtgggtcgcacacgctgacgggcttgagccttgctgggcgacatagggaagccattggtggtcttctgcaagtccatctgaatgacattgtcctcgaggtccgagtggaatacctcttccagctgcccagccgagcttgcgggcatcttgaaggcgattgcatcagcctctagttccaattccgcagcaggggtcgatgcaacgggcggggactcagcctctgcttccaccaccaccgcctcctcctcctcatcctcctttttcgccgttgggagctcctccctgcgtggcttgcgtttgataagcgacaggttggccggagccttgatgcgctggcgccgcatggacatcctgcctgggtactcttaggcttcttccaggctcaaccgcagtttcacacatcaaatcgaatcaaaatctgcgcaacaaaaacaatgcggccgcaaccacgagtttcccaagtatagtgttggctaacgccaaagagcattcacagtgtcctggccatgtaagaaagtagacaaccaatttatttaaagtttcaaaatggctataaaaaacttgcagtacccaaaagattttttaacaaataaaaaaaaaacgagataactgcgttattagaaagcatgtcaagtaaatttattcgcagtgtcaaaaataaattggtataaattatggcacacttcaccagattcacgtcaaaaatttgtacacagtaaaagtttggttgaatttaatattatttgtgtttcagtgttgcagaaaagtgtgatcactgatcgtagctgtcacctctcagcaggcggtttgcgattttccaacactgctgcctgtaacggcacaacaacaggaacaacaacagcggaataacaacagaagcagcagacaaattgcaagttgcacgttttttctaatcgggcaaacatgataagtccgcccagatcctaaccaagctctcgtgcagtaacgcttccggcaaacctatcgggtgtgtcctggctagaagtactaaattcccaaagttttctggcgacaaatgtgccaagtgtgcgggggcacagtaatagcgaaggagcattaagaagtcgccgcacttttgagtaggttgttatgcaagcgggcggccgacggacaaattgaattagccggcatgctgttcaatcgatttgtactggccatcaagaaccagtcccgagaaacgctgcgtgcctggagctaccaatgcgagtcgattttcgcccagcgctcgcgtcgcgttcagcagttgttcagtttctaccagtcggtgtatggaactcagggtctgaagcagctatggcgcgcctactaccgccgggagctgcagcctccgctgcggggaatggtgatgagtgcagtgggtctcgtcgggctgaatatcaagcgaatgggta

SEQ ID NO: 19844 - DNA, 2150 bp, DROSOPHILA
attcgatttgatgtgtgaaactgcggttgagcctggaagaagcctaagagtacccaggcaggatgtccatgcggcgccagcgcatcaaggctccggccaacctgtcgcttatcaaacgcaagccacgcagggaggagctcccaacggcgaaaaaggaggatgaggaggaggaggcggtggtggtggaagcagaggctgagtccccgcccgttgcatcgacccctgctgcggaattggaactagaggctgatgcaatcgccttcaagatgcccgcaagctcggctgggcagctggaagaggtattccactcggacctcgaggacaatgtcattcagatggacttgcagaagaccaccaatggcttccctatgtcgcccagcaaggctcaagcccgtcagcgtgtgcgacccactccggtatttggccagcgacgcaacagcttcgtgggctcacccatggccagtgattatgagggcgactatcagtcgccagccacgcccacgcggcgagagcgctatcttagcggttcttcatcgggaactcctttgcagcagcaggtgcactcgcctatgcctccgtccccctataaatacctaccgcccgctagtccgggcatgggacgcattcgcaccgaatccacctgttccacctattccgaaggaggtagcaagcagaggaagggcgacgataggtcgcaaagtcaaattggacagcggttaaatgcccggcgagactttgaaacccgtttcaataagggtgtacccgacaagtccacgttcaagatgatggacatgatcttctacaatccggagaacaatcccatggtgcccaaacagtcggtgacgaccatcaaggatgagtctggtggcgatgattccaagcccgcagtcagtcaactattggaacccaagggagagtccacatccgctatgttagtgcctcagctaaagcttgatgccaatggcgagatgatcattgatgagaaaacattggagatcgaaaccacggccgaggtggaggcccgcaaggtgctagccaactcatcgttaatcctaatggacgagactacgggagataatggattctataaacgccacaagcgcacgccatactggacctccgatgagaccgtccgcttctaccgcagcctgcagatcattgggacggacttctcgctgatgtgccaaatgtttccaacacgttcacgtcgggatctaaagctgaagtacaaaaaggaagagcgaaccaatgggcagctcataaacaaagcactcctctatcctaaggccttcaacattcaggagctcaaggatcaactggaagaggaggaccgcgaaagggaagaaaatgatcgcaagtggagggaaatcgcacgagctcttccgggaaaccctaagaagcgttcccgagtacagcagcaaagcaaggcctcaagggcactaaacgatggtgatgttgtctacgaaaacgagcacgtaacgagtacaaagctcggcaagcacgcctgggccaaaaggcgaaaggagttggagaccgatgagaacgacggaagtgcgccggccaaacgtaagccaaaggctaagcgacgatctcccaaggtttcagttccagcggcaacggaaagcctgtctgatgtggcggccattaagcaggaaaaaacgatcaaaaccgaacaaacgagtagtcatttgccaacggggggagaactgcaggctgagctcaatggcctcctcatggatgatccggtggaatatgacgtagatgtaaacaagccacgtgataaaactattatcaatatggatgatggtaccctaagctatgtcagcgacgtcgaacccgccccagagacgcccaatcgaaaggcagagacatatttaataaacttcattgaagaccaagatcatgaacttataacgccggatgaccccattccgccgtccactaccgaaccggatatcgaacaaattctcgccgagcttgcggaaggatctctggctctcgtctcgtccttggatccagagcacgaggatcgtgtgctcaacgaaatctacatgctggacaaaaaaacgggcgagttgtgcgaaacgcctctgaaaataccagagcatattgttcaatgcataatgaatgttatgcagccagaggactaa

SEQ ID NO: 19845 - protein, 693 aa, DROSOPHILA
MRRQRIKAPANLSLIKRKPRREELPTAKKEDEEEEAVVVEAEAESPPVASTPAAELELEADAIAFKMPASSAGQLEEVFHSDLEDNVIQMDLQKTTNGFPMSPSKAQARQRVRPTPVFGQRRNSFVGSPMASDYEGDYQSPATPTRRERYLSGSSSGTPLQQQVHSPMPPSPYKYLPPASPGMGRIRTESTCSTYSEGGSKQRKGDDRSQSQIGQRLNARRDFETRFNKGVPDKSTFKMMDMIFYNPENNPMVPKQSVTTIKDESGGDDSKPAVSQLLEPKGESTSAMLVPQLKLDANGEMIIDEKTLEIETTAEVEARKVLANSSLILMDETTGDNGFYKRHKRTPYWTSDETVRFYRSLQIIGTDFSLMCQMFPTRSRRDLKLKYKKEERTNGQLINKALLYPKAFNIQELKDQLEEEDREREENDRKWREIARALPGNPKKRSRVQQQSKASRALNDGDVVYENEHVTSTKLGKHAWAKRRKELETDENDGSAPAKRKPKAKRRSPKVSVPAATESLSDVAAIKQEKTIKTEQTSSHLPTGGELQAELNGLLMDDPVEYDVDVNKPRDKTIINMDDGTLSYVSDVEPAPETPNRKAETYLINFIEDQDHELITPDDPIPPSTTEPDIEQILAELAEGSLALVSSLDPEHEDRVLNEIYMLDKKTGELCETPLKIPEHIVQCIMNVMQPED

SEQ ID NO: 19846 - DNA, 2756 bp, DROSOPHILA
tgctacacaaaaaacgtaaaagagaagacagttctctcgaaatattgatagatcaacaaagattaaagtgaggtgtgttaaaatacagcagatacgtggtagtatcaagtgttaacacttttcgtactctgcagcaacccaaaagcagaatgtcagtacgagactttatcaagggtctgcccatacacgattcgagcaattttacccatttgagcaacgaacatggaattcgaacgtcgcagaagcgtgcctccgtctacctgcccaccgaggatgagcattcagagcagctgatcgtgatggacaagcgatgtgtcctgctgcgctacctcactcagcagtgggacaaaaagacgcttcagcggaagagggagcacggcggcgattcgggaaatggcaacggcaacagctccacgcccaacggcaacagcaccaacagcaaaaagcgcccgcgcttggaccccaacgagctgaactgagctgggcggcaggaccttaagccaagcacccgatggacatccccacgcagcactactatcccgagcgaacacgcagccgccaccattcatttacactcatatacatatatattaaataaaatatactaagtacaaaggagttgcagtcgaacggtcctttcaaagttttgtatcacgctgatcattggtcgaaagccccagtatttctttagatttcagttgtacccaaattaacacagctaaataatgtttttgtgaccaacatatgcatacctccttttgcaagaaaataccatcattcgtataaaatgtcgagtacaaaattttgtaagctttgttactgctagttcatgaatcacggtatttttttttccattctttggacttaccttaggaaaatatacatgtacttctcgcaaagtttgtaacctaaaatgtaatgcgtttataatctgggaattgatctgcataaccaattgtatacactattattgtaaattggcaatgaattattttggcagaaggaagatcgactgaattccagtacaacacatttataatagcacataatgtgagttccaatagatttacttttaaagacaaagattggatgtgatttgattacggtactctaagattagtggtgtcccaggtccttggggtcgggcttgccgtactgcttctcccaccaggtcacaaactccttcttgcgctgctcccgcttggcaaagtactcggggtactgggccttctccaggggatgccagtagtccaggacccagtcgggcggaatcacctctcgttcgaaagcacagccaccggcactgttggcaactacaacgataacacacgttagatacacagacatatgaccatacgttcaatttgtttacagtttcggggctggaaatgccttgtctcgaaaagctccctttgtccacaggctaggaggcggatgccctcgcccagatctttggagcggttttcgtcgaagcgagcacgcagctgcacagcgcggtagcggtagacattgctgatgggcattaagaaacaaccaagatgcacttgctcattatataatatttgggaattctgcgccgagtgcactcaccgtcggtcgtaccacgactctaagttgcgcagtgctcgcttgtacaggctgcacacctggcgcttgtgcgagacgattgccaagggaacttgggccatcgttttttactatattggttaaattgtattaatttgctaccgcagccgaggcaacaacaacaacagctgtcaaaagtccagtgctctaaagccctgcgcctgaaaatatgtgttgcgaagcgaaaaataattttagagaacggcaactctgaaatgaatggaaattcaaaaaatatttatatatttgatttaaattttctatacaaaagcaatggctatctttgcattttatacaagcttttgttattgcaagaaatcgaaatgatcctgtctagagtagatacctataaccaaacacttttaatgcttaaaagccttcttgctaccctattttatttataaaataagactattttgacaaatctgttataattgtatattaattacaattttttttaggaatagttaaagaaaccaagaaagtcagtcccatttttgcattttttgcaattccctttgaatttgcgaggaacaagaaagtaattttgtaaatacatctagcgaaatgctttaataaattataactgttaacaaatactcttaagatataaatataaaatgtcgttagtcctctggctgcataacattcattatgcattgaacaatatgctctggtattttcagaggcgtttcgcacaactcgcccgtttttttgtccagcatgtagatttcgttgagcacacgatcctcgtgctctggatccaaggacgagacgagagccagagatccttccgcaagctcggcgagaatttgttcgatatccggttcggtagtggacggcggaatggggtcatccggcgttataagttcatgatcttggtcttcaatgaagtttattaaatatgtctctgcctttcgattgggcgtctctggggcgggttcgacgtcgctgacatagcttagggtaccatcatccatattgataatagttttatcacgtggcttgtttacatctacgtcatattccaccggatcatccatgaggaggccattgagctcagcctgcagttctccccccgttggcaaatgactactcgtttgttcggttttgatcgttttttcctgctt

SEQ ID NO: 19847 - DNA, 619 bp, DROSOPHILA
agctgttgttgttgttgcctcggctgcggtagcaaattaatacaatttaaccaatatagtaaaaaacgatggcccaagttcccttggcaatcgtctcgcacaagcgccaggtgtgcagcctgtacaagcgagcactgcgcaacttagagtcgtggtacgaccgacgcaatgtctaccgctaccgcgctgtgcagctgcgtgctcgcttcgacgaaaaccgctccaaagatctgggcgagggcatccgcctcctagcctgtggacaaagggagcttttcgagacaaggcatttccagccccgaaactttgccaacagtgccggtggctgtgctttcgaacgagaggtgattccgcccgactgggtcctggactactggcatcccctggagaaggcccagtaccccgagtactttgccaagcgggagcagcgcaagaaggagtttgtgacctggtgggagaagcagtacggcaagcccgaccccaaggacctgggacaccactaatcttagagtaccgtaatcaaatcacatccaatctttgtctttaaaagtaaatctattggaactcacattatgtgctattataaatgtgttgtactggaattcagtcgatcttcctt

SEQ ID NO: 19848 - protein, 144 aa, DROSOPHILA
MAQVPLAIVSHKRQVCSLYKRALRNLESWYDRRNVYRYRAVQLRARFDENRSKDLGEGIRLLACGQRELFETRHFQPRNFANSAGGCAFEREVIPPDWVLDYWHPLEKAQYPEYFAKREQRKKEFVTWWEKQYGKPDPKDLGHH

SEQ ID NO: 19849 - DNA, 6697 bp, DROSOPHILA
tgcctcccatgtccgactgcccagcgatttgcaatcggtcccaggtcttgtactatgttgcaatatcccattgccgccgattcgcattgcccaattccgcccgacgcggtgtccaccagagcccagccaaatgtaacactcgccactaattggtatgcatgtcgcatccagaggcgttccaatcaaagcgctcgtcaccacagcggatcaattcacatgaccaccgctacttcattactccatggcgaccattggattgattacaatcgctggatcttaatgaggctgctttgtttaaggcgaaccaagatcggtgcatccagctgcatgtggagcatctgtttccataatttatgtatgcaaatcgaaactcgtaaggtgattagctgataaattagtgaaacatttagtgcaacaagcactgctcttaatctattaaagtttattcaacaaaaatctgtatgaatgaagaaatcgagaagttaataattaaattgaatttattatattatatatgaaacatatttctctataaaaggaaatttgacgcggtagttatgcactgacattttaacatacataactttgaagtagttctaaaattatatctgtgatgatatatcggatatctttatcctgctggatctaaacagcaaatcaaaatgttaatttacttgttgtacatattatagcttatataaaacgccacaaaagttaacaacaaaactgagcgtataaagttaatcaaagtatatccaaatttcacattaagtttagcaactccttggcaaaaatggcaggacttgcctttgttaaaggacctttcctgtatctaatcgatatgcaaatggcgatggtaaccgtgtgcgtaggtcgatggccaaatttctatagaaactgaaacaaacaaagccattatagcaaaggattggcagaaaggtccttccccacaggattacgtaaagtaagggctcagttggctctgattatgtgaaatacgcacgcatcaaaacatctttgaggtcactgtcaggaaatcaaacagaaatcacaaacacaatttcggttgttgaaacgatttttttaaatttcaggcataaagttctttctaaaacttgaagattatctgtgaaaaaaaaccgaagaaaccgccagtaaaatggccacaaaaccgggaaaaggtgacggcaagcaggtgaagggaaaagtaagtaaagtagaaataacaccgcacataaatacccttaaatattctgaactccatgcaccttacactccgcacgagcacacatcctttcgccacgaaagctggcggcgttgtgacgaaattcgaggtccttgctgcggtacaacgtctatttttgtgtttaaaacttgtttgcgcctatttgcgcttactttttaataagtttgcctgaaagctggctccgccaggcagctctccttgatggaactttgtcacggaacataatttgcaatttccggacccatccggcgctccggcgaaggagtagcggagtagcggatgagtagctgccaccatgtgcgtgccaagctaaaaaatgcggagacagaggtcctatcgggtccttgcaatttagttacagctaccaatttatttggctattgggcccatggggactggaatttgcaggatgtgagtgtcgaaggctcatcaggcgcaacgcaataaaagagtcgataaatcactcaggtatacgaccctaggctcaccttatccatttggatgcacatcaaaataaatatgtttttatgtaagagccaatctggcccgctgttataccccacatccttcctctccaacactccacccccacttatttccaggacctgctaatcgagttgtgtgtgcaatttgtttattccacctcatcctgtttgtgacgtcaggccggaaagttgttcgccttcgccggtgaagaggccgctgacgtggcgaacgtcatcacgaatgtcttggctccaagagctgaggctccttttttgggtctggcctcagtcttggctcgccgttctcgccgcgcagatttcccggcttccttcaacatttccgaactgagttcattctcgccccaaaagaaatttaaatatctaccaggatgtggaagctagccaacaaggccatggcggtatatgaccactagattgcatacccactagcaactcttagctaaccgagtagatctgtgtgcctgtgagtgtggctgcagtgcgtctcagaatcagtgcatccggatggcagtcatctccattcgtatagctttctaaatggaattcgcttgcatatttactataatatctggttctgaaactcactgcactttagggatatgtaaataccacaagtgcctgtctgtgtctaacgtactatataatatataaccgatatctttccatatgtactgtacgacttgtaaatacaacccgtagtcgttttctcgaaactaaaactgaactcgtagtcgtagctctccatctcagaccacagatcatagatcatatatagcccaccgtaatgtcagaggttgctagtgccgctggaaccggcgatcctgtggaggatcctgagatcgccagccagagcagcgattgtgatggcgacgaggtaacgcctccgttgggagttgtccctatcaaccgatatttggatatatgtatatatctactttcaagtcgcatgccgcataatgcttggttctcctccctcatgattcctccccacacctgccccaaaaactagtttgcaccacccacatcttaaggtagtccatgtcggctgtggagtcaggtaagtggccactcccaaggatcccgctcctagcttcgtttcttttttgtggcaccttcagtggaatgttgcatgctgcaccacactctggaaaagtccatactctcaacctgtgcagtgagttagtcatactgttgttccaatttccccagctgaggacctccaagaacaagacagatggccccggcggtggtggcggcgatgccgatgacttcgatgcctggatgaagtcgcgccagctgctcaagcccgatgaccagctcgatctcaccgaggcggaactgggcgaggagatcaccaaggtgctgactcccaccaacacgaacatcgttcgcaatctcgtggtctatagcttcaaggaaggcgagtttgttccggctccgttgcccggcaatacggtcaccctaatcgcctttgccggcaactcacttcacgtggactccgatgagggtcgccgtcagatcgaggagtccgacgagattggctacccactgcccatgcccaactacactgtggtggagcagcgcgagacggataacgtcgacggtgaggagggagagggcgaggaggatgatgatggggccacgtaagtagtgccaccatgtcataacaacccattcatttgaatccttggtactaataaagcgcaaaggacgccgccgtagaagacgaggatgtcgaggaggaggacgacgaggaggccaagggcaccgaaggcgatgagggcgagggcgaaggcgagggagagggtgctgctgcccgccaggaggacgatgagcccgcccaccaagcggcggccgtttcatccaagaaacgcaagctaatcaaccagttcaactactgcgaacgtggtgccctcacctacacaaatcccaaaagggtaagtaatacaagttttagatattcattgaatttctcctggataccattccttctcctagaatgtagacacccagaccatacccccaccccgttcccagtttggagccaatgtgctgcagtgggtcatctatgattcctatatggagaactttgcggagtcccagaaggacggcaccaagaaggaggagcgcaagcgcggcaagagggagaagaagttccgggataagtcggccattgccgagcagctcaacaagaagtatctcaaatgctggcagatactcgagcgcatgatcaatcagaatatctacgatgacatcgcccacgactatcgctactgggaggatccggctgatgagtttcgtgagggtgagggcaacctgctgccactctggaagtttcagtacgacaagaccaagaagatgaacgtcaccgacatcctgttcaatccgagctactatgatctcttcgccgtctgtttcggatcgcgtaaatattgaaaatgtacccttttgatgaaaactttttgaatggtttctcctcctcctcagatgacttcatgaagcagaccaatgagggttacttgtgtctgttcaccgttaagaatccctcattcccggactatataagtgagtcccagtccggccaatccttcctctcgaactcatggatcattgcatttcatctctttcagttcaaaccgactgtggtgtcatgtgctgtgacatccacccaacgtatcctttcctggccgtaatcggtctctatgacggcaatgtggcggtctacaatctgcgcgaggactgcaaggaaccactctatgtgtccagaggagtcaactgcaagcacggcgagtgcgtgtggcagatcaagtggggtttggacatggccgatggcgaggtgaacttcttttcggtgtcctccgatgggcgcgtcttcaactggattctcatgcagaacaaactgtgggtaaccaccatcatcacattgtaccgcgaaaacggactggttgacggaccagatggcacaaaggtcacgctgaagagcggaggatcctgcatggtgttccatccagtggataataagatatttctggtgggcaccgagtgtggttacatctacaagtgcagcacggcgttcagctccaaatacctgatgacctactatgcccacaacatgtccgtctatcgcattgacttcaatcgcttcaacagcaacatcttcgtgtcctgtggcgccgactggatggtcaaggtgtgggaggatatgcgtccagatccgctgttcatattcgatcttggtgccgccgttggcgatgtcaagtgggcaccttactcgagcaccgtcttcgcagcggtgaccaccgagggcaaggtccacgttttcgacctaaatgtgaataagtacaaggccatctgcatccaggccgtggtgcccaagcgaaagaacaagctcaccaggttatccttcaacgagaagctcgccttcattgtggtgggcgatgagaagtaagcaccataccaagtattcaatctatataggcaatatatatttatatattccaatttctgtctttaggggcgtcaccacttcgctgaagctatcgcccaatctccggatgatggtgaagccgccgaagaagcagctgtatctcgaccagaacaccctccagattggcaagttggagaagctgctttccctggtgcgggaacttccggaaggttcaactgcggtgcccgatgcagccacaaccgtgcgaagttaaatcccaacttttaaccaattccagaaacacactgttttcagagttgatgtattatattttacacatatagattatctgctggttctgaaagaatcctgattcatccgtcttgtgttacgctatgtttctatccatctaacaaaaatttgctatcaaccaacaaaaggaacttagaagcaatgtatatatagtcacaaaattgtatatatgcttaaaaacgaaataaattatagaaacaactacgatcaaatccgtttttaagtagtttttgtagatcttaggatcataagaagattaggatacattataatgctagttgaaaacattgtactttaaaaatgatatttcatataaatgaaatttgtagggattgttcgttcagtcggatgtttagtatattgattttaaaacaacattaatatcaagaatctgaactaatagcttactttaattggctgcatcctataattccttaataatcacgatttcgtttagcaaaaaaaaattaaaatatccttttcacagacattttgtgttttttaaaactatatttttaaataaagctgcctcaatcctcatccgcatccaagtcggcggacttcacccggatgcgcttctcctccagatactccagtacattgtttgggcacataacgctcttgcccagaaagagcaccgtggacatcggatgcaggtagtccgccgagaagcttctggccttccagccgaagaagccactggccttcgcctccgttccactgatggaatagggcagtaggttgacgcccacctggttgggctttgagaactggacgcggaaatgatggccatcggtggccttaatccaatagaaaccctcgttgtccacatagggcttgctctgcgacttcttcatcgcattggatcgctccaggtcctggacattgaagctaatgtcgatgtcgtaggcatccggagacaggtgattggtttcgatggcgctctgcagggctcggttgtccagccagtagcgtatgcccacgttctcgaactcctccagcacatggttgaaggtcgtcctcagcttgtccaggcagcacggtggcgtatgcttgcccaggtaggagtagtacggtctctcgttatagacactgcctatgcaggacttggtggtccgctcgcagccgaacagatcgatgtcggtgatcaggggcagcgaggtgttcgaggacgagaactgaccatccaggaccaagccgtgaccc

SEQ ID NO: 19850 - DNA, 2716 bp, DROSOPHILA
cacgcatcaaaacatctttgaggtcactgtcaggaaatcaaacagaaatcacaaacacaatttcggttgttgaaacgatttttttaaatttcaggcataaagttctttctaaaacttgaagattatctgtgaaaaaaaaccgaagaaaccgccagtaaaatggccacaaaaccgggaaaaggtgacggcaagcaggtgaagggaaaaatgtcagaggttgctagtgccgctggaaccggcgatcctgtggaggatcctgagatcgccagccagagcagcgattgtgatggcgacgagctgaggacctccaagaacaagacagatggccccggcggtggtggcggcgatgccgatgacttcgatgcctggatgaagtcgcgccagctgctcaagcccgatgaccagctcgatctcaccgaggcggaactgggcgaggagatcaccaaggtgctgactcccaccaacacgaacatcgttcgcaatctcgtggtctatagcttcaaggaaggcgagtttgttccggctccgttgcccggcaatacggtcaccctaatcgcctttgccggcaactcacttcacgtggactccgatgagggtcgccgtcagatcgaggagtccgacgagattggctacccactgcccatgcccaactacactgtggtggagcagcgcgagacggataacgtcgacggtgaggagggagagggcgaggaggatgatgatggggccaccgcaaaggacgccgccgtagaagacgaggatgtcgaggaggaggacgacgaggaggccaagggcaccgaaggcgatgagggcgagggcgaaggcgagggagagggtgctgctgcccgccaggaggacgatgagcccgcccaccaagcggcggccgtttcatccaagaaacgcaagctaatcaaccagttcaactactgcgaacgtggtgccctcacctacacaaatcccaaaaggaatgtagacacccagaccatacccccaccccgttcccagtttggagccaatgtgctgcagtgggtcatctatgattcctatatggagaactttgcggagtcccagaaggacggcaccaagaaggaggagcgcaagcgcggcaagagggagaagaagttccgggataagtcggccattgccgagcagctcaacaagaagtatctcaaatgctggcagatactcgagcgcatgatcaatcagaatatctacgatgacatcgcccacgactatcgctactgggaggatccggctgatgagtttcgtgagggtgagggcaacctgctgccactctggaagtttcagtacgacaagaccaagaagatgaacgtcaccgacatcctgttcaatccgagctactatgatctcttcgccgtctgtttcggatcgcatgacttcatgaagcagaccaatgagggttacttgtgtctgttcaccgttaagaatccctcattcccggactatataattcaaaccgactgtggtgtcatgtgctgtgacatccacccaacgtatcctttcctggccgtaatcggtctctatgacggcaatgtggcggtctacaatctgcgcgaggactgcaaggaaccactctatgtgtccagaggagtcaactgcaagcacggcgagtgcgtgtggcagatcaagtggggtttggacatggccgatggcgaggtgaacttcttttcggtgtcctccgatgggcgcgtcttcaactggattctcatgcagaacaaactgtgggtaaccaccatcatcacattgtaccgcgaaaacggactggttgacggaccagatggcacaaaggtcacgctgaagagcggaggatcctgcatggtgttccatccagtggataataagatatttctggtgggcaccgagtgtggttacatctacaagtgcagcacggcgttcagctccaaatacctgatgacctactatgcccacaacatgtccgtctatcgcattgacttcaatcgcttcaacagcaacatcttcgtgtcctgtggcgccgactggatggtcaaggtgtgggaggatatgcgtccagatccgctgttcatattcgatcttggtgccgccgttggcgatgtcaagtgggcaccttactcgagcaccgtcttcgcagcggtgaccaccgagggcaaggtccacgttttcgacctaaatgtgaataagtacaaggccatctgcatccaggccgtggtgcccaagcgaaagaacaagctcaccaggttatccttcaacgagaagctcgccttcattgtggtgggcgatgagaagggcgtcaccacttcgctgaagctatcgcccaatctccggatgatggtgaagccgccgaagaagcagctgtatctcgaccagaacaccctccagattggcaagttggagaagctgctttccctggtgcgggaacttccggaaggttcaactgcggtgcccgatgcagccacaaccgtgcgaagttaaatcccaacttttaaccaattccagaaacacactgttttcagagttgatgtattatattttacacatatagattatctgctggttctgaaagaatcctgattcatccgtcttgtgttacgctatgtttctatccatctaacaaaaatttgctatcaaccaacaaaaggaacttagaagcaatgtatatatagtcacaaaattgtatatatgcttaaaaacgaaataaattatagaaacaactacg

SEQ ID NO: 19851 - protein, 754 aa, DROSOPHILA
MSEVASAAGTGDPVEDPEIASQSSDCDGDELRTSKNKTDGPGGGGGDADDFDAWMKSRQLLKPDDQLDLTEAELGEEITKVLTPTNTNIVRNLVVYSFKEGEFVPAPLPGNTVTLIAFAGNSLHVDSDEGRRQIEESDEIGYPLPMPNYTVVEQRETDNVDGEEGEGEEDDDGATAKDAAVEDEDVEEEDDEEAKGTEGDEGEGEGEGEGAAARQEDDEPAHQAAAVSSKKRKLINQFNYCERGALTYTNPKRNVDTQTIPPPRSQFGANVLQWVIYDSYMENFAESQKDGTKKEERKRGKREKKFRDKSAIAEQLNKKYLKCWQILERMINQNIYDDIAHDYRYWEDPADEFREGEGNLLPLWKFQYDKTKKMNVTDILFNPSYYDLFAVCFGSHDFMKQTNEGYLCLFTVKNPSFPDYIIQTDCGVMCCDIHPTYPFLAVIGLYDGNVAVYNLREDCKEPLYVSRGVNCKHGECVWQIKWGLDMADGEVNFFSVSSDGRVFNWILMQNKLWVTTIITLYRENGLVDGPDGTKVTLKSGGSCMVFHPVDNKIFLVGTECGYIYKCSTAFSSKYLMTYYAHNMSVYRIDFNRFNSNIFVSCGADWMVKVWEDMRPDPLFIFDLGAAVGDVKWAPYSSTVFAAVTTEGKVHVFDLNVNKYKAICIQAVVPKRKNKLTRLSFNEKLAFIVVGDEKGVTTSLKLSPNLRMMVKPPKKQLYLDQNTLQIGKLEKLLSLVRELPEGSTAVPDAATTVRS

SEQ ID NO: 19852 - DNA, 3029 bp, DROSOPHILA
aatagttgaaagtctgtctgtgcggagttgaaggagtttcccggccgtcgaattgacgactcgtaaaattgttttaaggtgcgacataaagtgtgaatggcgggctaaaggacggcgtttccggatgataaacaaattgttaaagggacttcatttttatcgcaattgaatcaatttgctgacttcttgctgaaacggcgttaaattcgatggtttcacatgactgaacacggctgaaatcagtacgaatttccatgcaatttaatacatcattttgggaagctgcacaaattttatgaaagttgagaaaatatcttgtaataacagttattaccgcgactagggaaacatttttgcagaaaaattacgcggcaattagtggaattatatttacaacagttttgatttcattcatgcaaacaattttctcgaaattaactgaaacaaacaatgggctgaaatttcaaccgaaaataatggataaatgttgtaaaatttaaaagtgatttaaactccatcattttgaacggaaatttatggcacaaaaactgcaatccagctttcgatgggcgactgaaagagcaagaagaatgatttgcggaaaatccaaatgcgtgtccgcccgcccagatggcattaaaaatgcatgacattttgacaattgatgggccaaggaatcgataacatcaaatatgcattgccaagggggcgactttggggcggacatctgacaatttgcaatttgcttttatcatcttaatttgatttgtagggtgtttgcagaaacggggccatgtgggcaaagtggggcgactggtgggaaggccagctcgataatgaagcgaagttggttaaattagcacagcattcaattattcagctcggttgggagtggtcgggagaataacgtctttcaatctctgaataaatatatacactggatttatgtgtatatactaatgtatattgagtcccggccgcaaaacgaaataaattgaagatgctgtcagctattgtcttagtgttagtgctttttcaagcggcttgtggcttcatcgttaccctggatgcccacgagacgatgtgcttctacgatcatgccaatgtcagcgacaaggtgaccgtgtccttcgaggtaatggaaggtggcttcaaggatgtgggcgtggagattgctggaccagacgacgatcgcctgcaccactccaagcaggacaccatgggcagcttcacctttacggccatgaaagagggacggtaccaattgtgcttcgacaataagatgtccacgatgacgcccaagatcctaatgttccaatttcacgttgccagggccattgagttctacatggactcctcgaagcgagttgacgacgtcatcgagcaggcgacggtccaatcgatgatcaaccaactctccgccaaactgggagccgtgaaaatggagcaggagtacatgcactttcgctatcgcggtcacttggaggtcagcgatatggtggaactgcgagtcctggcgtggtctatatttggaccaatgatgctgatcattacggccgttctggaggtatactacctcaagcatttcttcgaagtcaagcgcgtggtttgaactgcaaattgatgagcatttcatctgataaaacagtcgcgaagtttgtaagattttcttaatattgtttcaaaggattacaggattgctagattacaactaccaataaaaggctaagaatgttggaaaaatttaacgactggtctttccttgtggcttttctttcccctcaatttgttgcatatttcacgcttcacaaaccataaaacttttccacgtccggggggctggttcaagtatccataaagttcacttcacctatatagactgtggcccgcattggattagcagtagaaatttatgacgggtgtccacacatggccaatacaccagtcgagtcggaaacttatcatattcattcacaactttctcccgccgctttctctgcttcttggcaaaacaaagccaaagtttttgcctcttatttacgacaatgtcgcgtcaagtttttcccgctcctctttttgtttttttttctattcccgtgccacggttgtatatgtattgccctataaagtagcaagttttccctacattttttcgttggttgttgcataataaaatgaagcatgttgtgggagctctcgagacgcggcatctggtggcgcaagaagaatgaataaaggacacccgacttggtacaatattgttccccagcgtcaaatgaaagcaaaagttcagggagcaggacgagcgagtcgggaacggggccaatgtggtacaaatatcctggcatccaatggagcagcacgcaaataaagttcgtaaggcaaaacaggaaaggcaactgaggccgggagaaagctaactggccgagagaaaacccaactccccgaggaatattttcaaagaattttattccaaatttacattctttggttgctcgaaggcaagtatgtatattaaaattttagccatttctcatcttgaaatatataacacaacttaattaaaaagagagttaaaattgtaagccatctacccttacatgggaatctattaaggacatacttggcacttcgatttctccgccagatgctactcaacattccgatggcccatcatgtatcatcattatcgcctgccaggatctcatggcacccgagcctcaattatgttttgcatccttcagagctgttcacttaattgcatcacttgcagagatgccggggttaaaggcagtggttgcccttgggttgcctctgggttcaaatgtcctcccacttgaagttcacccagctcagtactcccacacagccatcgtggcaattcaattttctattatgtcaggccgagttgaaagcaatgtaatgttaataaaatactgccaccagcctcagtcccagcttcagatgggtatgggcatcggtgctctagtgcttcagctggagcaacaatggcagcagcacaggcggcg

SEQ ID NO: 19853 - DNA, 1029 bp, DROSOPHILA
atgctgtcagctattgtcttagtgttagtgctttttcaagcggcttgtggcttcatcgttaccctggatgcccacgagacgatgtgcttctacgatcatgccaatgtcagcgacaaggtgaccgtgtccttcgaggtaatggaaggtggcttcaaggatgtgggcgtggagattgctggaccagacgacgatcgcctgcaccactccaagcaggacaccatgggcagcttcacctttacggccatgaaagagggacggtaccaattgtgcttcgacaataagatgtccacgatgacgcccaagatcctaatgttccaatttcacgttgccagggccattgagttctacatggactcctcgaagcgagttgacgacgtcatcgagcaggcgacggtccaatcgatgatcaaccaactctccgccaaactgggagccgtgaaaatggagcaggagtacatgcactttcgctatcgcggtcacttggaggtcagcgatatggtggaactgcgagtcctggcgtggtctatatttggaccaatgatgctgatcattacggccgttctggaggtatactacctcaagcatttcttcgaagtcaagcgcgtggtttgaactgcaaattgatgagcatttcatctgataaaacagtcgcgaagtttgtaagattttcttaatattgtttcaaaggattacaggattgctagattacaactaccaataaaaggctaagaatgttggaaaaatttaacgactggtctttccttgtggcttttctttcccctcaatttgttgcatatttcacgcttcacaaaccataaaacttttccacgtccggggggctggttcaagtatccataaagttcacttcacctatatagactgtggcccgcattggattagcagtagaaatttatgacgggtgtccacacatggccaatacaccagtcgagtcggaaacttatcatattcattcacaactttctcccgccgctttctctgcttcttggcaaaacaaagccaaagtttttg

SEQ ID NO: 19854 - protein, 203 aa, DROSOPHILA
MLSAIVLVLVLFQAACGFIVTLDAHETMCFYDHANVSDKVTVSFEVMEGGFKDVGVEIAGPDDDRLHHSKQDTMGSFTFTAMKEGRYQLCFDNKMSTMTPKILMFQFHVARAIEFYMDSSKRVDDVIEQATVQSMINQLSAKLGAVKMEQEYMHFRYRGHLEVSDMVELRVLAWSIFGPMMLIITAVLEVYYLKHFFEVKRVV

SEQ ID NO: 19855 - DNA, 4064 bp, DROSOPHILA
tttaacatttgagtattatttctgcaactttttaaactcattctcagttttttgtctcaattgagtgttttgattgagtgggtgtttttaactctcttagctgcatattcctcccttaaatgcagttttttttagctcaactaccaattgagtgaatgttaacggaatgttaactgcaatctcaagactcaagcgcagttctgagtgagtcaaatatgtggctttgagtggaacagactaagctcataagagtcatgagcagtattttgacgattcttttgcccaaccatgatataaaataataatgacatatttattttcaaaatgttggtataataataagctattaactatcaaatagctattgatatacattcgttttccccattctctgctcgaaaaaatatagttttgaaatttgaaagctggaattgttagcccatcaaaatgctaaattacttagttctttctgtacctggtaattaaataaactttgtgattcgtatttgattttacatatactacgtttgcttttatttcaactcagatcagaggatagcttgaacataaaatggcctacaagcaatagtattttaagtcgtaattgtaactactaaaagattaggggattacatttagtacatgtcttatacggattttatttgagtagaaattagtcaaggcaacacggaactatcgtaaatttcaactattctagaaaattgaaatatttaagcatagtaacggtgctctcgaaactaaacaaaagggctttaacattgtaaaatagaaaaatatagcatggaaactttcgtgtgtatagacgtattataaaaccagcataagacatgcctattgtggatgtgttatcttatactgccttataaggaagtagtatgatgcgaagcgctcccccttcttcatcgtccctcagagcactaagtccaaattaatcttcctcatcctgtcccaatcccagtcgctgccactagacgctttgtcacagagtgtcgttgaacaagcgcttggccttgtagctcggatgaatcggtcccggtatccagtgtggcttaagggcactcttaccgggcaaccgattcgcgtcgtagggcacctgcggagacagcttcagctggcggtagtaatcgctcttggggtagatgcagttgctcttagtcacgatccgcacatgcttgccactgcccgtttgtggagtcgcaaactctgcgcgcgcaggctgtttgggtgtggactgcggcagcttactgttggcctgcttcacttgcagttttcgagagggaacaaagatgtcctgctcaccgtcctctaaaggggcatcccatccgttggtcggagcatcatcatcaacaccggcagccttcgttttgggagtcggcttggccttggactgtccctccaccttaggtgtgggcttgggctgctcgtctgtcttcggcttcgactgctcctccttcgtcttggagtggtccaatttcttgcgcttcgcaggctcttctttttctgccttcaaggtcggttgatcctctatcttgggcttggactggtcattcttcggcttaagctggcttttcttcttcaccttcgtctggtcatctttgttctgctgtggcggttcttccttttttgctttcttcgacttgggctcggcctccttgacctcctctactacccatgcgttgtttatgctagaacgcacctttgcattgtaattcaccttcttctgcagctcaggaggcagagccttgctaataacctcatcgtagttgtgctcgtccacctcctcaaagttaatggactgcagtaggcgtttgcgtttggatttgttgagcttcttcagttttcttccggttgcaaagacctcgtcctccatcttatctaaggcagccactttttgctccaccatttcggacagagtttgtccctccacctttggcattgtcctcacgccaagtggaaactctcctctctggtaagtctcaaagatctggataagtttgcgcaatcccttgcgtctcttgctgttaaaatcgttggtgcgtagctgcgtctgcagctcatctagtacgcaatcagcgttgagcggcagctccggcatgtgaacgtccacgttgcccgctcggggatccaaggatgtggcccgcggctgctcctcctcggcgttgacctcgtcatcctcctcgtcaaatccagaatctagtttctcaatgtcatcaatggaggcggtggggaaacccatctgcttccaggcattgtacttttcgctgtactgtcgtcctaagtcgctctggtacatcagatgatagagtacccttgtgcggcactgtgccactagcttagcatcgcgttgtgtagcaatgtaggtgacaaacggacgcaagaacatattaacctgagcagcagtgatctcaccattggccgccttggccagctcctcaaagaaaacatctaggtagtgcatggtcatgccgcgagacttaggctgctccgacatcacagaaagctgcatgctgctgttgaatgcggctatcaggtccgcattccagttgttctgtttgaggaatctcagtagataacgcaccatgcggcgggtgagcatcaggaatttgtccatgcgccactgatctatgccaaagtactcctggcacattgtgcgcataaacgcactaaagtaggccagactgcaggccgtattaccgccgaagctgtccaccatttgagccaacttctcggccagctcctcctgcaccagcggcttatccgacatccacatggtgtagtacaatcccttccagatgcgcatgaagtcgtcctcgttgaagggaaaggagctaccggcacgcgccttgaaccacttgcgcaaaatgcggatctggcgattacgctccaccacatcgttgcaggcaagagcacgtataattttcacctcctgggcgaccaccatcagctccttggccaccttcggctgtgaagcgtcctcctcctgctcgacctggatttcggccgcctcggcgttgcgcttaactggcttcttgcgcgtcaccattatccggctaattcaacttttagttgcgaaaaataagtgagctgtgtatattgaatacggtacggcacgaccgcacgtgttgccgttcgatgttgccagatgttgaaacgacattttctccaaatttcgtccaacagctctaaatgcatgagctgtactgaaaatgacaacaaaaactcaagctaatgaaataattttcaaagaataaaataaagaaaaaaagaataataaaaagaatatttaaattgctagttttgatacttcatgaaacgcttgctttatacattttaatacaattttatatatttttagccatttataggttgttattttatagctaccagcgctgacttctttacggaaagtggcaactctcttccacagctgataattcggtctgctttttgtaaattttgcttgtccagcaaatttagttaaataattcaaagaaatcatgcccgtggtgaacgtgtcggctgccgaggagtaccagaagtacattaatgcggataagacgaccgtagctctattcgccgccgaatgggcagagcaatgcggtcaggtgaaagacgcgctggaggagctggccaagattactggcgaaaaactgcagttcatcagcctaaacgctgaacaatttcccgagatttccatgaaacatcaggtacgctcgtatttattttatgaaaatataacagtagttcctcattcatttgcgatgccaccagatcgaggccgtgcccacagtcatattcttcgccaagggctccgccgttgaccgtgtcgatggtgtagacatcgccgccataagcgccaaatccaaaaagttggccgaaaacgcaagcagcgcggcggcaacaggacaaacgttggaggaacgcctaaaggccctaatcaatacagctccgctgatgatattcatgaagggcgaccgaaatggaccgcgttgcggattctccaagcagctcatcggcattgtgaacgaaaccaagtatgcaaa

SEQ ID NO: 19856 - DNA, 2064 bp, DROSOPHILA
atggtgacgcgcaagaagccagttaagcgcaacgccgaggcggccgaaatccaggtcgagcaggaggaggacgcttcacagccgaaggtggccaaggagctgatggtggtcgcccaggaggtgaaaattatacgtgctcttgcctgcaacgatgtggtggagcgtaatcgccagatccgcattttgcgcaagtggttcaaggcgcgtgccggtagctcctttcccttcaacgaggacgacttcatgcgcatctggaagggattgtactacaccatgtggatgtcggataagccgctggtgcaggaggagctggccgagaagttggctcaaatggtggacagcttcggcggtaatacggcctgcagtctggcctactttagtgcgtttatgcgcacaatgtgccaggagtactttggcatagatcagtggcgcatggacaaattcctgatgctcacccgccgcatggtgcgttatctactgagattcctcaaacagaacaactggaatgcggacctgatagccgcattcaacagcagcatgcagctttctgtgatgtcggagcagcctaagtctcgcggcatgaccatgcactacctagatgttttctttgaggagctggccaaggcggccaatggtgagatcactgctgctcaggttaatatgttcttgcgtccgtttgtcacctacattgctacacaacgcgatgctaagctagtggcacagtgccgcacaagggtactctatcatctgatgtaccagagcgacttaggacgacagtacagcgaaaagtacaatgcctggaagcagatgggtttccccaccgcctccattgatgacattgagaaactagattctggatttgacgaggaggatgacgaggtcaacgccgaggaggagcagccgcgggccacatccttggatccccgagcgggcaacgtggacgttcacatgccggagctgccgctcaacgctgattgcgtactagatgagctgcagacgcagctacgcaccaacgattttaacagcaagagacgcaagggattgcgcaaacttatccagatctttgagacttaccagagaggagagtttccacttggcgtgaggacaatgccaaaggtggagggacaaactctgtccgaaatggtggagcaaaaagtggctgccttagataagatggaggacgaggtctttgcaaccggaagaaaactgaagaagctcaacaaatccaaacgcaaacgcctactgcagtccattaactttgaggaggtggacgagcacaactacgatgaggttattagcaaggctctgcctcctgagctgcagaagaaggtgaattacaatgcaaaggtgcgttctagcataaacaacgcatgggtagtagaggaggtcaaggaggccgagcccaagtcgaagaaagcaaaaaaggaagaaccgccacagcagaacaaagatgaccagacgaaggtgaagaagaaaagccagcttaagccgaagaatgaccagtccaagcccaagatagaggatcaaccgaccttgaaggcagaaaaagaagagcctgcgaagcgcaagaaattggaccactccaagacgaaggaggagcagtcgaagccgaagacagacgagcagcccaagcccacacctaaggtggagggacagtccaaggccaagccgactcccaaaacgaaggctgccggtgttgatgatgatgctccgaccaacggatgggatgcccctttagaggacggtgagcaggacatctttgttccctctcgaaaactgcaagtgaagcaggccaacagtaagctgccgcagtccacacccaaacagcctgcgcgcgcagagtttgcgactccacaaacgggcagtggcaagcatgtgcggatcgtgactaagagcaactgcatctaccccaagagcgattactaccgccagctgaagctgtctccgcaggtgccctacgacgcgaatcggttgcccggtaagagtgcccttaagccacactggataccgggaccgattcatccgagctacaaggccaagcgcttgttcaacgacactctgtga

SEQ ID NO: 19857 - protein, 687 aa, DROSOPHILA
MVTRKKPVKRNAEAAEIQVEQEEDASQPKVAKELMVVAQEVKIIRALACNDVVERNRQIRILRKWFKARAGSSFPFNEDDFMRIWKGLYYTMWMSDKPLVQEELAEKLAQMVDSFGGNTACSLAYFSAFMRTMCQEYFGIDQWRMDKFLMLTRRMVRYLLRFLKQNNWNADLIAAFNSSMQLSVMSEQPKSRGMTMHYLDVFFEELAKAANGEITAAQVNMFLRPFVTYIATQRDAKLVAQCRTRVLYHLMYQSDLGRQYSEKYNAWKQMGFPTASIDDIEKLDSGFDEEDDEVNAEEEQPRATSLDPRAGNVDVHMPELPLNADCVLDELQTQLRTNDFNSKRRKGLRKLIQIFETYQRGEFPLGVRTMPKVEGQTLSEMVEQKVAALDKMEDEVFATGRKLKKLNKSKRKRLLQSINFEEVDEHNYDEVISKALPPELQKKVNYNAKVRSSINNAWVVEEVKEAEPKSKKAKKEEPPQQNKDDQTKVKKKSQLKPKNDQSKPKIEDQPTLKAEKEEPAKRKKLDHSKTKEEQSKPKTDEQPKPTPKVEGQSKAKPTPKTKAAGVDDDAPTNGWDAPLEDGEQDIFVPSRKLQVKQANSKLPQSTPKQPARAEFATPQTGSGKHVRIVTKSNCIYPKSDYYRQLKLSPQVPYDANRLPGKSALKPHWIPGPIHPSYKAKRLFNDTL

SEQ ID NO: 19858 - DNA, 3703 bp, DROSOPHILA
aaaaaattatataaaattttattggatgaaatatcaaaatttgatatgatcatatattatatatattccaagctagatattacaagtttccaaatcaacaagtacagaatttatcgcaacttaacattatatgcataaaatagaaatgtgtgtacacggcctatcttgatagcactaatatttatcttctagaaaagtattaaattatagtaaaacaagagaatttacgatctaaaagcaagcaggtttaaaaacaatctctgtgcacagtatattatgcagtaatttaatgacccacgaaagagtaaacaatctaggtatgcaatccattatggagacatttgaacatttgtaggttaaataaattcaaattaaaaccctttaatgacgaatcgcactgtactttggcgaagtcaatcaagcgcagaacgcccagacacacgtgtgctgcatgtaaacagagcggctagctaatgacagatctcgatgggtggtgatggggagaggtctccgaaagggcattatcatccgggttggataatcacagccagcagatacgttgggtaaccagattagcgacgattacttgccagtggtcaaggtcagctcctgaaagtatgctaaataaatgaggaggaaacacatttatagactattttaatgtatcctcaaatattttaggccaccgagggttagatatgtttaaaaaaaaatgtacataaatgacataaaattcagtagcactccgtttatttaacattcacagcaaggttagagtgtaaaaagtgtatgataaactggcattttaaataggcatattaagcacacaaatacagatacatttcaaatttctcatttactcttcttcagttggggcacattttgaacgttagaccagatttaaacaccaattaataattggtaagaataataataatttttaagaatacgccaaatatttcaacagcccacagtcttataaaaagtgactcaatacatcctagaacttggaaatcctggccgtgttaagggcctccgtcatcagtcttccgaaatcggagtgcaccatggtgaacagtttcactgcccgctcctgaaggaactggctagcttcggtcagatgctcggacaagttgcgaactagccgcttgcggccgcagttatccagggtgtaggtccagaagtcggtgacctgactgaaattgtcctcggtgtcaccgctcataaatcgatagacatctccgctcaacggacagcacgtctgcaggcccaaggcccgcggactttcccttggtccgcaaaaggaattggggaagtagttgggagccccgttctgattgtcagtcactgtcatagcaccatccctctggaagttgcgaacattcacgcggtacggacaattcaccggtatctgcatgtagttcacgcccaaacgatggcgctgcgaatcgccgtaggcgaagaggcgaccctggagcatcttatccggcgatggctcgatgcccggcaccatgtgggccggactgaaggccagctgctccacctctgtgaaatagttggtgggattgcgatctagaacaatcttgccaactggaagcagggggaagtccttctggggccataccttggtcacatcgaacggattgaaacgacactttttcgcctcctcgttgagcatcacctagtggttataaatgagctctcgatctaggtactcgattatatagacctatataattcctacctgaatgtacattgaccaactgggatagttgcccttcttgatcgagttgtacagatccctgatggcatagtccggatcgtgggacatcagctcctcgcatcgtcgggcgtccaggttcttgatgccctggtccgtcttgaagtggaacctaacgtattgcgtctccccactggcattgatcatgcggtaggtgtgcacaccgtatccgtgcaggtggcgatagccatctggggttccccgatcgctaaagtacatgagcagggcatgcagggtttccggacgcagggtcatgaagtcccagaacatgtccggatccttcaggtgggtctggggattgcgcttttgggcatgaaccaagctggggaacaacatgggatcccggacataatgcacgggcatgttgcaacccacaatgtcccagatgccgtcgtcggtgtagaatttgacggcaaatccgcgctgttcacgtaccgtatccgcagatccctgttcaccgcaggccaccgagaatctcatcgcgacggcagttcgttttctaaccttatcgaatatggaggctgcacagaattttgaaatgtcatgggtgcactcgaagtaaccaaaggcgccggctcccttggcgtaggccacccgttcgggaatccgctccgagtcgaagtgcatcacctcgtcgaggaactggaaatcctgcagcagggcaggaccccttggtcccaccgtctgtatggcatccttgacgccaactggagttccactggatgtcgtgatctccctttgcacctcggagtcattgttcttatagtcaatcaattgatttgacgccgtatcgcgtgaacacatttttcaattttgtctttggtcttaaaatttctaaaaaaaaatttattttcaaaaaaaatatttcacacagttgatttcaactgctaacaaaagcgttgtgagtgattttgcttgtcaattgtgtgatcccaaaatgaagtgtaaatcgaagaagacaagacgcgatgtaaatttataaacaaattatattgatatgtataagttagaacaacaatatatttacatatgtatgcgactttaatttacctatacttagattgttatttaatagaatcggagtattaaggtaaacaaagtatatcagctttttcccggaaatttataagcttataaaagagttctatttgtgttgttttcggcgccatttcggcgaatcgtgaaagtcaccggggttcaaaggtcacgaattgacaatgcaaacgagggggtctacgtcagctgccccctgataagcgataagagggagaaatcaaagagtgatacagaggtacccagtgcaatagaacccatacagtccatggggcttatcggcctttctggcactcgaccgaaaatcgcaaaaactcgcataatgatgagaaacaataaagggccgataaacagaaattctgttttcgcgttatcgcaaacagtcaattctctttttttacctgtttttttttcccttttttattttgcgagaatgagtgttttttatctgctagtcaataaagcattgaagattatgatttctggtattttttggagctttacgtgtacgtgttaccttttggactgttttgatattcgaagggggagtgtacgtagagctttgctttataaaagtattactatccctagtacaggtgtgtgtcgggcatattgctgatatgggatcgtaaaacaaaatgacacctccccccccaccaaaaatatctgatgggggaaatgtaatgtgaagcgtttggttgtcggccactcgagttgacacctacattgtgtgcacaaacgacaaatagccattttgtatataccgttttgtagatttacaggtgatacttcgctcgattagcgggtcatcattaaaaatttaatatgttcggcccgccttctgttgttttagccagtagtagattgaaa

SEQ ID NO: 19859 - DNA, 1640 bp, DROSOPHILA
attgacaagcaaaatcactcacaacgcttttgttagcagttgaaatcaactgtgtgaaatattttttttgaaaataaatttttttttagaaattttaagaccaaagacaaaattgaaaaatgtgttcacgcgatacggcgtcaaatcaattgattgactataagaacaatgactccgaggtgcaaagggagatcacgacatccagtggaactccagttggcgtcaaggatgccatacagacggtgggaccaaggggtcctgccctgctgcaggatttccagttcctcgacgaggtgatgcacttcgactcggagcggattcccgaacgggtggcctacgccaagggagccggcgcctttggttacttcgagtgcacccatgacatttcaaaattctgtgcagcctccatattcgataaggttagaaaacgaactgccgtcgcgatgagattctcggtggcctgcggtgaacagggatctgcggatacggtacgtgaacagcgcggatttgccgtcaaattctacaccgacgacggcatctgggacattgtgggttgcaacatgcccgtgcattatgtccgggatcccatgttgttccccagcttggttcatgcccaaaagcgcaatccccagacccacctgaaggatccggacatgttctgggacttcatgaccctgcgtccggaaaccctgcatgccctgctcatgtactttagcgatcggggaaccccagatggctatcgccacctgcacggatacggtgtgcacacctaccgcatgatcaatgccagtggggagacgcaatacgttaggttccacttcaagacggaccagggcatcaagaacctggacgcccgacgatgcgaggagctgatgtcccacgatccggactatgccatcagggatctgtacaactcgatcaagaagggcaactatcccagttggtcaatgtacattcaggtgatgctcaacgaggaggcgaaaaagtgtcgtttcaatccgttcgatgtgaccaaggtatggccccagaaggacttccccctgcttccagttggcaagattgttctagatcgcaatcccaccaactatttcacagaggtggagcagctggccttcagtccggcccacatggtgccgggcatcgagccatcgccggataagatgctccagggtcgcctcttcgcctacggcgattcgcagcgccatcgtttgggcgtgaactacatgcagataccggtgaattgtccgtaccgcgtgaatgttcgcaacttccagagggatggtgctatgacagtgactgacaatcagaacggggctcccaactacttccccaattccttttgcggaccaagggaaagtccgcgggccttgggcctgcagacgtgctgtccgttgagcggagatgtctatcgatttatgagcggtgacaccgaggacaatttcagtcaggtcaccgacttctggacctacaccctggataactgcggccgcaagcggctagttcgcaacttgtccgagcatctgaccgaagctagccagttccttcaggagcgggcagtgaaactgttcaccatggtgcactccgatttcggaagactgatgacggaggcccttaacacggccaggatttccaagttctag

SEQ ID NO: 19860 - protein, 506 aa, DROSOPHILA
MCSRDTASNQLIDYKNNDSEVQREITTSSGTPVGVKDAIQTVGPRGPALLQDFQFLDEVMHFDSERIPERVAYAKGAGAFGYFECTHDISKFCAASIFDKVRKRTAVAMRFSVACGEQGSADTVREQRGFAVKFYTDDGIWDIVGCNMPVHYVRDPMLFPSLVHAQKRNPQTHLKDPDMFWDFMTLRPETLHALLMYFSDRGTPDGYRHLHGYGVHTYRMINASGETQYVRFHFKTDQGIKNLDARRCEELMSHDPDYAIRDLYNSIKKGNYPSWSMYIQVMLNEEAKKCRFNPFDVTKVWPQKDFPLLPVGKIVLDRNPTNYFTEVEQLAFSPAHMVPGIEPSPDKMLQGRLFAYGDSQRHRLGVNYMQIPVNCPYRVNVRNFQRDGAMTVTDNQNGAPNYFPNSFCGPRESPRALGLQTCCPLSGDVYRFMSGDTEDNFSQVTDFWTYTLDNCGRKRLVRNLSEHLTEASQFLQERAVKLFTMVHSDFGRLMTEALNTARISKF

SEQ ID NO: 19861 - DNA, 3205 bp, DROSOPHILA
ggttacagtttttcccttacatcatatcttccagaagcgtagcataatcccttgaggcatcttcgatcgcctcaatgctcatggtcaaggcgtcgacatcctgctgcttgtagttgagaagccccggactttcggcctcgatttgcaggagcttgagctcgcgatccgaagcacttagccactcgccccgccgctgcatctcctcccgctccagaacctgtcgctctgtgaggatatttgcatccgtgatgttcccggacaggaacttgaagaacatctccatctgctcatcgtacagaatccactggttcgagctgtccactcccagcttcttgaagaattccgagttctgcaatcatggcgattataagctgatcattaattaaatcatcacacatacgctcagcagatcgcccatcttttaaaaaaatgacaacacaagctgattacttatcggttatatcgaaaggtttcagagacgttactagagatggtaccttttgaaaattaacaggaaatagtgcttaataattaagcttaataaaaatcgtagaaattcctgatttcctatcaacgatttcagaaatatttactcttatctatttctgttaaatatatatatatataatatatataatatatatatatatatatatatatatatataatatatataatatatatatatatatatatatatatataataaatttctgtttattatatatatatattttatatatgaattattttaaatttttgctatgaagtaaggatacaatttttctaaatttgacacaagttcttaagtttaattcaagtaaatattatgttttagtacacctcaatcttaaagggcttataaattgatctttgttaaaatgattttaataccttatatcgatatgtggataaacgtgcacaccacccctggtaaatagaaacaccctaacgccatctagtttgcagccctggtaccgctttggacgcacttcgtgtggcagtctggcaaccctacactgaatgacaagtaaattctgttcgttttgcaaaataaacttgtaaattggtatattccttagcaatggtaagtaccgcgcccagaagaccggtattggtctgagagccaccattgggccgatgaccattgaaggctagcaatcgtggtagtaattgacttgcgtgtattttcccaggctcgccgctatgattcccgcaccacgatcttctcgccggagggccgtttgtaccaggtggagtacgccatggaggccatctcgcacgccggaacctgcctcggaatcctcgccgaggacggcatcctgttggcagccgagtgccgcagcacaaacaaattgctggacagcgccattccttcggagaagatctatcgcctgaacgagtgagttgaaatttcagtagtatatcctacgatgaattcaagggtcacaggccatatatttaactggccatgatcttaattacccactacattctctacgaatctatctctatccaagcctctttgttttccctcagcaacatggtctgctcggtggctggcatcacctccgatgccaatgtgctgacctcagaactgcgtctgattgcccagcgttaccagttcagctacggcgaggtgattccctgcgagcagctggtgtcgcacctctgcgacatcaaacaggcgtacactcagtacggcggaaagcgtcccttcggcgtctcgctgctctacatgggatgggacaacaagtacggctaccaactgtaccagtcggatcccagcggcaactacggcggatggaaggccacctgtattggcaacaacttcggtgccgcgatctccatgctgaagcaggagctggccgataaggagaacgtgaagctgacgctggcggacgccaaggatttggccatcaaggtactgagcatgaccctggacaccaccaagctgaccccggagaaggtcgagatggccacgctgcagcgtgtggacaataagaccgtatacagtgtcctggagaaacccgatgtggagaagctgatcgagaagtacacaaaggtacaggcggaggccgaggctgccaagaaggagaagcaagcgaagcagccgaccaagtaatcccaaggatgcattattattgattaagggtctatcctgatttttgtaaccgatgtacggagtgtgtgaaataaaatttcaaaaaacaaaaacccactatcattgtgccaatagggatggccgattaatcgataacagtgccattgccattcgcagcgaagagctgctaaatatggccagcgacgggcagtcactaaaaaaataccgtacaaaacattttgagaaaaattccgtcgctttttatttgctgttgctgttataaaaaattcaattatacttgctaaactaacggttaatcggtttctgcaaaggggcttatgcgtaattggagagtgcgcgcaaaacgcgtggtgaatacggattggaaaaccatttttcatacgcagcaaacaggcaatgagcgcgcgtgtgtgtgtgtgccacagaaagttgcaagcagcctagagctaaataggcgcacggttgttaaatattcaccgtgctctctcgctttatgcaataacaaaatctgcaaattccccccattaggcgcaaaaatgtgaaaaaaggggggcaaaaaaaccaatgggaatttctcaatgttgtgtcaatacagtgagagcgacgtacgaaaagtcaaaagcaaaggagaggagaatggaataacacataaaaaaaagagctgagccacagcaaagaagcaagaagaaacgcgaagcaggctctaaaagaaaaatcgaaataataaaaaaaaaacacgcacgcatgtgttggtgtgtgtgagcgagtgagattctgtgcgcgtgtaagtgcaaatgtgtgtgtgagagagtgaaacgtataaataaaattcagccaaatgcagaagccaacaacaaaatggataacaaaactacacagttggattttaaattactggtaattaaataatgtttaccattaccccatcccgtcccactttttccaccattccaatatcacttacacatacagcagctgatgtttgtaagtgtgtgtgcagtctacattccgtgtgactgcgactgtctaattgagagagcagcaaaacaacgtgtaatgcgtagggaaaaagcggcagag

SEQ ID NO: 19862 - DNA, 959 bp, DROSOPHILA
gcagtctggcaaccctacactgaatgacaagtaaattctgttcgttttgcaaaataaacttgtaaattggtatattccttagcaatggctcgccgctatgattcccgcaccacgatcttctcgccggagggccgtttgtaccaggtggagtacgccatggaggccatctcgcacgccggaacctgcctcggaatcctcgccgaggacggcatcctgttggcagccgagtgccgcagcacaaacaaattgctggacagcgccattccttcggagaagatctatcgcctgaacgacaacatggtctgctcggtggctggcatcacctccgatgccaatgtgctgacctcagaactgcgtctgattgcccagcgttaccagttcagctacggcgaggtgattccctgcgagcagctggtgtcgcacctctgcgacatcaaacaggcgtacactcagtacggcggaaagcgtcccttcggcgtctcgctgctctacatgggatgggacaacaagtacggctaccaactgtaccagtcggatcccagcggcaactacggcggatggaaggccacctgtattggcaacaacttcggtgccgcgatctccatgctgaagcaggagctggccgataaggagaacgtgaagctgacgctggcggacgccaaggatttggccatcaaggtactgagcatgaccctggacaccaccaagctgaccccggagaaggtcgagatggccacgctgcagcgtgtggacaataagaccgtatacagtgtcctggagaaacccgatgtggagaagctgatcgagaagtacacaaaggtacaggcggaggccgaggctgccaagaaggagaagcaagcgaagcagccgaccaagtaatcccaaggatgcattattattgattaagggtctatcctgatttttgtaaccgatgtacggagtgtgtgaaataaaatttc

SEQ ID NO: 19863 - protein, 264 aa, DROSOPHILA
MARRYDSRTTIFSPEGRLYQVEYAMEAISHAGTCLGILAEDGILLAAECRSTNKLLDSAIPSEKIYRLNDNMVCSVAGITSDANVLTSELRLIAQRYQFSYGEVIPCEQLVSHLCDIKQAYTQYGGKRPFGVSLLYMGWDNKYGYQLYQSDPSGNYGGWKATCIGNNFGAAISMLKQELADKENVKLTLADAKDLAIKVLSMTLDTTKLTPEKVEMATLQRVDNKTVYSVLEKPDVEKLIEKYTKVQAEAEAAKKEKQAKQPTK

SEQ ID NO: 19864 - DNA, 4948 bp, DROSOPHILA
aaatcaagtaactgcgccgcagagtattgctcagctatatacgataaatattacccatttagctgcttgccatcccgttccaatcggttttctcccattgtggctggcatacgctacgtatacgcgatatttgaatttccattgcacaaatgatgcaattgtcaatgatatttttgctgcttctgatgacgatgtcagtgttttcttgccaaaacacggaagacaccgagggagccgacgaagctgccgcacaaatctcgtaatattttcatgtgcatactattttggcattgtttgtatttcgattttccatttaagcgcttacatgactcaaattggggctttaaaacatgtgcggccccgggaaacgtgactggcgtacgattcagatttatagtgatttattcgatatatatatatatatatatatatatatacagaattaaactcggaatttgttcggcttttgtgtccttgggcgggttcaattgtcgccatccatctatataaggacgcaacctcgttgaagtaatttcagtaatttcccgagttgatttatttgggcattttgtgagttagtcgatttacgatttatttttagtacaaacaaactcataataggctaatcatctgattaactcactaatttccaatcgaaattgattacagtcgtgcttatgctacaacgtgatcattttaattccttatgcaattctgaatcatcaaaagctttctttgtctttttctattgatttaatcattttgtttacctgtgcgctcatatgaatatcattctattttcctcagcggttaaaagtgcttgaataattttataaattgtacaacaatatgctacccaaatcattgaggagccaataaatcgataaattgtgtaataaggccataaatcgttcaattaatgattacctcagagcgggttatttataaatctccaacaaagttaccaatttatggcttcccactgatgatttccccctttttgttcttacagagaagttctgaatgcatggcgagcaaaggccagatgcaatgtggtgcccgacgaacggacacaggaactcttccacgagctaagcttccatcctagccaaaagcagagtaagctcttcataaatagaatataaagtatacgtatttaacaaatctatttaataacagttagcgaaatgctgcagactgccaagaaagtggcccgcaagggaggaagtggacaggcaaatgggctgacttttggccagttttgtgtcttagccgcggatctgaaacgtttcaggtaaggtgctatagtagcttcagaaacaacaagagattcgaattaacacatttattttgttctccgcagagcttcaacaatttcgaatcagccatcgtactgcgactatcagtctctgtccgcgggactgctgctcccggaactagatgatcctgccagctcgtccaatcaaaaccttcagtcgccagcggccaccaactcgtcacctgcgcacagctccaagaagccggataaccacggtaccgaactgaggagtaccaagtcctttagcagtgtggacgataccaaaaagaaaaagaacgccaccaatgagcccgtcgaggttttccttggcggatcctgcaatccgacaacctggcgagccgacgttgccataccagccctcaaggagctgggcatttcgttttacaatcctgtgagtatttctagaaaaattagcatctcttgggaagccaaacttattttgtgacttttatttgacaacagcaagtatccgattggacgcccgatctcatcgagctcgagcatcgagctaaggaaaaggcccgtgtattattcttcgttatggattcggaaacacgcgcatctgctggtgccatcgaggcggcacacatagcgggtcaaaactgcaagcagctggtgttggttttgcatccgtataaaccaaatcagaagatcctcaatgagcctatttcgcagcagtgagtattatcagtcatgcggatgatgagcaaccttttccaaaagcctagagtctaaactaaactgttgttattgtcttgcagagaatacctcgatctgaatcgcaatcagttgatacttaaggagctggtctcccgacgcggtctgcccgtattggataacataccactgggtctgcagcgcactaaggatatcctgggtggcatcagggatccaccgtccaaaatatcttctattttagagtaagttatacagaatccaattcaatccattatcaactgacttatttattattaattttcccagtaccgttcgcggcgcctttgatcgtgttaatccgctaaacgatctgctcactgtggaacaatgcaaacgtgctctcttattcctaggctatgctcagagtttagttaatttagacaatctaaataagatcattatcaaccaacgcgaatcgctgaaattgctccaaacgcacagtccaagagctgtcgccgatgatgcggatgccgatggcggcaactgcagccagcccatcctccccagccaggagctcatcgactttgatctgttttgtgtgatctcggcgtatctgtccgtcctgcagcaggagatccatgagagcggatgcatttcgcccatcaagggcaccaatgtgccgccaccgcaagtttacttcaccaacggtatgtgccaaactgcagacgcttagtttaacaagatttagtaatgtttaatttattatttagctcccgatgtggacatttactactcggccagcaagaatatttcgcgcacgtcgagcaacgccagtgttccgtccaatagtagcagtggcatcggacacgacctggagcgccagagtctcttcgagcagctcagtcgcagccgggacagtggaacatcttcgccacagcccacgggatcgagcagtttgggtaaaagccctcggccacagatcctgctaaatgtggagtcgatcgagacaacggaaataatcaccactaaaaccatagagaccaagccaaatccggtgactgcatcaactgttgtgcatgccgaggaggaagagagtgattccaacgactcggtcctctccagcaacagctccatagccagtgccggcgatatactctgctgcggtggtggcttggatctgcgggatgtctatctgggcggaagttgtgtgctgcgcaccaagtggcgtcaggaactggccgtgccctatctgcagtccaagggcgtcagtttccatacaccggcgctgcacgagagcatccagcaaatgattctgaaccaggaacagaaccaggatcagtctcagcagccgacagtgccgccgcaggaacagcagcaacagcagcgttcctttgtgcgcactcggcgaaagtgcaggggcaaccagctgcagctggaggagcaagaggagctgaccgtggccgaggagtcacttagctggtccctaccaccggtcgccgttcgtcagagcctgttcaacccatcgctgctcgactcgagtcgagtgttgctcttcgtcatcaccaacgagacccgttcgctggcgcccatgaccctggccgcccactgcattggcctcatgtacaatgtggtgctggcggtgcaaatgctgcccgaagactgtgtcctgggtgacgagaaggtgggttgtcgacgcagtccattagatagttatatcttatatcttgctcatatataactataagcatatacagcgagttctattcgttcattttatttgaacttttattaaccagacgttatgtttctccctccagctgactgtggcggccatcaaggactacaatcgcggacggtcgtacctgatcgacttggccaagaggcagggtgtgcccgtgttcagcgacattcgggcagccctcgagtgcaccgtggccaaggtgaaggcgtacaacaaccgcgaccgctgctaaatcgtacctgtatttaagttccagcacgtgacaatttaagcttatctttaagtctaaggattagtgcaatttacgttctactcttaacccccactaacttaaatggtgtctgatcgtattcggagaacactcttctacctagttaacgctatacgtaatattatatagatgatacaaataacaagtgtaaaaccactaaaatgtcgtcgcccagagagcgcatttcataaccttatggagaaagtcttgcattcagctccactctctctatgatcgctataagctatttgctttatgctaatttattatttatttaacaccatacgcgtggtacatgtgctaaattaaatgtaaatattcgaacgtgtacaattcttagtgcatatatgtacaatgaaacaccaactaaaatatatatatatattataatcatagtgagcattcagatctaaaataatatctatataaaagccccatcatgtatatgtatacccatagtgacccactgtaccagttagctggcaaaaaatatctcaataaaccaatttttctaacatttgattggagaagttttttttggtattgaacactttctttatataatttgaatattctttggaaatggagattactgttacctagtaattataatacacatatattttaaacgataaaattttgaatttgaatagtgcgcgcagtaattagctttcgcaagtgtcaaaaaagcttggcaatccaagcgtagtgctaccagatcgtatgtttttatcacagtctggcagccctccaccgcgatcactgaaaattgacgtgatggaaagtcacacgcacaccacagcaattgcacttttactctccgcgaatcgctttgttgctattttcgcgtgactcccttttgaactttgccaaacagaatattagcaacaaaatgtgatattatcgcatcttgttttgctcacgcgttttccgcttttcgcaacggctgtgtactgtgcgt

SEQ ID NO: 19865 - DNA, 2393 bp, DROSOPHILA
ttgttcttacagagaagttctgaatgcatggcgagcaaaggccagatgcaatgtggtgcccgacgaacggacacaggaactcttccacgagctaagcttccatcctagccaaaagcagaatgctgcagactgccaagaaagtggcccgcaagggaggaagtggacaggcaaatgggctgacttttggccagttttgtgtcttagccgcggatctgaaacgtttcagagcttcaacaatttcgaatcagccatcgtactgcgactatcagtctctgtccgcgggactgctgctcccggaactagatgatcctgccagctcgtccaatcaaaaccttcagtcgccagcggccaccaactcgtcacctgcgcacagctccaagaagccggataaccacggtaccgaactgaggagtaccaagtcctttagcagtgtggacgataccaaaaagaaaaagaacgccaccaatgagcccgtcgaggttttccttggcggatcctgcaatccgacaacctggcgagccgacgttgccataccagccctcaaggagctgggcatttcgttttacaatcctcaagtatccgattggacgcccgatctcatcgagctcgagcatcgagctaaggaaaaggcccgtgtattattcttcgttatggattcggaaacacgcgcatctgctggtgccatcgaggcggcacacatagcgggtcaaaactgcaagcagctggtgttggttttgcatccgtataaaccaaatcagaagatcctcaatgagcctatttcgcagcaagaatacctcgatctgaatcgcaatcagttgatacttaaggagctggtctcccgacgcggtctgcccgtattggataacataccactgggtctgcagcgcactaaggatatcctgggtggcatcagggatccaccgtccaaaatatcttctattttagataccgttcgcggcgcctttgatcgtgttaatccgctaaacgatctgctcactgtggaacaatgcaaacgtgctctcttattcctaggctatgctcagagtttagttaatttagacaatctaaataagatcattatcaaccaacgcgaatcgctgaaattgctccaaacgcacagtccaagagctgtcgccgatgatgcggatgccgatggcggcaactgcagccagcccatcctccccagccaggagctcatcgactttgatctgttttgtgtgatctcggcgtatctgtccgtcctgcagcaggagatccatgagagcggatgcatttcgcccatcaagggcaccaatgtgccgccaccgcaagtttacttcaccaacgctcccgatgtggacatttactactcggccagcaagaatatttcgcgcacgtcgagcaacgccagtgttccgtccaatagtagcagtggcatcggacacgacctggagcgccagagtctcttcgagcagctcagtcgcagccgggacagtggaacatcttcgccacagcccacgggatcgagcagtttgggtaaaagccctcggccacagatcctgctaaatgtggagtcgatcgagacaacggaaataatcaccactaaaaccatagagaccaagccaaatccggtgactgcatcaactgttgtgcatgccgaggaggaagagagtgattccaacgactcggtcctctccagcaacagctccatagccagtgccggcgatatactctgctgcggtggtggcttggatctgcgggatgtctatctgggcggaagttgtgtgctgcgcaccaagtggcgtcaggaactggccgtgccctatctgcagtccaagggcgtcagtttccatacaccggcgctgcacgagagcatccagcaaatgattctgaaccaggaacagaaccaggatcagtctcagcagccgacagtgccgccgcaggaacagcagcaacagcagcgttcctttgtgcgcactcggcgaaagtgcaggggcaaccagctgcagctggaggagcaagaggagctgaccgtggccgaggagtcacttagctggtccctaccaccggtcgccgttcgtcagagcctgttcaacccatcgctgctcgactcgagtcgagtgttgctcttcgtcatcaccaacgagacccgttcgctggcgcccatgaccctggccgcccactgcattggcctcatgtacaatgtggtgctggcggtgcaaatgctgcccgaagactgtgtcctgggtgacgagaagctgactgtggcggccatcaaggactacaatcgcggacggtcgtacctgatcgacttggccaagaggcagggtgtgcccgtgttcagcgacattcgggcagccctcgagtgcaccgtggccaaggtgaaggcgtacaacaaccgcgaccgctgctaa

SEQ ID NO: 19866 - protein, 757 aa, DROSOPHILA
MLQTAKKVARKGGSGQANGLTFGQFCVLAADLKRFRASTISNQPSYCDYQSLSAGLLLPELDDPASSSNQNLQSPAATNSSPAHSSKKPDNHGTELRSTKSFSSVDDTKKKKNATNEPVEVFLGGSCNPTTWRADVAIPALKELGISFYNPQVSDWTPDLIELEHRAKEKARVLFFVMDSETRASAGAIEAAHIAGQNCKQLVLVLHPYKPNQKILNEPISQQEYLDLNRNQLILKELVSRRGLPVLDNIPLGLQRTKDILGGIRDPPSKISSILDTVRGAFDRVNPLNDLLTVEQCKRALLFLGYAQSLVNLDNLNKIIINQRESLKLLQTHSPRAVADDADADGGNCSQPILPSQELIDFDLFCVISAYLSVLQQEIHESGCISPIKGTNVPPPQVYFTNAPDVDIYYSASKNISRTSSNASVPSNSSSGIGHDLERQSLFEQLSRSRDSGTSSPQPTGSSSLGKSPRPQILLNVESIETTEIITTKTIETKPNPVTASTVVHAEEEESDSNDSVLSSNSSIASAGDILCCGGGLDLRDVYLGGSCVLRTKWRQELAVPYLQSKGVSFHTPALHESIQQMILNQEQNQDQSQQPTVPPQEQQQQQRSFVRTRRKCRGNQLQLEEQEELTVAEESLSWSLPPVAVRQSLFNPSLLDSSRVLLFVITNETRSLAPMTLAAHCIGLMYNVVLAVQMLPEDCVLGDEKLTVAAIKDYNRGRSYLIDLAKRQGVPVFSDIRAALECTVAKVKAYNNRDRC

SEQ ID NO: 19867 - DNA, 4485 bp, DROSOPHILA
cgttgccaagccccaaaaagggggctcaccagaacgagcacagtaaaagagcaagctgaatatattttctaagtaaaatttatttattatgtataaataattctcttttagctctcgcacaagcgctattaacgttagtaatttacagttcgctctgcagtcctcgttgccgaaccagggactcacagtcgggtatccaggtcacctttggtgggatttaggagatcccccctgctgtaaccactgggtgtccctggtcggctgcgaagtggaaatcaaacgaaacataacggcacaaatagttggcttaaacaattacaataacaattgtggaatatataaatttgcatacaggctaaaagtgaagtggtcccgtctccacaagcatagctcccacttcacttacgttcgtattcgtaatttagttagaaattagatttcttgtacttgttgaacatcgtttgctttagtgttgttttgcagttcccatagctatctatccaatatataaatacgaaaatcaattgtaaagaagagggatattcgggccggtgccaccgctgcgccatggtggttatttgttgacttgggcgcaatggagccccaacgggtacagaaggaatgattgggatagatgcgactcgcttctgtgatttttgactttggctacccttaaacccataagagagatgcaacgcagaggttacaatttttacaatagaacgtttgttaatttgttgcttaggcgctgctttatccactactatatctaccagttatttatcatcctcagttatacatttatacaatcctattgcacacatacgattctcatatgtcttgcttagcaccccctcaagatacatatacataatcatatacatacatagatatagatattttgatacagttatagttaaagttaaaaaaatacctcacacttgataataatgagtgtaaagacccgcccgcgactatggtatgaagttaaccccgaccagctcgaaagaaagtgatagtgtaggaggcataggaaatagagggtcgagaaggccttgagttggcggtcctagacgggcccaatatcactttggtatctggcggtcaggtagttggccgcctctgtcatttgttccaggcactggtacagaccgttaagatgcctccggcagcgcttggccagctccgtggccttgtcccccgagcccggcttcgatttggcgacgtctacaatgtcgctgccgtcgctgctttgggcgttgtcgctcttgttgccatcggactctagccccgagtcgttttcctgcgatatgtccgagtcagagtcactcatgttgctcaccgagttggtggacatcatggatgcggtagaggtacggcgcacatgacccttgacacttccggatgcggttgtgcttggactgccgctgttgaattcagtcttgctctcgctgggattgcagctcgaagtggaactggtactggcgttgagctgctgttcggagtgctgctggtcgtcgtcctcctggttggcggtccaaagcagatcttttttcagggagttcagcatgttgtacagattgaacagctcggaggcgctgagaaagtcttggacattttttgaatgcgccgctccccgcttgccgtgggcactggaggtctgtgtcagctggttggcggtcgagtccttgccggttgctgggatgatgtcagtgctgtcgccgatctggggataaattatgtaaagtgggagccataagttgttggttccggatccggatggctggtcaaatggggggctggggttcttgggttatgcggtaccaacctgccgatccatgagcctgcatggcaccagtatggtgtcgtccataatgttgacagtctttacaaacttttccatcacattgacaatgctgtctttggagaactgctgctcatcgtgacgggcgatgcggcgcaggcagtttctgaaaaacagaacaatcgaaagatgagcttgggccagagcacaataaaccagtagagcgtgtgcaggggaaccagtttggattggacaatagtctgcgtgattagtgactatgccacatcacgccagactggaccaagcgctggccgttctaaagcgtcgttaagtctgcggcgatcagacttccgccactcgaagccatctttctttgatgctttcgactggagatgggtgcgcctcctgctgaccaacgtggcatatgatatatatgaattggtttctatgcaaatcagcgactcgctggcgttgtcgcaaattcaatttgtataaaatagaaaaccagttggtgctttatacctgacattgctcgtgtggctcttaaaacaaagcacagacggacggacagaaagatttctattttggtttccaaagccaatttaacgcgtccacgtgctgtcggtggcggggtgcgagggtaaagcccgactttgctcgcaagcttcaatgtaatggttatacaatcctggctggtcgcattaactttaatttcacgaaaagatcgcgtaacatctccaggtcaagccccataaacttgcctgagctccctccattaacccgccgggaatatatgttagttgctgatatctggagctggagcggccaaagtctagaggcggcttggcttatcgtcgctagacagttcccagacagagctgaagttgcgtatctcccgcacctcctatttaatgcggccagattgctcggggcggatcggcatgtgggcagccagttcggggccgcgtgatcgcagctagttgacagagcgagcgccgagcgcactgataaatttagtttcagtgactgcgccatttaaagacctctaccctacagttctatccctggccagcgcccgccccgatgccatggcaatccaacttagaaaatctagatatcgatgactgaagtgtaacgcgcggcaggccggggtggggtggccacgcgagtactgcgtgctccgaactctgctgaccgacatcgtctcactgtggtctagaaccacaataagatctagatctagagaaggctggcgcgggtgtcaatgttctttccactggcacggccagatgtcgtggacgtcgacggaggattcccagccactgaacagagtgactaattaagctaattgcagcgggttccaatcatggaaatccgcgtaggaatgcgaaaacaattaccatcttatcaacgcttttcgcttagacactcgaccataattgactgccatctcgtggaaacctgagtaatcgcctctatttattttaaattatagatattttctagccctgaccacgacccttgcttcgcttagtcacttaagctggccacacgatagttcaacttatcactgcattttgaatcctttccttgcgaatcctctgaacagatcccgaaagcccaaaaacgccggcttgggcaacacgccagatgctaccagccaattgaccaggcaataggtacacctgaagtgttatggaaatttggctaagccccacaagcgtcacgcgacatgctcgccaagaagggcggggtaagcagcgggagagggagggtaccgcatacaacgccgaaatcaggcgactttttcgctcagcggtagctaagggcggtgaaggagtgctgaaggggtggtggtttggtgggtggctgatgacgagctggctttatgtggcaagcgaatcaaacgcttctcttcgcactctctcttcggtccgtttcgccgttttctctttgccgccgagtggcgtgatgttgcccagaaactgtacagcggccagagtcgcctccatcagctgagcaagatgaatgaatctctagcgatgctctgccttcccctcaccttcctaccatcgctcatgcaaccatgtttagtggtatttctcgtatttgcaatgttgagcaatggcatatacatagccatacgaacagagttgaccaatatttggtttactttggctttggctgcgcctcgacctccagcataatcgatttttgatacgcccgcaaattagatattctacctactcggtggccgggttggccggattggctcggccatcgggcatagagcattgacgaccgtaagttggcgctcaaggcgacacctgcctcaaaaagtgacacactgccagcgcaacgaggtgaatcagagaattttctgcgatttaagcgccccaaggaggcgggcagcaccagaagcgatgagtaatggctatggccgatagctgggctggcggactggtgtcagtggaccggaggtgcgcacagataaggcatcttatcgcttatcccaaagctgtgatttgcctccgctggctcactcgaaacatttgggcaaacaaacggcaaaaaaaacaccaacatacttctgtataggtgtacaatatatagccgattgtgtcatattagcgctggcttgatttttttattttattttattttttttgtatttgttgttg

SEQ ID NO: 19868 - DNA, 978 bp, DROSOPHILA
acctattgcctggtcaattggctggtagcatctggcgtgttgcccaagccggcgtttttgggctttcgggatctgttcagaggattcgcaaggaaaggattcaaaatgcaaaactgcctgcgccgcatcgcccgtcacgatgagcagcagttctccaaagacagcattgtcaatgtgatggaaaagtttgtaaagactgtcaacattatggacgacaccatactggtgccatgcaggctcatggatcggcagatcggcgacagcactgacatcatcccagcaaccggcaaggactcgaccgccaaccagctgacacagacctccagtgcccacggcaagcggggagcggcgcattcaaaaaatgtccaagactttctcagcgcctccgagctgttcaatctgtacaacatgctgaactccctgaaaaaagatctgctttggaccgccaaccaggaggacgacgaccagcagcactccgaacagcagctcaacgccagtaccagttccacttcgagctgcaatcccagcgagagcaagactgaattcaacagcggcagtccaagcacaaccgcatccggaagtgtcaagggtcatgtgcgccgtacctctaccgcatccatgatgtccaccaactcggtgagcaacatgagtgactctgactcggacatatcgcaggaaaacgactcggggctagagtccgatggcaacaagagcgacaacgcccaaagcagcgacggcagcgacattgtagacgtcgccaaatcgaagccgggctcgggggacaaggccacggagctggccaagcgctgccggaggcatcttaacggtctgtaccagtgcctggaacaaatgacagaggcggccaactacctgaccgccagataccaaagtgatattgggcccgtctaggaccgccaactcaaggccttctcgaccctctatttcctatgcctcctacactatcactttctttcgagc

SEQ ID NO: 19869 - protein, 267 aa, DROSOPHILA
MQNCLRRIARHDEQQFSKDSIVNVMEKFVKTVNIMDDTILVPCRLMDRQIGDSTDIIPATGKDSTANQLTQTSSAHGKRGAAHSKNVQDFLSASELFNLYNMLNSLKKDLLWTANQEDDDQQHSEQQLNASTSSTSSCNPSESKTEFNSGSPSTTASGSVKGHVRRTSTASMMSTNSVSNMSDSDSDISQENDSGLESDGNKSDNAQSSDGSDIVDVAKSKPGSGDKATELAKRCRRHLNGLYQCLEQMTEAANYLTARYQSDIGPV

SEQ ID NO: 19870 - DNA, 6058 bp, DROSOPHILA
gagcagcggaaaatatttttagaaataaaagtttgatagaacgattgacggattgtcttactttttaaaaatatgaaaactatttaagggccgagcaattggaattgattagattcctgtagattatgcatattgccacaattaagaggttatcaatgggtcactcgcattacaagctgtctatttcatatagctagacctcgaaatacgcggtgtgcgattatttggccaaacttccgaattttcacatccctttaggttaaattttgctcatttcgtattcaattatttttcccatcattgatggagcggaattcagcgcatttgtactcgatccgactccgcacctgactggatgaaaccaaattcctagtaaacaatctatactgtaagttaaatattcgattttgttattgtgtcgccaataacaacaatgaataatgattaactgataatgaagtagtacggacaatttttcagaagcaacaacaaatgcggaactaaagcagacagttagacgttgatcacttgactatggtcaagtacagtgcgatacagttcaacctacaagtatacctaatgcagacgcaaggctatacaaatattacaggatgtattacagaatgactcaaatcaaggatgaatttgcatatcgcagcagaaattgcttgaagtaaatggcaaggattgaacggccggccctacaatgccggttttcactgtaccttcagacagtacaaaggaataacaagatttacattagaaattatttggcggctcattgcgtgttggccaaatcaattaggtagaaaatcacgatacatcaatttgcaaccagctgcgatacgcgccgagaacccccgtatatataccacacagatatataaatatagatatacctatagatatatagggagctaaccgagggtctggagcgtagagccttacaattgtgccacttatttttgtgtgccttgtagaggcgataaaaatgactcgatcaaatattgacattcacgtgtgctgcggatggagaggtgtggaatgttgtgtgctggagtgctggcactgcgataactcacccgacatgaaatgcaaaagtatcgatgtaatgggatacaatactggactgtaggtaatatcggggcagtcgtagcccaggacattcacgatgcgatcggccacggctcgtcccgtgctggtcaagtggtagggcaaacagtgggtggcatccacaaaggcgggcagcatgatcggcttctccgacagctccgtggtgccaaagacctgaattttaggaaaacacacattagttaagtacgggacaaaagggtgaaatctggtatatggatcccacctggtgaaccatctcccagtagaagccatctagcatttgctgtttggtctggtgctggccacacaacatcggccatagctgggctcggatcggggagttaatgggccacgagttctccctgagtatgttcttcacgtcgcgcttcttgccctgctgcagcagctgctggatttccgtgtaggagcgcagtgccggttccttgcctgcaaacaaagataggagacaccgattagattatattaaaggtcctctgtgggagtaggttacaagtggggaatattaatagattcacgtcggctattaacagaaataggtgcccaaatatataggtattacattttaggcgaagatagcgtgggcttacgatgttttccaaatatacacatatgtcacacatatatatatcttatctaaatcacctactctgcttccattatatgctatcattcaatctctaaaggtttaatccttacagctgataagtacagtttaattggaggcgtaagtatacagtgcttacttgattagtgttcaagctaatccctcttaggttaggtcattaactctcactaatccttcgactatttaaactacgcgatcaaacacaaacacgaagacctcaagtggtcgaggctgccgttttggctatttctggcacttcatgcacttcaatcatatgacacgattgtttttgttatggctaataatggaggttcttgaggttatcaccgctctagagcctttcaactggcagtccaaggaaccttttccactatcatcaaagtcgcgaggcgcttttgaccaacggagctcaagataaaaaacacttgtgaaccgccgataagtagttaaatttcatgtgtagggttgcgacattactcatgcctcgagtggtcaaaataaaatacttgagaaagtgcatctgataagtaaaaaatgttcgttcacttgatgaacacttcccaacaatttcattagcctttggcattggctagttttcagaaaggtgctggaggcaaattttcccacagtaagtaccattgacgtacataagtaaactgtatgacttcttcagaaatggtcacttaactgtttctgtttttggtaacattcgcaaaaagaaatgccgatatcagctaagcacctttaaatgttttaagcctatacaaattccgaagaaaataatattttctagacaaccaatggcatctcttccgcgttttacctcatttgaaatgaaagcctggaattaagtagccaatcggcgagtgcattagaagtgtaattattagtatgtaattaagtgctgattttattcgaattgattaaataaattgttcttaaggtaaatcagaagcttcttaaattagacaattatttttaattaggtgtcatgggattaggtgctttttcgggaaccctccgcgctgcgttgtatccccataacccccggacttttcaagcagatgtgtcaattgggtgacagccgtagatgtactatcacctcggtcagctggtcaactgcgtatgtaggacaacgccgagacccccaccctgctccatccgtatctgtggccacctcaatgccacttattgattagctatcggtgtgggggtaattgattgcactgcggacatgtctcattacaggcggcgacagctgatcgatttttgcatgccccccttatcgccgatagctgataaggtggaaagcgagggaaatagcgccgggcagagtcatatcagtatcgggcagcaaatcagatactgagctgcagaacccactgatttatttgccagctcgttttcccgcgattcgaaaatggtttcggatatcgcttgaataaaaatcgtttagcattaggccaataaaagatcggggagaactatcaaattgctccaaagcgataagatacggggtgagtgtgttttcattcagcaaacgcaataataataaaaactggtataattgagtggagcttcgttcagtcgctgtgtcgcttgtgggggtaattaatccccatctacggcatctcgcggatccatttgcatttttcgagcaaccaatatggaaaactgcgatgcatatcgtcaccacatatacactgcacagatgcagtagttttcctatcaacgcaatcaatttcatttgtttgcgacagcgaaacaagcccctcaaaacattcctcataattggatattatgtcagtttacgatcatacttataacacaactatccaagtcaaagccccagcgattaactcacatactttaaatacgctaaacgccattgaaagtgtgcaatctgattaggagcacaaaacgcaatgcaattaaatcaacaatgtagcggataccatttgtttcaacgccgaagctttatcgctattagtatgataatgaatacacacacgaaaatatcattcattgtcttccacaacagctgggaattttggaaattaaaaaagatttattcacgcagctgatctgttttatttttttcttttcttgctctctttacgcctgaattatacttatttactaaatatgtataccgatttaagtgttattttgtagagagctgagggtaagtaataataaacatcgctttttgaagcatcaaagaatttttcatgcaagctcttaactacagaaaaacagtttagataaaaacgatggttatgaaaaaaggggtcaagattaataataatatgtgtaccattctttgaaccaaggttaattgtcaagttttaaaagaaggaaaagatatagatagatagatattcccgaatctctaaagccacagttataaatttcacattttcattttgccaaaaagctagtaaatcaaagcatctatacttaaaatgaatctaattgacgttttgagtctttaatttaacacattttactctgattcaagagctggaactataaacattagttttgatttttatactatgtgtttttgagtctggtttggtcggtctcgtgttttgactgcgtcgtgcccatgggtttcattacctggactgaactggaagcactggcatttggtggtgatgtcgttcgagctggccgcgatgaagagcggcagctcgaagaacttgtcgcactcgggatcgacgtagacgctgctgcgccggctactgaactgctccaagtctttgatgcccaagactttgccaaccatttttcacactgtgttctcgaatcgctcctttcgtcaatttgtgtttgtgtttctttcgattcgacttggtcggtcgccttaattttattgttattttgttgctttattttaatttttgtttgttcactcgcttttttggcaccgagaacgacatcgtttatgtagatttcagtctctcttttgtgttgcttaatttctgtgtttttcgtattttatgcccgtacaccctgttcactgctgccttttattgttttaatttattgcgatctgcaattagctgtcgcccgagcagcgacgccggcagcgcatgaatttaatttgcttcacattcaacattcaacttttgcgggctctgcgtgtattgaaatgtaatgtaaatacttccacggcggttgaaagaaatcattacgcatccgggcgatgctagcggggattggatcgcggctaagaaaatcggagcacggcgagttctcagacgggcttagcttacgtgcggagcgttcggatgcggccgggcttctcagatattttccggcggacaggccggtttcattcgcgagccttctcaatgaaagctccccaatgaagaataaatgaaacgagagcgatcgaaaacctggcgcgtgcaagctttgatgtagagcttttcgcgggtctcctgctcttgctattctgttttgtgatttatttttgttttcctttcctattttcgtttgtttatgcatttcactatcgggcgcctcagagcaaacagctgttttctgttgctctcacgctctcgaagcgaaggaggggttagagaaaacatccaaatctagtgaaaatacctttataaatagcttttgtgggaaatttcgtaagcatggcgcaaaagagcttggaaaatgacaggcgagaagagaatctcgggcattcctgcatatacgtaatgtcgatttatgagcgtttggcaaggaaaattccataccacaaaataaaatttatggcgaaacctcagaaactttaattttctgcatttcggaacaagtctcagcagcacattgtgaaaacaaaaaaaaaggaggaaacgttcttcaagtctaaatatttataggggaaattctatataactttcacgtatgaaggctagagctatgagcgaagcaggtttgaacagaaaattagccaaatttaaagcaaaacgagttacatagcactttcaatttattcttatcaaatattaaagtgcaaaagacaaagaatcgaaaaggctgttaatttatactcttccccgttcaaacctccaattctgataatttacattaatcgaacgacatacaaagccgattttcagcactcactgaaaagactagctacaaagattcattttcaaacactcacgtgatgccctcttgcttaaacgcatttcaatacacatttagtttctttcacaccatccgcccatcttttttttagcgtattcacaaattgatttttcacatgttttgtcaggcaaattaaataagacc

SEQ ID NO: 19871 - DNA, 1105 bp, DROSOPHILA
catccgaacgctccgcacgtaagctaagcccgtctgagaactcgccgtgctccgattttcttagccgcgatccaatccccgctagcatcgcccggatgcgtaatgatttctttcaaccgccgtggaagtatttacattacatttcaatacacgcagagcccgcaaaagttgaatgttgaatgtgaagcaaattaaattcatgcgctgccggcgtcgctgctcgggcgacagctaattgcagatcgcaataaattaaaacaataaaaggcagcagtgaacagggtgtacgggcataaaatacgaaaaacacagaaattaagcaacacaaaagagagactgaaatctacataaacgatgtcgttctcggtgccaaaaaagcgagtgaacaaacaaaaattaaaataaagcaacaaaataacaataaaattaaggcgaccgaccaagtcgaatcgaaagaaacacaaacacaaattgacgaaaggagcgattcgagaacacagtgtgaaaaatggttggcaaagtcttgggcatcaaagacttggagcagttcagtagccggcgcagcagcgtctacgtcgatcccgagtgcgacaagttcttcgagctgccgctcttcatcgcggccagctcgaacgacatcaccaccaaatgccagtgcttccagttcagtccaggcaaggaaccggcactgcgctcctacacggaaatccagcagctgctgcagcagggcaagaagcgcgacgtgaagaacatactcagggagaactcgtggcccattaactccccgatccgagcccagctatggccgatgttgtgtggccagcaccagaccaaacagcaaatgctagatggcttctactgggagatggttcaccaggtctttggcaccacggagctgtcggagaagccgatcatgctgcccgcctttgtggatgccacccactgtttgccctaccacttgaccagcacgggacgagccgtggccgatcgcatcgtgaatgtcctgggctacgactgccccgatattacctacagtccagtattgtatcccattacatcgatacttttgcatttcatgtcggcacacgtgaatgtcaatatttga

SEQ ID NO: 19872 - protein, 198 aa, DROSOPHILA
MVGKVLGIKDLEQFSSRRSSVYVDPECDKFFELPLFIAASSNDITTKCQCFQFSPGKEPALRSYTEIQQLLQQGKKRDVKNILRENSWPINSPIRAQLWPMLCGQHQTKQQMLDGFYWEMVHQVFGTTELSEKPIMLPAFVDATHCLPYHLTSTGRAVADRIVNVLGYDCPDITYSPVLYPITSILLHFMSAHVNVNI

SEQ ID NO: 19873 - DNA, 2311 bp, DROSOPHILA
ttaccactttcgtgcagctgacacagtgagccattgagcataaatgtgatatctaacttccccctaaatctagtttagccaattcaattagctttcacatagatgtggttttttgttagaaaacgaattaaaatcgtacttttacttacagcacgaccctgcttttaattgctgcaatcgtaataaaattagattggatatctaaaatttttaaatcatttggttaataataataatttacttcttaacttcaaataaatttactcaaataaattacgataagtttgaatcctaacattatgagaactatttctaatattaatttcacgccaatagatggagcttagaaaaatgacaaaaattgaatttttaactttacccaattgactttttaacaaaccaatatttaatgtttattaaccactttctttactttccagctaattttgtttattgtggcctttgtggcgcacacaacttttgctacagtgcagccaaaagcaccgaacttccagtacttcgaaaggtatgcaattgtcaatttaaactatattaaattgaatttatataacaatatatttcaggcccaagtaccgttatccctactacgatgaacacgggcgcggaaaacttctctacggctacggcggaccggaattgtaccaatacaagacctacacgcccttggagggcattcactagtcctaaatatcgattagatgcaatgtagtccgtaatttatgtattctattatttaaattaaactttctttattaccccaaaaagtgtttttgaattcctctcaacttgaacaatagatggcgctcttggtgaagcgaatgcaatggtcacatcgaaatgttgtgttgcaaccttaccaaacctgcagtgtgaccgcagcattgccggcataaaataacaactgtattcacatttgttatttattattgctgccaaaaggttttgtaaactgcatttattttgaaatcatctattgaaaatgtcccgcaaagaggccctgtcgcagttcatcaatcagatacacggacgccccgtcgccgtaaagctgaacaacggcgttgactatcgaggtgcgttcaatgagttcccaaacacactcatcacatttgacaattttcccaatccactgaccaaattccaggtgtgctggcctgtctggatggctacatgaacatctgcctggagcagacggaggagtacgtgaatgggcagctgaagaacaagtacggcgacgccttcatccgcggcaacaatgtcctctacatttccacgcagaagcggagggtctgaatacaggagggtctcaactggcatggcaccatgaagttcgtagttagagaactctgattcctctgtttccttcagagggaacctgcgacaacacaagtgtttcatacttcaatattaaagctgaaccaacttctcatcatcctgtatacaaaccaattccagtagttcttgatatacccccgatacattagacctcgttgcttcgtttcttaagtttattccataaatacactatctagaggcgctaaattgcaatccccactcaactgggatagtgcggtgtgccatactcgcggggaatggcgccaaagtggcgcagttgtggcaccgaataccccgatcccagggcagcgattaggcgctctccgcgatagccaaactttcgctcgtagaccggacgccaggagcgaccgaaatgcggatcgaaggggatctcgctgggctgctggaacggagagttgccgaagaacaggcggtccagatagtccagcaccgccttcttcttctgaaaatgcaccagcagtggattggcggtggcggcggtgcgcggatcctgcgatgccaggttcttgaagtactggaagttcaccagatccacattggagaagtcaaagaccccgggcagatcgtgcagcgtggcttggactcgcaccgaggagcactgtgttcagccaagggcaatgttaatgggctgattatggtggctggatggttgctttaattgaccacttaccattacggccagtgcagcaattaatacgtatttgcacattgcaattgacaccaagatcaccaagcagacgacgacacctatacgctaccccacgcggaatccaactgatttgaataaattcggccaactgcaggcccatcgatggcgctgcctcccatgtccgactgcccagcgatttgcaatcggtcccaggtcttgtactatgttgcaatatcccattgccgccgattcgcattgcccaattccgcccgacgcggtgtccaccag

SEQ ID NO: 19874 - DNA, 240 bp, DROSOPHILA
atgtcccgcaaagaggccctgtcgcagttcatcaatcagatacacggacgccccgtcgccgtaaagctgaacaacggcgttgactatcgaggtgtgctggcctgtctggatggctacatgaacatctgcctggagcagacggaggagtacgtgaatgggcagctgaagaacaagtacggcgacgccttcatccgcggcaacaatgtcctctacatttccacgcagaagcggagggtctga

SEQ ID NO: 19875 - protein, 79 aa, DROSOPHILA
MSRKEALSQFINQIHGRPVAVKLNNGVDYRGVLACLDGYMNICLEQTEEYVNGQLKNKYGDAFIRGNNVLYISTQKRRV

SEQ ID NO: 19876 - DNA, 5609 bp, DROSOPHILA
tcgtccggatgcttgtccttgaagtgctcgcggatgccgtcgaagtcctcggccaagaatatgcacagctcgcagcccatgactatgtagcgcttgatcagttcctcgtcctctttgcaaaacggcggcaggcgttccatcttgaatatcctcttgggcggtccccgcttgaccaccatcttctccttcccctttctgcccaccgacaccgttcctcttttcgttttagccggcttggccacgtcccgtttacgtttgcgtccactccgggtcacgatcaggtcgtcggtgtcatcatcctcgtcgtcctcgtagtcctcatcctgttcattgttggcatcctcaaagaggagttccatgtcgggtgactgtcgctctgttttgatgcccaccttgctgtcttccggggacatgggttggctaaggtctaactcgtccaggggattcacatttatctgcgcaccgacatcgttgtcgacggcaaggacgtcggccggcatgagcacctcctccggccaggaggtgttcaccatctccggatcctgcttgaacttggaggtggtggcgtatatcacctgggcctcctgtatggacacgtagaactgatggaactcggacacctgcgtccagcagacgttgcaaataaccttggatatctcgtcgttgggcagtacctgtacgcgttccggagacgagatggtggtaaaaaaagattcccaggcacaaaagtgggtggagggcagcagcttacctcgaaccagaaatgttggcgcagcacctccgccaccttgctctcgcccgagtccacatcgaagatctgtagacacatctgggcgccgctcactccgcgtaaacagaggcggcagatatccatttcgcatttatttgataaaactataataaaaagtagtcatttacatagctctgtcgataactcccatcgcaactatcggctgcatcgtgatttgttcgctgttcattctgtgcactggttgtacgacgtcggtcacactggcaaattgttggttttcctattttcgtatttgctgataatgtgcatattgtgtggaaaagatgagtaaacaagggaataaaagcaaggattcggctgccgcatccgccactttaaaagtaaaggtgtcctgtgtagccggaaaaacgagcctaacatttttcggtcttgttttcagcggataagcgaaaagaagttggaggccttcacggtgggcaccttctccaaacgacaattgtccaaaaaagagctcgaggaccagaaaaaaaaggaggatgcagctgctgcggcacatgtaggcgcctctagcaaatccctcctccacgcattataatccaatacgatttttaggccttcaaagagttcgtagagactttccaagatgcacccaccccctcctcgaaagtttgggtcaaagccggcacctatgatgcaggatcccggcgggaggacaagtcggagaagggcaagctatacaagccggtctccaagctgatggaaaagagctcctcggacaaggtcgaggattacgccaagaccctggcctcggatctcaaaaaggactcgggtccattgaagaagaaaaaccaggagaagaaaaagagcaacttggagctgttcaaggaggaattgagacagtaggcccacttggttgtgcatgtgtgtattccatactaattgtttcatgcccacaggattcaagaggagcgtgaggagcgccacaagtacaagcacatggcctcaagccattccgcaccagcacagcaaccggctgcatcagctgctcctgtgcccagcagcagtgtctccaccacctcccagaactcaagcagctcaaaggagtctggttcgtttgacacgggcgatccaaataccacaaacctgtacctgggcaacctgaaccccaagatatccgagcagcagcttatggaaatctttgggcgatacggtcccttggccagtatcaagatcatgtggccccgctccgaagaggagaagcaaaggggacgcaattgcggctttgtggcctacatgagccgcaaggatgcggaaagggccctaaagacactgaacgggcgctacatcatgggctacgagatgcgtctaggatggggtaatctatagatcttatattgaagttcttattcctcatacatcttacttaatatttcaggaaagactgtgcccataatgaatacgcccatttttacaccgcaagcattgcttgagatgaccctgcctccgcctccttcaggattgcccttcaatgcccaacctccacccagtgaagctgatgtgctgcccaagaaaaactacaaggagttcaaccaagaggacaaagagaatatggagcgggtaagtgaataatcacctgctagcgtctaaagaaataaaaatgaaaatgttcaattttgtagatacttgccaaatgcgtcgttaaagtccatatacccacagagaagtatgaattgcaccaaggacattcacttaacaagaactcacgttactgtgcttttctttttttccagggctgttcttaatgttatccatcggatgatcgagtttgtaatacgcgagggaccgatgtttgaggctttgatcatgattcgggaaatggagaatccgctctttgcgttcctcttcgacaacgagagtcctgcccacatctactaccgatggaagctgttctctttgctacagggcgatacgcccaatgaatggcgggaggaggaattccgtatgtttaaaaacggaccggtttggaagcccccgattgccaacttctacactcaaggcatgccagatgagctggttgttgatcccgatgctcctgtggtgcacaaaggagccttgtccaatgcgtacgtttagcatagataatcctcgaaacataaatgtttactgtactgtaaatgtatactgaaataggcaacgcaaccgactcgaggatttgattaggcacttaactcctgaacgcgcccgcattggagatgccatgatcttctgcattgagcacgcagatgcggctgatgaaatctgcgagtgcatcgccgagtctctgtcaaatatcaatacattggcttcaaagaagattgctcgactttatctgatctcagatatactgcacaactgcactgttaaagttgcgaatgcttcgttcttccgtaaatcgtatgtatatatgtttatcaaagcatacacattgaaatatcccctattatttagtgtggaaaaacaattgttggacatctttgataacctgcataactactacttgaacatcgagagtagattgaaagctgagggctttaaatccagagtctgcaatgttatccgcacatgggaggaatggaccatttatcccaaggattttatggcccagctgacggccaaattcttgggcaaacctgttagttaatgaaattcatttcaaattgtgcatgtagtctaatggaatcttgtgtttagtacgtcaagccagtcaataactcacctcaagccgaggaaacgcgatttgatgaggctctggacgaagatatcgacggtgcgcccctttccggagaggaaaaggacgacgaggatctagacggagtgccactagatggagctgctttgcttaagagcgccttgaagcgagccatacctgatgcagatgctggtactccaaagcgtgacacacctaagaaagatgaatacctcgatgaaatcgatggcataccatgtaagcataagaaagtgatttaaaccttcttactactaagtaaataatccttaattccagtggatgatgatctcgacggtgtaccgttggaaaaagaaaccaaatctacggctaagttgcctggcttcataccctcaaagtgggagacagttgatccccagcaagtagaagcgcaggcgattaccaccagcaaatgggacactctcgatccgccagatccaccgaagttctttagctcggacgacgacagtggagaagacaatccgcaaaagtacaccgacgagatgcgtcagaagttaagagacattgagtcgaaagcaattcagtaccaggacgaactggagtccggaaagcgccgcctggaaccaggttggagtgtccccgaacaagtggaacaattccggaagcgattacttaaacaggtaagatttgtaacatacagtaagtcggatgtaacaactgaattctttgcgaacgaacaggactcgcgatctgaggcaactgtagactccccgctcagctacatgcacataaaatccaagagctccaaggtgagtgagagtccagcgctgttcagaagcagttcccgcaaacgatcccactcgccgttctctggtggcgaatccaaacgacgtgactattcacccgaaacctcgcgctcatccaaatcctcgaaacgcaatcggtcgcgtagtccgtccagttcaccgaagcggtatacagagcggtcgtctcgcagctcccgctacgaaactcctgcctccggatcgtcgcgatcacgcagttctccaacctcctcgcgctcctctcgcagagaagagccatcgccgccgagacatcgcagcgacaagcacaagcacaaacataggcactagagtgtctgctcttcggacgatttgtatttaattaaacatggattctacataaaaacactttcgtcgtttgttttaaatacacagtatatataattttaaatctaaatcgtttgttaggaagtgggacacacgcaaaacagacggcccaggcagttcgattccgctctgcgaatttgtctaaaaacatgaatctaagcaagctatcttaaaatggttacgttttgttaaggaaagccggccaaccaacaccagtcctcgaaccgcctgagcctggtcatataagcagtggtgattatcataaggtgaatacatagatgtggcttaaaagtagatgcgaacagcctcctcggcattctgctccacggggcagtaggggcacttcagtatgtggccaacactcagcttgtgcagggcgtcgttggatatgacatgaccgcaggtcaacttcttcggcggattgtcctcggaagtctgctggcgcaatatggggcaggcaaagatcgagtggaatcggaattccggctgcagatcgatctcaatgggcaactcgtcgcagccgttccacatgccaaggacttggcgcgactgcatcacctgcttgatattgagcaaggcgggcagggcagtgcatccggcattgaccacaacagacagggcggagttcttgctaatgcctagcagttggcatgcgtctttgaggaatatgaacgacagttcggtccacttctcctggcccaagaagtgcttgtaaggcgagttctccagtccactgggcagatatataaagctggccatcaagttggctatttcgtgctcatagcgcacagcaaacttcttgaagttcagtcgagcgtaggagatggcctcgcgctgcgagtccaatccgtaggagaccagctgcatgaaacgcatgcggtgcagccggaactctatgagcgagtggcggtcactcagctgctgggagtacatctttgcccacttgagggcgtcagtcagatcc

SEQ ID NO: 19877 - DNA, 2948 bp, DROSOPHILA
cgtcggtcacactggcaaattgttggttttcctattttcgtatttgctgataatgtgcatattgtgtggaaaagatgagtaaacaagggaataaaagcaaggattcggctgccgcatccgccactttaaaacggataagcgaaaagaagttggaggccttcacggtgggcaccttctccaaacgacaattgtccaaaaaagagctcgaggaccagaaaaaaaaggaggatgcagctgctgcggcacatgccttcaaagagttcgtagagactttccaagatgcacccaccccctcctcgaaagtttgggtcaaagccggcacctatgatgcaggatcccggcgggaggacaagtcggagaagggcaagctatacaagccggtctccaagctgatggaaaagagctcctcggacaaggtcgaggattacgccaagaccctggcctcggatctcaaaaaggactcgggtccattgaagaagaaaaaccaggagaagaaaaagagcaacttggagctgttcaaggaggaattgagacagattcaagaggagcgtgaggagcgccacaagtacaagcacatggcctcaagccattccgcaccagcacagcaaccggctgcatcagctgctcctgtgcccagcagcagtgtctccaccacctcccagaactcaagcagctcaaaggagtctggttcgtttgacacgggcgatccaaataccacaaacctgtacctgggcaacctgaaccccaagatatccgagcagcagcttatggaaatctttgggcgatacggtcccttggccagtatcaagatcatgtggccccgctccgaagaggagaagcaaaggggacgcaattgcggctttgtggcctacatgagccgcaaggatgcggaaagggccctaaagacactgaacgggcgctacatcatgggctacgagatgcgtctaggatggggaaagactgtgcccataatgaatacgcccatttttacaccgcaagcattgcttgagatgaccctgcctccgcctccttcaggattgcccttcaatgcccaacctccacccagtgaagctgatgtgctgcccaagaaaaactacaaggagttcaaccaagaggacaaagagaatatggagcggatacttgccaaatgcgtcgttaaagtccatatacccacagagaaggctgttcttaatgttatccatcggatgatcgagtttgtaatacgcgagggaccgatgtttgaggctttgatcatgattcgggaaatggagaatccgctctttgcgttcctcttcgacaacgagagtcctgcccacatctactaccgatggaagctgttctctttgctacagggcgatacgcccaatgaatggcgggaggaggaattccgtatgtttaaaaacggaccggtttggaagcccccgattgccaacttctacactcaaggcatgccagatgagctggttgttgatcccgatgctcctgtggtgcacaaaggagccttgtccaatgcgcaacgcaaccgactcgaggatttgattaggcacttaactcctgaacgcgcccgcattggagatgccatgatcttctgcattgagcacgcagatgcggctgatgaaatctgcgagtgcatcgccgagtctctgtcaaatatcaatacattggcttcaaagaagattgctcgactttatctgatctcagatatactgcacaactgcactgttaaagttgcgaatgcttcgttcttccgtaaatctgtggaaaaacaattgttggacatctttgataacctgcataactactacttgaacatcgagagtagattgaaagctgagggctttaaatccagagtctgcaatgttatccgcacatgggaggaatggaccatttatcccaaggattttatggcccagctgacggccaaattcttgggcaaaccttacgtcaagccagtcaataactcacctcaagccgaggaaacgcgatttgatgaggctctggacgaagatatcgacggtgcgcccctttccggagaggaaaaggacgacgaggatctagacggagtgccactagatggagctgctttgcttaagagcgccttgaagcgagccatacctgatgcagatgctggtactccaaagcgtgacacacctaagaaagatgaatacctcgatgaaatcgatggcataccattggatgatgatctcgacggtgtaccgttggaaaaagaaaccaaatctacggctaagttgcctggcttcataccctcaaagtgggagacagttgatccccagcaagtagaagcgcaggcgattaccaccagcaaatgggacactctcgatccgccagatccaccgaagttctttagctcggacgacgacagtggagaagacaatccgcaaaagtacaccgacgagatgcgtcagaagttaagagacattgagtcgaaagcaattcagtaccaggacgaactggagtccggaaagcgccgcctggaaccaggttggagtgtccccgaacaagtggaacaattccggaagcgattacttaaacaggactcgcgatctgaggcaactgtagactccccgctcagctacatgcacataaaatccaagagctccaaggtgagtgagagtccagcgctgttcagaagcagttcccgcaaacgatcccactcgccgttctctggtggcgaatccaaacgacgtgactattcacccgaaacctcgcgctcatccaaatcctcgaaacgcaatcggtcgcgtagtccgtccagttcaccgaagcggtatacagagcggtcgtctcgcagctcccgctacgaaactcctgcctccggatcgtcgcgatcacgcagttctccaacctcctcgcgctcctctcgcagagaagagccatcgccgccgagacatcgcagcgacaagcacaagcacaaacataggcactag

SEQ ID NO: 19878 - protein, 957 aa, DROSOPHILA
MSKQGNKSKDSAAASATLKRISEKKLEAFTVGTFSKRQLSKKELEDQKKKEDAAAAAHAFKEFVETFQDAPTPSSKVWVKAGTYDAGSRREDKSEKGKLYKPVSKLMEKSSSDKVEDYAKTLASDLKKDSGPLKKKNQEKKKSNLELFKEELRQIQEEREERHKYKHMASSHSAPAQQPAASAAPVPSSSVSTTSQNSSSSKESGSFDTGDPNTTNLYLGNLNPKISEQQLMEIFGRYGPLASIKIMWPRSEEEKQRGRNCGFVAYMSRKDAERALKTLNGRYIMGYEMRLGWGKTVPIMNTPIFTPQALLEMTLPPPPSGLPFNAQPPPSEADVLPKKNYKEFNQEDKENMERILAKCVVKVHIPTEKAVLNVIHRMIEFVIREGPMFEALIMIREMENPLFAFLFDNESPAHIYYRWKLFSLLQGDTPNEWREEEFRMFKNGPVWKPPIANFYTQGMPDELVVDPDAPVVHKGALSNAQRNRLEDLIRHLTPERARIGDAMIFCIEHADAADEICECIAESLSNINTLASKKIARLYLISDILHNCTVKVANASFFRKSVEKQLLDIFDNLHNYYLNIESRLKAEGFKSRVCNVIRTWEEWTIYPKDFMAQLTAKFLGKPYVKPVNNSPQAEETRFDEALDEDIDGAPLSGEEKDDEDLDGVPLDGAALLKSALKRAIPDADAGTPKRDTPKKDEYLDEIDGIPLDDDLDGVPLEKETKSTAKLPGFIPSKWETVDPQQVEAQAITTSKWDTLDPPDPPKFFSSDDDSGEDNPQKYTDEMRQKLRDIESKAIQYQDELESGKRRLEPGWSVPEQVEQFRKRLLKQDSRSEATVDSPLSYMHIKSKSSKVSESPALFRSSSRKRSHSPFSGGESKRRDYSPETSRSSKSSKRNRSRSPSSSPKRYTERSSRSSRYETPASGSSRSRSSPTSSRSSRREEPSPPRHRSDKHKHKHRH

SEQ ID NO: 19879 - DNA, 5591 bp, DROSOPHILA
ttcgaaatggagccgtgcagatcgcggtgctccgtggacagtttttgcacgcgctcgtggcacctggcgagagcattccggacgctctccacttggcgctcggttaggcgttgtggtgccgtcggttccgtctccacctgcatgctcaccgcatcgcccatgggatcgtcctgggacacctgggtgctcgagttcagagtggtcaccagctgctccgccctgctgagaacctctaccagctccgacatctgtgtggctatatctccgatgtccgcctctgcgttctcgtgaagctgctccagtttgctgaccactcgggtcaggtccttctccaccgacgaacaggccaacgactcgctgtccattgttagctccagtttcgtggggtgaaagcctagaaaccagtcacgccaggcgcgcgttcactttcgattttacaaccttttgctttcgaggattgatagcactgtgattcttcaaagtcacgacgatattcggtggtccagcggaaaatgcgtatttataaattgttaattttataacacaaagaagacgaaaacattggagctgggtggaccactcacgatgctatcgataaatcgaataattttaatttcgataaagggcaacagtgctgagcgaattaatatttgtatattccgcattttacgtattaccgttatattggatccttagttgatccttagttatatatagttagtctagtttaacatcataataatgcataataaagtaaccattttacgaaccaaatatatatttgacctttatatattaataataatgtgattccatttaaaacaattacaaatatacaaaaatttattaaatcccataagccttctatcagtgtaaaggatccgttaactttaaacgatagaaaagtatcgatagcactcgcatgcatcgattgacagccaatgctgcccatctccgttcggtcgactgaaaaatcaattattattgctgctgctttctggcagagaaacttataacgacaaacaaacagtttgaaattagcgtaattagataagaaaacgaactttgaaaccaaaggtgttagtctttaaaaacgaaactgataattatttaaaaggtacctcagaacacgagagcaattccaaggacaaaatctccacactttgaattcataatttttaaaaataagtgatgagtcttaagccgaacggcattgaacccaaattacaaatgctgtgcctccaaaaataaaagcgcagagagctcgaaaaacgttttccaaattaatgtagacagtgacaagaagagggaaatttttaaaataaaagtggtggaaataagaagatgctgtgcaaataacagacgtgcatagtaaaaacaattttactttcgccacttttcagtcagtgcgcttgaaagcgaaatggaaaacggtcggaaaactcatagcacttggcagtgtgtgtgtgcgtgtgtgataacaagagcgaagaagctgcgaaatgaaaaatatgaaaacacgaaatttcgcacacagtgctggtcagcaaaacagcagcaatagctcaaaaaattaaatttaaaattatattataaaatttttttgctgaaatatttcaaattaagtttgcccaatttcccaagcagttatatgtattttgatttaaaatctatttccgaaatgaattagagagcattaatgttatgtcggctgctgtagcgtagctctcggaaattcccggtgcaggcccaagctgcaaatcacttgtctcatcaaaaataaaggaaaataatggccgacgacgattatggggaaaagcgcgcccgaatggtgtgtcgggtcttcagatctgatctgccgaaaattcgctaatagtttcaaaaatttgcctggccagttcgggaacaacattcgaactttgcgtaagcagtcgctctgtccagttttctgttttcattttttttcgaacccttggtcgttcaaaaaccgttttccaaaagcgatacgaaagcattttcttttggagaaacgttcaatattatttatgcggtcgttaattgtgatttgtgcggtgggaaaagtgaaaataataaagaattattagacgggccgaaaagagcgaattgcgcgagctaaaaataaaaaagatcgggaccgctatttatgtaataaacttttttgttttcccgcaacaatattcaaacgtatacagcattttgcgctgcgattcgtgaccgatcagtgatgtgaatacaactccaacgaaagccggaatcagcgaactgtagcgtgtaaccgattatgcatctatgtatctttcagataatgctttaaacgtacagcaaatcaaccattagccagccaaaatgagccaatgccaaagttaaacagcaactagaaacacagcgcatagtcaacagctcgcagggagccatcaacgaaccaaatcgatcaggaacacatagcagagttgccttagggactagctttaaccacgaacccatagccaaacgaatccagatagcccacggaatccgctaccaagccaaaatgcccgctacagccacatccaagccgagagctccgctcgtcgaggagggcatgacgcccaagaagaccgccctgatcatcgtaaccgtgatcggatgcattgccatcctgtggccaaaggtcttccatcccatgatgttcggaggagtgcctccaagccagccaaacttcaaggatccacgagcagcaccaggcggtaagtcatcagattctattcaccacattaggagctagggcttataaatgttgtactttacttaatttcatttatcatttattatttatgaattatcatcatgattttcttttgatttccgtatgtgggtgttgttgttgtccggtcgatgttgtaggatgttgtgatgtcgtcctggacagggagcagtttctgaatgccacgaagaaggacactgtcgagcccttcggtccgcatttgtatcgcaagcaaatcaatgtttacacgggcgaaataagtatgtggctcgattatttataatttgcttattggttttactaacggtgtttggctctactaacaagattgtatctacatgaaacaatcgattgagatacatttagattcctaacctttacggtattaatgagtttattaatgtttgggtttctaaaatgtagtgtttatgtcaattaaaaatttgatagtttaattgtgttactaatgaatccattgtggtcgcaggtctgcgccaggagcgtcccgcccacctgcatccggaatccatataccaggccatgagggagcggggtcgcgccattcccgccacgcccaccgtgccgattctagaacgaaagacttcgcccagtaatccgcctccgcggattgtcgacggacgggtgagttgggctactatacatttaaccatacggtgtgcattattctccggacgataaatccataattataatatatatagttatactggtcggcgggctgtggtcgatgtgattataatgacggcgggatgagacatatccgcgctcgcgttggaagtcatttataaatagccaaacgtttattttattcggattcgggttttgtttttatgacactgcacgcaaattgaaggcaagagacagcgctaaagaaaacacaaaaaaagaatttgtaaatgatgagtgggagatcggccgaatgtgctgctgcgtattgaacttgtgccaaattcagtgcgccagttccattttgctctcatcgctactagaatgctagaatggccggggagcacaaatcagctgtcctcgcctcatgtcaaaatacaacggggcggatacgtaattttaatgattacatgggttgtcaataaaacacaatcgattcccttctcctacaaagacatcaattcaaaagatttcgaagacaactgtcttgagtaatctttatgtcaatatacatcgcggcggatacgtaatttttatgattacataggacaatagaatatacatattcgatcagttcaaaaatatctaaagacaattgacttaagaaaccaccggggcgtatacctgatacatttaatatgaccttgattgttggcggcattctattgtatttcagtaacttttgacatatgtatgtactttctagcctggacccattcctggaatgcgtccacccatgggcgccggtgcactgcatcagccacaacagcggggcagcagcatgggcttcctaatgccactctacaccattggcatcgtagtcttcttcggctacaccctaatgaaggtgactctctttgatcgtatatatgtaattataatactataaaactcttacatgcagattatgttcaagaagcaagttcccaatgatccgtacggagcggcgcctccaaatcctgccttccggcaggaggtcttcggatcacagaaccacagccaggtggaggatttgggcggcagcaaactgggtgagtgccaggccaattcggatgccatcttccggattattacactcgtagttggacacacacacacacaatcgctctagccaccgcactcacgattcaatcctaaccgaaaaaaaatcgcattttgtactcttctgcttccaaaaaaacccatgcacaccgaaaatcatgccacggtatcaggctggcgagagcatcagacaagtaagccagatatatatagatggttgcatagatgaccatagagtttcgttcgtatcttgagtttctagacctcgacaaaggccttttgagttttgaaatatgtcctcctcatttggtatcgtagtatcgtagcgactatgtgttctatttcatttacctagatgtactcattctagatgttgtgtgcctatatactatttataaatatatatatatactaaccccgaattgatcacgcttccatggatatatacatttattttgttgccactcctgcacccgtgtaaatactccttagtttcgttagtccctcgattgattcgatttccggccctgattaccaaaccgtacgacaattttataggagctgccaccgccactgccgccgcaaagaagccggccgccaaggacaccgaaaaggagctgtacaacgccagtgtgtcggccaccgaggtggcgagcagtttgtccgcctctctgaagagccaccagcagctgaaggaggccgagcagctgatggagatcgagaagctgcgccagaaactcgagagcacggagcgggcgatggcccagttggtggccgaaatgaacaccgatcagtatgaggcaaaggttagcatccagcatccagtatccagtagcttcctaccatcgtcatcgaatcggaaaaaagcagatacagatacagatatagctatacaacgcgactcagatacatctagtagcacatcatatatcgtagtgatttcagttggaccatctcgctgtcatttgaattaatatttgatctcttttgtgttctcattttcaagatgattgccctcaagtttctcaagcggcagccaaacttctaagacaataataaccatcattcagttcacatagaatcagtcagtaaaacagac

SEQ ID NO: 19880 - DNA, 1193 bp, DROSOPHILA
gcagagaaacttataacgacaaacaaacagtttgaaattagcgtaattagataagaaaacgaactttgaaaccaaaggtgttagtctttaaaaacgaaactgataattatttaaaagataatgctttaaacgtacagcaaatcaaccattagccagccaaaatgagccaatgccaaagttaaacagcaactagaaacacagcgcatagtcaacagctcgcagggagccatcaacgaaccaaatcgatcaggaacacatagcagagttgccttagggactagctttaaccacgaacccatagccaaacgaatccagatagcccacggaatccgctaccaagccaaaatgcccgctacagccacatccaagccgagagctccgctcgtcgaggagggcatgacgcccaagaagaccgccctgatcatcgtaaccgtgatcggatgcattgccatcctgtggccaaaggtcttccatcccatgatgttcggaggagtgcctccaagccagccaaacttcaaggatccacgagcagcaccaggcggatgttgtgatgtcgtcctggacagggagcagtttctgaatgccacgaagaaggacactgtcgagcccttcggtccgcatttgtatcgcaagcaaatcaatgtttacacgggcgaaataagtctgcgccaggagcgtcccgcccacctgcatccggaatccatataccaggccatgagggagcggggtcgcgccattcccgccacgcccaccgtgccgattctagaacgaaagacttcgcccagtaatccgcctccgcggattgtcgacggacggcctggacccattcctggaatgcgtccacccatgggcgccggtgcactgcatcagccacaacagcggggcagcagcatgggcttcctaatgccactctacaccattggcatcgtagtcttcttcggctacaccctaatgaagattatgttcaagaagcaagttcccaatgatccgtacggagcggcgcctccaaatcctgccttccggcaggaggtcttcggatcacagaaccacagccaggtggaggatttgggcggcagcaaactgggtgagtgccaggccaattcggatgccatcttccggattattacactcgtagttggacacacacacacacaatcgctctagccaccgcactcacgattcaatcctaaccg

SEQ ID NO: 19881 - protein, 272 aa, DROSOPHILA
MPATATSKPRAPLVEEGMTPKKTALIIVTVIGCIAILWPKVFHPMMFGGVPPSQPNFKDPRAAPGGCCDVVLDREQFLNATKKDTVEPFGPHLYRKQINVYTGEISLRQERPAHLHPESIYQAMRERGRAIPATPTVPILERKTSPSNPPPRIVDGRPGPIPGMRPPMGAGALHQPQQRGSSMGFLMPLYTIGIVVFFGYTLMKIMFKKQVPNDPYGAAPPNPAFRQEVFGSQNHSQVEDLGGSKLGECQANSDAIFRIITLVVGHTHTQSL

SEQ ID NO: 19882 - DNA, 2758 bp, DROSOPHILA
tatatatataatttggcaatgaacacgacttgattcagacgaaactaactaattgcaagggccgagtgaaatttcgttgctaatttcgttgaacgacgaacattatgactgattgccacgaaacagatttgccaataatttgatatctgatttgtatatatatacatattgtatgttttgatatcttcgttttgattttaaaacgccaacgttgtgtctactccctctaaagtaaaccttaaaactttatgctcttgaaaaccttaatcattttcggtcaaaacttaaagccaaacttgcatgtctagaaaactctttagctcgtttagaaaaccgcgtctttgtgaactgcatgattttgtgtgaatactcttagttgaaagtcaatgcaaaactagtctaccattaagctaagcgcatatgtatttcaagccgcatcgtctaatcaaaatccgtagctacttggcaatgaaattaccttaaaaaaaaatccaatcgatcgcacgtaaatcgtatgattaaacaaataaagttagtgccacggcgtttgtgaacctagtataatgaataaattgaaaaccgaacttgacatccacatgtgttttgaattttaaattaatacatagttataatgaaatttcattccttaatattttccaattataattttctaaaaaattagtttttcaaactaacagtgctgtaacattttgattaacagaatgcgccttacagcacaaagagtgaatttttccttctgctcgtgtgtatacactggcgaacagctgttttttgtcaatctccgccacaataattacgtaaatttcggcaggttagcaattttttgtatattccacagtaattctgcgcaacttaccactagccatgctcctaagggatagcgttcacagaacaatcactaatgttccttgtgactggagacacaatgggtgttccgtaattcttacgtttgattgtggctaatgtttttggacctccataccttccgtagcaaaccatgtcgctgctccgttcgaaatactacgaccatcccgatggcgaggatgcctttggcaagatcgtggccaccaacaagtacgcggtatccgccggcgtggcctggtccatgttcgacgtcctgacgctctccaagccgcaaggatatctgcccacactgggccgtttcgcctacaacacgggtccgctgatgggcatggccacggcgttcactctgaccaccctggtggccacaaatgcgcgcggcaaggacgataagtgagtaagcagcccacctgttgatggctattggtcctaaccatgtttgaattgcagaatcaactacctgatcggcggttttgcggctggcggcgtctttggagcctggaaacacaaccacgtagctggtctgtgcgccggcctcttcctgggttagttccctcgcttcctatgaaactaaagcactagagttaaccactcactcttttcaggcatcgctggtgtcatcaagaagatgtccattgaacagggctgggagttcttcccaaacacaccgatcaagcagtatggtggtctgaacattgccggaaacgactggaccatcatggccgatcctcccaagaactggaccacggaaaagccaaaggagtaaagaaggcgtaaagtctagtttcctatgtttagtttaatggtgattcgatgagagaaagattcggcactaaccgcttgccttgcaaccgaataaaagccaagtcagaagtgataatgccaaggcagctgtcgccattcctcggctgtccattaaccctatctaatggtgccacaggctgggcttcgttagccgtctcgatatgcaaacggctcgaatgtgtcacagaaacttatcaacagttggcgtgaatgaatgacggcggcccaggcggtaaatcggggaaaccaaaggggcggcaagcgcaaaagcaactaaccaaaaaaaaagggggggggggtggtaaacaagtcacgctcgcagctcagcggagtcttatgtgctgccaacagtttatttctttattttcatcggcccatttaaaatccatgaatgtgcatttactcatgttttttgttttggctcttttcacttggcgaggtgagtcatgccccaagcatacatatgtaagtatgcttggccattggtaagagatgccattgtacgcatactaatgttggctcttaggttcttttattgggcttcgaaattggaatccatcgattgaatctgtgggctgcccacaggaattctggcgaagcatcccaaccgaccatttgccttaacctttgccaacctgagaatgttttcttctcgctttttgacgatttattcttactgtttcttttgctgattacttttggccagatttatggccatggggaacgaaagttggtgtgccgagtagaggagtgacccttaagctggagaccgttaagtgtgggcttatataagcgatgctagtgctacaatactattgaccctctgaccatttgatagcagagcagagggagttgcaatcctttcaaatattcgccattaatttagccagtcaccttgatctctggtacctatgtatccccaccctaactatccaataatctcaaaaaccagtcgagcagcttagcagcgagtgaaccgaagtgcgccagtgtatccgaatctctggctgactctgactaatctgtggcagctggctccactccacattacttggctgcaagctggcgaatc

SEQ ID NO: 19883 - DNA, 641 bp, DROSOPHILA
taccttccgtagcaaaccatgtcgctgctccgttcgaaatactacgaccatcccgatggcgaggatgcctttggcaagatcgtggccaccaacaagtacgcggtatccgccggcgtggcctggtccatgttcgacgtcctgacgctctccaagccgcaaggatatctgcccacactgggccgtttcgcctacaacacgggtccgctgatgggcatggccacggcgttcactctgaccaccctggtggccacaaatgcgcgcggcaaggacgataaaatcaactacctgatcggcggttttgcggctggcggcgtctttggagcctggaaacacaaccacgtagctggtctgtgcgccggcctcttcctgggcatcgctggtgtcatcaagaagatgtccattgaacagggctgggagttcttcccaaacacaccgatcaagcagtatggtggtctgaacattgccggaaacgactggaccatcatggccgatcctcccaagaactggaccacggaaaagccaaaggagtaaagaaggcgtaaagtctagtttcctatgtttagtttaatggtgattcgatgagagaaagattcggcactaaccgcttgccttgcaaccgaataaaagccaagtcagaagtg

SEQ ID NO: 19884 - protein, 170 aa, DROSOPHILA
MSLLRSKYYDHPDGEDAFGKIVATNKYAVSAGVAWSMFDVLTLSKPQGYLPTLGRFAYNTGPLMGMATAFTLTTLVATNARGKDDKINYLIGGFAAGGVFGAWKHNHVAGLCAGLFLGIAGVIKKMSIEQGWEFFPNTPIKQYGGLNIAGNDWTIMADPPKNWTTEKPKE

SEQ ID NO: 19885 - DNA, 2605 bp, DROSOPHILA
taaaacatttaagattgcttgaattagtcaaatttaaagagaataaactaattgaatcggacattcggattgtcttcactttgaatgtgtttctggttgttgatccgatgcggatagaatgacattggaatcaacttgctgggcagtttgtttggttatactctcgggcagatcgaaggttagttcctcggattttttaagcaaaaatcgtttctctgggttgagttttgtttccagctccagtcgatcgatcagccagcctctatccggctgattggacgcccaaaagtataaagttcctgcaaatataaggttggtaaacgccaaagatttgctttcaaaatcgatggatctacctttatccttgctgccccgcacagccacctcacaacgcgcctcctccgcattgcaattgttgttggcgttggacagatcgatgccagagtccttgatgggttcacccaggagaccaactgctcctcgatggctccgcagtgccttcaaggccagtttgtagtactctgcggatttcacccgatcctccatcttccatttcatgtacatcacagcggatatggaggccaccgcaccgtagacacaaatattgcccagtgttcggttcgacggaaacttgagtccaaccatcttgctaacgcttttttatttacaatccagctgctgttacttgtgtaatataccgtatagccggcgtcgaattagcgatgacagctggtcgatatcgttatgtgaaaaggcttattaagaccgaagtccacctctaaatgcatttatatgcaaattatttgcagaaaatataacaacatcatctattgttatgttgttttagtgacaattaagtcatattataaaattgctcataaaattgcttttcatttaaaaataatttcgatagttatttgttttgaaaaatcagctgactggtcgtatactttataaccagggctgcagtgccacacttatagttagcagattatacaacaaaacgcacagttttgtaaatatctgtaatttatcatttgtttttctattaaagtgacgaaaacggattaaataaagcacatagcagacatgaccagcctaaccgcagttttccagatggcgaggcagcgattgatagccccagcgataggaaactgggcacgtttttatgctgcaaaaccggcggcgccaggtgagcctccacatccaggttaaatagttaacaactaatagtaaatgcattccacagcgggcaagaagaaaaagcttggcaagctgggtcccatcatggagaagaaagtcatacccgtggaaacggatgccaacaaattggtgaactatgtgtgcggaagtaactacatgaaaacaggagaagatatcaaagtaagtttaccctttcaattcctcaatacactcttctgtacgagtatctttgctgaacagatcaaaccggattcggaatatcccgactggctgtggacgctgaatacggaaggcatagttccgctggacgaactggaccccaactccaagcagtactggcgccgcctgaggaaactggccttgcggcgcaacaatcagctgtccaagctaaagaagttctagaacccatagccctaggtgttatcgttgattttggagacacagccgaccgtcacagcggcccatgttgtttgcgatgctctcctgagcaacaagtgtgcaaacaccatgttattttgctaaaagcgaattgcaaatacatttattgcaccgtcttatcataaaattgagtcgctataaaagtcatggagttgcgggaagtgttcatttagtggtcaagcaatgtggagcgtatctggtttagttaagctgctcctcggggtaatcctgatggcagcatcatcttctgcacaaggcaactcctcaagtatgtaaaagtataacagatttgcatatttcgaggaatatcagtgaaatccccttgcagagaacgttgtctgctaccagggcacttggtccgtttatcgacctggtctgggcaagttcggtatggaggatattgatccgtttttatgcacccatcttatctacgccttcctgggcatcgaggagacgggccagcttcgcgtgatcgacgcctatctggatcttgaggagaatagtggacgcggaaatatcaagagttttaatgcgcttaagctaaagaatcccgtgttgaagacgctcgtcgctgtgggtggttggaacgagggctccaagcgattctcattggtggcccgtgatccctcgaagcgtgaaaagttcgtggatgatgtggtcaggtttctgcagcgccatggtttcgatggcctagatctggactgggagtatcctggccagcgtcacagtctggataacgaggatcgctcgaactatataacctttctaaaggagctgaaggaggggtaagaaatgatggaagttgtatgtgctgcccattttctgacccttaacgccttctcagcttggaaccctttggtttcatactcagtgctgccgtgggctccgcacaattctccgccgaaatatcgtacgacattccggctatggttccgtatctggacctcattaatgtgatggccta

SEQ ID NO: 19886 - DNA, 488 bp, DROSOPHILA
aaaacgcacagttttgtaaatatctgtaatttatcatttgtttttctattaaagtgacgaaaacggattaaataaagcacatagcagacatgaccagcctaaccgcagttttccagatggcgaggcagcgattgatagccccagcgataggaaactgggcacgtttttatgctgcaaaaccggcggcgccagcgggcaagaagaaaaagcttggcaagctgggtcccatcatggagaagaaagtcatacccgtggaaacggatgccaacaaattggtgaactatgtgtgcggaagtaactacatgaaaacaggagaagatatcaaaatcaaaccggattcggaatatcccgactggctgtggacgctgaatacggaaggcatagttccgctggacgaactggaccccaactccaagcagtactggcgccgcctgaggaaactggccttgcggcgcaacaatcagctgtccaagctaaagaagttctag

SEQ ID NO: 19887 - protein, 132 aa, DROSOPHILA
MTSLTAVFQMARQRLIAPAIGNWARFYAAKPAAPAGKKKKLGKLGPIMEKKVIPVETDANKLVNYVCGSNYMKTGEDIKIKPDSEYPDWLWTLNTEGIVPLDELDPNSKQYWRRLRKLALRRNNQLSKLKKF

SEQ ID NO: 19888 - DNA, 3552 bp, DROSOPHILA
atcatctattgttatgttgttttagtgacaattaagtcatattataaaattgctcataaaattgcttttcatttaaaaataatttcgatagttatttgttttgaaaaatcagctgactggtcgtatactttataaccagggctgcagtgccacacttatagttagcagattatacaacaaaacgcacagttttgtaaatatctgtaatttatcatttgtttttctattaaagtgacgaaaacggattaaataaagcacatagcagacatgaccagcctaaccgcagttttccagatggcgaggcagcgattgatagccccagcgataggaaactgggcacgtttttatgctgcaaaaccggcggcgccaggtgagcctccacatccaggttaaatagttaacaactaatagtaaatgcattccacagcgggcaagaagaaaaagcttggcaagctgggtcccatcatggagaagaaagtcatacccgtggaaacggatgccaacaaattggtgaactatgtgtgcggaagtaactacatgaaaacaggagaagatatcaaagtaagtttaccctttcaattcctcaatacactcttctgtacgagtatctttgctgaacagatcaaaccggattcggaatatcccgactggctgtggacgctgaatacggaaggcatagttccgctggacgaactggaccccaactccaagcagtactggcgccgcctgaggaaactggccttgcggcgcaacaatcagctgtccaagctaaagaagttctagaacccatagccctaggtgttatcgttgattttggagacacagccgaccgtcacagcggcccatgttgtttgcgatgctctcctgagcaacaagtgtgcaaacaccatgttattttgctaaaagcgaattgcaaatacatttattgcaccgtcttatcataaaattgagtcgctataaaagtcatggagttgcgggaagtgttcatttagtggtcaagcaatgtggagcgtatctggtttagttaagctgctcctcggggtaatcctgatggcagcatcatcttctgcacaaggcaactcctcaagtatgtaaaagtataacagatttgcatatttcgaggaatatcagtgaaatccccttgcagagaacgttgtctgctaccagggcacttggtccgtttatcgacctggtctgggcaagttcggtatggaggatattgatccgtttttatgcacccatcttatctacgccttcctgggcatcgaggagacgggccagcttcgcgtgatcgacgcctatctggatcttgaggagaatagtggacgcggaaatatcaagagttttaatgcgcttaagctaaagaatcccgtgttgaagacgctcgtcgctgtgggtggttggaacgagggctccaagcgattctcattggtggcccgtgatccctcgaagcgtgaaaagttcgtggatgatgtggtcaggtttctgcagcgccatggtttcgatggcctagatctggactgggagtatcctggccagcgtcacagtctggataacgaggatcgctcgaactatataacctttctaaaggagctgaaggaggggtaagaaatgatggaagttgtatgtgctgcccattttctgacccttaacgccttctcagcttggaaccctttggtttcatactcagtgctgccgtgggctccgcacaattctccgccgaaatatcgtacgacattccggctatggttccgtatctggacctcattaatgtgatggcctatgaccttcacggaccgtgggaccaggtggtgggcatcaatgctccactatacgctgctgagaaggatgccagtgattctagcgggcggcaacagcagctgaacgtggacgccgtagtcaagtattggctgaaagcaggtgctccggctgaaaagctgattctaggagttcctttctacgggcgctccttcacattagcgaccgccgagggcaatcagccaggagcgccgcatattggcaagggaattgcaggaaactactcccgcgagccgggcgtcctgggttacaacgaactgtgtgagatgatggagcgggaggagtggacacagaaatgggaggccacacagcaggtgccttacgcctacaggcaacgccagtgggtgggctacgaggacccacgtagcttggccctcaaggcgcagtatgtgatggacaaccacctgggtggcataatgatctggtcgctggaatcggatgacttccgcggcacctgtggtcagcagccctatcccttgctgcacgaaatcaaccgtgtgctcttcggtggcaatacaccatctggcttgaccaccgaatcgaacagggaatcgcccagtgaaggattcagttgtccagctgacgcgcccgctggatatattcgtgatccggacaactgctccaagttctactactgcagtggcggcaagacccacaactttgattgtcccagtggactcaactttgaccttgacaccaaaagttgtaactactcaggatcagtaaagtgctagattttatttgtccagaaaaatgtcatggggtttgtgtatttttatggacctactccacgatctttaggtttagtggcatgttgtcgtagctataaacgggcattcccggtcgccaaatgacaaagttctgatcacacttgacctcagcggctgggcggcacacgatctggttctcgtcgaaatactgaccctcgaggcactcgtaatagatcctctctccatcgcggcactcatgatacaatcggcaatcccaaccatcgcggctaaagccatcatgtgggcacagtccggatgcttctgtggtcggcttctctgttgtgaggccgttcttgtcgcccagggcggagaagatcacacggagcaatccatgctgctcgccacatctgccccggaaatcgtctacgtcaatggtccaggccatggcgccacccagcttgtgctcttgcaacagatgcatcttggcccagatgctccgcgggttctcgtagcttacccactgatcaccccttgtggcatagggcaccttggccagctggtcaaacatcctgctccatttggactgttgcacgcaccactcgttgtaggtcatgaagccgggacggtgggattgcttcgtctgtctgccgggtcctttgcaggcggatcccactgtcgattgatttctatccatggtgaaggagcgcacgaagagcggaatgcccaagataagtttctctggcgctcctccatttcgtttccagtgcataattgaatcggtcacgctgccttcatatcccacaagtggagcattgtaagccaagcgcaggtggtacggatcctgctcgtcgtgcatcatcaggtggataaagtccgagtgattaactatctcagggatattgtagctttccaggatgcgattgtctcttcgtcccagcacagccaccattaatattagctgattcttccgaaagctatcgaaaaggggtaggaacttactggatgatgggaaaacctcctaaaa

SEQ ID NO: 19889 - DNA, 1433 bp, DROSOPHILA
caatgtggagcgtatctggtttagttaagctgctcctcggggtaatcctgatggcagcatcatcttctgcacaaggcaactcctcaaagaacgttgtctgctaccagggcacttggtccgtttatcgacctggtctgggcaagttcggtatggaggatattgatccgtttttatgcacccatcttatctacgccttcctgggcatcgaggagacgggccagcttcgcgtgatcgacgcctatctggatcttgaggagaatagtggacgcggaaatatcaagagttttaatgcgcttaagctaaagaatcccgtgttgaagacgctcgtcgctgtgggtggttggaacgagggctccaagcgattctcattggtggcccgtgatccctcgaagcgtgaaaagttcgtggatgatgtggtcaggtttctgcagcgccatggtttcgatggcctagatctggactgggagtatcctggccagcgtcacagtctggataacgaggatcgctcgaactatataacctttctaaaggagctgaaggagggcttggaaccctttggtttcatactcagtgctgccgtgggctccgcacaattctccgccgaaatatcgtacgacattccggctatggttccgtatctggacctcattaatgtgatggcctatgaccttcacggaccgtgggaccaggtggtgggcatcaatgctccactatacgctgctgagaaggatgccagtgattctagcgggcggcaacagcagctgaacgtggacgccgtagtcaagtattggctgaaagcaggtgctccggctgaaaagctgattctaggagttcctttctacgggcgctccttcacattagcgaccgccgagggcaatcagccaggagcgccgcatattggcaagggaattgcaggaaactactcccgcgagccgggcgtcctgggttacaacgaactgtgtgagatgatggagcgggaggagtggacacagaaatgggaggccacacagcaggtgccttacgcctacaggcaacgccagtgggtgggctacgaggacccacgtagcttggccctcaaggcgcagtatgtgatggacaaccacctgggtggcataatgatctggtcgctggaatcggatgacttccgcggcacctgtggtcagcagccctatcccttgctgcacgaaatcaaccgtgtgctcttcggtggcaatacaccatctggcttgaccaccgaatcgaacagggaatcgcccagtgaaggattcagttgtccagctgacgcgcccgctggatatattcgtgatccggacaactgctccaagttctactactgcagtggcggcaagacccacaactttgattgtcccagtggactcaactttgaccttgacaccaaaagttgtaactactcaggatcagtaaagtgctag

SEQ ID NO: 19890 - protein, 460 aa, DROSOPHILA
MAASSSAQGNSSKNVVCYQGTWSVYRPGLGKFGMEDIDPFLCTHLIYAFLGIEETGQLRVIDAYLDLEENSGRGNIKSFNALKLKNPVLKTLVAVGGWNEGSKRFSLVARDPSKREKFVDDVVRFLQRHGFDGLDLDWEYPGQRHSLDNEDRSNYITFLKELKEGLEPFGFILSAAVGSAQFSAEISYDIPAMVPYLDLINVMAYDLHGPWDQVVGINAPLYAAEKDASDSSGRQQQLNVDAVVKYWLKAGAPAEKLILGVPFYGRSFTLATAEGNQPGAPHIGKGIAGNYSREPGVLGYNELCEMMEREEWTQKWEATQQVPYAYRQRQWVGYEDPRSLALKAQYVMDNHLGGIMIWSLESDDFRGTCGQQPYPLLHEINRVLFGGNTPSGLTTESNRESPSEGFSCPADAPAGYIRDPDNCSKFYYCSGGKTHNFDCPSGLNFDLDTKSCNYSGSVKC

SEQ ID NO: 19891 - DNA, 10904 bp, DROSOPHILA
tttacgtattcactgccacccaagccgcccaagccaccttgcaacacccagttgccacccacttggggcggcgcagcgtgtggcaatcgaagggcgcccacacacgcatcttcccgctgctcggcttgattgcttaccacaactggagcatgggcagtggccaataattgtggagtccgcgtcttgtgggcttggtcagtggcaagcacgcagaaggcaggcggcaggtggcaggtggcaggcggcaggaggggaatagaaagtgcaaacagttagaggacttgtgccacatgcaattgtcaacgaagtcgtctgctgcttctgtaacccagcgcaactgaaagttgtacgtacatacatacatacattcatacaactaactgctgcccagtgtaaacaaacagaaggctgggggaaaccaactggcgaccgacgacgcatgccacaagcagcatcagcagcagcagcaaccatagcaataacaatatgcatggcccaagcaacaacatgagcagtatctgcaacaacaatagaaatggccaaggcaatgctgctgcagcaacatttgggcccaaaaagcaacaccaacaactgcaacagcaacaagcagcaacagcaacatgcagcagcagcagcagcagcagcagcaacggcaacaggcagcagcaacaaccacatgcaacatgagccggcaagctgtacttgaacaagtcgtacttggcatcgtattttggctttggacttggccgactgcctcagtggaggcctcaatgaaagaagaaatttcgctgccgtcgaaggcggcgacgttggcggcgacagcgcgcgctgccgctgctgctgctgctgctgcgcatgcgaagtgttccgctgcgagaaagcaggtgtctgcagcattcggcgcttaaccacggcgcgaagcagacgcgttgctccctctttctgctcctccaggcgcgatcgatcctcgttgctctcagccgcatgcatagcgaaaaacaaaaataacacaaaaaatttccgatatacaaacaaatatatattcgatatatgcgagcgttatcaactgctaaatcgaacaaacaagccaatttacatatgtaaaaagaaaaacaaaaacaaaaaagaaacaaaagtaaataaaaacaaacaaacataaggcaaagccaaacgaaacggaacggaaagaaccgctgggaaaacggttagcaaagtagtgatcaacacgctttttgtgtccttttcttttttttttttttgtttgcattttcttttgtgtgtgctccacttgcgatcgttaattgttgaccgcgtgcaacacgcccccctcctcgcccgctgctgtcattaccagcaacccatcggcaacatcggcggactgcagcagcagcaacagacgcagcaactgcagcagcagcatcaactgcagcagcaacagcaacagcaacaacatcatcattggcgggcagaagtaacggccaccgttcaagtgcaactgttttcgaaagttgccgctaacgcatcctgtttgtcagccttcggaattttgatttcgattcggaattggaattgaaattggaatcggaactttagctgcaacatcacggaatcgcaaatcggaattgggcctaggacctattaataggtgagtgccggcagatgggatccacaaaagccggaagttgccttttgcgcagcggaaacggaagcagtagaacagctgtgagaggatccttaaatacgaaaatgataaggaatataggaggtagatatagggagagatcttaacttggggctctaagttgcggttatcacttggaatcaataaacaactgaaaagggtagctactttttgctacaataaatccttttaataggtattatattatttcatcgcaactatatcaatacagatgggttaggaacacagaacaacttaaaaagattaatagaatgcaatgttattaatttttctgctttcataaaacaaacgtagtaaatttaaatccaaagaattgtcacttaaaagcctgaggataacttaaaagtgtttagattgttgttatgaaggagaaacctcgatcgcagtaaggaaatagataaattaggcattactaatcattactaatgacagaagttcgtggtcagttttcaaggtcaataaatagcgagtgaagaattcacttaattcttccagagtgatgctttctcgccttcactcactctttcctcactctctctttcgtcggaatttcctcacacctttgtcactatctttggccttctaattggccaactaagagcactcgtatttgtctgggccaagatgacccacttgagttatggggaaacctattaacacttttcaccaccgcagttacccttttattttctcaagtgagttgtcattaaacagattcttttctttcttgacttgtcgcagcttccctttctttcttttttgtctgtctgtctttttgacttcagtcttttcatttatggtcagtgggtggagttagaaaggggctagagaagagaggaatgaagaagagggcccacaacacttagcaagtcaatcaatcatcattgagttgactgagaaattgctaataaattgcaattagcgggaaacactttcatatagcaggtaaccataataatgtgaagaaataaaagcgaaaagcactttctttgccacgttctctctcttccgttttccgtttcttctgctccttcttctccttcattgaacgcccacaacaacactataaatatcgaataacgataaacaaattaattacacacttaacaaacagcaacaccatcaacacaatcagcagcagcagcaataacagcatcaacatgcaacatcagcagcaacagcaacagcaacagcagcagcagcagcaacaacacaagcaagtgcgctacagaaatctacgaagaaacgtagaaatcggtgctaagaagatttggctgccgcttatcattttcctttcactgcaggtgagttgagccgatgcaaataattgaaatcaatttaagcgaaaagccgcagacacaacggcagcacaagcaacatcggcttataaaaagataattcccattagcagcagccggcttaagcttctctctttctttcagtggcgtgcggggtttttgatgaaagggggttataactaagcttagttctcgctttttggattgggtcattcaatagtcacttgaatataccaggaatgtttagttcaaaactaaagcatttaatatttgttcaggcagtgcatgttagtatcattgaaataggttcaatttcggccccccccttccttttttttctccgccactgctctgcatcctgctctctccgccttgccatccaccccccctccttctgtctgcctgtcgtctgcctcgtcgtgtgcgtgtgagtccaagtgtgtgcatgtgtgcaagtgaaagagcgcctctgccggaatgaaacggaatgatgaggagccgaatggaacggcatggaatgggtgggaatgcgctggaatgggttgggatgggacgtgtaattggcatggcctcgtttcacgagcttgtgcgaatgttacatgtgctgcttttagttcctggaatcaatacaaaatcaaaacacatagtatatttataagatatccaagtgaactgaccagtggggaaagtaacggaaaatcgagtaattagtgcgggtaatgaaaaggatacacatcgaagatgccatctctggaatttagaaacaacatagtttcaacagagattgcagttttcaaaagaatactgcaacaatttgaagctatacaatgtcctttagagtatttccatgtgtgcaaatagaattcagcagcaataacagcgcataattctacactcagcaggccatatcgttttgaagtccacacttccgcagcattcctttctctttttcgccttttggcacatattaaaaattccatgtgcaatcccatgctgactaggtaatacccccatccccatgcccatcccccagactgaatctcctttcgttcaacgttcatgacgttagaaagttattctttttgttgttcgccagcgtttatggccattctggggcgatgacacaatttagccaggccaaaaagcataggaaaacgaagcattttcattgatttaaccaacggcagcatgtggtggcagcatcatctccacttttcgcctccatttcgctttcatcttggggtcgagaaatgctgccaaacgacctggcgttcacctttgaccctccgtgctctatcctccatccgccattctcctccagcccaaatggttgccaaattccgattctctgctaatgtttcactttctcccgatttggtgcgctgccaggcagacagcctcttcccgaaatcccctcaaaaaaccaaaaaaaaaaaaaaaaacaaaaaaaacagcctagcaccatgcattggtcgaggtcaagattggcaacaacagccggtttcttctgtcttccgcctttggtctctagtcttgagtctttagtctttagtcacatcattagtcttctccatttcgtattacgtggggaactgcaaagggggcttgaaatgggggatttgggaagtggtgaggggggggggggtctattgaaactcacgacttcccactggtttggatgggcaaacactgtgtgcccacttggcacacatttcaattaacgcaattctctcgagatgattagtttcgcatatgagttggaaaacgaaacaggatacatttcaatagccttttggtggatttgcatgtggcggcgtattagtaactttgtgatgtcttccatctctgtgcgaattgctcgaatttttgttttgttggtattcatggcctgccccgctgcagttgctccaaatcacgtagctgcatgcaaatttgattatagaattttgagcagtgggttttcctgagttcgtggcccactcgtttgccacaacttgccccatcgagcatttacgattttaccatctacttgcttacttacctttttgtcgtcaatcgtctgccgcgcttgccacatcactttctaccaaacaggattgcttcaggatgccgccgtctcagccgttgcgacatcccatcttaagacaaaaaaaaaaaaaaaaataaaaaccaagtacgaaaatataaaaaatccaatacctgagatactgagacactgagacactcggatgctcagttttctcagcttcccagttggcggagaaagttgttttcggcggtgcggcacagatttggccaaatgggatgcagcctcgccatcttcgctgggcatcttcatcatgggattgctatgggtatgggtatgggttttgggtacgggtatgggtatcttggccatgatcaccatttccatggccatggccatcatcgtccacctgtccgcaattgctccagtgcccccaacctcccgctccttctgctcctctcgtctaattgccaagatagccaggtaacttggcaacttggcgagttggtaactgaatcagtccagttcggcgacaagtacacggccaagccatcgacgcggatcaagatgttcctgaatggccgggcgaaatgaagaaatggtcacccggaacatggccactggccaatccaatctgtgagccaagtgaaggacgcaaaaagaaagtaatgaaaaattaattaagtttattagcagatcgcacagttggtcacaagatgcgacatgggaatcttgattagaaaggatggatgggctatacagatacattttcgaaacggttcagattcagagagaaaggtttatttatatataaatatatatatttatctttttatatgtagatgtgaacttttgaccatattcagttaacgtttgctgtattactcgttaattcttggatagaattcttcatttctaacattttatattgacattactgaaaaagtacaaaagtaaagatctgttgcttcccaccatctaagttatctggtttgcatctaatctgttacccggctattatcgggtacacaccaccatcatcccaggccggcatctcctgttccatccatgtcgattgcgatctcaatctgggtcttgaatgtctggtgtcttgggtcttccgtcttcggtcttcggtctttggggctgggtccatcgtccatggtcttttgccttttgtttgtgttgtcgtctggtctggggcctggtctggtctggttctagccttgacatcgccttttaagccaggcggatctccctggcaattgggtcgccgcacgttgcatgtggcacaagaagagttgctggttggttggaaaaccgaagacagaaaacagaaaacggcaatcgggcaaacagacgtcggaaaaaaagcgaaattgttgcagtgcctgtggtttttctcttgtttttctctttctccacggcagccagtggctttttgctgccttatgcaattgagttgcatgccgcatccgccttgcaacctgcctaccacttgccacttgctgctctgcgcccattccatttgacattccccaactgaaatcgtaccgttcttcatcatcgcaacttctcatcttttcaccctctcttcatctttcacccacaaaccccaaacacgaaaatggggctacaggtcgcacttgtctgcgcggacgatgtggaggttgtgaaggcgattgccggtggacccgacgacgaactgaccatcgcacttggggatcacgagaacgagctggaccagatggcccaggaatcggagcaggagcagcaggcacaggcgcagcagcaacagcaacaacagcagcagcagcagcaacagcagcaacagcagcagcatcagcaattgccgcaaatccagatgcagttgccacaatcggtgcccaaggtgcaggtgcactaccagcacaatatgccacagccgcctccaaatgtggcacttaccatgcgaagtaagtgaaaatagccttgctactacacacatatgaaatgtttgaataattatctataaacagcttattgatattaacaaaaatacttaaattgcattgctgcacttacagacaatcaccagaacattccgctgagctttggccagccgttcggaccaccaccgccaccgggtgcccagttctacaagggaccacctccgccacagctgcagcagcgaccgcagccaccgccgcagttgcaattgcaggtgcagccgcaacagcagcagcagcagcagcagcagcatacgcagcagcagggtcagcagcagcaggtgcaggtgcccgacttgagtgtgggcggatcgagcaacaatgagatatgggcggcacctgtacaggatatgcccaaaattgtctccctggacgtcaagtgcgagaagaacgggatgaaggtgttcgtgcagttcgacaaacccttcaatggcattgtgttctccaagggtcactacagcaacatgaactgcgtccacttgccatcgggtttgggacgcagctcggcgagctttgatattggactgcacgagtgcggcaccgccggcaatacggacaactatggccagggttatggccatgaggcaggcagcacgggagcaggcacctacttcgagaacatcatcgtcatccagtacgatccgcaggtgcaggaggtgtgggatcaggccaggaaactccgttgcacgtggcatgatcagtacgagaagagcgtgaccttccgtccattcccggtggatatgctggatgtggtgagggccgattttgctggcgataacgttggctgctggatgcaaatccaggtgggcaagggtccgtgggcatccgaggtatctggactggttaagatcggccagacgatgaccatggtgctggccatcaaggatgacgactccaagttcgatatgctggtgaggaattgtgtggcgcacgacggcaagagggcgcccatccaattggtcgaccagcgcggttgtgtcacccgacccaagctaatgtcacgcttcaccaagatcaagaactttggagcatctgcgtccgtgctgtcctatgcccatttccaggccttcaagttccccgattcgatggaggtacatttccagtgcaccatccagatctgtcgctaccattgtccggagcaatgttcggcggaaacgaatctgcaggatgtccatcacttgcaggtgggtccagaatcgcagtacggtccaccgccgcaacttcatgtggatgcctaccacgtggccagcgcgattggcaagcggcgcgacgagcgaagggtgcagcgacgtgcccgagcggtagccgaaccgcaggtgggtctaaacaggatcatcaaggtggtttcctccggcgatctgaccttcgccatcgatgaccaggccggcggtaatggaagctcaacgaatggcgcgaactccggcgtggatcgcagtccacagaccatggtatttccattgcgcgaggagggcctgatctgcatgaccacgccgggctttgccatcacgctaatcgtgctcctgggtatccttgtcacgtcctgccttacctctgcggtactatacgtccgactgcgtccgttctcctcgttcgcaggcagcgccaaggagcgggctgtggccttcacgaatccccagctggcaccgctgcccgtcattcagctaccgtcgccggcggatctgcagggaacgctctccaagaagcgggcgatgtcgtgagcacgaccccgactgtgcgactggaactagttccgcggacggattaccgatttccggcggctgggcaatggcactactgatagcttcttcgggatcgggtcttttggttggcaaacagaacaagttgttttcaaatccattcttaaatcgagtaaacaaattctataatttaaatcgaaaaccttataaatgcttggtttagataaaagaaaatatttttgctataatcgtattctttttacaacaaattaattataattttgtcttagcaaaaaagtccacgtccaaagaccgcgatttgaaaagtaactgccattagtgtcatcactagctactgcgttctgtcagcgcttccgtttccggttctaggtacagttgtgtctgcgtctgcggctcttaaatttgtagcgtacacttcgttagtataatttttgatacaaatcatttaacattaactcaagccgtttactgggttctcctctacctcttccgcttccatttccttttccattttcatttcaatttccgtttcgtgaaaactgtagctctaaacaccctttagcacaccatttcctgtttgtttctatcatttctacactccctccttggtggcagtgcgataatcgattatttttgttttagtttaagcctaggttctatttcatgtaaaacggtgctaagccatgatcagcccacatcatactcgtacatatatatccatctgacaatcacttgtagctttcttcagcagttgagccgatataatccattacttagagtatttctcgtaagactctcttaagactttgtagacacgcatacacgcacattttgcacacaagcacacacatacatacacgcacacttatacaacatatgcataacagatatacacttgaattagtcactaaatattttaagcgctttaagccgtagactaagccgaatacttctgcgtcccactgtcagagattttcccagacccccggtatctaattatatcagatagtacgccctatagtccacttatttatttgcataatgatttatacatatcgcatacatacccacatatataccgccttatatatatcttcgattttttttgtctacttttgtaagccgagcaatgcgagtgagaagagaaaagtgttcaataaattgtttagaatccctaaagctgctgttattgtttttgattttatggaaagggtgttgcgatatcaacaaaatggcttagtgccacagaaattacccacaaatgtgtctaaaagtatgcaacaatattttttaagtccggtaaacgaatgcattcgtgtcagaagtctacgttcaatttttcacagcatacttttagacaccttgcaaagtgcaaattgtgtaaattcgattatttcataaagcatctaatgaaattcaacattggcaggttatttatttttcatcttaactaatctttattcaattgtcaatttttcagttataaaatttgcacttaaatttaaattttaatatgcatgcaaggagttgcatttgcttttgttcatactatcaatggaaaatggtagtcggttttgtatgtgtgcgtcagtaagtctgtgagttttatgagtgtgtgtgtgtgtgtgtgagagtgagaatgtactaaaatttaactaaaattcccctaattatgttttggatgccggtcgaaaagagcacacaaaaaaaaaacaaaacaaatgtccgaaagcaaaataaaattaaaaatttccataccacacaaacttacaagctaaatctcgtatgtatactttatagatatatatatatttatatataaataaataagttcccttatgcctagtggatgcgttgcataacatccgtctccttaagcctggagcacctttccggagtcttcatttcatttcattttgtttgtgcatctctctctctctttgtgtattatttccattaattttctatgatttcctctatgcaatttaacgactaaatgcatccaaaaaaacaaattgcaaaaaaaaaaaaacttttagaacattcagcaccgaatcgagcagtttgagtattgcattgttgcccgatctctgatatctgatatctgcaccatatatatctctttttttcgtttggatcaggattccgaacaaacaacccaataatacgttt

SEQ ID NO: 19892 - DNA, 3963 bp, DROSOPHILA
aaaaataacacaaaaaatttccgatatacaaacaaatatatattcgatatatgcgagcgttatcaactgctaaatcgaacaaacaagccaatttacatatgtaaaaagaaaaacaaaaacaaaaaagaaacaaaagtaaataaaaacaaacaaacataaggcaaagccaaacgaaacggaacggaaagaaccgctgggaaaacggttagcaaagtagtgatcaacacgctttttgtgtccttttcttttttttttttttgtttgcattttcttttgtgtgtgctccacttgcgatcgttaattgttgaccgcgtgcaacacgcccccctcctcgcccgctgctgtcattaccagcaacccatcggcaacatcggcggactgcagcagcagcaacagacgcagcaactgcagcagcagcatcaactgcagcagcaacagcaacagcaacaacatcatcattggcgggcagaagtaacggccaccgttcaagtgcaactgttttcgaaagttgccgctaacgcatcctgtttgtcagccttcggaattttgatttcgattcggaattggaattgaaattggaatcggaactttagctgcaacatcacggaatcgcaaatcggaattgggcctaggacctattaatagcaacaccatcaacacaatcagcagcagcagcaataacagcatcaacatgcaacatcagcagcaacagcaacagcaacagcagcagcagcagcaacaacacaagcaagtgcgctacagaaatctacgaagaaacgtagaaatcggtgctaagaagatttggctgccgcttatcattttcctttcactgcaggtcgcacttgtctgcgcggacgatgtggaggttgtgaaggcgattgccggtggacccgacgacgaactgaccatcgcacttggggatcacgagaacgagctggaccagatggcccaggaatcggagcaggagcagcaggcacaggcgcagcagcaacagcaacaacagcagcagcagcagcaacagcagcaacagcagcagcatcagcaattgccgcaaatccagatgcagttgccacaatcggtgcccaaggtgcaggtgcactaccagcacaatatgccacagccgcctccaaatgtggcacttaccatgcgaaacaatcaccagaacattccgctgagctttggccagccgttcggaccaccaccgccaccgggtgcccagttctacaagggaccacctccgccacagctgcagcagcgaccgcagccaccgccgcagttgcaattgcaggtgcagccgcaacagcagcagcagcagcagcagcagcatacgcagcagcagggtcagcagcagcaggtgcaggtgcccgacttgagtgtgggcggatcgagcaacaatgagatatgggcggcacctgtacaggatatgcccaaaattgtctccctggacgtcaagtgcgagaagaacgggatgaaggtgttcgtgcagttcgacaaacccttcaatggcattgtgttctccaagggtcactacagcaacatgaactgcgtccacttgccatcgggtttgggacgcagctcggcgagctttgatattggactgcacgagtgcggcaccgccggcaatacggacaactatggccagggttatggccatgaggcaggcagcacgggagcaggcacctacttcgagaacatcatcgtcatccagtacgatccgcaggtgcaggaggtgtgggatcaggccaggaaactccgttgcacgtggcatgatcagtacgagaagagcgtgaccttccgtccattcccggtggatatgctggatgtggtgagggccgattttgctggcgataacgttggctgctggatgcaaatccaggtgggcaagggtccgtgggcatccgaggtatctggactggttaagatcggccagacgatgaccatggtgctggccatcaaggatgacgactccaagttcgatatgctggtgaggaattgtgtggcgcacgacggcaagagggcgcccatccaattggtcgaccagcgcggttgtgtcacccgacccaagctaatgtcacgcttcaccaagatcaagaactttggagcatctgcgtccgtgctgtcctatgcccatttccaggccttcaagttccccgattcgatggaggtacatttccagtgcaccatccagatctgtcgctaccattgtccggagcaatgttcggcggaaacgaatctgcaggatgtccatcacttgcaggtgggtccagaatcgcagtacggtccaccgccgcaacttcatgtggatgcctaccacgtggccagcgcgattggcaagcggcgcgacgagcgaagggtgcagcgacgtgcccgagcggtagccgaaccgcaggtgggtctaaacaggatcatcaaggtggtttcctccggcgatctgaccttcgccatcgatgaccaggccggcggtaatggaagctcaacgaatggcgcgaactccggcgtggatcgcagtccacagaccatggtatttccattgcgcgaggagggcctgatctgcatgaccacgccgggctttgccatcacgctaatcgtgctcctgggtatccttgtcacgtcctgccttacctctgcggtactatacgtccgactgcgtccgttctcctcgttcgcaggcagcgccaaggagcgggctgtggccttcacgaatccccagctggcaccgctgcccgtcattcagctaccgtcgccggcggatctgcagggaacgctctccaagaagcgggcgatgtcgtgagcacgaccccgactgtgcgactggaactagttccgcggacggattaccgatttccggcggctgggcaatggcactactgatagcttcttcgggatcgggtcttttggttggcaaacagaacaagttgttttcaaatccattcttaaatcgagtaaacaaattctataatttaaatcgaaaaccttataaatgcttggtttagataaaagaaaatatttttgctataatcgtattctttttacaacaaattaattataattttgtcttagcaaaaaagtccacgtccaaagaccgcgatttgaaaagtaactgccattagtgtcatcactagctactgcgttctgtcagcgcttccgtttccggttctaggtacagttgtgtctgcgtctgcggctcttaaatttgtagcgtacacttcgttagtataatttttgatacaaatcatttaacattaactcaagccgtttactgggttctcctctacctcttccgcttccatttccttttccattttcatttcaatttccgtttcgtgaaaactgtagctctaaacaccctttagcacaccatttcctgtttgtttctatcatttctacactccctccttggtggcagtgcgataatcgattatttttgttttagtttaagcctaggttctatttcatgtaaaacggtgctaagccatgatcagcccacatcatactcgtacatatatatccatctgacaatcacttgtagctttcttcagcagttgagccgatataatccattacttagagtatttctcgtaagactctcttaagactttgtagacacgcatacacgcacattttgcacacaagcacacacatacatacacgcacacttatacaacatatgcataacagatatacacttgaattagtcactaaatattttaagcgctttaagccgtagactaagccgaatacttctgcgtcccactgtcagagattttcccagacccccggtatctaattatatcagatagtacgccctatagtccacttatttatttgcataatgatttatacatatcgcatacatacccacatatataccgccttatatatatcttcgattttttttgtctacttttgtaagccgagcaatgcgagtgagaagagaaaagtgttcaataaattgtttagaat

SEQ ID NO: 19893 - protein, 699 aa, DROSOPHILA
MQHQQQQQQQQQQQQQQHKQVRYRNLRRNVEIGAKKIWLPLIIFLSLQVALVCADDVEVVKAIAGGPDDELTIALGDHENELDQMAQESEQEQQAQAQQQQQQQQQQQQQQQQQQHQQLPQIQMQLPQSVPKVQVHYQHNMPQPPPNVALTMRNNHQNIPLSFGQPFGPPPPPGAQFYKGPPPPQLQQRPQPPPQLQLQVQPQQQQQQQQQHTQQQGQQQQVQVPDLSVGGSSNNEIWAAPVQDMPKIVSLDVKCEKNGMKVFVQFDKPFNGIVFSKGHYSNMNCVHLPSGLGRSSASFDIGLHECGTAGNTDNYGQGYGHEAGSTGAGTYFENIIVIQYDPQVQEVWDQARKLRCTWHDQYEKSVTFRPFPVDMLDVVRADFAGDNVGCWMQIQVGKGPWASEVSGLVKIGQTMTMVLAIKDDDSKFDMLVRNCVAHDGKRAPIQLVDQRGCVTRPKLMSRFTKIKNFGASASVLSYAHFQAFKFPDSMEVHFQCTIQICRYHCPEQCSAETNLQDVHHLQVGPESQYGPPPQLHVDAYHVASAIGKRRDERRVQRRARAVAEPQVGLNRIIKVVSSGDLTFAIDDQAGGNGSSTNGANSGVDRSPQTMVFPLREEGLICMTTPGFAITLIVLLGILVTSCLTSAVLYVRLRPFSSFAGSAKERAVAFTNPQLAPLPVIQLPSPADLQGTLSKKRAMS

SEQ ID NO: 19894 - DNA, 3573 bp, DROSOPHILA
aatatgagcaaaactagcaacagtaagtgtttctcaaaatttcaaagagatccacttaaatatttcttatttaatagtcatgcgtttggcgctgctgcagctcaagggttccaaggacaaagtggccaatgtccaaaacgccgtcaccaaaatcgaggcggcggtcaaggagcataaaccccgattgatcactctgccggagtgctttaatgctccatacggcaccaagtactttcgggagtactccgagaccattcccgatggctatacctcgcaacagctctccaatttggccaggaagcaccaggtgtacatcgtgggcggaacaatccctgaactgggcgaaaacgatgccatctacaacacctgcacggtttggtcacccactggtgaccttgtggccaagcatcgcaagatgcatctctttgacatagatgtcaagggtggcattcgcttcaaggagtcggaaacgctgtccgcaggcaatgatttcaccatcatcaacgtagatggccacaagattggcatcggcatctgctacgatattcgattcgaggagatggcgaggctctatcgcaacgcaggctgcgagatgatcatctatccggctgcattcaacatgaccactggtccactgcactgggagctattgcagcgatcccgtgccaatgacaaccaactctttgtggtcacaacatcaccagcccgtgacacaagcgccgagtatgtagcctatggccattccatggtggtgaatccatgggccaaggtgcagcagagtgccagtgaaggcgaggaaatcgtggtggccgatatagatttctccgaggtggagcaggtgcgtcagcagattcccgtctttgggcaaagacgtctagatctgtacgccaccgaaaggaaggccaaataaaggattgctttaaatgggaaatgggaaatcttcaaaaattcaagaatctgtcgttttaagcacctttaaagcattgcatttatgttatttgattgtatataaaatttattaggcctacacacacatataacattgatttctgtcgaaaaactattgcattttatctagctgctgattatcgcaggcaggagttacttcggatgcaggtgattgcacgtagtggggtcgctgggcctggtcgaaaagtgctcgtatggcttcatcggtggccatcaggggctgactaatgaattccaaggcctggtgggacggtaataaggtgtaccattaactggatgtttgaatcactttaactatcgctgtacttaccctaaccgcgtacttctccgcctcacaaagtggacttgtgctggcgctggacaactttagtgtctcctcgggaatgcccacgccagtgtgcaggaccatgcgttggagaatgttaaggttttcggcacttaggctgattacatcggtggcgggcaggttgaggaaacgaatcttggccaggaacttcagttgcttaagcatatctagctgaatttcgcggatctgatgggtggcatgaagcagttgcttcgttgactcgttcaatagctgattcttctgcgtgagatcggctttccagcgggctaactcctcaaccataacgctgctggcgaggaatttggaccgccagacctcacactggccggccaggaactcaatctgctcggtgtgggtggtcaaattgttggcagtgtccaatagagctctggccagctgtagtttgtcctcggtgaggagattaacccgtgtctgcagatcctcgcccacggaggccaccagcaggctcttcagctcgctattcacctgcgtttggaacttatactgggcttgaaagtaattgcgttcatcgcgcatcttggccagctcctctttaagtgagtttacctcatggctactggctgtgtctgtttctttaatatccgttgtctcagtctccaattcctgtgtgcgcagcgtggacacctgatccaccagcaccgcaatgtccaggttgttcttatcccgatggattttgtgtttattcgttggctcagagatcatgggattcacggcacccggatatggttcgtagggcacgaatttgggcgccttggtcttcttatgttcgggcagcgagtccgcgctggtgaccagtcttggccgcatctggaccagctcccccttgggcacaacgggcgccaaactccgggtgacgttctcgggtcgtctgtacagggtatgcaagccaggaaggggcaaatttgaggagtggccgctactagttgatgtcttcctgcccatgacggcctcctggacaacggagctgtcttttcgcgataattgtggcctctttaccttgttgtccacatcagcactcgctgggatttcgctctctgttttggccgctccactgttttccggttgctccatgccatcgccgctggtgcgacaagcttgggatttgtccgttcctggcatcgcactttcattcgcttccatttctgggcaatcttggccaggccaaataaaattttcctaatttaagaatttcttttgctgtgccagcaaaacaaaaacattgaccaagggctgccaactcgctgcaaagaagttttgtgtttctagtgttggtcaagacctaaatgtttgaaactatcatgattataaaaaagcattgttaattagaaatttatttgcctttaaaaatgctctcctacccaataaaatgggtataaataaataaattcccaagtgaacaccacagtccagtgtgaccagagcatgtcaacatgaaaacgcacgttacacttcatttaacagtgctgttcggcccacccacgcacacgttcacactttttgataaagtcgattgatttgattgaccgagaaaaaaaaacaaataaacacaacgaaggtgaactggtaccggcgtagtgaagataccaccaacgccagctcccaacacatcccggccacgccccccgaccgcccgcggagctccaaaggatgtcctcagtggaggccgaggtgctgcagaaaatcgatctgattgagcccacaaccggaaaattgtttttcgagcacaaaacggagctgcttttctgccggccacatctgatgccgctaaagacgcaggcgctggaacgcctggaggaaatgcatcgggacaccgctcgccaattgcagaagaagcgccagcagaagaagaagtccacggagcccacaggctcgctatgaaccagtccttaatcgcagaaatacatttgttataagcacatacacccacacgcacgcaccacaaatacacagaatcacagcaaagcacaagaactgagtacacccgtaccaggatcgggatcgggataagcactagtcacaatggcgtacctactaagctttggcatcgtggccgccctattcctggccagcatctcgctgtaccgttacggaaacataccacgtcagcacatcctggtcaccctgtccgtgctgaccgcctggtgtttctcctttctaattgtattcaccattccgctggacgtgacatcggtgagttggaatgtgaagctataagaccatttggaatagaatatagc

SEQ ID NO: 19895 - DNA, 1504 bp, DROSOPHILA
ttggcagcccttggtcaatgtttttgttttgctggcacagcaaaagaaattcttaaattaggaaaattttatttggcctggccaagattgcccagaaatggaagcgaatgaaagtgcgatgccaggaacggacaaatcccaagcttgtcgcaccagcggcgatggcatggagcaaccggaaaacagtggagcggccaaaacagagagcgaaatcccagcgagtgctgatgtggacaacaaggtaaagaggccacaattatcgcgaaaagacagctccgttgtccaggaggccgtcatgggcaggaagacatcaactagtagcggccactcctcaaatttgccccttcctggcttgcataccctgtacagacgacccgagaacgtcacccggagtttggcgcccgttgtgcccaagggggagctggtccagatgcggccaagactggtcaccagcgcggactcgctgcccgaacataagaagaccaaggcgcccaaattcgtgccctacgaaccatatccgggtgccgtgaatcccatgatctctgagccaacgaataaacacaaaatccatcgggataagaacaacctggacattgcggtgctggtggatcaggtgtccacgctgcgcacacaggaattggagactgagacaacggatattaaagaaacagacacagccagtagccatgaggtaaactcacttaaagaggagctggccaagatgcgcgatgaacgcaattactttcaagcccagtataagttccaaacgcaggtgaatagcgagctgaagagcctgctggtggcctccgtgggcgaggatctgcagacacgggttaatctcctcaccgaggacaaactacagctggccagagctctattggacactgccaacaatttgaccacccacaccgagcagattgagttcctggccggccagtgtgaggtctggcggtccaaattcctcgccagcagcgttatggttgaggagttagcccgctggaaagccgatctcacgcagaagaatcagctattgaacgagtcaacgaagcaactgcttcatgccacccatcagatccgcgaaattcagctagatatgcttaagcaactgaagttcctggccaagattcgtttcctcaacctgcccgccaccgatgtaatcagcctaagtgccgaaaaccttaacattctccaacgcatggtcctgcacactggcgtgggcattcccgaggagacactaaagttgtccagcgccagcacaagtccactttgtgaggcggagaagtacgcggttagggccttggaattcattagtcagcccctgatggccaccgatgaagccatacgagcacttttcgaccaggcccagcgaccccactacgtgcaatcacctgcatccgaagtaactcctgcctgcgataatcagcagctagataaaatgcaatagtttttcgacagaaatcaatgttatatgtgtgtgtaggcctaataaattttatatacaatc

SEQ ID NO: 19896 - protein, 448 aa, DROSOPHILA
MEANESAMPGTDKSQACRTSGDGMEQPENSGAAKTESEIPASADVDNKVKRPQLSRKDSSVVQEAVMGRKTSTSSGHSSNLPLPGLHTLYRRPENVTRSLAPVVPKGELVQMRPRLVTSADSLPEHKKTKAPKFVPYEPYPGAVNPMISEPTNKHKIHRDKNNLDIAVLVDQVSTLRTQELETETTDIKETDTASSHEVNSLKEELAKMRDERNYFQAQYKFQTQVNSELKSLLVASVGEDLQTRVNLLTEDKLQLARALLDTANNLTTHTEQIEFLAGQCEVWRSKFLASSVMVEELARWKADLTQKNQLLNESTKQLLHATHQIREIQLDMLKQLKFLAKIRFLNLPATDVISLSAENLNILQRMVLHTGVGIPEETLKLSSASTSPLCEAEKYAVRALEFISQPLMATDEAIRALFDQAQRPHYVQSPASEVTPACDNQQLDKMQ

SEQ ID NO: 19897 - DNA, 2366 bp, DROSOPHILA
ggaagctgggtccatctcgaagccaacacaaccggtcagtcggtctttcgcctcgctgccgcaggagcaagacaagaaggagcagaatgccagagagagccttaaccgcctgcctcgcctaatggactttccagagatcgtgtggccatcggcgcttaactcgttaaaaaattggatcaccatacagttcataattcgaccctacttcgacagcgagtttcaactcaaggacttcatatacggcgccaagcaagcgctgcaggtgcgtcatggtttgtctatcatgaagtgtaatgatattaattccctcataggtagtatcctcaaaactgatgggcggcgacttagactccctggacaatcttgtctcgcccgaggcgatcgcagagcttagaccggtaatccaaaaactgtcaatgacgcaacggaggcagctagaaatcaaggagagcgacatatacctcagctttccctatcaggtaggtattatgtttgacgatgcaaacgacaagctgcagaagcgtttcgtagagatcaccatggtgtttcacgtaatgcgtggtctatccgagatgcgggaacgcggcgaggaaataccctggaacatggggtaagtttggactgtcactgcccgaaagctgagctcctcatacccatttgttgcaggacccttcccgagtaccaggataaggttttcatctgcaactaccgttttgtaaaggagttcaccgctggacaccaatcggactggaccgtaaatgtggccaaccagtttagggccatcgaccttattaacgagaccatataacatcggcccatggctaccatcatccgcgctgttcgccgactcatagcatatattggcgtaagccaccgccttcgttggaataaaagtttcgttttccgcatttaggtataaaaaactaaaatctttactgtggatctctggtttaaattaggttcatgtgaaattagtgcatttggtggacaagcaaagcgctcagtgtccctcgtgctttgctctgtagatgccttggggatcgtacttgttcaggaggagcttccattcgccggctttgttggcgcgaaggtagttgattaccttttgtgagtttttgcgttggacttccgtgcactttgagcagtcggaatgaagggcgtcgggtaaaaggcgcttaagttcacgaccctctgctgtgcatgggcccttgtccatcaggcacttgagataattacccaacactcggttgttgcccagaacttcatccacgttgacactgtcgtacttgttggtgtaggttttttcaggagcagctgccgcaagaccgacacaaacacagaacactagagctagcgaggctttcatcttggaggattatctggaaaggcaggtgggaaattcaaattattaaaggtaagccacgaaacacatttcctaaaatgagggatttttggttgccgggtaagcggataataagaaggcgtcaggcagtctcggcttttctgtgttttcgacgcatgtcaaagaatcatccaaagcggttagtggtctgcccaccagctcatgcattatttatggcccttggcatatatatcgcatatgcatactaattggcaatcgtttggatttaatatttttgaaaagatttcacaatttcaccgacaccacgtagttttagcagctttcgacttatttgcgtccaatatccgaatccatgctagcccgtggccagctgtttggttttcgcaatccttgatgggtgctgcacctcaattcctcgggtgctcggcctaaccagggcaaacgaaccacggcttgaacaatggcttactcacttctcttccggtgattttcggtggcccgggtgcagttgtggtacgatcaaaggcgcaactcaaattgcgagctgttagctcgctggcctcgcttttataccaggagctttagcggctcgtacactgagcgcaatggtcagctctctggcatccagagctttagcaggcagggagcaggcggcgggtttggccaagtcgcggcccagcgtagacccaaagcaggcaaaccgaaccggattttcgatgactgacttaaggttttttcagccgaatttcggcaagtggtccgatgctcgggccagcggttcaaagggtggaatggaatgggagttttatcacagatttatctctcagaccctggtcgtttgtttactcgttcacgtacgaaattcataggaaaaacattgacgtacgtgaaaattgaaatttacatgttgattttgccagttggttttagtggctccgagactcacagctgctgaatcggcttggatcagcttggagttgggtgtccaactctttcccgacat

SEQ ID NO: 19898 - DNA, 366 bp, DROSOPHILA
atgaaagcctcgctagctctagtgttctgtgtttgtgtcggtcttgcggcagctgctcctgaaaaaacctacaccaacaagtacgacagtgtcaacgtggatgaagttctgggcaacaaccgagtgttgggtaattatctcaagtgcctgatggacaagggcccatgcacagcagagggtcgtgaacttaagcgccttttacccgacgcccttcattccgactgctcaaagtgcacggaagtccaacgcaaaaactcacaaaaggtaatcaactaccttcgcgccaacaaagccggcgaatggaagctcctcctgaacaagtacgatccccaaggcatctacagagcaaagcacgagggacactga

SEQ ID NO: 19899 - protein, 121 aa, DROSOPHILA
MKASLALVFCVCVGLAAAAPEKTYTNKYDSVNVDEVLGNNRVLGNYLKCLMDKGPCTAEGRELKRLLPDALHSDCSKCTEVQRKNSQKVINYLRANKAGEWKLLLNKYDPQGIYRAKHEGH

SEQ ID NO: 19900 - DNA, 3930 bp, DROSOPHILA
aagcgccgccgccagcgtgccgaggaggcgatggccagacgccgtgacttcaaccgaaccgatcaggttctgggcagcgattacttgagcaaataccggagtggtggacccggtggactaaccagtagtcgcacgcccgccgacgggctgctgcgcgatggcgacggcagctttgactatgcggcagtggcttcttcctctgcactgggcgtaccgcgatccctgtcggaggagatcaacgaccgtttcggtgtgagcactcaggtgcaggtgggattccgagaccccgactacgaggcggagacagatggtcgaattgtcggcccaccaccccgaggactcttcgacgatgtctagactttggatatggataactctttatttcaattcgttaccgagtatctcaatatttcgctcgcgcttaagtatttcccgatgccactgctgctgctgctgttcctttacacccatgtagaccattcagttgaataaaccactaaagaggattcttatccatctttcgaagggagtagcgcggttcgttgctgctctcctggctagtgtccagaccactatccgtgctggtgtcctgcgcctccacgttcatcgagatgtccgtctccgatgagtagcttgagctgattgattcttctagatcaacatttgtgctatcctggtcgtcttccgacgtcggttttccactctgcagttgcgatatgggatgcggatttatgcgctttcggccgcgcagatagccactgcgagaggtaactggagtagtcggaaaatacatcttggtgccttgacttcaatgacttgaatgacttgaatgatgacggcctgtcagaaaggaaagctgtcactttcgtaaggcaactctaaaaaatgattgccaacaaaatatagattttcgatattgagcgcttagcctcaaattcaattcaatccagaatatttatatattaatgtttaggtttatgcaatgccttttgaacggtataaaaatatgcaaaatgctgttggtaatcttgtctgcttataaatcaacatttattcgtaacccagaaatcacagcaattgcaacatgagcttaacaaaggtggacatatttcttctgtacgtgtgtgaatgataaataatcgaacagtgaagaatccatataggaaatatgtacaaccgacgggcctcgaagcacaatatgctaaggcccaaagatccaatgtgttgtgccttcctaatgggttcccctgctagcctgttttggtgttcatgtgtgatcttgagtgggaagttaatcctattattcatcgccgccaccctcttcgtcttcatcgaattcgccctcctcatcggcagtcgcctcctggtactgctgatattcagaaaccaagtcgttcatgttgctctcggcctctgtgaattccatttcgtccattccctcgccggtgtaccaatgcaagaaggccttccttcggaacatggcggtgaactgctccgaaacccgtttgaatagctcctgaatggcggtggagttgccaatgaaggtggccgacatcttgagacctctgggcggaatatcgcacaccgctgtcttgcagttattcgggatccattccacgaagaagctgctgttcttgttctgaatgttgagcatctgctcgtccacctccttcatggacatgcggccacggaagatggcggcgacggtcagatagcgaccatgtcgcggatcgcacgcagccatcatgttcttggcatcgaacatctgctgggtcagctccggaacggtaagggcccggtattgttgcgatcctcgcgaggtgagcggtgcgaatccgggcatgaagaagtgcagccgggggaagggtaccatgttcacggccagcttgcgaagatcagcgttcagctggccagggaagcgcaggcaggtcgtcacaccagacatggtggccgaaaccagatggttcaggtcaccgtaggtgggcgtggtcagcttcagtgtgcggaagcagatgtcatacaacgcctcgttgtcgatgcagtacgtctcatcggtgttctccaccagctgatgcacactcagggtggcattgtagggctccaccaccgtatcggacaccttgggcgagggcaccaccgagaaggtgttcatgatgcggtccgggtactcctcgcggatcttcgagatcagcagggttcccatgccggagccagtgccgccacccagcgagtgggtcagctggaagccctgttggagaaaagtagggtaaactttttcagataaattcccaaacccccaaaacttacctgaaggcaatcgcatccctcggactcctttcgcaccacatccaagacggaatccaccagttcagcaccctcggtgtaatgacccttggcccagttgttgcctgctcccgattggccaaacacaaaattgtccggccggaagatctggccaaaggcgccagaacgaaccgaatccatggtgccgggctccaggtccacgagaattgcgcgtggcacatacttggcaccggtggcttcattgtagtatacattgatgcgctccagctggagatcactatcgccgtagtacgttccggtcgcatctatacagtgctcatccgagattacctcccagaatttaccaccgatctggttaccgcattgaccggcctgaatgtgtacaatttcacgcattttgatagtaaagttagggcccctttttcacaccgaaaaaatggtacaaaaaaaaatcgagcttttaaaacagtctgagtggggcaaaaatcggcaaaagactgaatatttaaacgtataatttttcaggtttagattttagtcgtgtacgtgctagctgatactgaggtgaactgaacctggcttggattactacaccgaatgttcacaaataggctactacgatttccgacttcgacacatttcacacaccccgatttcagaaaactcagttctccgttttgagcacaaactttaatagtacttacatagataaacgaatatacggctaaaattcgagatgggatggatttggcggtgccttggaagcaatagaggattccaaggctaccgaccagatgatacgattgatattgacatggatgtcctggattttactcctttgtaaatgtttatatgggtgtataatgggatgggtcgattatttcttaagcaaaaactgccttttaaagactattaaccttgctctccaaacttatatgtattatgacccatcctggtttaaaaatctacgtagggaggaaggtttgtctaacaaccaaattttggcggcggatggttctctacaggattgtaactacgatttggtgatccattggctctggctcctacaatgaggagtcccacagctggctgtacggatatcagacggaggctcgcttcaggcacaaggtgctctcgataatgtcggtaggctgaaagtccgggtccacgaactgctcatgattcaggcacctggtgccacccatgcaggtgcaggaacacagggaggcggtctcatcgttctccgttgtgtagttgttctccagcagcttgccgtgcatattgtacgtggactcatcatcgaaggtcaccggctgggcatttccagccaagttctgagcatcctgctcatctctcttggcatcctctgcttgcctgtgattaaaaatccattaaataagatatttcctgcaatagaacatggactcacatggtcatgaatcggagcaccaatagattgatactggcggccaccacggccaagccgaataggatgaagaccaagctcagcgccacatagccaggcttattagttagagcttggtcgttctgcaatgccacataatcgccgaaaccaattgtcgtcaaggtgacaaaacaatagtagaagctatcgaagtagctcca

SEQ ID NO: 19901 - DNA, 1871 bp, DROSOPHILA
ggaaatcgtagtagcctatttgtgaacattcggtgtagtaatccaagccaggttcagttcacctcagtatcagctagcacgtacacgactaaaatctaaacctgaaaaattatacgtttaaatattcagtcttttgccgatttttgccccactcagactgttttaaaagctcgatttttttttgtaccattttttcggtgtgaaaaaggggccctaactttactatcaaaatgcgtgaaattgtacacattcaggccggtcaatgcggtaaccagatcggtggtaaattctgggaggtaatctcggatgagcactgtatagatgcgaccggaacgtactacggcgatagtgatctccagctggagcgcatcaatgtatactacaatgaagccaccggtgccaagtatgtgccacgcgcaattctcgtggacctggagcccggcaccatggattcggttcgttctggcgcctttggccagatcttccggccggacaattttgtgtttggccaatcgggagcaggcaacaactgggccaagggtcattacaccgagggtgctgaactggtggattccgtcttggatgtggtgcgaaaggagtccgagggatgcgattgccttcagggcttccagctgacccactcgctgggtggcggcactggctccggcatgggaaccctgctgatctcgaagatccgcgaggagtacccggaccgcatcatgaacaccttctcggtggtgccctcgcccaaggtgtccgatacggtggtggagccctacaatgccaccctgagtgtgcatcagctggtggagaacaccgatgagacgtactgcatcgacaacgaggcgttgtatgacatctgcttccgcacactgaagctgaccacgcccacctacggtgacctgaaccatctggtttcggccaccatgtctggtgtgacgacctgcctgcgcttccctggccagctgaacgctgatcttcgcaagctggccgtgaacatggtacccttcccccggctgcacttcttcatgcccggattcgcaccgctcacctcgcgaggatcgcaacaataccgggcccttaccgttccggagctgacccagcagatgttcgatgccaagaacatgatggctgcgtgcgatccgcgacatggtcgctatctgaccgtcgccgccatcttccgtggccgcatgtccatgaaggaggtggacgagcagatgctcaacattcagaacaagaacagcagcttcttcgtggaatggatcccgaataactgcaagacagcggtgtgcgatattccgcccagaggtctcaagatgtcggccaccttcattggcaactccaccgccattcaggagctattcaaacgggtttcggagcagttcaccgccatgttccgaaggaaggccttcttgcattggtacaccggcgagggaatggacgaaatggaattcacagaggccgagagcaacatgaacgacttggtttctgaatatcagcagtaccaggaggcgactgccgatgaggagggcgaattcgatgaagacgaagagggtggcggcgatgaataataggattaacttcccactcaagatcacacatgaacaccaaaacaggctagcaggggaacccattaggaaggcacaacacattggatctttgggccttagcatattgtgcttcgaggcccgtcggttgtacatatttcctatatggattcttcactgttcgattatttatcattcacacacgtacagaagaaatatgtccacctttgttaagctcatgttgcaattgctgtgatttctgggttacgaataaatgttgatttataagcagacaagattaccaacagcattttgcatattttt

SEQ ID NO: 19902 - protein, 446 aa, DROSOPHILA
MREIVHIQAGQCGNQIGGKFWEVISDEHCIDATGTYYGDSDLQLERINVYYNEATGAKYVPRAILVDLEPGTMDSVRSGAFGQIFRPDNFVFGQSGAGNNWAKGHYTEGAELVDSVLDVVRKESEGCDCLQGFQLTHSLGGGTGSGMGTLLISKIREEYPDRIMNTFSVVPSPKVSDTVVEPYNATLSVHQLVENTDETYCIDNEALYDICFRTLKLTTPTYGDLNHLVSATMSGVTTCLRFPGQLNADLRKLAVNMVPFPRLHFFMPGFAPLTSRGSQQYRALTVPELTQQMFDAKNMMAACDPRHGRYLTVAAIFRGRMSMKEVDEQMLNIQNKNSSFFVEWIPNNCKTAVCDIPPRGLKMSATFIGNSTAIQELFKRVSEQFTAMFRRKAFLHWYTGEGMDEMEFTEAESNMNDLVSEYQQYQEATADEEGEFDEDEEGGGDE

SEQ ID NO: 19903 - DNA, 2838 bp, DROSOPHILA
tccagttgcttgttacttgttactgtataaattagtttatgcaaatgcattgtaattgttttacatcttgatcaagccaacgaatagtttagcattattgcatttacatttaacgcattttgcttgtcatgcttttcacaagcttatctcaatgctttacatcatattctcattcgaatgaaatattgaaacaaaatcagtgacaacaatacgtatacgtaatggtcaatagcaaacagtcaacagttcgtatacgtaataaaaatatcaatttgtttcccaagtttagctcttgcttaaattcgatttttgttagtctgataatacacatatatgtatgtatacttataaactgcctactatcaatgagtttgccttcgaaagcaaagcaaactgcttacttacaatgatttgcagttttcaagcgaagcaaataagcgtcatgtttgaattctattacattaaaccttaactgagcgccaacaagtagacaattgcgagcgattccatatcattttaaacgagtgtgtcacaatgtggtgttccccctctttggaagcccccagcccaaaccaaatgtgctgacccataatgaagtccactcatgctcattcttatcatcatcgaaaggggagagctatcgcatagtacatatatgtttggagtatctttctagaatgagttgatcaacagaggcgcgatggctttatgctgactcacgattacgatacaattgagaaaaaagccggctgaacggcgagaatgttttggactcggcccaaaatggagacgagtggtgaatactattactctctcaaatttgagctcggaactgatcggctctgctgggaactgcgatgatctataaaagcaagtggatcggcaatgaaagagcagttctagaacaggtcgcgatcgcaaaccaaccgtatatacatatatatatatatatacatctcagttgcattagacccgtacaaacaaatactaaatacaaattatggatcgttggctaaatcgcgttgctgttgtcactggcgccagttcgggaatcggagctgcctgttgcaaggatttggtgtccaagggcttggtggtcgtgggtcttgcacgtcgcgaggaccgtctgcaggagctgaaggcttcgctgccagcggaccaggccagtcgtttccatggacgcaaatgcgatgtgagccaggagcaggaggtgatcgatgcgttcgcatggatcgatgcaacactgggcggtgccgatgtgctggtcaacaacgctggcattgttcgcctcggtgtgggcatcacccacgagggtaatggcgctgatcttcgtgccattctggataccaatgtcctgggcgtttcgtggtgcacccgcgaggctttcaaatcactgaagagacgcaatgttaacgatggacacatcctgattgtcaacagtgtggccggacaccgggtgatcaacaacccaggcatcaccatgggcatgtattcgccatcgaagtacgcagtcaccgctctcacggaggtgctgcgtcaggagttccacaacaacaagacccagaccaagattacggtaagtgcgcagagagagattagcttaaagttgacatttcgattacccccttttccgataaatatccattgtgattttacagagcatcagtcccggtgccgtggacaccgagatcatcgacaaggaggctctcgttggcattcccgactttccaatgctccgctctgaggatgtggccgatgccattagctactgcatccagaccccgccaaatgtccagattcacgagctgaccatcaagcctgtcggcgaaaccctctagactctagatttcccactggatgcttctgctatttgtgtttacaacaaggaagtgtcatatgaagttgatctactatattttatttttattaaaaatatatatatatctatatatatatatgtatgtatgcatgtaccaaacgttatgtgattaaaattctttagcaaaccaagtcccaattgtatctaactattcttcaatttattgcctagatcagaccacaatttatgtgctgtaatagaaacatttgttgatcaaacaaattgtaatcatttttccgtagattagatatttttctattttttgtttgcccatggttcacactaagtattattgtttacaatttgattttgcttacttaccattaagtgtaagataaatatacagctactaaacctaaggtcccacagtcgtgtagggcctttttgtgggctccacatgttggcgctgtgggcgtggcgatcggatctgaaaatagggaaaaaaatacataacaatcagataaatttaggcagtggttggtttctgagactacctcaataatatgtgtattagaactaaaagtaatcttaactggtctcctcatctctgttttcaatggattgcttgttcattgggtaacaaaaaaaaaaaagacgaaaaaccccaagtttacactctcaacaattttattttctggcattcatagtatttatcttatatcacaacaatttaaataatgctcagctaatgtggcacggtgttagaaagtagaaatcagctgccccaaacaaacagatatgtataattgaaacgctttcactgcactgcgcttctgttattctacgtccgtgccagccaatcaacactgtaccacatatgtatattttcaattaattgcacactcttaattgatcgcatttacacaattaactgagggccatgtgttgttgcactatacatagtagatctttcgcggcaagcaatcgatttggaggcacgaattcgttttgcggcacag

SEQ ID NO: 19904 - DNA, 756 bp, DROSOPHILA
atggatcgttggctaaatcgcgttgctgttgtcactggcgccagttcgggaatcggagctgcctgttgcaaggatttggtgtccaagggcttggtggtcgtgggtcttgcacgtcgcgaggaccgtctgcaggagctgaaggcttcgctgccagcggaccaggccagtcgtttccatggacgcaaatgcgatgtgagccaggagcaggaggtgatcgatgcgttcgcatggatcgatgcaacactgggcggtgccgatgtgctggtcaacaacgctggcattgttcgcctcggtgtgggcatcacccacgagggtaatggcgctgatcttcgtgccattctggataccaatgtcctgggcgtttcgtggtgcacccgcgaggctttcaaatcactgaagagacgcaatgttaacgatggacacatcctgattgtcaacagtgtggccggacaccgggtgatcaacaacccaggcatcaccatgggcatgtattcgccatcgaagtacgcagtcaccgctctcacggaggtgctgcgtcaggagttccacaacaacaagacccagaccaagattacgagcatcagtcccggtgccgtggacaccgagatcatcgacaaggaggctctcgttggcattcccgactttccaatgctccgctctgaggatgtggccgatgccattagctactgcatccagaccccgccaaatgtccagattcacgagctgaccatcaagcctgtcggcgaaaccctctag

SEQ ID NO: 19905 - protein, 251 aa, DROSOPHILA
MDRWLNRVAVVTGASSGIGAACCKDLVSKGLVVVGLARREDRLQELKASLPADQASRFHGRKCDVSQEQEVIDAFAWIDATLGGADVLVNNAGIVRLGVGITHEGNGADLRAILDTNVLGVSWCTREAFKSLKRRNVNDGHILIVNSVAGHRVINNPGITMGMYSPSKYAVTALTEVLRQEFHNNKTQTKITSISPGAVDTEIIDKEALVGIPDFPMLRSEDVADAISYCIQTPPNVQIHELTIKPVGETL

SEQ ID NO: 19906 - DNA, 12130 bp, DROSOPHILA
aatctatgttacgttcctaaacattttgttttgctctgccgccgtttttactgtcaacacgtcacatttcaaatgcaactgcaaattgcattaagtgaatgaaagagaggggtgtgttaaataggtggcggagggtgtaatgtcgtggacaaagttcgcaaaacgaggaagtgtgcgtgagcggaaagagcaagagaactagagagagagacgagaaggatagagaaaatgtaccggttgacgcacatagcactcacacacattctaaaaacgatctctcccaaaaattattgccactgtgtgcgtgtcttttatcacaacaagagaaacacgcggttcgctctcaaaaagcacgttcgctaacagctcattgtacactgacaaaaatgatgggatattcacaatgttaaccttaaattgagattgtaattttgctaaacaagtgtaaaacacaatatttgatattcgaacggatatttcatgtttacgctcacgcaagttatttgaagcaaaacatttatactagatcttctatcttaaaaactaagtacttttggagtttatcattaaagagacgactcatctgtcttggcaaattctatcaaaatatttttcgtttatcaaaattaaatttgtaagaaggtgaatcaactgggtttgatgaaaatgcttaaagtatgtttcacttgttttgagtccaaaacattttttgtatataagcactgccaaaaatgcttcattaactagatgtgttttggatttttgacataaatcatttgttcttttatcttaaattttcggtctgaatgtttctttatctgattaaaggatttgatttagtggaccttgatgcgacagttatcctgccagcgtatatctcgccgatataggtgtatattacaatccggtcgctttttgcgctgctgttatccaagtttctgatgtgagcagcagagctgaaaagcgcgaaattcgctgagcgaaaactatttaacaaccgtaagttgcacggtcgtgattagtctcgtggcgctgctcgaaggcaaaagaagcaaccaggcgttacggtggatcgaaattcgaataataatacggcagtgatcaaatcgagtgataaatgcaaacaacgcatattgacgtgataaacaagtggcaagaataaacaaaacattttggtcaaattgaaatcttcgcttcgcgcccgcaaccttgcgagaatctcaacatattttgcgacatcaggaaacaacagtctttgtcgcaatatggcctctccagcgaatccatcgagcaatcacaaaatgaacggaaatgggtgagtttgcctaaacaaatgtgcacatagttctgatcgattgtgttgcataattctgcaaattgttcaccatgcacttgccaactttagacatctgttgtctagctacccgctttcacttttctgcccgccgcatatctggcaaatgtctcgccaaagtgccaaaagaccgtatgtatgtatgtatgtacatatagccgcatatagtgaatagttttaatttagaccaacgctacttggccattcggtgccaatgccactcgattttgttttcttttctcttctcacgcacgcttacgtttgcaaatctgccggcgagccaaaatatcatttgttttttatcttcagtgttcttctgcaattagcattagcatttttattttcgggttttcctccaaaagatcacatagaaaaatgttttgtcgtctatcatttttcgcgaggaaacaccaccaaaaatgatgacatctttgccaatattaaagtactcctcttaaaatgtcttttataacacacaaagaatattttatcccaaccagcaagtatccggtttggaattaaagatttaaaaaaatacgcctatcacaaatgaataagattacttactcttgccttaactttgtaacaacaataaaaccatataaatacaaaatatttcttttaatgatataaatttgtgcctaaaattcaggactttaaattaaaaaattttgcactaaataaaatgtaggcggatataaagtgtaatacaattcaagctcttttatctaatatatctgactgtgtgaaaacttttccataaatacatttgtataatataagggtatacgaactccgtcattagcaccttcgttaattttgcttttgttttgctttacttctgtgttcacaagtgtcgccgttcgataagagtgaaaatgttatcccatcgttacaatcaagtttccacaatccaaactattcataaaactgagaaatatgcagaaaaatagggataatattgaatatgtttcgtgtcacaattgtaataatatccataggcatttgcaatgtcattacaagcaaaatacattaattagtagaccgagtagttaagcacgtgtcgccacatagtcacatacgaccttgtttcggagcacctttggaatttcagtgcggagaaatgcaatagctaaatacacttggagaaacgcgactaaagtacaaattgtgcgatctcaaggacacatctaaccgtcggtaaaagaatacccactgttatagtgtgttatcagttacccacgctggcttatcaatcaaaacaacgagcccctccttcgattgcccttatcgcgtattgaatttcatagcttacttttgggggaatcaaaaactgtagcctacttttaagttcgttttgctcaacaaagaacttttcgtgtaagtatcgtatacgtgattttttatgtagaatgtgtgtatagttagcaaatattactggtaacagatcaaatatagaagagaaaacttgaaatgaatgtttttaaatttattacttagctgttctttttatatgatcttatgctaaacatcgatttacaaaaaaatatctcaatttgttatatggacttgcaagttactgaaaaatgtattataatttattatctattaaatgtcactacccatccacttaagttactgtaatcatttttgttgttttgacaaataaattccagttaaataggaaaaaactaagccctgatttacttgcactcatttgcaattagttcagactcagtgtgatggcttgtctattatagagactcctataaataataatcagttctagaaattatttatatttatgttcgtaaaaaaccacaacgatttagattatttaaatgtaaaagctattaatattaacagtttgcgttctcctgaccagtcataagcgaagcaaatgtaactgacatttgttaccgtttattgtttgtcacgaactcagttagattcacttctctgtttcagagctgatttgcgattggtcgttgcttggcggtgtgtccatgtcgtatacgtaatgtgaaacggattagctcgttaagatcagattggaaccagctgttgagcagaaacggcagtcacgtttatagctctctagcccagctagatcgcaaattaatccattatcagtcacttttcttatcagcccagacaacaacagaccaactgacatcgcatcaattgagacagatcctccccctgttgaacgatttcattatttctgaacttagtacacactcagcttgtcatgcatatcaccaagtgtctattcagattttcccactcccgggcgctccattgggcttcgcagaaactaaatcagtatgcgattaggaggtgcatcagtcaccgaaggctcaggtgaggcgagatagtctgacactgataaagggcccgtcctgctatggcacgttcgttttagccagatagagcgatagacggcgagccttctgaatcacctgatgctgtctcatccccagaaactactcacactgcacaaaagtcagacttttcaagaacaatttcgatattacactcattcctttgcattgattttaaataatacgtcatttccataatacgacgttttgaataagtggactcatttgaccggaaatgggaaatatactcacttcatacttttaataataatgcgttcattcaagtagtaaccaacgtcaagttctaattacgagaacatatcttcttttgcaattgagtccaatccaactcatacgaacttgaattcattataaaatacgctgtgatgtatgtaaaaaaataaattagtaatgactacactactacaaattctttcattgtaaatgttttaatttacaattccttaaatatgaataaattttctaaacaaaactagttttagataacatagtatttatttgctttagagccaatttcctgcctatctcaataatgaataatctttcttccaaatcaaaaattatttataatcgtttttggcaacaatcataagttagtgagggtcttaaataccacgtcaattcatttcagggtgattctatcttatcgccctattttcgagatttcagaagagcgaggctttagaaaatcaggctaaagtatttacggtttccttttcaccacggcaaaatgaacaaaattttccatattggaatataatgagaccctagtgcttcgccaattgtataattctctctactgcccaataattttctcaatcaatcaatgcaaatgtgacagagtttacgcatcaataaatcttatttatttgcgttctcaactaaaaaggcaaacagaaaacacgattttagccaattttcagctgtgcttcagcttctttcccccaaagggaacacttggtaactctgttccgggcggatctttgcgaaaatcttatttaaatttaaatctccggcacttggatcgaggcagtcggatcgttgccttcaaacgatcaacatcgcaggggctttatggcgataaagcagcgcttttgattaggaacgagagtgtatatagtccgcgttcacatctatatacatatagtaatctggtgcacaaaacaatacagatagtgagcgagttataaaaactcgtagtcagctcagcaaattgccaataataaaagtgagtgaaatgcgaaaacaaactacaaattaatttgaaactgaaaaagtacctttacaagtaattgtaatttggtttgtaactctcgactgaaaaatacaacgcgagctgaatatacaaaagcaattaaattataattttcaatacaaattgctgtggttgctgtcgttttccctcatatctgctgatattttccctgagctttttttatcgcgttgaaaacgtgaattctcgttatttttaccacagatcagcgacttgcggtgtcagtgatctgtggtccctgggtatttagaatttaaatggacttgcggacagaaatcccacaccgaatagtatataaactgctgtctagtgtcaacgcttcaagtctcgtttttgcactgccaaaaaccacttttttttttattccaatatgaattgcagctaatttgaactgtgaatttcattaggaatcgagtgaatagctgaaagtagctgatccagcccgactggaagatgtacactttctgttgctaaacctatttaatcttatcaatatcaatatcaatttcattatattctttctaagaaagtttctaagttctttctatatgtgcacttcaagctgctgacttcaacgaggcaatcagttttttttttttatcagtatccctgaacttgtccaaaaacaagttaagtgcacttaactatatagaggtgaaatgattcttaaaactgaagagccttgaatgccgctgtatttcaagtgaaattccatcagaagattacttcaagatctattttcaatatcaatgcaataaacaatgcccatgataacgaatatttgagttatcttcgagattaagttcaatgctttccagttttatgagcaatcgataaacctttattgtccacttgaagattgaagattaaggctccagtggttcataatgttactaggtcaaattttcccctttatttaattaagattaaaacgcagtacttaagccactcaatatgaatccttgtattgcaaatcattttatttaatttgtttaacttaattactaattatttccctcacgcatgaacgtttcgtttgcagctaactgcaaacctttttacgattcaataacctttcgaaggcctttcgatcggcatttgaacggctaatcaaagcaaaaacgcacagtatctaaaacaagttaattcaacctgatgcaagttaattcttaatgacattacctgtttttgtgtgtcttgtgtgtttcttcgttttcctcgcggacttttcaacatgtcattccaaacccatcaggcatttgttagaattttcgactaagccaacaaaccgtgctttataatggctagttgagtgattaaattaatcggcaattatacgaacgcgttgaatggcccacataacgattaaaatcgtccttgaatgattttggcaaagttttgtttttcaagcccagttcaaagatctgaattaactgacttttggctattgtattcaaacaaaaacgtcatgcgaggcacttatcactgccatcgatgacgacaatgaaattttataatacacatctatataaacaaatcataaagtcactggcaaacataatagcccaactaaatggtgagagtgcgaataagcattcagaaaagttaatgatttcgttcacgcaccttaaattgttgtttaaacaatagttgcttcatgatcgggctgcatttttatgatttatatggaatttaagacggaattgtgtgatttttgagtaatgcggaatcggaagtccacgtaggggggaattcaaaattcgaaaagttgttaatacaataatgttttccaatgcctgacacgtagggccagctgtagcgcctgctatttgtcatccatggttatctgaaatgtttttcgaaaagagccataaatcaaatattggttgagtacgccgagcggaacaagaaagtaaatatctacaaaaaactcaatggagtgtgtctggaagtgtagtaagtgttataagtctatgatcccaacttgcaaatgccgaatatgacttcgctaatggaatcataaatactaaccacttgtgacgtatgtattagatcaatgatttagttgcacctgctagttgctgtcgtcacagaaagattgaaacaatgaacttctctctttgtggttctcattaccgtgcggctcaatttaaattgcacaattgtttcgcctatttgagttccctttgttttctgatgccccatagggttatatcatcgtagtgcgataattcatcatacacttaatgttccataaaatacatttgtacatttcgtgtgcaatatggtggccttagccgttcgagtttgagttctactggcttccgataatggctctccaagctgcgcttaagttttccaatcccatcacataatcccctttttgcgactcaaatttccaaatatgacgtatctgtatatccatacattcgttaatctctcgaaagcaatccttattcagcgaatcagttcaatgaagactcgttatgtcggtccacagagtggcattcgtgcaaaacgtcgcaattccggtccagaatttggggccagacgacacacgtgtcactaacacacaacccactctaattatagacttgaaaatgtatcagcttgattagtttggatataaataaaatgtcaggcgaatgtcaccattcttcggtgacctcaaatcgggtacagcgcgattaaaccgcactgcaatgcaaatcgctcagatatcgggctatactcattaaatttctggataactggttagtttccaattccaaaaaaaagtttccacacttgccatcgtaagtggagcattacctattagcatttaaactaggcctaaaatccccgaaaattacttcttatcagtaagtacagtgggaccttgctcaggcaaatatctatatggtaactatagatgatcaaaagttgcgggtgccgctttaaataggtgttatagttatgaatatatattcaaaggtcctaaaccatgaatattcaaacatcagttaacgatatgcaaatgatgggtgtgccaaaaacccagtcgaatgccccttgccaccgggcaactgtgtaattaccaaggcacttagaaccgaaaccgataccaatatgccgattgagcaggtaatgaatggctgacttataaatatatatatgtatatatgtgttcacgagacttgaagcaggtgaacccgacaattacgtttggggccactttgacgtttttaaaaatagaccgaacgcgcccccaaagcgcaaccgtcgatcgatcgagcgatccgagcaagcaaccccactcaaccccactaaaccccacccatcgccacagcggcggatccgatgacttggatccaagaaatcatcgccttgtcccccgcccgaagatcgctcgttcagccgatcgctggtcgtcgtagtcgcactctccgtcgcattcgtagattaaattagttttataaaaatggaatcgagcggaacagttagaagtattcttgcgctgactggcgctggttgtgcttgtgttgttcagtttgagttctgggatcgcgagcatatcctgtgcgccaaaggatatacagcatatatcaggatatatcagcagcctcagcaacgtatttcgtattttcattcacgcagattgaaagttcgttgctttattagccgcgtgaattgtccagtgaaagtatgttcaagctaccgaccatcagcctgctcctcgtgagctggagttgcctggtggccttgtcccaggccaagacctacagcctgcccgatctcaccaccgactataacaatgccattcccgtcgacgaggaggaggcacaggatccgttcgccagctggtaagttcaccgcaagacttccggactctggtggccaccaatcgtcgcatcgtcgagactgtgaggcagcaccaggttttcagcttgagtgctttcctttcacacggcaccataaacgtgacgtgttggttgttcgtcgtgcattagctttagccgtatctgatcggcagatacgattcatcgatgctttggacaggtgttcagctaagcatcaccacctggatacggatactcgtgctggcgcgcttttatatccatttaactcgagaattatttgcactaattagtgccgtcgttgttcgtgtgtgtgtgtgtttactgtatgggaatgggaataagccgcttttatgctctggcttacgtaagtctcatccgggattttttcggctcaggctgggcaaataaatttaaattcacttataatgaaattaattttcaaaagagataaatgagctatagatacttcctgtttttatatataattttgtttattttccagtaaaatctactgcgagggcaatctgctgcacaccatccaaacggcagtgcccaaactatttgcggattcgaaaacgtttgtggacatgaagctgaacaattcgcccgacaagaccctcgaggactttaatgccatgatggaggccaagaatcagacgccaagcagtgaggatctcaagcagtttgtcgatgtgagtacaaaaggcagccaatctctgtcagaaactgaacggtggtcaaccattttgcagaagtacttcagtgcaccgggcaccgagcttgagaaatggacgcccaccgactggaaggagaatcccagtttcctcgacctgatctccgacccagatctgaagcaatggggcgtcgagctgaatagcatttggaaggacttgggacgcaaaatgaaggacgaggtgtcaaagaatcccgaatactactcaatcattcccgtgccaaatccagtgatcgtgcccggcggtcgtttcattgagttctactactgggactcctactggatcatccgtggacttctctacagccagatgtttgacaccgcgcgcggcatgattgagaacttcttttccattgtcaatcggttcggttttattccaaacggcggtcgagtctactaccacggtcgctcccagccgccacttctaaccggtatggtcaagtcgtacgtggacttcaccaacgatgacaagttcgccatcgatgccctggacacgctggagcacgagttcgagttctttgtgaacaaccacaatgtcacggtgaagaatcacagcctgtgtgtgtaccgcgattcgtcgtccggaccgcgaccagaatcctaccgagaggatgtggagaccggcgaggagttccccacggatgaggccaaggaactgcattacagtgaactcaaggcaggcgccgaatcgggcatggactttagctcgcgctggttcatctcaccgactggaaccaatgatggcaaccggagcgctctgagcaccacctccattgtgcccgtcgacctgaatgcctatctctactggaacgccaagttgattgccgagttccattccaaagcgggcaacaccaaaaaggtcaccgaatacgagaccaaggccgagaaactccttctgggtatccaagaagttttgtggaacgaggaggccggtgtctggttggactacgatatgattaaccagaagcctcgcgattactacacgcccaccaatctatctccactgtgggtgaaggccttcaacatttcggagtccgaaaagatatcggcttcggttatggcctacattgagaggaacaagctggacagcttccctggcggagttcccaacacgctgagctacaccggagaacagtgggatgcccccaatgtgtgggcaccgatgcagtacatcctggtcgagggcctaaacaacctgaacactcccgaggccaagaatatgtcactgaagtgggccaccaggtgggtgaagacaaactttgcggcgtttagcaaggacaggcacatgtacgagaaggtgagtgtagagtttactttgatcatattaatcatagtaataatgattgactaaatcccaatagtacaacgccgatgagttcggagttggaggcggcggtggcgagtacgaggtacagactggattcggttggtccaacggtgtgatcatcgagtggctgagcaagcacgggcgcgacatttccattggatccggttgtggctgcctagcaggtgaaaagcggcagtagaaagaatctgtagccaggccagaacgcaatccatcagacatcattgtcagcatcatcacaggctcgaagccaaagcttattcaaaaaattgtatttagatatttgtatattattaaggctccaatcagaagcgctcatcaactgctcatccttaggctaagaaaatgctgtctctctcgctctgcgcaatctttatacctttaaaagccgctgtctataaccaatatctgtaccgcgaaccatcgacatctcgagccaagcaccacgaaccacagcaccacagttacagcaccgccaggaatcaagatctgaagtccgccatccgtcgagcatctgtgtactgtctgttgtccatgtagtaaaccacgtccagtccacgtttgcacactcgtgtgacttgtccaaattcaagaaataagaacgcaaagaacgctatctatcaagttgaggattcacgagtaagtgtccaattggatcattctatgtggttgatttgtgtttgtgaatgtcaaggcaatgtttagtgtaaccaccaccaagcaccagatccagagcacactaccccataacacctaaaacagactgatccatggtatatgtacccttatagactaaatggcggctatagaaagctaaccacatattcaatcctggcttgacttgcatgcataaaaacgagcttccaggaaactgctcaaataaccctaactaacccttctaaaagtgtacatatgaaatgaaatttggggcagcagtttcctacgcctttgatttacacactgccatcaattcttactgatctgtgtcttctactcttccaatccaggtaatcgtatgatgggcatcgtgggcgtggcagctgtcactatagttgctctgatagcaggtcgtgttctatggtgaggtaagcgaaatcgaattgaaatctagctatctcccggcgacgggctaattgggtaatcatttttctatctcttccgcagacaatgtgtgccaaaac

SEQ ID NO: 19907 - DNA, 1948 bp, DROSOPHILA
taagttgcacggtcgtgattagtctcgtggcgctgctcgaaggcaaaagaagcaaccaggcgttacggtggatcgaaattcgaataataatacggcagtgatcaaatcgagtgataaatgcaaacaacgcatattgacgtgataaacaagtggcaagaataaacaaaacattttggtcaaattgaaatcttcgcttcgcgcccgcaaccttgcgagaatctcaacatattttgcgacatcaggaaacaacagtctttgtcgcaatatggcctctccagcgaatccatcgagcaatcacaaaatgaacggaaatggtaaaatctactgcgagggcaatctgctgcacaccatccaaacggcagtgcccaaactatttgcggattcgaaaacgtttgtggacatgaagctgaacaattcgcccgacaagaccctcgaggactttaatgccatgatggaggccaagaatcagacgccaagcagtgaggatctcaagcagtttgtcgataagtacttcagtgcaccgggcaccgagcttgagaaatggacgcccaccgactggaaggagaatcccagtttcctcgacctgatctccgacccagatctgaagcaatggggcgtcgagctgaatagcatttggaaggacttgggacgcaaaatgaaggacgaggtgtcaaagaatcccgaatactactcaatcattcccgtgccaaatccagtgatcgtgcccggcggtcgtttcattgagttctactactgggactcctactggatcatccgtggacttctctacagccagatgtttgacaccgcgcgcggcatgattgagaacttcttttccattgtcaatcggttcggttttattccaaacggcggtcgagtctactaccacggtcgctcccagccgccacttctaaccggtatggtcaagtcgtacgtggacttcaccaacgatgacaagttcgccatcgatgccctggacacgctggagcacgagttcgagttctttgtgaacaaccacaatgtcacggtgaagaatcacagcctgtgtgtgtaccgcgattcgtcgtccggaccgcgaccagaatcctaccgagaggatgtggagaccggcgaggagttccccacggatgaggccaaggaactgcattacagtgaactcaaggcaggcgccgaatcgggcatggactttagctcgcgctggttcatctcaccgactggaaccaatgatggcaaccggagcgctctgagcaccacctccattgtgcccgtcgacctgaatgcctatctctactggaacgccaagttgattgccgagttccattccaaagcgggcaacaccaaaaaggtcaccgaatacgagaccaaggccgagaaactccttctgggtatccaagaagttttgtggaacgaggaggccggtgtctggttggactacgatatgattaaccagaagcctcgcgattactacacgcccaccaatctatctccactgtgggtgaaggccttcaacatttcggagtccgaaaagatatcggcttcggttatggcctacattgagaggaacaagctggacagcttccctggcggagttcccaacacgctgagctacaccggagaacagtgggatgcccccaatgtgtgggcaccgatgcagtacatcctggtcgagggcctaaacaacctgaacactcccgaggccaagaatatgtcactgaagtgggccaccaggtgggtgaagacaaactttgcggcgtttagcaaggacaggcacatgtacgagaagtacaacgccgatgagttcggagttggaggcggcggtggcgagtacgaggtacagactggattcggttggtccaacggtgtgatcatcgagtggctgagcaagcacgggcgcgacatttccattggatccggttgtggctgcctagcaggtgaaaagcggcagtag

SEQ ID NO: 19908 - protein, 548 aa, DROSOPHILA
MNGNGKIYCEGNLLHTIQTAVPKLFADSKTFVDMKLNNSPDKTLEDFNAMMEAKNQTPSSEDLKQFVDKYFSAPGTELEKWTPTDWKENPSFLDLISDPDLKQWGVELNSIWKDLGRKMKDEVSKNPEYYSIIPVPNPVIVPGGRFIEFYYWDSYWIIRGLLYSQMFDTARGMIENFFSIVNRFGFIPNGGRVYYHGRSQPPLLTGMVKSYVDFTNDDKFAIDALDTLEHEFEFFVNNHNVTVKNHSLCVYRDSSSGPRPESYREDVETGEEFPTDEAKELHYSELKAGAESGMDFSSRWFISPTGTNDGNRSALSTTSIVPVDLNAYLYWNAKLIAEFHSKAGNTKKVTEYETKAEKLLLGIQEVLWNEEAGVWLDYDMINQKPRDYYTPTNLSPLWVKAFNISESEKISASVMAYIERNKLDSFPGGVPNTLSYTGEQWDAPNVWAPMQYILVEGLNNLNTPEAKNMSLKWATRWVKTNFAAFSKDRHMYEKYNADEFGVGGGGGEYEVQTGFGWSNGVIIEWLSKHGRDISIGSGCGCLAGEKRQ

SEQ ID NO: 19909 - DNA, 8136 bp, DROSOPHILA
tacttttaataataatgcgttcattcaagtagtaaccaacgtcaagttctaattacgagaacatatcttcttttgcaattgagtccaatccaactcatacgaacttgaattcattataaaatacgctgtgatgtatgtaaaaaaataaattagtaatgactacactactacaaattctttcattgtaaatgttttaatttacaattccttaaatatgaataaattttctaaacaaaactagttttagataacatagtatttatttgctttagagccaatttcctgcctatctcaataatgaataatctttcttccaaatcaaaaattatttataatcgtttttggcaacaatcataagttagtgagggtcttaaataccacgtcaattcatttcagggtgattctatcttatcgccctattttcgagatttcagaagagcgaggctttagaaaatcaggctaaagtatttacggtttccttttcaccacggcaaaatgaacaaaattttccatattggaatataatgagaccctagtgcttcgccaattgtataattctctctactgcccaataattttctcaatcaatcaatgcaaatgtgacagagtttacgcatcaataaatcttatttatttgcgttctcaactaaaaaggcaaacagaaaacacgattttagccaattttcagctgtgcttcagcttctttcccccaaagggaacacttggtaactctgttccgggcggatctttgcgaaaatcttatttaaatttaaatctccggcacttggatcgaggcagtcggatcgttgccttcaaacgatcaacatcgcaggggctttatggcgataaagcagcgcttttgattaggaacgagagtgtatatagtccgcgttcacatctatatacatatagtaatctggtgcacaaaacaatacagatagtgagcgagttataaaaactcgtagtcagctcagcaaattgccaataataaaagtgagtgaaatgcgaaaacaaactacaaattaatttgaaactgaaaaagtacctttacaagtaattgtaatttggtttgtaactctcgactgaaaaatacaacgcgagctgaatatacaaaagcaattaaattataattttcaatacaaattgctgtggttgctgtcgttttccctcatatctgctgatattttccctgagctttttttatcgcgttgaaaacgtgaattctcgttatttttaccacagatcagcgacttgcggtgtcagtgatctgtggtccctgggtatttagaatttaaatggacttgcggacagaaatcccacaccgaatagtatataaactgctgtctagtgtcaacgcttcaagtctcgtttttgcactgccaaaaaccacttttttttttattccaatatgaattgcagctaatttgaactgtgaatttcattaggaatcgagtgaatagctgaaagtagctgatccagcccgactggaagatgtacactttctgttgctaaacctatttaatcttatcaatatcaatatcaatttcattatattctttctaagaaagtttctaagttctttctatatgtgcacttcaagctgctgacttcaacgaggcaatcagttttttttttttatcagtatccctgaacttgtccaaaaacaagttaagtgcacttaactatatagaggtgaaatgattcttaaaactgaagagccttgaatgccgctgtatttcaagtgaaattccatcagaagattacttcaagatctattttcaatatcaatgcaataaacaatgcccatgataacgaatatttgagttatcttcgagattaagttcaatgctttccagttttatgagcaatcgataaacctttattgtccacttgaagattgaagattaaggctccagtggttcataatgttactaggtcaaattttcccctttatttaattaagattaaaacgcagtacttaagccactcaatatgaatccttgtattgcaaatcattttatttaatttgtttaacttaattactaattatttccctcacgcatgaacgtttcgtttgcagctaactgcaaacctttttacgattcaataacctttcgaaggcctttcgatcggcatttgaacggctaatcaaagcaaaaacgcacagtatctaaaacaagttaattcaacctgatgcaagttaattcttaatgacattacctgtttttgtgtgtcttgtgtgtttcttcgttttcctcgcggacttttcaacatgtcattccaaacccatcaggcatttgttagaattttcgactaagccaacaaaccgtgctttataatggctagttgagtgattaaattaatcggcaattatacgaacgcgttgaatggcccacataacgattaaaatcgtccttgaatgattttggcaaagttttgtttttcaagcccagttcaaagatctgaattaactgacttttggctattgtattcaaacaaaaacgtcatgcgaggcacttatcactgccatcgatgacgacaatgaaattttataatacacatctatataaacaaatcataaagtcactggcaaacataatagcccaactaaatggtgagagtgcgaataagcattcagaaaagttaatgatttcgttcacgcaccttaaattgttgtttaaacaatagttgcttcatgatcgggctgcatttttatgatttatatggaatttaagacggaattgtgtgatttttgagtaatgcggaatcggaagtccacgtaggggggaattcaaaattcgaaaagttgttaatacaataatgttttccaatgcctgacacgtagggccagctgtagcgcctgctatttgtcatccatggttatctgaaatgtttttcgaaaagagccataaatcaaatattggttgagtacgccgagcggaacaagaaagtaaatatctacaaaaaactcaatggagtgtgtctggaagtgtagtaagtgttataagtctatgatcccaacttgcaaatgccgaatatgacttcgctaatggaatcataaatactaaccacttgtgacgtatgtattagatcaatgatttagttgcacctgctagttgctgtcgtcacagaaagattgaaacaatgaacttctctctttgtggttctcattaccgtgcggctcaatttaaattgcacaattgtttcgcctatttgagttccctttgttttctgatgccccatagggttatatcatcgtagtgcgataattcatcatacacttaatgttccataaaatacatttgtacatttcgtgtgcaatatggtggccttagccgttcgagtttgagttctactggcttccgataatggctctccaagctgcgcttaagttttccaatcccatcacataatcccctttttgcgactcaaatttccaaatatgacgtatctgtatatccatacattcgttaatctctcgaaagcaatccttattcagcgaatcagttcaatgaagactcgttatgtcggtccacagagtggcattcgtgcaaaacgtcgcaattccggtccagaatttggggccagacgacacacgtgtcactaacacacaacccactctaattatagacttgaaaatgtatcagcttgattagtttggatataaataaaatgtcaggcgaatgtcaccattcttcggtgacctcaaatcgggtacagcgcgattaaaccgcactgcaatgcaaatcgctcagatatcgggctatactcattaaatttctggataactggttagtttccaattccaaaaaaaagtttccacacttgccatcgtaagtggagcattacctattagcatttaaactaggcctaaaatccccgaaaattacttcttatcagtaagtacagtgggaccttgctcaggcaaatatctatatggtaactatagatgatcaaaagttgcgggtgccgctttaaataggtgttatagttatgaatatatattcaaaggtcctaaaccatgaatattcaaacatcagttaacgatatgcaaatgatgggtgtgccaaaaacccagtcgaatgccccttgccaccgggcaactgtgtaattaccaaggcacttagaaccgaaaccgataccaatatgccgattgagcaggtaatgaatggctgacttataaatatatatatgtatatatgtgttcacgagacttgaagcaggtgaacccgacaattacgtttggggccactttgacgtttttaaaaatagaccgaacgcgcccccaaagcgcaaccgtcgatcgatcgagcgatccgagcaagcaaccccactcaaccccactaaaccccacccatcgccacagcggcggatccgatgacttggatccaagaaatcatcgccttgtcccccgcccgaagatcgctcgttcagccgatcgctggtcgtcgtagtcgcactctccgtcgcattcgtagattaaattagttttataaaaatggaatcgagcggaacagttagaagtattcttgcgctgactggcgctggttgtgcttgtgttgttcagtttgagttctgggatcgcgagcatatcctgtgcgccaaaggatatacagcatatatcaggatatatcagcagcctcagcaacgtatttcgtattttcattcacgcagattgaaagttcgttgctttattagccgcgtgaattgtccagtgaaagtatgttcaagctaccgaccatcagcctgctcctcgtgagctggagttgcctggtggccttgtcccaggccaagacctacagcctgcccgatctcaccaccgactataacaatgccattcccgtcgacgaggaggaggcacaggatccgttcgccagctggtaagttcaccgcaagacttccggactctggtggccaccaatcgtcgcatcgtcgagactgtgaggcagcaccaggttttcagcttgagtgctttcctttcacacggcaccataaacgtgacgtgttggttgttcgtcgtgcattagctttagccgtatctgatcggcagatacgattcatcgatgctttggacaggtgttcagctaagcatcaccacctggatacggatactcgtgctggcgcgcttttatatccatttaactcgagaattatttgcactaattagtgccgtcgttgttcgtgtgtgtgtgtgtttactgtatgggaatgggaataagccgcttttatgctctggcttacgtaagtctcatccgggattttttcggctcaggctgggcaaataaatttaaattcacttataatgaaattaattttcaaaagagataaatgagctatagatacttcctgtttttatatataattttgtttattttccagtaaaatctactgcgagggcaatctgctgcacaccatccaaacggcagtgcccaaactatttgcggattcgaaaacgtttgtggacatgaagctgaacaattcgcccgacaagaccctcgaggactttaatgccatgatggaggccaagaatcagacgccaagcagtgaggatctcaagcagtttgtcgatgtgagtacaaaaggcagccaatctctgtcagaaactgaacggtggtcaaccattttgcagaagtacttcagtgcaccgggcaccgagcttgagaaatggacgcccaccgactggaaggagaatcccagtttcctcgacctgatctccgacccagatctgaagcaatggggcgtcgagctgaatagcatttggaaggacttgggacgcaaaatgaaggacgaggtgtcaaagaatcccgaatactactcaatcattcccgtgccaaatccagtgatcgtgcccggcggtcgtttcattgagttctactactgggactcctactggatcatccgtggacttctctacagccagatgtttgacaccgcgcgcggcatgattgagaacttcttttccattgtcaatcggttcggttttattccaaacggcggtcgagtctactaccacggtcgctcccagccgccacttctaaccggtatggtcaagtcgtacgtggacttcaccaacgatgacaagttcgccatcgatgccctggacacgctggagcacgagttcgagttctttgtgaacaaccacaatgtcacggtgaagaatcacagcctgtgtgtgtaccgcgattcgtcgtccggaccgcgaccagaatcctaccgagaggatgtggagaccggcgaggagttccccacggatgaggccaaggaactgcattacagtgaactcaaggcaggcgccgaatcgggcatggactttagctcgcgctggttcatctcaccgactggaaccaatgatggcaaccggagcgctctgagcaccacctccattgtgcccgtcgacctgaatgcctatctctactggaacgccaagttgattgccgagttccattccaaagcgggcaacaccaaaaaggtcaccgaatacgagaccaaggccgagaaactccttctgggtatccaagaagttttgtggaacgaggaggccggtgtctggttggactacgatatgattaaccagaagcctcgcgattactacacgcccaccaatctatctccactgtgggtgaaggccttcaacatttcggagtccgaaaagatatcggcttcggttatggcctacattgagaggaacaagctggacagcttccctggcggagttcccaacacgctgagctacaccggagaacagtgggatgcccccaatgtgtgggcaccgatgcagtacatcctggtcgagggcctaaacaacctgaacactcccgaggccaagaatatgtcactgaagtgggccaccaggtgggtgaagacaaactttgcggcgtttagcaaggacaggcacatgtacgagaaggtgagtgtagagtttactttgatcatattaatcatagtaataatgattgactaaatcccaatagtacaacgccgatgagttcggagttggaggcggcggtggcgagtacgaggtacagactggattcggttggtccaacggtgtgatcatcgagtggctgagcaagcacgggcgcgacatttccattggatccggttgtggctgcctagcaggtgaaaagcggcagtagaaagaatctgtagccaggccagaacgcaatccatcagacatcattgtcagcatcatcacaggctcgaagccaaagcttattcaaaaaattgtatttagatatttgtatattattaaggctccaatcagaagcgctcatcaactgctcatccttaggctaagaaaatgctgtctctctcgctctgcgcaatctttatacctttaaaagccgctgtctataaccaatatctgtaccgcgaaccatcgacatctcgagccaagcaccacgaaccacagcaccacagttacagcaccgccaggaatcaagatctgaagtccgccatccgtcgagcatctgtgtactgtctgttgtccatgtagtaaaccacgtccagtccacgtttgcacactcgtgtgacttgtccaaattcaagaaataagaacgcaaagaacgctatctatcaagttgaggattcacgagtaagtgtccaattggatcattctatgtggttgatttgtgtttgtgaatgtcaaggcaatgtttagtgtaaccaccaccaagcaccagatccagagcacactaccccataacacctaaaacagactgatccatggtatatgtacccttatagactaaatggcggctatagaaagctaaccacatattcaatcctggcttgacttgcatgcataaaaacgagcttccaggaaactgctcaaataaccctaactaacccttctaaaagtgtacatatgaaatgaaatttggggcagcagtttcctacgcctttgatttacacactgccatcaattcttactgatctgtgtcttctactcttccaatccaggtaatcgtatgatgggcatcgtgggcgtggcagctgtcactatagttgctctgatagcaggtcgtgttctatggtgaggtaagcgaaatcgaattgaaatctagctatctcccggcgacgggctaattgggtaatcatttttctatctcttccgcagacaatgtgtgccaaaac

SEQ ID NO: 19910 - DNA, 1892 bp, DROSOPHILA
aaatgcgaaaacaaactacaaattaatttgaaactgaaaaagtacctttacaaattgaaagttcgttgctttattagccgcgtgaattgtccagtgaaagtatgttcaagctaccgaccatcagcctgctcctcgtgagctggagttgcctggtggccttgtcccaggccaagacctacagcctgcccgatctcaccaccgactataacaatgccattcccgtcgacgaggaggaggcacaggatccgttcgccagctgtaaaatctactgcgagggcaatctgctgcacaccatccaaacggcagtgcccaaactatttgcggattcgaaaacgtttgtggacatgaagctgaacaattcgcccgacaagaccctcgaggactttaatgccatgatggaggccaagaatcagacgccaagcagtgaggatctcaagcagtttgtcgataagtacttcagtgcaccgggcaccgagcttgagaaatggacgcccaccgactggaaggagaatcccagtttcctcgacctgatctccgacccagatctgaagcaatggggcgtcgagctgaatagcatttggaaggacttgggacgcaaaatgaaggacgaggtgtcaaagaatcccgaatactactcaatcattcccgtgccaaatccagtgatcgtgcccggcggtcgtttcattgagttctactactgggactcctactggatcatccgtggacttctctacagccagatgtttgacaccgcgcgcggcatgattgagaacttcttttccattgtcaatcggttcggttttattccaaacggcggtcgagtctactaccacggtcgctcccagccgccacttctaaccggtatggtcaagtcgtacgtggacttcaccaacgatgacaagttcgccatcgatgccctggacacgctggagcacgagttcgagttctttgtgaacaaccacaatgtcacggtgaagaatcacagcctgtgtgtgtaccgcgattcgtcgtccggaccgcgaccagaatcctaccgagaggatgtggagaccggcgaggagttccccacggatgaggccaaggaactgcattacagtgaactcaaggcaggcgccgaatcgggcatggactttagctcgcgctggttcatctcaccgactggaaccaatgatggcaaccggagcgctctgagcaccacctccattgtgcccgtcgacctgaatgcctatctctactggaacgccaagttgattgccgagttccattccaaagcgggcaacaccaaaaaggtcaccgaatacgagaccaaggccgagaaactccttctgggtatccaagaagttttgtggaacgaggaggccggtgtctggttggactacgatatgattaaccagaagcctcgcgattactacacgcccaccaatctatctccactgtgggtgaaggccttcaacatttcggagtccgaaaagatatcggcttcggttatggcctacattgagaggaacaagctggacagcttccctggcggagttcccaacacgctgagctacaccggagaacagtgggatgcccccaatgtgtgggcaccgatgcagtacatcctggtcgagggcctaaacaacctgaacactcccgaggccaagaatatgtcactgaagtgggccaccaggtgggtgaagacaaactttgcggcgtttagcaaggacaggcacatgtacgagaagtacaacgccgatgagttcggagttggaggcggcggtggcgagtacgaggtacagactggattcggttggtccaacggtgtgatcatcgagtggctgagcaagcacgggcgcgacatttccattggatccggttgtggctgcctagcaggtgaaaagcggcagtag

SEQ ID NO: 19911 - protein, 596 aa, DROSOPHILA
MFKLPTISLLLVSWSCLVALSQAKTYSLPDLTTDYNNAIPVDEEEAQDPFASCKIYCEGNLLHTIQTAVPKLFADSKTFVDMKLNNSPDKTLEDFNAMMEAKNQTPSSEDLKQFVDKYFSAPGTELEKWTPTDWKENPSFLDLISDPDLKQWGVELNSIWKDLGRKMKDEVSKNPEYYSIIPVPNPVIVPGGRFIEFYYWDSYWIIRGLLYSQMFDTARGMIENFFSIVNRFGFIPNGGRVYYHGRSQPPLLTGMVKSYVDFTNDDKFAIDALDTLEHEFEFFVNNHNVTVKNHSLCVYRDSSSGPRPESYREDVETGEEFPTDEAKELHYSELKAGAESGMDFSSRWFISPTGTNDGNRSALSTTSIVPVDLNAYLYWNAKLIAEFHSKAGNTKKVTEYETKAEKLLLGIQEVLWNEEAGVWLDYDMINQKPRDYYTPTNLSPLWVKAFNISESEKISASVMAYIERNKLDSFPGGVPNTLSYTGEQWDAPNVWAPMQYILVEGLNNLNTPEAKNMSLKWATRWVKTNFAAFSKDRHMYEKYNADEFGVGGGGGEYEVQTGFGWSNGVIIEWLSKHGRDISIGSGCGCLAGEKRQ

SEQ ID NO: 19912 - DNA, 8323 bp, DROSOPHILA
ctgaatcacctgatgctgtctcatccccagaaactactcacactgcacaaaagtcagacttttcaagaacaatttcgatattacactcattcctttgcattgattttaaataatacgtcatttccataatacgacgttttgaataagtggactcatttgaccggaaatgggaaatatactcacttcatacttttaataataatgcgttcattcaagtagtaaccaacgtcaagttctaattacgagaacatatcttcttttgcaattgagtccaatccaactcatacgaacttgaattcattataaaatacgctgtgatgtatgtaaaaaaataaattagtaatgactacactactacaaattctttcattgtaaatgttttaatttacaattccttaaatatgaataaattttctaaacaaaactagttttagataacatagtatttatttgctttagagccaatttcctgcctatctcaataatgaataatctttcttccaaatcaaaaattatttataatcgtttttggcaacaatcataagttagtgagggtcttaaataccacgtcaattcatttcagggtgattctatcttatcgccctattttcgagatttcagaagagcgaggctttagaaaatcaggctaaagtatttacggtttccttttcaccacggcaaaatgaacaaaattttccatattggaatataatgagaccctagtgcttcgccaattgtataattctctctactgcccaataattttctcaatcaatcaatgcaaatgtgacagagtttacgcatcaataaatcttatttatttgcgttctcaactaaaaaggcaaacagaaaacacgattttagccaattttcagctgtgcttcagcttctttcccccaaagggaacacttggtaactctgttccgggcggatctttgcgaaaatcttatttaaatttaaatctccggcacttggatcgaggcagtcggatcgttgccttcaaacgatcaacatcgcaggggctttatggcgataaagcagcgcttttgattaggaacgagagtgtatatagtccgcgttcacatctatatacatatagtaatctggtgcacaaaacaatacagatagtgagcgagttataaaaactcgtagtcagctcagcaaattgccaataataaaagtgagtgaaatgcgaaaacaaactacaaattaatttgaaactgaaaaagtacctttacaagtaattgtaatttggtttgtaactctcgactgaaaaatacaacgcgagctgaatatacaaaagcaattaaattataattttcaatacaaattgctgtggttgctgtcgttttccctcatatctgctgatattttccctgagctttttttatcgcgttgaaaacgtgaattctcgttatttttaccacagatcagcgacttgcggtgtcagtgatctgtggtccctgggtatttagaatttaaatggacttgcggacagaaatcccacaccgaatagtatataaactgctgtctagtgtcaacgcttcaagtctcgtttttgcactgccaaaaaccacttttttttttattccaatatgaattgcagctaatttgaactgtgaatttcattaggaatcgagtgaatagctgaaagtagctgatccagcccgactggaagatgtacactttctgttgctaaacctatttaatcttatcaatatcaatatcaatttcattatattctttctaagaaagtttctaagttctttctatatgtgcacttcaagctgctgacttcaacgaggcaatcagttttttttttttatcagtatccctgaacttgtccaaaaacaagttaagtgcacttaactatatagaggtgaaatgattcttaaaactgaagagccttgaatgccgctgtatttcaagtgaaattccatcagaagattacttcaagatctattttcaatatcaatgcaataaacaatgcccatgataacgaatatttgagttatcttcgagattaagttcaatgctttccagttttatgagcaatcgataaacctttattgtccacttgaagattgaagattaaggctccagtggttcataatgttactaggtcaaattttcccctttatttaattaagattaaaacgcagtacttaagccactcaatatgaatccttgtattgcaaatcattttatttaatttgtttaacttaattactaattatttccctcacgcatgaacgtttcgtttgcagctaactgcaaacctttttacgattcaataacctttcgaaggcctttcgatcggcatttgaacggctaatcaaagcaaaaacgcacagtatctaaaacaagttaattcaacctgatgcaagttaattcttaatgacattacctgtttttgtgtgtcttgtgtgtttcttcgttttcctcgcggacttttcaacatgtcattccaaacccatcaggcatttgttagaattttcgactaagccaacaaaccgtgctttataatggctagttgagtgattaaattaatcggcaattatacgaacgcgttgaatggcccacataacgattaaaatcgtccttgaatgattttggcaaagttttgtttttcaagcccagttcaaagatctgaattaactgacttttggctattgtattcaaacaaaaacgtcatgcgaggcacttatcactgccatcgatgacgacaatgaaattttataatacacatctatataaacaaatcataaagtcactggcaaacataatagcccaactaaatggtgagagtgcgaataagcattcagaaaagttaatgatttcgttcacgcaccttaaattgttgtttaaacaatagttgcttcatgatcgggctgcatttttatgatttatatggaatttaagacggaattgtgtgatttttgagtaatgcggaatcggaagtccacgtaggggggaattcaaaattcgaaaagttgttaatacaataatgttttccaatgcctgacacgtagggccagctgtagcgcctgctatttgtcatccatggttatctgaaatgtttttcgaaaagagccataaatcaaatattggttgagtacgccgagcggaacaagaaagtaaatatctacaaaaaactcaatggagtgtgtctggaagtgtagtaagtgttataagtctatgatcccaacttgcaaatgccgaatatgacttcgctaatggaatcataaatactaaccacttgtgacgtatgtattagatcaatgatttagttgcacctgctagttgctgtcgtcacagaaagattgaaacaatgaacttctctctttgtggttctcattaccgtgcggctcaatttaaattgcacaattgtttcgcctatttgagttccctttgttttctgatgccccatagggttatatcatcgtagtgcgataattcatcatacacttaatgttccataaaatacatttgtacatttcgtgtgcaatatggtggccttagccgttcgagtttgagttctactggcttccgataatggctctccaagctgcgcttaagttttccaatcccatcacataatcccctttttgcgactcaaatttccaaatatgacgtatctgtatatccatacattcgttaatctctcgaaagcaatccttattcagcgaatcagttcaatgaagactcgttatgtcggtccacagagtggcattcgtgcaaaacgtcgcaattccggtccagaatttggggccagacgacacacgtgtcactaacacacaacccactctaattatagacttgaaaatgtatcagcttgattagtttggatataaataaaatgtcaggcgaatgtcaccattcttcggtgacctcaaatcgggtacagcgcgattaaaccgcactgcaatgcaaatcgctcagatatcgggctatactcattaaatttctggataactggttagtttccaattccaaaaaaaagtttccacacttgccatcgtaagtggagcattacctattagcatttaaactaggcctaaaatccccgaaaattacttcttatcagtaagtacagtgggaccttgctcaggcaaatatctatatggtaactatagatgatcaaaagttgcgggtgccgctttaaataggtgttatagttatgaatatatattcaaaggtcctaaaccatgaatattcaaacatcagttaacgatatgcaaatgatgggtgtgccaaaaacccagtcgaatgccccttgccaccgggcaactgtgtaattaccaaggcacttagaaccgaaaccgataccaatatgccgattgagcaggtaatgaatggctgacttataaatatatatatgtatatatgtgttcacgagacttgaagcaggtgaacccgacaattacgtttggggccactttgacgtttttaaaaatagaccgaacgcgcccccaaagcgcaaccgtcgatcgatcgagcgatccgagcaagcaaccccactcaaccccactaaaccccacccatcgccacagcggcggatccgatgacttggatccaagaaatcatcgccttgtcccccgcccgaagatcgctcgttcagccgatcgctggtcgtcgtagtcgcactctccgtcgcattcgtagattaaattagttttataaaaatggaatcgagcggaacagttagaagtattcttgcgctgactggcgctggttgtgcttgtgttgttcagtttgagttctgggatcgcgagcatatcctgtgcgccaaaggatatacagcatatatcaggatatatcagcagcctcagcaacgtatttcgtattttcattcacgcagattgaaagttcgttgctttattagccgcgtgaattgtccagtgaaagtatgttcaagctaccgaccatcagcctgctcctcgtgagctggagttgcctggtggccttgtcccaggccaagacctacagcctgcccgatctcaccaccgactataacaatgccattcccgtcgacgaggaggaggcacaggatccgttcgccagctggtaagttcaccgcaagacttccggactctggtggccaccaatcgtcgcatcgtcgagactgtgaggcagcaccaggttttcagcttgagtgctttcctttcacacggcaccataaacgtgacgtgttggttgttcgtcgtgcattagctttagccgtatctgatcggcagatacgattcatcgatgctttggacaggtgttcagctaagcatcaccacctggatacggatactcgtgctggcgcgcttttatatccatttaactcgagaattatttgcactaattagtgccgtcgttgttcgtgtgtgtgtgtgtttactgtatgggaatgggaataagccgcttttatgctctggcttacgtaagtctcatccgggattttttcggctcaggctgggcaaataaatttaaattcacttataatgaaattaattttcaaaagagataaatgagctatagatacttcctgtttttatatataattttgtttattttccagtaaaatctactgcgagggcaatctgctgcacaccatccaaacggcagtgcccaaactatttgcggattcgaaaacgtttgtggacatgaagctgaacaattcgcccgacaagaccctcgaggactttaatgccatgatggaggccaagaatcagacgccaagcagtgaggatctcaagcagtttgtcgatgtgagtacaaaaggcagccaatctctgtcagaaactgaacggtggtcaaccattttgcagaagtacttcagtgcaccgggcaccgagcttgagaaatggacgcccaccgactggaaggagaatcccagtttcctcgacctgatctccgacccagatctgaagcaatggggcgtcgagctgaatagcatttggaaggacttgggacgcaaaatgaaggacgaggtgtcaaagaatcccgaatactactcaatcattcccgtgccaaatccagtgatcgtgcccggcggtcgtttcattgagttctactactgggactcctactggatcatccgtggacttctctacagccagatgtttgacaccgcgcgcggcatgattgagaacttcttttccattgtcaatcggttcggttttattccaaacggcggtcgagtctactaccacggtcgctcccagccgccacttctaaccggtatggtcaagtcgtacgtggacttcaccaacgatgacaagttcgccatcgatgccctggacacgctggagcacgagttcgagttctttgtgaacaaccacaatgtcacggtgaagaatcacagcctgtgtgtgtaccgcgattcgtcgtccggaccgcgaccagaatcctaccgagaggatgtggagaccggcgaggagttccccacggatgaggccaaggaactgcattacagtgaactcaaggcaggcgccgaatcgggcatggactttagctcgcgctggttcatctcaccgactggaaccaatgatggcaaccggagcgctctgagcaccacctccattgtgcccgtcgacctgaatgcctatctctactggaacgccaagttgattgccgagttccattccaaagcgggcaacaccaaaaaggtcaccgaatacgagaccaaggccgagaaactccttctgggtatccaagaagttttgtggaacgaggaggccggtgtctggttggactacgatatgattaaccagaagcctcgcgattactacacgcccaccaatctatctccactgtgggtgaaggccttcaacatttcggagtccgaaaagatatcggcttcggttatggcctacattgagaggaacaagctggacagcttccctggcggagttcccaacacgctgagctacaccggagaacagtgggatgcccccaatgtgtgggcaccgatgcagtacatcctggtcgagggcctaaacaacctgaacactcccgaggccaagaatatgtcactgaagtgggccaccaggtgggtgaagacaaactttgcggcgtttagcaaggacaggcacatgtacgagaaggtgagtgtagagtttactttgatcatattaatcatagtaataatgattgactaaatcccaatagtacaacgccgatgagttcggagttggaggcggcggtggcgagtacgaggtacagactggattcggttggtccaacggtgtgatcatcgagtggctgagcaagcacgggcgcgacatttccattggatccggttgtggctgcctagcaggtgaaaagcggcagtagaaagaatctgtagccaggccagaacgcaatccatcagacatcattgtcagcatcatcacaggctcgaagccaaagcttattcaaaaaattgtatttagatatttgtatattattaaggctccaatcagaagcgctcatcaactgctcatccttaggctaagaaaatgctgtctctctcgctctgcgcaatctttatacctttaaaagccgctgtctataaccaatatctgtaccgcgaaccatcgacatctcgagccaagcaccacgaaccacagcaccacagttacagcaccgccaggaatcaagatctgaagtccgccatccgtcgagcatctgtgtactgtctgttgtccatgtagtaaaccacgtccagtccacgtttgcacactcgtgtgacttgtccaaattcaagaaataagaacgcaaagaacgctatctatcaagttgaggattcacgagtaagtgtccaattggatcattctatgtggttgatttgtgtttgtgaatgtcaaggcaatgtttagtgtaaccaccaccaagcaccagatccagagcacactaccccataacacctaaaacagactgatccatggtatatgtacccttatagactaaatggcggctatagaaagctaaccacatattcaatcctggcttgacttgcatgcataaaaacgagcttccaggaaactgctcaaataaccctaactaacccttctaaaagtgtacatatgaaatgaaatttggggcagcagtttcctacgcctttgatttacacactgccatcaattcttactgatctgtgtcttctactcttccaatccaggtaatcgtatgatgggcatcgtgggcgtggcagctgtcactatagttgctctgatagcaggtcgtgttctatggtgaggtaagcgaaatcgaattgaaatctagctatctcccggcgacgggctaattgggtaatcatttttctatctcttccgcagacaatgtgtgccaaaac

SEQ ID NO: 19913 - DNA, 1813 bp, DROSOPHILA
caaacgatcaacatcgcaggggctttatggcgataaagcagcgcttttgattaggaacgagagtgtatatagtccgcgttcacatctatatacatatagtaatctggtgcacaaaacaatacagatagtgagcgagttataaaaactcgtagtcagctcagcaaattgccaataataaaataaaatctactgcgagggcaatctgctgcacaccatccaaacggcagtgcccaaactatttgcggattcgaaaacgtttgtggacatgaagctgaacaattcgcccgacaagaccctcgaggactttaatgccatgatggaggccaagaatcagacgccaagcagtgaggatctcaagcagtttgtcgataagtacttcagtgcaccgggcaccgagcttgagaaatggacgcccaccgactggaaggagaatcccagtttcctcgacctgatctccgacccagatctgaagcaatggggcgtcgagctgaatagcatttggaaggacttgggacgcaaaatgaaggacgaggtgtcaaagaatcccgaatactactcaatcattcccgtgccaaatccagtgatcgtgcccggcggtcgtttcattgagttctactactgggactcctactggatcatccgtggacttctctacagccagatgtttgacaccgcgcgcggcatgattgagaacttcttttccattgtcaatcggttcggttttattccaaacggcggtcgagtctactaccacggtcgctcccagccgccacttctaaccggtatggtcaagtcgtacgtggacttcaccaacgatgacaagttcgccatcgatgccctggacacgctggagcacgagttcgagttctttgtgaacaaccacaatgtcacggtgaagaatcacagcctgtgtgtgtaccgcgattcgtcgtccggaccgcgaccagaatcctaccgagaggatgtggagaccggcgaggagttccccacggatgaggccaaggaactgcattacagtgaactcaaggcaggcgccgaatcgggcatggactttagctcgcgctggttcatctcaccgactggaaccaatgatggcaaccggagcgctctgagcaccacctccattgtgcccgtcgacctgaatgcctatctctactggaacgccaagttgattgccgagttccattccaaagcgggcaacaccaaaaaggtcaccgaatacgagaccaaggccgagaaactccttctgggtatccaagaagttttgtggaacgaggaggccggtgtctggttggactacgatatgattaaccagaagcctcgcgattactacacgcccaccaatctatctccactgtgggtgaaggccttcaacatttcggagtccgaaaagatatcggcttcggttatggcctacattgagaggaacaagctggacagcttccctggcggagttcccaacacgctgagctacaccggagaacagtgggatgcccccaatgtgtgggcaccgatgcagtacatcctggtcgagggcctaaacaacctgaacactcccgaggccaagaatatgtcactgaagtgggccaccaggtgggtgaagacaaactttgcggcgtttagcaaggacaggcacatgtacgagaagtacaacgccgatgagttcggagttggaggcggcggtggcgagtacgaggtacagactggattcggttggtccaacggtgtgatcatcgagtggctgagcaagcacgggcgcgacatttccattggatccggttgtggctgcctagcaggtgaaaagcggcagtag

SEQ ID NO: 19914 - protein, 515 aa, DROSOPHILA
MKLNNSPDKTLEDFNAMMEAKNQTPSSEDLKQFVDKYFSAPGTELEKWTPTDWKENPSFLDLISDPDLKQWGVELNSIWKDLGRKMKDEVSKNPEYYSIIPVPNPVIVPGGRFIEFYYWDSYWIIRGLLYSQMFDTARGMIENFFSIVNRFGFIPNGGRVYYHGRSQPPLLTGMVKSYVDFTNDDKFAIDALDTLEHEFEFFVNNHNVTVKNHSLCVYRDSSSGPRPESYREDVETGEEFPTDEAKELHYSELKAGAESGMDFSSRWFISPTGTNDGNRSALSTTSIVPVDLNAYLYWNAKLIAEFHSKAGNTKKVTEYETKAEKLLLGIQEVLWNEEAGVWLDYDMINQKPRDYYTPTNLSPLWVKAFNISESEKISASVMAYIERNKLDSFPGGVPNTLSYTGEQWDAPNVWAPMQYILVEGLNNLNTPEAKNMSLKWATRWVKTNFAAFSKDRHMYEKYNADEFGVGGGGGEYEVQTGFGWSNGVIIEWLSKHGRDISIGSGCGCLAGEKRQ

SEQ ID NO: 19915 - DNA, 3261 bp, DROSOPHILA
ttgcctgctcccgattggccaaacacaaaattgtccggccggaagatctggccaaaggcgccagaacgaaccgaatccatggtgccgggctccaggtccacgagaattgcgcgtggcacatacttggcaccggtggcttcattgtagtatacattgatgcgctccagctggagatcactatcgccgtagtacgttccggtcgcatctatacagtgctcatccgagattacctcccagaatttaccaccgatctggttaccgcattgaccggcctgaatgtgtacaatttcacgcattttgatagtaaagttagggcccctttttcacaccgaaaaaatggtacaaaaaaaaatcgagcttttaaaacagtctgagtggggcaaaaatcggcaaaagactgaatatttaaacgtataatttttcaggtttagattttagtcgtgtacgtgctagctgatactgaggtgaactgaacctggcttggattactacaccgaatgttcacaaataggctactacgatttccgacttcgacacatttcacacaccccgatttcagaaaactcagttctccgttttgagcacaaactttaatagtacttacatagataaacgaatatacggctaaaattcgagatgggatggatttggcggtgccttggaagcaatagaggattccaaggctaccgaccagatgatacgattgatattgacatggatgtcctggattttactcctttgtaaatgtttatatgggtgtataatgggatgggtcgattatttcttaagcaaaaactgccttttaaagactattaaccttgctctccaaacttatatgtattatgacccatcctggtttaaaaatctacgtagggaggaaggtttgtctaacaaccaaattttggcggcggatggttctctacaggattgtaactacgatttggtgatccattggctctggctcctacaatgaggagtcccacagctggctgtacggatatcagacggaggctcgcttcaggcacaaggtgctctcgataatgtcggtaggctgaaagtccgggtccacgaactgctcatgattcaggcacctggtgccacccatgcaggtgcaggaacacagggaggcggtctcatcgttctccgttgtgtagttgttctccagcagcttgccgtgcatattgtacgtggactcatcatcgaaggtcaccggctgggcatttccagccaagttctgagcatcctgctcatctctcttggcatcctctgcttgcctgtgattaaaaatccattaaataagatatttcctgcaatagaacatggactcacatggtcatgaatcggagcaccaatagattgatactggcggccaccacggccaagccgaataggatgaagaccaagctcagcgccacatagccaggcttattagttagagcttggtcgttctgcaatgccacataatcgccgaaaccaattgtcgtcaaggtgacaaaacaatagtagaagctatcgaagtagctccaaccctcgtatcgggaaaagactgctgctccagtggtgattattatggaggagagcattccggtggccaacatgagattcatttcggtggcatccgtacagcgagctccactggctctctttgcccgccttattatcacggatgcaaacttattcagacgttctccgatagactggaacatcaccagacccagcgggatgcccacctaataagggaatatctttagaagactggaaattgggattgtaagttcacttaccatagcatagcccatacaaaatgcttttcccggaattgtaactggcgtagaatgaccatatcctaaagaaagttacaacagaattataatctattcaataaatcatatttaatagataattaatttacctatcattgccagtacaaccgtgctgaaatagaaagctccagcgaatttccactgaggtccggccttgtggggcttattttcaatgatgacgatttccatcacacggaaatcctcgtcagtcacattgtactttctaacaaagttgttcttaacggctacaattgattaaataaattcattactaagaaattaggttaataaatcaacaagcttctcactctgtaggaattcccatcttttggcctccgttggtgactccagggaatcgaacacggcggctccaattaaaagataggtgaaagtgcataccaccagggaaagggtacggacattctgtcgcttcatcatatagtctcaaatataatcactacgatctataatcaattaatatattttgcaccacgcgcctttttcgttcagttaaagatgctgcgtctgacaaaatcgatagttgtcagcaaaacaaacacacagcatccgccaaaaatggttgatttcggttacagtggccgaataacatatgatacaatgaattttaaaaatttcatcattctttaaatatgtaataagttttcttttatctattgatttgaccgttaatctcaataaaggattgtgattttaccgttagtttatcacaacagaagcaacagaatttgatggcgttgccacttggcggtatctgttaactctgtacagctaaaaagctgtaatgtcacgataactaaggataataataatttttttaaaggatcaatatacacaaacaacataagagttttattacattttctttaattgcctttaaagtttttgtctttctaagccattttaacaatttaacattttgcagttagcagcgccgataacttgacagcctatcgattttcgggaaaagcaaacatatcgccagatctgatttgtttatgctaaaaaaaaaccacgcaagttccaaccgattggattgttgcagttggctgctgtgtctctgacgtcgacgtttccatgcttaattaaccggaaaatgttgcgaatacgtcggcggttcgctttggtaatttgctccggctgcctgctggttttcctcagcctgtacataatcctcaattttgcggcgccggcagccacccagataaaggtaaataaatgcttctaaatcaattcgaatgtataataacttctttattttagcagcccaactatgagaacattgagaacaagctgcatgagctggaaaatggtttgcaggagcacggggaggagatgcggaatctcagggcgcgtcttgccgaaacatccaatcgcgacgatccaataagacctccacttaaagtggctcgttccccga

SEQ ID NO: 19916 - DNA, 1023 bp, DROSOPHILA
atgatgaagcgacagaatgtccgtaccctttccctggtggtatgcactttcacctatcttttaattggagccgccgtgttcgattccctggagtcaccaacggaggccaaaagatgggaattcctacagaccgttaagaacaactttgttagaaagtacaatgtgactgacgaggatttccgtgtgatggaaatcgtcatcattgaaaataagccccacaaggccggacctcagtggaaattcgctggagctttctatttcagcacggttgtactggcaatgataggatatggtcattctacgccagttacaattccgggaaaagcattttgtatgggctatgctatggtgggcatcccgctgggtctggtgatgttccagtctatcggagaacgtctgaataagtttgcatccgtgataataaggcgggcaaagagagccagtggagctcgctgtacggatgccaccgaaatgaatctcatgttggccaccggaatgctctcctccataataatcaccactggagcagcagtcttttcccgatacgagggttggagctacttcgatagcttctactattgttttgtcaccttgacgacaattggtttcggcgattatgtggcattgcagaacgaccaagctctaactaataagcctggctatgtggcgctgagcttggtcttcatcctattcggcttggccgtggtggccgccagtatcaatctattggtgctccgattcatgaccatgcaagcagaggatgccaagagagatgagcaggatgctcagaacttggctggaaatgcccagccggtgaccttcgatgatgagtccacgtacaatatgcacggcaagctgctggagaacaactacacaacggagaacgatgagaccgcctccctgtgttcctgcacctgcatgggtggcaccaggtgcctgaatcatgagcagttcgtggacccggactttcagcctaccgacattatcgagagcaccttgtgcctgaagcgagcctccgtctga

SEQ ID NO: 19917 - protein, 340 aa, DROSOPHILA
MMKRQNVRTLSLVVCTFTYLLIGAAVFDSLESPTEAKRWEFLQTVKNNFVRKYNVTDEDFRVMEIVIIENKPHKAGPQWKFAGAFYFSTVVLAMIGYGHSTPVTIPGKAFCMGYAMVGIPLGLVMFQSIGERLNKFASVIIRRAKRASGARCTDATEMNLMLATGMLSSIIITTGAAVFSRYEGWSYFDSFYYCFVTLTTIGFGDYVALQNDQALTNKPGYVALSLVFILFGLAVVAASINLLVLRFMTMQAEDAKRDEQDAQNLAGNAQPVTFDDESTYNMHGKLLENNYTTENDETASLCSCTCMGGTRCLNHEQFVDPDFQPTDIIESTLCLKRASV

SEQ ID NO: 19918 - DNA, 3583 bp, DROSOPHILA
gcacaggaaacagcagcaggagcagcagcagcaacagccagcgggtggacaggactcttccgtggtccctattccctagtccgccatccttcgtcctccgtccaccgtccaccgttcgaatccaagtccagtgtccgctgtccgttgtccggcacgtgcactacgccaaaatggcaaacggaagttcaaaagagcaaagagcatgtaacgatatttcggttcccttttcagccattccgcatggccctacgattgcgggcaacaaatttgcaataagctatttttcaattttcaatttaggcaccaaggcgggtggacaaggatatgcaaagcggcgaccacatatcgccgagccataattcaacgcgagttgccacaatcgcattcgacccaaaggacaaatgagagtcctgcgagtgacccaaaccgtcagtcaggcgtaaagcgctaataattaacagcgattctgctttaccgacgaactaagcacccatcgacatggaagctttatttacgaatccgtccagaaggtaattctaaaacttattttttagattttccgacatcagcagaacatccaaactgattcccatgatgcacgccacgcatggaaataatggaagcagatgcttcttctaaaatctctgaacttattaggaagaagacagagtgcagtccacatgcacaatgtcttccttgtaagactctttcctggagtttatattgaagcaattgaccatcagcaggcaaagaagttgggtgtccatggaggccactcaaagtaggaacactactgaagtgacaaagccttgccgatagtcatgggtcagtagaagtttattatattacatatctgataatctgatcaggaaagctggtcacgaaagctgcttaaagtccatcgaaatgaaatattactaccttataccataggtaacacgaaacacattcatgtgtttgataatggattcaatgttttattagtttctcaataattgtttcacaccatgtagtgtcgtatatcaagattgcgttcccttagcttcaaatcgatccactgccggtacaacttgacgtttgtgtaaattccaagaagttgcgggccatcgcagcgagccgtgcgggtcaaaagaccggccaggtggaaacgatcatcgtgaccggaaagaggacacatcagcggcacagcggtcatgtccacatcaccgcagacgaagtcacccttgtcgccgccggcacacagcaggctatcgttgtgggcgtggcgtcgccccaagagggacaatcgcaacttggtcctgcattgatcgggtggtaggacgtagagtgtccaacgcttgggcaggattgcagctctaccaaaatcactcctctgccaaccggacacatagcactggctgtagttgtacattattcgcggaggcggcaagcaaatgggctgtacattaggagccagctggaaaggtttctccttgtccaccagaagtatcgctatgttgtgggccaatggcatttgagtgtaattgggatgcactaatgtctcaacaaccgatctttgctggtgcggctggggctccagctccacggcggcatcccattccccggccaacagacgaaccttctccatttccgaattctgaacgcagtgcgcggtggtgatcaccgccagcggagtgataagtgctccactgcagagataagtatccgacccgtagaccgccaccaaccagggaaactccccgaacttggcctcttgctgtttatatcccagcggtcgaaggtagtaccagagatcatggcgtcctccacacgggcagctcatcatctcctctggaattttcggagtcgggagctgttggtataaaagttcgacttttaaaaacttattgatttgattttacttcaggcaattaaatgaaattaagttaaatataacaacagtgttaagtgcttggccgctagaaactgaaaaacaaacgaatttttttcgtaatatgggtaaaatatatcatacaaatttaaattgtcagctagcataaaaaaatggttgatttctttgcatcaggtagggaataaaagaattttttcgataaatcgctttatttttttgaccggttgtaaccagttaatcattaaatgtggctgcaattcagaaagccaaccggtttaaaatccaaaaggtattaaatttaagagcgtcgaatcaaggattgtttgtttttttatttgatttaattccaatgcgatttaaaccatttttttagtcaagtttttgataccgcattccggaaaactttatgaaaatcgtaactttttcaatactcactttatcggggatattacagcacttttccatatagtgacaattctcatccaaagtcgttctgctgcgatccggatagaattttccgtccaccattaagccctcgttgcactgctcgtagggaacgcaatgcttttccggtccgcagactttggatgccgctatggagggcactagggagcctagaagacagatgaccacaatccgatagaagcacatatccgaggattccgattccgattccgtccctgaacaggtgccttcgccttgcacttgaactgcgcaactgggcgaccgatggcttttatagcctcgccaaagttcaagccgtacacaccgatttgattgggcaaaaaatagattgcgatccattaaagtgctaaaaatagtcgacattgtgctgggaaaaaaggggctggacctggacaatatgacaattggtttcggcggcaatgcactgagaaaatataatcacagtttataatacattctaggccagcaaatggtatttgcagttattggttctagcaaaagatagatttgatagatagttctgtccttaaagatactttgtgaagttgtcccttggaaagggtatccactctatgcccaattacgcagatgtatctggcactttccttagtctgccgccacttacacgtatccatatctattacattcgaatgggactgaaagtgggggaggatgcggatcagctgtgcactggcttagggattgtgtcatatcttaatgtacaatcgtcgcctaagtgcacgtaaattgaataaaatttcgacaaagtttaatacaccagacatgcacatgcacacaacactctgaggaaaatgaggtggcgacaagatggcttgggtttttccgggcagaaatctgcagtttgcctgccattcgatagacaacacccagctttcagcatctggacaaatgtatatatatatatatatatttgatgcaccgacttgtttagctgagatttacgcaacttaagcagattgtcaacaggaattgtgaggtatgagttcgaatcgaggaccctgaggtgggcgaacaagaatgccaggaggagagtacatgcgtcaaatgtgtagaaagttaacgtgtcctgtgcctgcctgctggtcctgtgcgaaacttaatttgttccatcgtgttgcaacacttctgaacagatgttatcctcgaggaaatgaatcctgttattgttgctggccgtccacttaaaacagatttatgaacatgtca

SEQ ID NO: 19919 - DNA, 1109 bp, DROSOPHILA
gcacctgttcagggacggaatcggaatcggaatcctcggatatgtgcttctatcggattgtggtcatctgtcttctaggctccctagtgccctccatagcggcatccaaagtctgcggaccggaaaagcattgcgttccctacgagcagtgcaacgagggcttaatggtggacggaaaattctatccggatcgcagcagaacgactttggatgagaattgtcactatatggaaaagtgctgtaatatccccgataaactcccgactccgaaaattccagaggagatgatgagctgcccgtgtggaggacgccatgatctctggtactaccttcgaccgctgggatataaacagcaagaggccaagttcggggagtttccctggttggtggcggtctacgggtcggatacttatctctgcagtggagcacttatcactccgctggcggtgatcaccaccgcgcactgcgttcagaattcggaaatggagaaggttcgtctgttggccggggaatgggatgccgccgtggagctggagccccagccgcaccagcaaagatcggttgttgagacattagtgcatcccaattacactcaaatgccattggcccacaacatagcgatacttctggtggacaaggagaaacctttccagctggctcctaatgtacagcccatttgcttgccgcctccgcgaataatgtacaactacagccagtgctatgtgtccggttggcagaggagtgattttggtagagctgcaatcctgcccaagcgttggacactctacgtcctaccacccgatcaatgcaggaccaagttgcgattgtccctcttggggcgacgccacgcccacaacgatagcctgctgtgtgccggcggcgacaagggtgacttcgtctgcggtgatgtggacatgaccgctgtgccgctgatgtgtcctctttccggtcacgatgatcgtttccacctggccggtcttttgacccgcacggctcgctgcgatggcccgcaacttcttggaatttacacaaacgtcaagttgtaccggcagtggatcgatttgaagctaagggaacgcaatcttgatatacgacactacatggtgtga

SEQ ID NO: 19920 - protein, 355 aa, DROSOPHILA
MCFYRIVVICLLGSLVPSIAASKVCGPEKHCVPYEQCNEGLMVDGKFYPDRSRTTLDENCHYMEKCCNIPDKLPTPKIPEEMMSCPCGGRHDLWYYLRPLGYKQQEAKFGEFPWLVAVYGSDTYLCSGALITPLAVITTAHCVQNSEMEKVRLLAGEWDAAVELEPQPHQQRSVVETLVHPNYTQMPLAHNIAILLVDKEKPFQLAPNVQPICLPPPRIMYNYSQCYVSGWQRSDFGRAAILPKRWTLYVLPPDQCRTKLRLSLLGRRHAHNDSLLCAGGDKGDFVCGDVDMTAVPLMCPLSGHDDRFHLAGLLTRTARCDGPQLLGIYTNVKLYRQWIDLKLRERNLDIRHYMV

SEQ ID NO: 19921 - DNA, 2934 bp, DROSOPHILA
aattcaattcagggatttaaaaaaaaaaaaccaaaaccaaatttagaaacactatcgaagatttacaagtataaacgatgtatgtatgtatgtatgtataagtacttcatgtcaaagtcaaagggcagatgctaaacaaatcgttcacaaagtacaaaacgtcagtcaaccaataagtaaactaaagcaagctacatatacactaaatcgaataaatcctaagtaatttatgtgaactaagctaaagaatcgatcacctattcgatggttctggatttcgtaatgcctctttgataccacgaaagcataactaactaacgaagtatttccctaaatccaatgcacatagacgaaatacaaagcgaaccgattaagtgcacagtaattttattagcaagttgatgtaacttggaccgtgtgagtctcctcacaaccccgtacgagtagttataaacataagcctgccgatgccaagtacatacacacaaacacccatacttactatcctgcacgacagtacaacgcacgagtcgaagaacgaacgccaatagtcatcatcatacaaacatacatataggtcgagctgcgcattttcgcacaccaatcgaatcgaataccaaattgaatacgaaccaactaatatgcataatttccgaaatattgtaacagttccatatactataaataaataaaacttcaaactaagctgaaatattgctcaacaaatgtacttttaatatatcaaaagcagcacgaaaaagagtaggcaaatcacagatatctatcattacttgaagaaatataaaaaactcataaaattgcattacacctataggatctttatcataaagtacccttgtgccatttacttgaatatattacgaaaataattgcctactcttgggagcaacctataaatgtagggaacctatcgatagttcggcacagcattctccaatcagaacagctgagtattcttattgctatcagttagcaaaagtaaaccggttgtttttctcactataagttctgttacttaatagaagggttctcttaaagaatatatatttacatatatggcttctgctacccaattgacccacagaggtatccatttggccggactgtacagatcttcttggtctaagcccttgttccgacatttggcaacaaagcctatactgtattcctattggcctagttcgtgttcttggagagttcgcgttgcgctggcaataaagaagattgattatgacattaagccgacttctttgctaaaaacagttagcggacatgcctatacggatgaatatagggaagtcaatccgatgcaaaaggttccctcgttgaagattggtaagtgaagcgagcaatttgagtatttcaaatctatgagttttgcggcattagatggccataccttgtgcgactcggtggctattatccactacctggaggaaactcgacctcagccagcacttctgccccaagatccggttaaaagagcaaagatccgtgaaattgtggagctcatttgctcgggcatccagccactgcaaaatgtatctgtcctagatcatataggcaaggatcagagtctgcaatgggcacaacactggatttctcgaggatttcagggtctcgaaaaggttctttcccattcggcgggcaaattctgtgtgggagatgagctcagcatggctgatatttgcctggtacctcaggtgcgcaatgccaggaggtaagaaacattaatttatttaaatttaactggatactgatttattttaaaactcctaaccagatacaaagctgacctgaccccatatcccaccatagtacgcttgaatcaggaactacaagaacttgatgtcttcaaagccactcatcccagtacccagccagattgtccacctgaattcgcaaaaaaataatcaaaacttaagatatattacattgcatttataaagatgcttgatattaaatggatttccaaagcacccagcacaagtcgaagtgaaagctcattgaattataatataatttttattagttttgtcatttttatataatcgttcttaaatgtgtagtgtgtaattcacgtaattcatttatgtaccgtcctaactttgcatttctaattttccatcctggatgcggatcgttataatgtttctgtgtatgtagtatgcacttattggctttcctggttggagtgtttctctgtgtttgtgtgtctgcgtgtgtatatatgtattcaacaaattttctataaatactattacatacatacagatgcgccaacgcattacataacataaccattacattcgatatacatgtatgttccgcactgtacctaacgtcggtaccgatccatcgcctacctagcttagctttcattttattattggccgtttagcgcgccattaccgtaaagttttagtcgcaatctgcattataatcttgttcattttcttattaattttctttttcattttcgttttcatttttttgttcgagtatgattcacttggggttatatagctatgcatatatatgtatgtagagaggagtaactgtttgcatacttttcgttcgcaattgtacagaatttcttatcgttttgtttaattgcaaaaattatgtttttctcgatttattaaaacttgaatgagctactttaaagaatcttcttgtagggataccttttgatttaattgtttaaagatttcactagactatttttctgttacttgtcgtacgttttggtttttggttttttttttttgttcaaatctatacctctttaaatgaaattgagcgaaatgaagaaaacctattttataccgtggttatgtgtgaacttttaccatagcgattttcaaatgctaaatgaataaatctataaaatcgtttgctttgctacttgat

SEQ ID NO: 19922 - DNA, 817 bp, DROSOPHILA
taaaccggttgtttttctcactataagttctgttacttaatagaagggttctcttaaagaatatatatttacatatatggcttctgctacccaattgacccacagaggtatccatttggccggactgtacagatcttcttggtctaagcccttgttccgacatttggcaacaaagcctatactgtattcctattggcctagttcgtgttcttggagagttcgcgttgcgctggcaataaagaagattgattatgacattaagccgacttctttgctaaaaacagttagcggacatgcctatacggatgaatatagggaagtcaatccgatgcaaaaggttccctcgttgaagattgatggccataccttgtgcgactcggtggctattatccactacctggaggaaactcgacctcagccagcacttctgccccaagatccggttaaaagagcaaagatccgtgaaattgtggagctcatttgctcgggcatccagccactgcaaaatgtatctgtcctagatcatataggcaaggatcagagtctgcaatgggcacaacactggatttctcgaggatttcagggtctcgaaaaggttctttcccattcggcgggcaaattctgtgtgggagatgagctcagcatggctgatatttgcctggtacctcaggtgcgcaatgccaggagatacaaagctgacctgaccccatatcccaccatagtacgcttgaatcaggaactacaagaacttgatgtcttcaaagccactcatcccagtacccagccagattgtccacctgaattcgcaaaaaaataa

SEQ ID NO: 19923 - protein, 246 aa, DROSOPHILA
MASATQLTHRGIHLAGLYRSSWSKPLFRHLATKPILYSYWPSSCSWRVRVALAIKKIDYDIKPTSLLKTVSGHAYTDEYREVNPMQKVPSLKIDGHTLCDSVAIIHYLEETRPQPALLPQDPVKRAKIREIVELICSGIQPLQNVSVLDHIGKDQSLQWAQHWISRGFQGLEKVLSHSAGKFCVGDELSMADICLVPQVRNARRYKADLTPYPTIVRLNQELQELDVFKATHPSTQPDCPPEFAKK

SEQ ID NO: 19924 - DNA, 3327 bp, DROSOPHILA
tttgcattcaagaggttacaaaataaatgcaaatcttatacaaaatggttgccttgcaaatctgcgtacaaagttctctgtaatcgagagtaatcgatatcttaaatttcggtttcggtataggagtagtgtctttatatatgtatgtagatctctccaaaaagggtctcacaaaaatatatccgattagagcgtgtgtgcggattagttgatgaatttgatgaggatgttcgaggaaacctgtgtaaacaactaagagtctaatgacattcacacgtatatatagtagttagtacattgtatataaaatcagtacacattaatgcttgtatattgaaccgtttgttgttagctgctttggtttggtttggaaatacttttaactgctacacacacacatctaaataggttggtggttccgtagacaactatagtcatacacatacacatatagttaggtatataatttgatatatcgtagttataattaggtggagattcggggcaaaccctcgtcgattccactgggattgtgtaatgccgttgattgtgttgtgcgtggggaccaaataatgtctgagagctggagagtgtatacaaatgtcgtatataggggttttctcctttcataactagcctagaagagttgcttgtgcttcgagttgagttttcgttaacattacgatctgggatcacatttgggtatatcaaacaatatagtagagagctaaagcttttccatcagccctgttctatgcgattttaagattcctttgcagggcttacaccataaacttggtggtcttcaaggggaagacgtagaatttggtttgtgcctaagacgtttgagcgaagaaaatgcttctggacaggatccattaaggtggtaagatgacagtagacgattgctgagtaagagttcattgttcaggaaggggttggtggtaattttgattatgttttcccattgcatggacaaccattgtccattatagctagcttagtccatcagtcgaacgccggcttgaacgtcatcggccatgctgactcccttctttttcttgccttcgccggcgggcttcttcttggtcaggactagggtttccggctcattctgcgactgctgacgcttgccatttccgctggctccgccaccaccacctccgccgcctccccctccgccgctgttgcttctcagcttgaaacgcgtcgtggccgccgccgcattgttgttggcgcaattgcatatggcatcgaagatccgcaccacgaatcctcgagcgcgattcaccaccttgccgttcttaaaatctggtatggcgaaacctgagaggttagtgcatgcgaggcgcagagagtacaaaaatacggaaataaagatcagtgatacgcaaaatacaagttaagtgcaacaaaatatggtcatgcaatcgagctggctgggttttttggaaaatgggtgaaaatggcgtgcgaatgcgtttatatattctaaattatatgctttcctcagttttaattgccatctgttaacaaccgtggaggaggcccacaacggtcgccctgtcatcagttagttaggtcagcccacttttatcaaacaagttacaacattacgcgacagttctcttaatttcagcacgaagattatactttcctaaatatttgcaatatttgagatttagacctcatccaccaacttttagcctaggcactcttaggtgtcaagcgagttcattgccacgaaagtcatcgatacaaaaatacttaagcaagactaagaaaaggatttgtgcacaagtgtctattcagcggccagcacttggcaagggtttgcgctgaagtgctcgaaagggaaaagcaatacactatccaaatagctaagaagtgaaatgtactgaaccacactgcgtatacttactcggtcgtttttccttgccctgcaagggaagttacaagttagttcagttagctcgaaaacgaatattagatatgtgtggtcaacctgttgcgatttctggctctcaactgcccgcctgttcgcctccgtctcagcccgcaggagcacatcgtcgagcgcctcccgcaacgcggccatgttctggggattttgcttgaaggcctcaatccgcgcctccagtgactccgtttcgattccatcaacgctgtccggagacgctggctcgggatccgcaaatctggcatgcatctttcctgggtttttgtgagaattcctttttatcctttgaaaatgctgccagaagcgtttcgagctttgcctttgtcctgcgatgggtatctacaaggagtgctgagcagagctctttgtgcgttcacccagcaatgcgctggagaaatcaatagcaagccacttgggggcccatacccgcacatgcgtgctgactgcgtgggcaagctttcgatttgtggggtgggagagcagtcagttgatttcaacagttcgttatttacagaactgtagcttaatatttctatgggaaatccttaaataatgtttttttttttgcttgctaagaagaactaaatccattttacacaaaacgtgtgaaaataatgatttaatattcttcctatttgtgtggttacatttttttggggtaggaacccgcattttttattttattgcatacaatatgacaaaatgtggactacgaactaagctggctactccaggtgcgagagatcgtccagctcgggcggtgcgcgcacaatctccgtctcaatgatcagcgagttggcgtctaggatgctctgaaagattgaactgttataccatcaactgctggcgcttcgctaccggcaataacacacacattatcgctgctccgctgtgcagccgctagtagactgccgctcgagcttgagttcgaattggaggcactggcagcgttggaggccgcggagaggaccacgctgtgcggagagctgccacgccgcaccaccttcgcctggccctgctgcggcgagttctgggtgactatcacaaacttttgcgccggctggttggcctgaatggctcttatttgcggcagggacgagactccgggacttctaaaacaaaagaatatttaaccgcttagtaatgggcataaaaagacatgtcaacatggtttccattaggaatcaaatgcttggctggaattttattttatgcttaaaagtgttatttacccctgtctctgtgtggtgggcatggacactcgtccgatggttgttgctgtttgtgctgcactcgtgatgggtgccgtgttgatagtgttggatgacagggttacaatgcttgaggcgggcgcatttcgaactttg

SEQ ID NO: 19925 - DNA, 749 bp, DROSOPHILA
aaagagctctgctcagcactccttgtagatacccatcgcaggacaaaggcaaagctcgaaacgcttctggcagcattttcaaaggataaaaaggaattctcacaaaaacccaggaaagatgcatgccagatttgcggatcccgagccagcgtctccggacagcgttgatggaatcgaaacggagtcactggaggcgcggattgaggccttcaagcaaaatccccagaacatggccgcgttgcgggaggcgctcgacgatgtgctcctgcgggctgagacggaggcgaacaggcgggcagttgagagccagaaatcgcaacagggcaaggaaaaacgaccgagtaagtatacgcagtgtggttcagtacatttcacttcttagctatttggatagtgtattgcttttccctttcgagcacttcagtttcgccataccagattttaagaacggcaaggtggtgaatcgcgctcgaggattcgtggtgcggatcttcgatgccatatgcaattgcgccaacaacaatgcggcggcggccacgacgcgtttcaagctgagaagcaacagcggcggagggggaggcggcggaggtggtggtggcggagccagcggaaatggcaagcgtcagcagtcgcagaatgagccggaaaccctagtcctgaccaagaagaagcccgccggcgaaggcaagaaaaagaagggagtcagcatggccgatgacgttcaagccggcgttcgactgatggactaa

SEQ ID NO: 19926 - protein, 208 aa, DROSOPHILA
MPDLRIPSQRLRTALMESKRSHWRRGLRPSSKIPRTWPRCGRRSTMCSCGLRRRRTGGQLRARNRNRARKNDRVSIRSVVQYISLLSYLDSVLLFPFEHFSFAIPDFKNGKVVNRARGFVVRIFDAICNCANNNAAAATTRFKLRSNSGGGGGGGGGGGGASGNGKRQQSQNEPETLVLTKKKPAGEGKKKKGVSMADDVQAGVRLMD

SEQ ID NO: 19927 - DNA, 2825 bp, DROSOPHILA
tatggcttagttttagaccgaactcgacaaccctgcccctgggttttgactcaaactctaacgcgccgacggccgagcaacccctgaaaaagcacaccctctccaagcgaatggcgaaacttctgagccaattttctcttgagtaggggtcctgtgtccttggagctgccttcgcgctgtggactcaggacaacgacaacttgaataaggttaatgcccctagccgaccttggggtgcgacacagttcgggactcgggagctcgggacctcgctgctcggggttcggggttcgaatgtaggatgtcggatatcgaaacttatcggacccaccgtcctcactttcgcctgggttcattgaacttttagggaactcattatgctttcggtgaatacagtttcgtgtgggtggcgacgacaacgacccgtcgataggctctgctgggttgattggccaagccggaacagccagctgtgtgtatatcattttagggctcgtcctcatcggcggccatttggttaggatatatagtatatggtatagggtccgataccgaccacctcgaccgcccgaagctctccactgttgctttgcagctgttgtcgggcgctatttttggtgcaagtcgaactcaacgctgtgctttttgtcagtctatcgctggcgttgctcctgtctggacaccatgaatcatgtgggtacatatgcaaacatccatccgagagcctcggagaaaatccctgttatctgtgcatagaaataagcgataagtgcgtaattgagtgctctggcttatcgcgaagtaaaccaaatagccgcgctaaatgcaaatgattaaaccagtttgactaggcttgttgtgcgcctactaacccaactcgttatcagcggcaacctgttctgtgctatttgtgttgtttgttgtctccgaattagaataaatagatttcgtaatagagtttgtgggcccgtcacgccattcggcgctggccagttgtggtaaaatgtctactaatctctgtcccaatgcttcctcctccgacatacagccaatactctactcgtattggcgcagctcgtgctcctggcgcgtgcgcattgcgatgaacctgaaggagataccctacgacatcaagccgatcagcctgatcaaatccggtggcgagcagcactgcaatgagtaccgcgaggtgaatccaatggagcaggtgcccgccctacagattggtaagtatctaccaaagaaacccaagtcaacttcctttactcaccacatatccaccatcagatggacacaccctcatcgaatcggtagccataatgcactacctggaggaaacacgtccccagcgaccactcctgccacaggacgtccacaagcgggccaaggtgcgcgaaatagtcgagatcatttgctctggcatccagcccctgcagaacctcatcgtgctcatccatgtgggcgaggagaagaagaaggagtgggcccagcactggattacacgaggcttccgggcggttgagaaggcgctgtccacttcggccggcaaatattgcgtgggcgatgagatctccatggcggactgctgcctcgtacctcaggtgttcaatgcccgaaggtaagtatgatacgaaatcaactaaatctcgagatgctgaagcctagcttgattcattgattcctatttcgttccagattccacgtcgacttgcgaccgtatcccataattctgcgcatcgatcgcgaactggagagcaatccggcattccgggcggcccatccctccaatcaaccggactgtccgccggagctgcccaacaaatagaattttccgaccccaactgcaaagcgccgtaagacgaaaaagtgaattgcagttcgtaaaccaggcacaagacaaactaagaacttaaatctgatcggtgggcacgtggatggcgatggcgatggagaatggattggataggatggcaaagctggcgaggattccattaagcagaaacagtcggatgtgatttaagaaattgctaacagcatttaaatatgcataaatgcataaaaatactatcgataacataacgaaattcctcacacgaaattcaaacgcaaacgcaaacgcaaaattctcagaaaacggaacaaaaaatcgtataataaattcttcaaattcccttagtttgtcattgtgaatatgatctaaaagatgaactcatatatattaaatgtaacttatttttatgcattttatttaggctaacaaatcataacaaattcaaggagaactcacgacgaaaagcaaaattcaattcagggatttaaaaaaaaaaaaccaaaaccaaatttagaaacactatcgaagatttacaagtataaacgatgtatgtatgtatgtatgtataagtacttcatgtcaaagtcaaagggcagatgctaaacaaatcgttcacaaagtacaaaacgtcagtcaaccaataagtaaactaaagcaagctacatatacactaaatcgaataaatcctaagtaatttatgtgaactaagctaaagaatcgatcacctattcgatggttctggatttcgtaatgcctctttgataccacgaaagcataactaactaacgaagtatttccctaaatccaatgcacatagacgaaatacaaagcgaaccgattaagtgcacagtaattttattagcaagttgatgtaacttggaccgtgtgagtctcctcacaaccccgtacgagtagttataaacataagcctgccgatgccaagtacatacacacaaacacccatacttactatcctgcacgacagtacaacgca

SEQ ID NO: 19928 - DNA, 687 bp, DROSOPHILA
aaaatgtctactaatctctgtcccaatgcttcctcctccgacatacagccaatactctactcgtattggcgcagctcgtgctcctggcgcgtgcgcattgcgatgaacctgaaggagataccctacgacatcaagccgatcagcctgatcaaatccggtggcgagcagcactgcaatgagtaccgcgaggtgaatccaatggagcaggtgcccgccctacagattgatggacacaccctcatcgaatcggtagccataatgcactacctggaggaaacacgtccccagcgaccactcctgccacaggacgtccacaagcgggccaaggtgcgcgaaatagtcgagatcatttgctctggcatccagcccctgcagaacctcatcgtgctcatccatgtgggcgaggagaagaagaaggagtgggcccagcactggattacacgaggcttccgggcggttgagaaggcgctgtccacttcggccggcaaatattgcgtgggcgatgagatctccatggcggactgctgcctcgtacctcaggtgttcaatgcccgaagattccacgtcgacttgcgaccgtatcccataattctgcgcatcgatcgcgaactggagagcaatccggcattccgggcggcccatccctccaatcaaccggactgtccgccggagctgcccaacaaatag

SEQ ID NO: 19929 - protein, 227 aa, DROSOPHILA
MSTNLCPNASSSDIQPILYSYWRSSCSWRVRIAMNLKEIPYDIKPISLIKSGGEQHCNEYREVNPMEQVPALQIDGHTLIESVAIMHYLEETRPQRPLLPQDVHKRAKVREIVEIICSGIQPLQNLIVLIHVGEEKKKEWAQHWITRGFRAVEKALSTSAGKYCVGDEISMADCCLVPQVFNARRFHVDLRPYPIILRIDRELESNPAFRAAHPSNQPDCPPELPNK

SEQ ID NO: 19930 - DNA, 4207 bp, DROSOPHILA
acaccttgcaaagtgcaaattgtgtaaattcgattatttcataaagcatctaatgaaattcaacattggcaggttatttatttttcatcttaactaatctttattcaattgtcaatttttcagttataaaatttgcacttaaatttaaattttaatatgcatgcaaggagttgcatttgcttttgttcatactatcaatggaaaatggtagtcggttttgtatgtgtgcgtcagtaagtctgtgagttttatgagtgtgtgtgtgtgtgtgtgagagtgagaatgtactaaaatttaactaaaattcccctaattatgttttggatgccggtcgaaaagagcacacaaaaaaaaaacaaaacaaatgtccgaaagcaaaataaaattaaaaatttccataccacacaaacttacaagctaaatctcgtatgtatactttatagatatatatatatttatatataaataaataagttcccttatgcctagtggatgcgttgcataacatccgtctccttaagcctggagcacctttccggagtcttcatttcatttcattttgtttgtgcatctctctctctctttgtgtattatttccattaattttctatgatttcctctatgcaatttaacgactaaatgcatccaaaaaaacaaattgcaaaaaaaaaaaaacttttagaacattcagcaccgaatcgagcagtttgagtattgcattgttgcccgatctctgatatctgatatctgcaccatatatatctctttttttcgtttggatcaggattccgaacaaacaacccaataatacgtttcttcaaaaaaaaaaaaacaataatcataataaataaataataatggaaggcgtagatgtgggcaacgtgttttgattttgctttctgctggtttccatttcgattttgaattcgctttcgattgctattccgattctgattctgattatgattctgcttgctatctatatcttgatcccgaacgatcactggaccgtttcgtgacctgaactcggctgcctcacttgttgttgctgctgctgctgctgctgttgttgctgctgctgctgttgcatgtgtcgcaggcgaaacagtcgcagggtcatccaggaggccagtgttccggtcaccggcatgggtgtctgcttctccagcgcctccttttgcagctgatagcgatatagcagggatccggccaccagagcggacacgatcgttgtcgaaatgacaacgatgaagagaatgctgaagccgggcactggcatacaaatgccgtagacaacctcctcgctaatcttgccctggaacacggtgaccgcctcctgtttggagtccggcgagaaggccaaatccgcctcggatataacatcgtacagaccgctgacgcccacatcggcactgcgcaccttgcgatcggaaatgaccaacgaacgacggcgacggctcttggaggaatcattgctggctgctgcacctccttcacctgtcagcttatcctcctgctgcgttttctcttccttctccttctcctcttcctcctccttgtccaaatcgatgtgatcctcgcgtggctgcttcaacgcctccgcctgtggtctgtagacgggtcgtggcacatcctcatcgccatgaccatgtggctccagggagcggggtcccgccatcggtacacccatacgtttctgggcctccagctgccgtggaccgtgtgggaacttgccgctcttcttcagacccaagtaccgctcgccctcgccgccttccatgtccaagtcggcaagatcctcatcgccaaatagatctgaaagatccgcctcctcctgttcctcgtgcacgggtcgtggctgcagattaacactcttctcgtgaccataatctccgccagctggcattcctccgccgcccagcgtttgtttgtgatcgtggatgatgtcctcgtagaagatgtcatgatctggacccattcccatgcccatgccgtgttgaccgcccggcggcagtgccaaatccctgagcagatcgttgctgctactgcccaaggcatccgacatgtgcacatccttacgctcattggcattggtcagtcccaggccgagacccaatcccaggctctcgccggatccgccgccaccaccgcccacgcccgtgttctggcaatgatcgagacagccgtggcgacaaatctccaccttgcacttgatgtgcacactgagggcatccgggaacttgaaggcatggaagaaggcataggtgatcacggtggccctctcgtcgggcgcacgagccttcaggaagcgtgagatcatcttgggtcgcagcacgcagccaaattcatcggacaggttgatcacatgaccagatccatcggaggccacgcaggatttcacacgcatatcgaattcgcctggcagagatcgagtatgaattgaattgaacaacatctagcatttaacgaataacgaatcttctcacctcgataatcattgatggccaccaccagggttaaagttgagccgagtggtacaattccactaacaggcggcgcccagggtcccttgccatgctgaatctccatccagcagtccacattgtcacctataagatcgaagaaagttaatttcattccacaatagtagaaatatttataatactatatacgtttgtaaagtacttaccacggaaatccagttggataacatcgagatcggcaatgaccatcggtggcttggaggcggtcttctcgtagtcattgaaccactcgcatcgcaatcgcttagcctcatcccagacttccagcagatccttgtcgtactgaaccaccacctggcattaaaagggaattaggatattcagacgacattcatcttatagaggggcaactccaatcacccaccgtattctcatagaactgtccgttgagatccggcttggtgccgcagcgggagtacgagatgcggaaggagaagaacgtcttgcccgttgagggcggcacataaacgcaacgcggatcgctgtgttgtcctttttggggataatgataaagtggataagttaaaggattatatgcgacattcccatatgaaggcgactcacctttggagctgacgatgccctcgaatggatgcgaaaaggtgagatgtacatccatgtgatccttgccgcacatcacctccagtgagacgatattgggcattccgtctggccgttccatgggccacagttcattaccagctatgactaaactaaactgtaattgaaaacaaaaaaaaaccagagaatcacaatttagttaattgcatagaaagaaaaagataactttttcatgcatgtggggctggacgaagtttaagtgatgaaacgcttaaagaacagaaatacacgtaaaagtcttccatgaattacaagttgtatggatttcagctataacttgatattcccgatcccgaaattcattggccagccttgtgggtgggctcctaacggttccactggcacctggcacctgacaaacgtgttgccaataaaaacgaaacggcaatccagtctctccagtctcttcaggctctttaggctggtcttcggtctgcagtcctcagttcccccccttttggatggccaatgaaggccaatcgaaatgggaaagcgaattccacttggcctgcatccgtttggctttttgagggggatctaactggaacctgtgctccaatcatgctgaggggcttgtggttttcgggaggtagttgcacctgacacatttgcatatttgcatatttgcataccgatacctgccccaaactgccttgccacatgccgcatagatcggcttcgatcagcaaaatcaaatcgagggaagtctgagcgagtcgctggctcaaggaatttgcattttccttgcccccgtccgcagtaaaagttgacttactggatgagtggcaactgaacaagtgggtattcatatatatatatatgttgaatatatataaccggctatataccatccgatcttagctggtgccacattgtctggcgtcgccacaacggaccaaaatggaaatgcaggaatggatcgtatggatcgcagccagatcttccagttgcttgttacttgttactgtataaattagtttatgcaaatgcattgtaattgttttacatcttgatcaagccaacgaatagtttagcattattgc

SEQ ID NO: 19931 - DNA, 1917 bp, DROSOPHILA
atgcccaatatcgtctcactggaggtgatgtgcggcaaggatcacatggatgtacatctcaccttttcgcatccattcgagggcatcgtcagctccaaaggacaacacagcgatccgcgttgcgtttatgtgccgccctcaacgggcaagacgttcttctccttccgcatctcgtactcccgctgcggcaccaagccggatctcaacggacagttctatgagaatacggtggtggttcagtacgacaaggatctgctggaagtctgggatgaggctaagcgattgcgatgcgagtggttcaatgactacgagaagaccgcctccaagccaccgatggtcattgccgatctcgatgttatccaactggatttccgtggtgacaatgtggactgctggatggagattcagcatggcaagggaccctgggcgccgcctgttagtggaattgtaccactcggctcaactttaaccctggtggtggccatcaatgattatcgaggcgaattcgatatgcgtgtgaaatcctgcgtggcctccgatggatctggtcatgtgatcaacctgtccgatgaatttggctgcgtgctgcgacccaagatgatctcacgcttcctgaaggctcgtgcgcccgacgagagggccaccgtgatcacctatgccttcttccatgccttcaagttcccggatgccctcagtgtgcacatcaagtgcaaggtggagatttgtcgccacggctgtctcgatcattgccagaacacgggcgtgggcggtggtggcggcggatccggcgagagcctgggattgggtctcggcctgggactgaccaatgccaatgagcgtaaggatgtgcacatgtcggatgccttgggcagtagcagcaacgatctgctcagggatttggcactgccgccgggcggtcaacacggcatgggcatgggaatgggtccagatcatgacatcttctacgaggacatcatccacgatcacaaacaaacgctgggcggcggaggaatgccagctggcggagattatggtcacgagaagagtgttaatctgcagccacgacccgtgcacgaggaacaggaggaggcggatctttcagatctatttggcgatgaggatcttgccgacttggacatggaaggcggcgagggcgagcggtacttgggtctgaagaagagcggcaagttcccacacggtccacggcagctggaggcccagaaacgtatgggtgtaccgatggcgggaccccgctccctggagccacatggtcatggcgatgaggatgtgccacgacccgtctacagaccacaggcggaggcgttgaagcagccacgcgaggatcacatcgatttggacaaggaggaggaagaggagaaggagaaggaagagaaaacgcagcaggaggataagctgacaggtgaaggaggtgcagcagccagcaatgattcctccaagagccgtcgccgtcgttcgttggtcatttccgatcgcaaggtgcgcagtgccgatgtgggcgtcagcggtctgtacgatgttatatccgaggcggatttggccttctcgccggactccaaacaggaggcggtcaccgtgttccagggcaagattagcgaggaggttgtctacggcatttgtatgccagtgcccggcttcagcattctcttcatcgttgtcatttcgacaacgatcgtgtccgctctggtggccggatccctgctatatcgctatcagctgcaaaaggaggcgctggagaagcagacacccatgccggtgaccggaacactggcctcctggatgaccctgcgactgtttcgcctgcgacacatgcaacagcagcagcagcaacaacagcagcagcagcagcagcaacaacaagtgaggcagccgagttcaggtcacgaaacggtccagtga

SEQ ID NO: 19932 - protein, 638 aa, DROSOPHILA
MPNIVSLEVMCGKDHMDVHLTFSHPFEGIVSSKGQHSDPRCVYVPPSTGKTFFSFRISYSRCGTKPDLNGQFYENTVVVQYDKDLLEVWDEAKRLRCEWFNDYEKTASKPPMVIADLDVIQLDFRGDNVDCWMEIQHGKGPWAPPVSGIVPLGSTLTLVVAINDYRGEFDMRVKSCVASDGSGHVINLSDEFGCVLRPKMISRFLKARAPDERATVITYAFFHAFKFPDALSVHIKCKVEICRHGCLDHCQNTGVGGGGGGSGESLGLGLGLGLTNANERKDVHMSDALGSSSNDLLRDLALPPGGQHGMGMGMGPDHDIFYEDIIHDHKQTLGGGGMPAGGDYGHEKSVNLQPRPVHEEQEEADLSDLFGDEDLADLDMEGGEGERYLGLKKSGKFPHGPRQLEAQKRMGVPMAGPRSLEPHGHGDEDVPRPVYRPQAEALKQPREDHIDLDKEEEEEKEKEEKTQQEDKLTGEGGAAASNDSSKSRRRRSLVISDRKVRSADVGVSGLYDVISEADLAFSPDSKQEAVTVFQGKISEEVVYGICMPVPGFSILFIVVISTTIVSALVAGSLLYRYQLQKEALEKQTPMPVTGTLASWMTLRLFRLRHMQQQQQQQQQQQQQQQQVRQPSSGHETVQ

SEQ ID NO: 19933 - DNA, 7358 bp, DROSOPHILA
ccagcagaaagaacgatatcttcggcatcaatgacggacagctggcggcggatgatcttccatatgccactctgagctatgccaatggaccgggctatgatagtaactacctcagggaaggcggcgctgtgcggaggaaaaatctgagagccatcaatatgaagaacaaggacttcatgttccccagcacagttcccttggaatcggaaacgcacggtggcgatgatgtggccgtttttgctagtggaccgtatgcccagcttttcaccggagttttcgagcagcatttcatacctcacgcccttggttacgcctcttgcctcagtgatcgtaacatgtgcgtggatgggggcgtggcacggagaccacgctgaaacttggcggggatcaaaggttaagtgaagcacaatgagtctaagcgacaaacgtattattctcgtttaagagagaagccactagaagataagcaatcgtttaagggggatactaaaataaataattgaaatctaaaaaaagcatcgattactatttgtgccaatattatacgacatttatttgcagataagagtccgttcccgtggttatcttataatgtcgattcttttttgcactttagaatttgatagcaaaatgtcgattttacgcggggaggttatcgattgacatgtgtcaactgcttaaattttgtttccttttcagtgttggctaatatcaacatgtgactgcttgcatccgcactaactgtggtttttgtctttactaaatctaacagcgtactgttgccaacactaaaatgttaaattattttaaaactaacagacgacttggcgccaaatttgaaataaaattaaaatgttttcgaatataaaagggacagacaacattaatgactagggttttattgaaatatacatggggctaattgctggacatatcagatttaaattatattttaatatgtataagtgtatatcattttcattttgtgctgtttttatttatctttttacaattaatgccttctggctgcatatataacataaggattcacacaagtggcacttaattatacaaacttaactttaaattttctacacagtttttttcccttttgcgaaaacgaagcacaaatagtcaggcgaattagtagcataatacattacgcataataacaatatttaaaattaggcatacacatagttcacagtattttgcacgattgcttggacgtcgtctttggtttcctctccacggctctaaccgcctcctcgaagacctgctgcaggttctgcttcttcttggcggagcactcgaccaagttgaatgcgtgtatctctttgcgcatcttttttccctcctgaaaaagtcgagaaaacttagcatacaactgtgtcaatcgtttagttactaactaacctgtgtggtcacgaacttctccgagttgggaatgcgcaagtccagtttggtgcccacgagaaccacgggaacgtgggcggagaagtgacggatctccggccaccacttgcttttcacgttttcgaatgaggtcctactgctgatcgaatagcacaacaggaagcagttggtctgtggagcgagtacgaaatgtattagcaataggtaggactaatttccctatcagtagtcaatgctatcatacttacactgggatagctcagggggcgcagcctttcgtaatcctcctggccggcagtgtcccagagggtcagattgtagtcccgatcatctacggctatgttgcaggcgtgattgtcgaacactgtgggtatgtactcctcggggaactcgttccgtgtgtaggttatcagcatgcaggttttgcccaccatgccatcgcccacgatggttattttcagcgggcgcggactcttcgttatgttcgccgtcattcccggtttttttccccgttcgtctttgttaagcaagaactgcaaagaggacaaaatagaggcgtcacaatcgggattgcaacatttggtggcagatgttggcgcactgtgtgtttatcttggcgcacccacactttcatccaaccggaaatctccaggctttgcccctagctggcttcactttgatacttgcagaatacagcagaaatgggattactgctcatacagaatataagaatgtataagaatgaacttcaatagcattagctggaaatattgctgagtaagtaaatacaatacaccagtctaatctacattctatttcagttgagttcgcttgaaggaatatcggtttccattgacgttttgaagttttcattattgctggaatgtgttttatagagttaaatatataaatgccacattttaaacaaattatacgtatctatatcataacagcgaacagtccacctgaattaaccttgttgatcatacaacccatatcgcacatgaacttcaaaacttttaatctaatcgccggtcgaattgaaaacgacaaaagtctgggcaattggagcttttacgacgggccaactgtggactggacttcatcaagcgcaattgattctgcgaaatctctaatggaaataaatgtgcttttatggctgtcccccccgtcttacataacaattaaataaaggccgggccaaaactgaaagactttcaccatctgtccaggcacaaaaacaaacaaactaacaaaaccgcatttgtttcataaatttttcatttttaattaaaactggtttcgtcggtttccagttgacccaaaacatagactagatttccctacgcagcctccataacgacacaaaatccaaatcaaaagacatttgcccgatttacaaatgagcgatgccgttaggtattcgtattcgtattcatcttgtgagtgggaattcttggggtacccgtttaagcagaaaactcatgcgaataccaggaattattcactgtttgcggcatgactcatcgcgtacacttgttgatgtctcgggctccattcagtttccttacataattgcaaatcagagcggtggaagcgtttattagaagagctagaccacaatcttggcttggtggctgactcatcggtgagggaaaacgcttccttccctccaacccacaccaaatttcatctttgagctgcattttaaattattcagaaaataaagattgaaaaccggttgcgttgcgacattcatcagcattcaccgttcgacggcactgcacttcccaacttttgaccacgaaaggcacaaaaccacagccaaagatccccctaatacatacatataaaataataatttaattgttcacccctataagtacaaaagcttattcatatggatgattgaatttagcaaacaaaatgttgtgttagaagtcaagtaataaatacactttccaaccaacctatcagttcgcaagaagtagatgataacatttagataagcagtgaaaagtgaagaaaagtaccaaatacactgcaatttcaagctagtataaaattcaccaatatctggaatgccttgtaagacgcggcaaatgcgtgagtaataaacataaaacgctttcttggcacgcgatccacagatgctgaactttgactggggcactttgatgccggggtcaacacaattaagccccccatcattgatgcgagtggcttcaagttggggttaagtgctattcgcttttttaggttcgccattttttgattgattttgtaaacttttcctaaagccttgaatagtttaaatgtattccaacgatcaagcttctgaacaaattttattccaattctgtatgaatgacgttaccaaatttaaatcggatgagttcgttccagcaaaatggcagcagaatccccaaatagaagcagtgcttttttttctctacttttgttgccaaattagtaaacaaatccaaatgaacaattgaccattaggtagccactagcgcaaaaatgggcgaaaaaaaaataaagcgaacaaaaacacaaatttggccagagagcaacaacgaaactaaataaacagcacacttttgttttggcctctttggacgcgttttaaattattataaacaaacagctttgggtgctgttttagtgactacagaaatgtgcaaataattaagtcccaatgctaccgaattcttctatttatacaaccagctgattaagcaacacgtaggaagcaaactcgtgaatgagtttcctcagttccacgatgtaaacttgtggattaaaaaacaggtgtgcgagcaatggtcgaaactttccaggcatgccaccaagtgggtggcaatacccccctgctaccctgtacaatgccgcatcatcatcataacttatgcctttctatcagttcggaaaacagcggaaactctttatcaagctcgctggccgatgatgatgaaaatgaaactgtatcgagcgagagcgcgcggctcgtaattaatacacataataaattatttaaacataattgctgtgcatttaatgcactcccttgaaacatgaagtgcacatgcccggcagtccgtgaacaacttattccagttcattgttatctacaggcttggcctcttgtaaacttttcatatcaagttacgaactcgtcgttctcggaatcttgtcccaagaacaagacttgtcacatttcacactctctctttctttgcattgattcggtggcgatgatttcccaagatgaggaaaggtctcaaagcgacacatctgcactatggctactcgtattcatgtgcaattcacttgggtcactccagttcaaacctcgtcttggaggcgtctcttatcagcctccttaataaatgggtgcatgcatcagttggattcccgttcccatatagcagacggtccacaaataactcagttacacaaaggcggagttagtcaataagtgaattatacgtatagatggatcatccgactacgcaattaattaaataattccgcaataacgaatgtgaagcgacgtcagtagaatgtaggtaattcttttatataactaagattactcggcttgagtttcttaagaatttcgttttattagaacttgcagtggagcagcagtataactaatcgtacgcccaaaaccagatcgaattggtactccaaatcgtctatataggtaggtacatttctatatagacacctatttctattctacaccaaagcgaaaaaaaaacacttttattcaactctgcttcttgttgcgaaaaatatacgaactgtatatgtgcatgtatttttatggtttctcgcatgggtttttgtatttaataaactgattagataagatagatgtcggtgaatgcggtgtacatagggaattggacttgaaagagcaacggcgataagtggatgtggaaccatggcgaaaacccatggttacctggtcagaggagccatcgaatccccagaatcagattggatccgggcagattgcaagggcacgcgctgccaattaggtaaattaattgaggttaatgcggagtgtttattgtgccataggtcgcaatgaattgattagcgacattatggattgtattggattggggcgacaggcgattcacgtactcggtttcctgcgacgtcctctaaatggctgtgtaaccatataattgtttgataactaaaaatggtatcgagcccattatggtggagaatcaagtcgcctgccaagatccccgaagaataagagagccccacaacagcgattggaattggaattgggactggaagaggaagcgagagcaagagagttgggatcgtaaaccgaaacaacttggcattccagagctgtggacggatgggcggtcggatcgggggaggtttggtggggggggggggggggtgcggtgacgtgagcgcaatacaaagtgactcaggtgatggtgaaaaaggaggaacgatcacgaagataactctcccagtgagtgagatctatgctaatagtgtttacagccaaagataaatgttgttattttaacagctcgtgcaatcgcagacccactgagcgcccacaccatcgcaaggtcgtcgcaattgggtgttattgaattcattctgcgctggattcgacatttggccagctagctgctggcgaggatgaacttagtgggatacgagtgttgcgtagacgctttgaactggacgtacttttagatacgggacttgtgtgcccgtacttttatccgtatgcgtactatttgcaataatcaatcgaacaacacgtctggctggcgatgacgtgcgacttgatcgcagtgtggatgtggattactcgaactggcggcggcgagagtataaaaccggataaacgaatagcaacaaccgatcgcacgcgatgtcgtcgaacaactgaacctttggcgattccgattcgtttagctcgcagagttcgagtagctcgcagatacgcgaagagcgaacgaagagagcgcggtggagcagctctctctcttagcacttggcacacaatgtttccttatcaaaggtttcggtttggataagaagaatttggcgaactacagctccaggtttctaatccctataaatatttttgcatttctttttgagtaaatgatgtgatgtctgcaattccaacttaatgtttcgtattcaagttgataacattttggtttgaatgcttatttttagaatacagaagctcaatgctcatataagtacataaataagcccatgattaaaaaccaccataaataagttcataatgataaattagttacttctatttacgcattttctactacgaataaaacgtttgaatcaaacttcgaagtgcgtcaaattattaagactgaactactcacgcaattacttaactgagaacgcaaaatactactttaaagctacttgtgagctacaaatcctgttgcgtaatatcccgccctgcaacccgagtatctggcataagccattaatcaacgacattccgcaagtgcgtgcctccaaactgggctttatatctgtccgatgtaggggtaattaagccaaagaaccgccttgcgggttagaccgaataaaatgcgtttactgcgagtatgtggcactggcgtacatgagttcaattagccgacacgttgatggggcactacattaattagaattaccactgcactgggcaagtcactgccgtacaaagaataaaggtcaagtgacaaaggcttcgacccagacccaaaaagtcgggcggtcacagcaaagagaagagccggaaaattattaatacacaaatatgaatgtgcagcatttccaattagggatagctacttaagcgaacacatgagcaacatgtgtgccactactgcaaacaccaaagatacttctggaagact

SEQ ID NO: 19934 - DNA, 1012 bp, DROSOPHILA
gttcgacgacatcgcgtgcgatcggttgttgctattcgtttatccggttttatactctcgccgccgccagttcgagtaatccacatccacactgcgatcaagtcgcacgtcatcgccagccagacgtgttgttcgattgattattgcaaatagtacgcatacggataaaagtacgggcacacaagtcccgtatctaaaattcttgcttaacaaagacgaacggggaaaaaaaccgggaatgacggcgaacataacgaagagtccgcgcccgctgaaaataaccatcgtgggcgatggcatggtgggcaaaacctgcatgctgataacctacacacggaacgagttccccgaggagtacatacccacagtgttcgacaatcacgcctgcaacatagccgtagatgatcgggactacaatctgaccctctgggacactgccggccaggaggattacgaaaggctgcgccccctgagctatcccagtaccaactgcttcctgttgtgctattcgatcagcagtaggacctcattcgaaaacgtgaaaagcaagtggtggccggagatccgtcacttctccgcccacgttcccgtggttctcgtgggcaccaaactggacttgcgcattcccaactcggagaagttcgtgaccacacaggagggaaaaaagatgcgcaaagagatacacgcattcaacttggtcgagtgctccgccaagaagaagcagaacctgcagcaggtcttcgaggaggcggttagagccgtggagaggaaaccaaagacgacgtccaagcaatcgtgcaaaatactgtgaactatgtgtatgcctaattttaaatattgttattatgcgtaatgtattatgctactaattcgcctgactatttgtgcttcgttttcgcaaaagggaaaaaaactgtgtagaaaatttaaagttaagtttgtataattaagtgccacttgtgtgaatccttatgttatatatgcagccagaaggcattaattgtaaaaagat

SEQ ID NO: 19935 - protein, 190 aa, DROSOPHILA
MTANITKSPRPLKITIVGDGMVGKTCMLITYTRNEFPEEYIPTVFDNHACNIAVDDRDYNLTLWDTAGQEDYERLRPLSYPSTNCFLLCYSISSRTSFENVKSKWWPEIRHFSAHVPVVLVGTKLDLRIPNSEKFVTTQEGKKMRKEIHAFNLVECSAKKKQNLQQVFEEAVRAVERKPKTTSKQSCKIL

SEQ ID NO: 19936 - DNA, 6454 bp, DROSOPHILA
gaatggaaataaaaccgaactgcaggaccgattgcagaccgcgttattagagggggacctttctctggaggattcggccatagcagatgccattgacgacgacgatgtgtctttcaccgacgaggatgagcacaagctgctgggcgatgagaacgacgatgagctactgaaaagtccggttagcacacccacaactgtggccattccggaccttctagcggaagagaagacgtcttcggccccagatgcagctgcgccgaccaagaaaatagttctgaagcgaaataattcccagcagtcgacgggcacggtagccagcacggggacaactccatcgaaggagaacgaggcgcccgctgcagctgctagtgactccaccggcgaaactcctaccaagaagcataagccgattgtggtcggaccaaagacggaaggagagaagccatcaggcgacaagaaacttaaccagctgactgcacaagagcgattggaactgcgggccaaaaagtttggcataacaccccccgctgtggccaacactgcaaccgcagtggcagtggccatcaataaatcctctagtgcctccattacggccaacaaaggtaacaaggaaaccgaggagcagcaaaaggaggcactcaaaaaacgtgccgagcgtttcggattcgtggtgcctgacaaagcaccgacctcaaaggccgatgatcgtctccagaaacggaaggagcgatttggagcaggagcagtctcagcagctaccaccacgcctaccacaactgaatccaaggacgcctggtcagagaaggcgcgcgctcgcttggaaagattcaaaacagccccgtccacaaattaagaaaagcgaatataattatttaagcaagcaaatacaattgtaaatcatttcgggagtaggccctatcatgtatcaaaccccaaagccaccaatgcttgtagtaattaagcaaaaattcaataaacacaaaacatgaccactgaaattcagggtttacattactttatttcgtttaattcaaagacttaaaaataatttgagtcgcgtcttcggttttattggggcatttttttttttttggaacgtcaaaattcatattagttggtataatattatgcgttaaaatatataaaagttattcaaataagtgggtgcaaaattaattccgtattgcgagtcaaataaggaatatcagctcatttcattggtcatcgcgctgtttgaagtgtgaattggcgacaagaaacgtagaataacttttgaactgaattgcctgacttaaaagtatgttactttaatgttgcgcccatccagacgggagccatccataagcgctgaaaagacattggagttcagcaaaaataaaggaatcgccttttgagtattacttaccaatggctagctcggcatcgcgctccttaaagaaacgcacaacgcccacatcattgccacggatttccgcaaacttaacgtccccgatctctcggaacttgtcgcgcagtgtttgccaagtgcaggttattggaacgttcttgataatgatcgtgtccgactttcgagaagcaccgacagcattggccgagccaacgttggaattgcccacgttgctgccgccgccatagacatccaatggattgccagtgttgtaatcgttgccatcaacaccaactcctccgttgccgccgcccattccaccagagctgctgtaagcattgtatcccaaattgctggagccgccaccgccgctgtagttgtttccagagctatagctattgccaccaccggtgccgccgctgctgtagttgtttgaaagacccacattgcttggcggcaggttgtcatcattgccggagttgcccagattgagacccaggttgctcagcgaagaggacagcaagggattgcttaaattccctccctggttaccaagattgccgaccacggcagccaaaatgctgggattcagattgtttaggttcaatccgccggaaccggtattgtttcctaggctaggcttttgcaccggagctacaggcgatggctgcactgccgcatgattgccaaacataacgccggtcaggttgttaagcaggtttgtcgtggcgttgctaacagcgctgctgtttggttggctacccaccgatcccagctgagatccctgctgagcgttgccaagcaactggccctggctctgaccaccattgggaaggttgtgagccacgtccctgagtggctcgccgttgggtcccaggccgatgcccacacctcccaagccctcgggcagctttatgccttcattcttatccggaattcggtccaggcgcacggtcatacgacggtcgaatagcatctgacgatccagcatggaaatggcctgaacagcctccaccggatggtcgtactcgatcacagcaaaaccgcggctgttgccctccttgtccagtgaaaggtctacgctctgcaccttgccggccagcttgaagacctgcttgagcttcttgttgtcgaccttgtagtccagctgcagggagttttaagaaagcgaaattagcagtttgtcaatcccatggtttgtccactgaaataggttcgaaagttgcccaatgttgataccactgctgtctttgacaaaaccatgctgcaaaactatgctgacgatagacgagaatctcaggagaatcagtcccgcacacgtgcccagaaaccaaacggaatagcccagagacgacgtcgaattttaaaacacccgtaactgcttcatatttataacccttgaaaacgaggtggttttcgcggaacatcttatgtgaaaagtgtaaaagaggcaaaaacgctgcaaccaacaaacagtcaaggaccttccaagagtcattgcaactacaaactaaccaattatcattaaacaacttaaccgaaacaaaatatgtgatatatcgaaaacaagattttacgtagcccaatttgttgttgccgcttaagtccgctttctgagtagaaaatataatacttagggtccattctgcagttatgttatcaactaaaatatattcattgtgtagcgatgtagaagagggtatgtgtatgtcacatcgagtattcagtgtgtttcccaggacttccaagtagttccacccagtctttcaaacacatcaacgtatacgattccatccgaattttcgaaaacgggaaaggaacgaacatatgtcaaaagggaaaggaaaccgtggagttgtcattactttgggtcgactgagatgaatttaaacaagtaaacagtatcttctggatgatgtgacctaggcgggttataaatacgaagcagagaccccgaagcaagaacagaacgcagcatatttgtagtgtggtccggtccagttgaataatatacataggattattggaattttatattacaatatactcacattagcaacaaaaaccttattatgcaaaggtccacttatgccaagactctccaaaaacgaagcagaaagcccatacaaattgtaattcgacgaattattataatcatttgacatcatgttaaaattattacgcccagatctagaaaaagagaagccagatttccagagaaagataacaaaaggcacaagtaaacttcagctacggagaagtgggtttccaagagagccgcaggatattccgacgcgttcacattttcccttatgttaaacattttataccctttttttctcttcaggtcctgtcttaaactatctttaaatttgaattccgattttttttttttttttttttcaaaaacagcacaaaactgttactccgatgtatttgacagactttccataaatccttgagcgtttagacaatttgaacaaataaaattctatcagcagcaaaaaagcaaacgcctgctgtgatcaaccttcaaactcaacactaaacataaataattgacttgagatcgaaacggagcactttaataatgaaaaaaatcactagataaccatttagagaactaagagaacggagatttcgttgtaatcagatgaacacaaactgcatatattatatatatatatatatatatttgcattacaactaactgatatgaagagtacgactgaactcgtatctaatattaatgataattttcggcgtgttcccctgaataaaattttatatttattatatcagcgatcagtaaaattttctaaagaaatatgggtaaatttaatacgaaacccttaaggaaccacgattaactcgcagtacgcaccctgggctgaatgtaaatcgggttgtcacctaaatgatgcacaaacgacaaaggaaactccttaaaataaaaaattcagttcgtacgtgataataggaactttagaatgcaatattcctgacctacatacatatatatgaaaaatcaatgcagagccgcaatcgttgatacatttaaaatggaaccactgccagctggcaagtttctaaaaattgaatagtatatgcgtgccatgaactcagctttcctgctccagaatatcggaaaaaagtgcacatacgtataggatataagcgtaaagggaatactcacagtctgtcgtcgtctcgccgggagaaaccccgatcgcggtcatccatgtggtcacggccaccgccgccacctcctccattgttgccaccattgcctccttgtacgccgccaccgccgcctccaccaccaccaccatctcgcacaatgcgtccgtattgatcgcgctgctcgccgtgatcctccttgaccaccagttcgcggccattcacctcatagcggttcattttctccaaggccttctgtacgttctccggatccttgaactctacgatgccacagccgcgagccttgccgctctcatcgaagaacagctggacgtactcaatggagccgacgatgcggcggaacagatccttcagatcctgccaacggtagtcgtatggaatgttcgaaatgtagacccggcaattgcgacgttcccggctacggtcgcgagcagcgacgccacctccctgactaccagcgccgtttccattgccatcagcgtccgtgaaacgggagccacgtgctccgcgtccacgacggtcgcgctccttctcgcggctctccaccgagttactagcgtccatgctcattgttgtctgcaagggattcgcaatgcgttttgtagttcttgcaatattcgtagtagtacacacccggagcggcgtccgcgaaaacaaaatggcgaccgcgtcaatcgactttttcgccaaatgttcttttctatgctagcgttatggcttaccttttgatgttggctgtgctcttaatactggtaatatttctattttgctgctttcggcgtagtaaattttatacaatgaacaaacgcttgtgacaaactacagtttccgagatcaatagaaaaccgtacaaaagtctatgttagagttgacagtgatacgatgacagcacattcatcgatggtttgatatttggacgtgtctcagatttctatcgactagacatcgccgatattcgaaaatgctcttcgaattatcgaaatgtaggcatactgcaatttacgcgcgcaacgcaaaaattcaaataatagaatatttggctcaacaagacaggagactttagatggaaaaatagaatccacaaaagcaaaactatggaataactaaaaccacttttcataaatagtacacacaatcgatttatttcgtttctttttgtatggcaaaaattaatacaaaaaattaaatattaaatgtatgtatgtatgtataaaaagcttaaagcaaactatataatgtaaatttaattggctgtttgttttctctccgattgatctgtcagtatggtaagtagaaagaaaggcaaatctcaagaactcatacggattataatttcatcatcgtagcaccacagatatgtgtttaaccgaacataaatctagtttggggctagcgaatttactcgtttgtgcgaaagttgctgtgagcttatcggcttttgcttgtttgttctctaatgatgaatactaatggaattctgctcgtgcgtgtgtgcgaaaaaagattacatttatgtatgactgtcgggttgaaaccaatagataacagggctgtaaaaatacacaatatttgtttacatcgcgtttcggttttaagcacggagtatctgttgaagtacaaacaacatagaatcaagttaagtgctggttgaaaacaaacggatatagcagctgaaccaaggcagttacaacagtattcatagtttttatgtagaggtacatattcattttcattttcgatttgcttcgttcgtttttgtttgcttgttattgttaatactcttaaaagggcgcctcgcagcctttcaaacgacacaaaacacacacattcacaaaatcatttcgacgtacataaaactctagttac

SEQ ID NO: 19937 - DNA, 2340 bp, DROSOPHILA
ctaacatagacttttgtacggttttctattgatctcggaaactgtagtttgtcacaagcgtttgttcattgtataaaatttactacgccgaaagcagcaaaatagaaatattaccagtattaagagcacagccaacatcaaaagacaacaatgagcatggacgctagtaactcggtggagagccgcgagaaggagcgcgaccgtcgtggacgcggagcacgtggctcccgtttcacggacgctgatggcaatggaaacggcgctggtagtcagggaggtggcgtcgctgctcgcgaccgtagccgggaacgtcgcaattgccgggtctacatttcgaacattccatacgactaccgttggcaggatctgaaggatctgttccgccgcatcgtcggctccattgagtacgtccagctgttcttcgatgagagcggcaaggctcgcggctgtggcatcgtagagttcaaggatccggagaacgtacagaaggccttggagaaaatgaaccgctatgaggtgaatggccgcgaactggtggtcaaggaggatcacggcgagcagcgcgatcaatacggacgcattgtgcgagatggtggtggtggtggaggcggcggtggcggcgtacaaggaggcaatggtggcaacaatggaggaggtggcggcggtggccgtgaccacatggatgaccgcgatcggggtttctcccggcgagacgacgacagactatctgggcgtaataattttaacatgatgtcaaatgattataataattcgtcgaattacaatttgtatgggctttctgcttcgtttttggagagtcttggcataagtggacctttgcataataaggtttttgttgctaatctggactacaaggtcgacaacaagaagctcaagcaggtcttcaagctggccggcaaggtgcagagcgtagacctttcactggacaaggagggcaacagccgcggttttgctgtgatcgagtacgaccatccggtggaggctgttcaggccatttccatgctggatcgtcagatgctattcgaccgtcgtatgaccgtgcgcctggaccgaattccggataagaatgaaggcataaagctgcccgagggcttgggaggtgtgggcatcggcctgggacccaacggcgagccactcagggacgtggctcacaaccttcccaatggtggtcagagccagggccagttgcttggcaacgctcagcagggatctcagctgggatcggtgggtagccaaccaaacagcagcgctgttagcaacgccacgacaaacctgcttaacaacctgaccggcgttatgtttggcaatcatgcggcagtgcagccatcgcctgtagctccggtgcaaaagcctagcctaggaaacaataccggttccggcggattgaacctaaacaatctgaatcccagcattttggctgccgtggtcggcaatcttggtaaccagggagggaatttaagcaatcccttgctgtcctcttcgctgagcaacctgggtctcaatctgggcaactccggcaatgatgacaacctgccgccaagcaatgtgggtctttcaaacaactacagcagcggcggcaccggtggtggcaatagctatagctctggaaacaactacagcggcggtggcggctccagcaatttgggatacaatgcttacagcagctctggtggaatgggcggcggcaacggaggagttggtgttgatggcaacgattacaacactggcaatccattggatgtctatggcggcggcagcaacgtgggcaattccaacgttggctcggccaatgctgtcggtgcttctcgaaagtcggacacgatcattatcaagaacgttccaataacctgcacttggcaaacactgcgcgacaagttccgagagatcggggacgttaagtttgcggaaatccgtggcaatgatgtgggcgttgtgcgtttctttaaggagcgcgatgccgagctagccattgcgcttatggatggctcccgtctggatgggcgcaacattaaagtaacatacttttaagtcaggcaattcagttcaaaagttattctacgtttcttgtcgccaattcacacttcaaacagcgcgatgaccaatgaaatgagctgatattccttatttgactcgcaatacggaattaattttgcacccacttatttgaataacttttatatattttaacgcataatattataccaactaatatgaattttgacgttccaaaaaaaaaaaaatgccccaataaaaccgaagacgcgactcaaattatttttaagtctttgaattaaacgaaataaagtaatgtaaaccctg

SEQ ID NO: 19938 - protein, 632 aa, DROSOPHILA
MSMDASNSVESREKERDRRGRGARGSRFTDADGNGNGAGSQGGGVAARDRSRERRNCRVYISNIPYDYRWQDLKDLFRRIVGSIEYVQLFFDESGKARGCGIVEFKDPENVQKALEKMNRYEVNGRELVVKEDHGEQRDQYGRIVRDGGGGGGGGGGVQGGNGGNNGGGGGGGRDHMDDRDRGFSRRDDDRLSGRNNFNMMSNDYNNSSNYNLYGLSASFLESLGISGPLHNKVFVANLDYKVDNKKLKQVFKLAGKVQSVDLSLDKEGNSRGFAVIEYDHPVEAVQAISMLDRQMLFDRRMTVRLDRIPDKNEGIKLPEGLGGVGIGLGPNGEPLRDVAHNLPNGGQSQGQLLGNAQQGSQLGSVGSQPNSSAVSNATTNLLNNLTGVMFGNHAAVQPSPVAPVQKPSLGNNTGSGGLNLNNLNPSILAAVVGNLGNQGGNLSNPLLSSSLSNLGLNLGNSGNDDNLPPSNVGLSNNYSSGGTGGGNSYSSGNNYSGGGGSSNLGYNAYSSSGGMGGGNGGVGVDGNDYNTGNPLDVYGGGSNVGNSNVGSANAVGASRKSDTIIIKNVPITCTWQTLRDKFREIGDVKFAEIRGNDVGVVRFFKERDAELAIALMDGSRLDGRNIKVTYF

SEQ ID NO: 19939 - DNA, 4482 bp, DROSOPHILA
caccaccaccatctcgcacaatgcgtccgtattgatcgcgctgctcgccgtgatcctccttgaccaccagttcgcggccattcacctcatagcggttcattttctccaaggccttctgtacgttctccggatccttgaactctacgatgccacagccgcgagccttgccgctctcatcgaagaacagctggacgtactcaatggagccgacgatgcggcggaacagatccttcagatcctgccaacggtagtcgtatggaatgttcgaaatgtagacccggcaattgcgacgttcccggctacggtcgcgagcagcgacgccacctccctgactaccagcgccgtttccattgccatcagcgtccgtgaaacgggagccacgtgctccgcgtccacgacggtcgcgctccttctcgcggctctccaccgagttactagcgtccatgctcattgttgtctgcaagggattcgcaatgcgttttgtagttcttgcaatattcgtagtagtacacacccggagcggcgtccgcgaaaacaaaatggcgaccgcgtcaatcgactttttcgccaaatgttcttttctatgctagcgttatggcttaccttttgatgttggctgtgctcttaatactggtaatatttctattttgctgctttcggcgtagtaaattttatacaatgaacaaacgcttgtgacaaactacagtttccgagatcaatagaaaaccgtacaaaagtctatgttagagttgacagtgatacgatgacagcacattcatcgatggtttgatatttggacgtgtctcagatttctatcgactagacatcgccgatattcgaaaatgctcttcgaattatcgaaatgtaggcatactgcaatttacgcgcgcaacgcaaaaattcaaataatagaatatttggctcaacaagacaggagactttagatggaaaaatagaatccacaaaagcaaaactatggaataactaaaaccacttttcataaatagtacacacaatcgatttatttcgtttctttttgtatggcaaaaattaatacaaaaaattaaatattaaatgtatgtatgtatgtataaaaagcttaaagcaaactatataatgtaaatttaattggctgtttgttttctctccgattgatctgtcagtatggtaagtagaaagaaaggcaaatctcaagaactcatacggattataatttcatcatcgtagcaccacagatatgtgtttaaccgaacataaatctagtttggggctagcgaatttactcgtttgtgcgaaagttgctgtgagcttatcggcttttgcttgtttgttctctaatgatgaatactaatggaattctgctcgtgcgtgtgtgcgaaaaaagattacatttatgtatgactgtcgggttgaaaccaatagataacagggctgtaaaaatacacaatatttgtttacatcgcgtttcggttttaagcacggagtatctgttgaagtacaaacaacatagaatcaagttaagtgctggttgaaaacaaacggatatagcagctgaaccaaggcagttacaacagtattcatagtttttatgtagaggtacatattcattttcattttcgatttgcttcgttcgtttttgtttgcttgttattgttaatactcttaaaagggcgcctcgcagcctttcaaacgacacaaaacacacacattcacaaaatcatttcgacgtacataaaactctagttacttaaattaattacaatttctcttcttttatctgacaattgcaccgaccaacacgctcccacatgtgtgtgtttttcgcattgtgtgtccaaaatggacaaaccatcgagcccaggacgatcggcgattcgccgacgcacatacagacaaacaggcgacatttgaagaaataaaaagtgaataataaccaatgcgtggccgtttagagcattttacatttaaatctacgattcggcttgttcattttgcggcccctccgccccttgttgtccttgtccttgcggatttcgcgcaccagtgtgtaaaatgcatcgtccacgcccatgcgcgtcttggcggatgtctcaatgtatggaatgccgtactgtttggccacctgagaacaaccataattaacggaatgttcgctcggaactctgaaggccggtactcacctctcttgcctgctcgttgttaacgttccacgaggccagatcacatttgttgcccaccagcaccatgggcacctcttcggcatcctttacgcgcttgatctgctcacggtaggtgccgatatcctcgaaggacttcgcactgttgacggcaaagaccagcaggaatccctcgccagtccgcatatactgatcccgcatggccgagtactcctcttggccggcggtgtccaggatgtccagcaggcaggtctctccatctgcaggggaatataaaatgcatttgaatatcgcaacttcttaaggtctcttctagtataaacgggaaaccaaaccagcgaaagggtgcagaaatctctagagtatttggacctgtgcagccctagctttgccagatctaagtacatataactcaccgataaccacttgctttcggtaagagtcctcgattgtggggtcgtactcgtccacgaaatggttctggattagctggatggtgagcgcggacttgcccacgcctccggctccaacgacgaccagtttgtattccgtcatttggctgtggcgtccgttttcgatttgccgtagtcaaatgtcacagtaacagtctctttctcgcgatcgatgcttactctcttgtgaagcgcccgcagatgcagtctctctctccgtacgcttgttgcgtgtgtttgtgtgggtgactgtgcgtgtatgggctgcaagtggagtaaattattaattaagattgattaaaataaattaaacgcataattaggcaggaattaatgcacgtcactgagtcactgtgactaggcgcttactcgcacaaacacacacgcaccactgcatgcacacagccagacgggcaacacaaaaaaaaatgggaaaaagagatcaatgactcaaactaaaattaaaacccattcgctcaatgcaaattagttagtctcccccatagccgagttgttaactaggtgaatttgctaattcggcggcgttgtttttagcccttttctttattatttttcttttgcctgccggggctgcggaccttctttgttgctgcctcttcagctagctcctccttgtttttccgctccgctcctctctatcaatactctgcctctctcttctcgcgcgcggcgcagttgctgggcacgtttcacgtcactttcgcggctaacggtgcgacaggcggtactcctcgatggcaccaatttaattgccgtgcggtaattgcaattaacagcgcaggaaaacaataaatccgtatgtgaaatgaagatgaaatctaggctgtacgtagctgtgaagatactagagctggcaccaagccgatggcactatcgatagcgatggctgcattctggccggcaccatcgatggacttgcaatagcgattgctatatgaaaactaatctaaagaggtggatgcacttcagtcgactctctataatttgcttaaactaataaatgatttgatcaatacagctttctgtaaaaactggcagacgctttctgcttttaataattgttaatttaagttcaacgggctggcatcaccgtttcttagcacggactcaagcctgagtctattatttcaaccaccactgtaacgaaaacagcatggacagattgaaattcaataatttggtaaataaacgattttatttaaaattatagagttttaattaaaaagaacttttacaggtgatatccaacaagaaggtcattcaaaaggcacgcgcccagaccatcgccaaaatcgtacaaaagctgcgaaagacaaaagaggctctggccaaaaatccagacagtgaaaaggaaaagattcgtttacgcaagaacacagaatgcctggcccagttgaaggctctaaaatatatggatatggtacgccagtcgctcctgcaggagggcacaaatcccaatgcggtgattgctaacgagcgctccacgccggatgaactgggcattgccatgctgcggctaaacaaattgatgcacggactggtggacaagtttgtggaaaccttgaagctgagcaccaccgataaggaggccaagtggcgtgaggagatcctagagacgagcaagcgaagggccaaaatagaacgcactgaggagcggaagaggaagcgcaaggagctgaaggagcagaaggcccaaaccaaaaaccgactggagtggttagagcagaacaaagtggtggatgcagatgttaatggagcaactgcggaaacgcccactcttcaagtcagcaaagtaaatgatcaggaaataccacagtcttttgcaaaaactg

SEQ ID NO: 19940 - DNA, 1933 bp, DROSOPHILA
tacgtacagcctagatttcatcttcatttcacatacggatttattgttttcctgcgctgttaattgcaattaccgcacggcaattaaattggtgccatcgaggagtaccgcctgtcgcaccgttagccgcgaaagtgacgtgaaacgtgcccagcaactgcgccgcgcgcgagaagagagaggcagagtattgatagagaggagcggagcggaaaaacaaggaggagctagctgaagaggcagcaacaaagaagcccatacacgcacagtcacccacacaaacacacgcaacaagcgtacggagagagagactgcatctgcgggcgcttcacaagagagtaagcatcgatcgcgagaaagagactgttactgtgacatttgactacggcaaatcgaaaacggacgccacagccaaatgacggaatacaaactggtcgtcgttggagccggaggcgtgggcaagtccgcgctcaccatccagctaatccagaaccatttcgtggacgagtacgaccccacaatcgaggactcttaccgaaagcaagtggttatcgatggagagacctgcctgctggacatcctggacaccgccggccaagaggagtactcggccatgcgggatcagtatatgcggactggcgagggattcctgctggtctttgccgtcaacagtgcgaagtccttcgaggatatcggcacctaccgtgagcagatcaagcgcgtaaaggatgccgaagaggtgcccatggtgctggtgggcaacaaatgtgatctggcctcgtggaacgttaacaacgagcaggcaagagaggtggccaaacagtacggcattccatacattgagacatccgccaagacgcgcatgggcgtggacgatgcattttacacactggtgcgcgaaatccgcaaggacaaggacaacaaggggcggaggggccgcaaaatgaacaagccgaatcgtagatttaaatgtaaaatgctctaaacggccacgcattggttattattcactttttatttcttcaaatgtcgcctgtttgtctgtatgtgcgtcggcgaatcgccgatcgtcctgggctcgatggtttgtccattttggacacacaatgcgaaaaacacacacatgtgggagcgtgttggtcggtgcaattgtcagataaaagaagagaaattgtaattaatttaagtaactagagttttatgtacgtcgaaatgattttgtgaatgtgtgtgttttgtgtcgtttgaaaggctgcgaggcgcccttttaagagtattaacaataacaagcaaacaaaaacgaacgaagcaaatcgaaaatgaaaatgaatatgtacctctacataaaaactatgaatactgttgtaactgccttggttcagctgctatatccgtttgttttcaaccagcacttaacttgattctatgttgtttgtacttcaacagatactccgtgcttaaaaccgaaacgcgatgtaaacaaatattgtgtatttttacagccctgttatctattggtttcaacccgacagtcatacataaatgtaatcttttttcgcacacacgcacgagcagaattccattagtattcatcattagagaacaaacaagcaaaagccgataagctcacagcaactttcgcacaaacgagtaaattcgctagccccaaactagatttatgttcggttaaacacatatctgtggtgctacgatgatgaaattataatccgtatgagttcttgagatttgcctttctttctacttaccatactgacagatcaatcggagagaaaacaaacagccaattaaatttacattatatagtttgctttaagctttttatacatacatacatacatttaatatttaattttttgtattaatttttgccatacaaaaagaaacgaaataaatcgattgtgtgtactattta

SEQ ID NO: 19941 - protein, 189 aa, DROSOPHILA
MTEYKLVVVGAGGVGKSALTIQLIQNHFVDEYDPTIEDSYRKQVVIDGETCLLDILDTAGQEEYSAMRDQYMRTGEGFLLVFAVNSAKSFEDIGTYREQIKRVKDAEEVPMVLVGNKCDLASWNVNNEQAREVAKQYGIPYIETSAKTRMGVDDAFYTLVREIRKDKDNKGRRGRKMNKPNRRFKCKML

SEQ ID NO: 19942 - DNA, 2674 bp, DROSOPHILA
caagtcagcaaagtaaatgatcaggaaataccacagtcttttgcaaaaactgaaaattctccagttctcaaagtcaaaaaggaaaagacacctaaaacaccagccaaaaaagaaagaaaccttcagaaaaaacaagcttttgatgagcagatcaacccggagataactaagctcagttccaaaaagcagaatttaaatacaatcaaggagaataatgcagagccacaactagaaggcagaccgaaagaatctaagccaaaacccttcgagaaaaaaccagccagagagcagaagcctaagccacgattagaaaggcagccaagtatcgatgaagaagaaccacaacttgacaataatcgtcccacacatgtcgttgatcccttcttcattacggaatcaggccagccctacttgtccagcgccgtggttctttccggggacaatgacagcgaagctgatgaggaacaggcaccgccgccagtcaaaaggttccgcaatgaggatcgacggtcgaacacatatcgggagaaaccggaaagacagccagagttcaaagcgagaaagccaactgatgatcgtcatccctcctggctggctaagcaacagcagaaaccaatcattggtgattttagaggcaagaagattacattcggcgacgacggccaggcggcggaaattattgctccaagtatcaatcaattaaccgctactgctgctcctttgcccaccgatggcatgcacccgtcttgggtggccaaacagaagtttaagccgaaaattgccgcgtttcagggcacaaagattaagtttgacgaagattaaagatgatgtcaatggtattttgttgttttaataactaaataactgcagctttgctgctcacacgccaactttgggcacatagtgaccacgaatcttgtcctcgttgcgcagcttgtccacgttgacatcggggaactggcgacgcagcacatccagatcgaaattggggttgcgacgcaggatcatcatgacttcgttgcgggagcggctgcaaaataacaatttttattgagatatcccatttaactaagggcaacatacttcttggccttgcgcttggcattgtagagtttctccctgtactttaagaggaatctgttcacagctctgccgccgtagccaatgttgcgggatttaatccatttgaggttcatgaagggcggcagggcgtgttcgcatgctttgtatgagacctgcaggccaaatgcgttcttcaccgccttctggggccgttcacccgtttcacctgtttccagcaggtgatacgccttgttccgctccctcactactgtctccaggttttccatggagattttcacctgcaattctaaagttttagaaaaggatctccaccatcaaatatcgcccaccttatcgatgcgctccggactagggaagacttccattttgtcattgcactcgtgctccatggtcagcagcatgttgcgctccttgaggagcacgaaccacagctggtgcagctccttgttggacttgatacgcagctcctccgtccgccaggcgcggcccaccttcacctcattctcgctccagttcttcttgtcgtcgaagaactccataagatcccggcgaacagcggaagtgtgcatttgcatcggcatttgaacatgcggcgtttgcagggcagccgcactacatattacataaaaacaaaggcgcgtttatatcggttactctgtgtaaaagtcggatttgtgaaagagaacggacctgcacgactgccatggctgcttgggagctgccaaaaagctcctgactgtcgcatttcccacagtttttgccaaatttaaacattttattaacgccgaagacattttttcgaccgaacaaaacagctgaagcaataacaatcgatacttttttgtatcgatttattggattgcgtgcgtactacatttttagccgggctttactccatttcagggctgccatgcatttcaactgaaattagtcgatagtataatttcagcatcgacttgttggccagctctagttgcgcttcgctcagtgctaatgaaaaatcgaatttttcgcttcaaatcgactgaagtttacacgggctaaagtattacagaagtttggctcaagccattacacaacatgcaataagtaaatgtaagtgaagtggccactccccgaaaaaaacaacgcgctgcactgtcatcttctctgttccatccaatccaatttgtatgccaaggaacgccaacttaatgtttggctgtgtgcatgcatgtgtgattgtgtgctggtgtttgtgggtttcagtacacaaatttaaattgataaaactcgacaaaggcagcggttctgaattgcagcgagtgcagggaatgcactgccaagtgcctgttaattgtgcatttatcacagcgaattcaagcaatttgcacctcgaaatgggcattcaaaaacaaattcattgaagagtaacgccaggatgaaaaaaaaaaaaacaaatgtagaacggtatagtaacaggacagtgttgccgagctgctccaagttccccggtactattgccgtgcagcgcagtgtagcgtacataaatatttatctcactgccttatcaggcagcattattgttgaagcgactgtgtatctgtgggca

SEQ ID NO: 19943 - DNA, 623 bp, DROSOPHILA
gcatgttcaaatgccgatgcaaatgcacacttccgctgttcgccgggatcttatggagttcttcgacgacaagaagaactggagcgagaatgaggtgaaggtgggccgcgcctggcggacggaggagctgcgtatcaagtccaacaaggagctgcaccagctgtggttcgtgctcctcaaggagcgcaacatgctgctgaccatggagcacgagtgcaatgacaaaatggaagtcttccctagtccggagcgcatcgataaggtgaaaatctccatggaaaacctggagacagtagtgagggagcggaacaaggcgtatcacctgctggaaacaggtgaaacgggtgaacggccccagaaggcggtgaagaacgcatttggcctgcaggtctcatacaaagcatgcgaacacgccctgccgcccttcatgaacctcaaatggattaaatcccgcaacattggctacggcggcagagctgtgaacagattcctcttaaagtacagggagaaactctacaatgccaagcgcaaggccaagaagtatgttgcccttagttaaatgggatatctcaataaaaattgttattttgcagccgctcccgcaacgaagtcatgatgatcct

SEQ ID NO: 19944 - protein, 182 aa, DROSOPHILA
MPMQMHTSAVRRDLMEFFDDKKNWSENEVKVGRAWRTEELRIKSNKELHQLWFVLLKERNMLLTMEHECNDKMEVFPSPERIDKVKISMENLETVVRERNKAYHLLETGETGERPQKAVKNAFGLQVSYKACEHALPPFMNLKWIKSRNIGYGGRAVNRFLLKYREKLYNAKRKAKKYVALS

SEQ ID NO: 19945 - DNA, 5321 bp, DROSOPHILA
agaaaaatagagaaggacaagccacaaaagaataaccaacacacgcatcagtaagatcaaagctaaatgatcccaatgctgtagattcgcagttctcttccgcccttaatgggacacttaaattcctaaatggtcgttcgatgcttcgggaggtgcaaacagtaaaagtaattggacttatggggtaaattttaagataacgcatactttgtctagctggtagatattgtgagtccagtctgtagaaattaatactgcccaaactcacaaattgtcgcaaagaattggtcccaaactcggttatagcgccctttacataacaacgtggatttgaaattcgacggggcactaaatggaagctggcgataaattttaattgattatataaatttaaggtcattaccttgccgaattcgtttaataacgggagcactgcaactgtcgggtggcatttcggtgtttaaagggtacaaatctttacttggatcgcggacgaagtcgtggaaccttaccaacgctccacctccataataaataaagtgcaagctgggaaaatgaacttgcattctttccaaatattgctgacaataatcatagtcctcctcatccacgtaggacagcggactgggtattaaaagtgcaactaatgatcgtcctcccagattattggtagcacgatctgtttcaagcaagtcctcaactcttgaattcagagtgttaaggataagtggaagattaaaaccaggtggatctggaatggaaacaattattgaaacaccaattagtttagtttattcttacgccaagagtgtgaagttgagttccaattttcatagacgttgattatgtagtcggtgttatgaacaatgactttcgtatcaaaacctgcaaaaagggtaaccttacttgcgtaaggatgaatgttaaggccctgcagcacataactgcaaaaacatatttatagatttaaaaattgtatactgaatatctggtttagcaaacttacgttacgtaatcaacaacccagccaaagggccagtaggtgtcgacaaacacatatatatcagtcattattgtgtctagattggatatttcagaccattgcggagacggaaagtaatccatatttcctaaaaacagaacaacaaaatgataaatttgcataagtttgttaaagaaagcctatcgggaaccaccatcaaatcaaaatagacatattagttatatttaggaaattgaagtagggttgtttattaaagcatatcattaattacgaaaaaataaaacataaatgtaaaacaaaaaaatagttatttttgtaaggaaacttaagattaaaatctgcggcagtatcctaatattaccacgcactagttgccaatcattaaattagcctgagagctaatattgcgaatacaattattaacaaactggctgctatacccgagacaccgctgtagcatcccatgttgaccattgacattatataacgccattgatcaggggtctggcaagcatcctgtatacaggacgtggtgtttgatgtagcttggactgacaaatacaagtctggacactgggtgatagtatagtagccctcgcaggcatttgaaagatcgtagctaaaactatttccacttatttgtgtgcaactctgatctatcgagtttgtcgtagaaagagtagttgagttctgttgcggccatgcatatgtgcgtgaagtacatatggtataagttcctccattctgtgattgaatggtcaaatagcgattcgcaccagctccaaagaaatagttagaagaaactcgataaaagttcacctttccaggccctacatattgggctgtttgatcagtacctggtaagtatttaaaatagtaagtataaaaatatagatatttaataataataataccccagctatttgtgtaccaagttgatccacaacgtggattaataacgcgacggggaactgtaagaacaaaaagcctttaaataaataaaatacataaagtaagttgacatactttggacaatgcgctttgctacgggtcccgctgaagtcgccggtgtacttcccaacgttagggagaaaaggtcttgagtgggatctcggacaaagcttgaaaaccgctgaatgcttccaccaccatagtatataaaacgcaggtctggaatttgttcctgaatgtactgaatttcagtagtggcataactggagtctccatcattaatggtttgctgattcggaatgattagagctactagtgagtgaccacttaagctcgaattagtcttttcttcattcattaagtactgggttaggttttgaattgtacgcagcacattaggaaggttgaatccctgagtatctgtgaaagacccgttaaatcaaaagcatatatcttgcaaatggagcttacaagttgcctgtgtagttgcattccattgttgatagacatcggtaatatagtttgtggtgtttacgataatcgaaccatcttgtgctgaaagcattgtgattgtgctggcatacgggtgaatattaagctgctgtataacataactagaaataattaaacaaattattttttatggataacatgatgtatgcaatacttcgagaagaccaacttacgctatatagtcaacaatggtgctgtattgccaagaagtatccaaaaaaagatacaggttagtcattggagttatggcatcagtcaagtcaagattactagtagccatacaagatacatcgtttaacgattgtgctgtttaagggaagcgcaatccgtagtgcacacggaagcaataaaaatatatttcaaaagataaaaatagttacaagaactttctaatattctagatatctaagtaagagcaaggtggttccgcgacaatatggatttattattacttacgcacatacgtcaccagagatgcggtggcgttaccagcaaattgggaaataagggaaggctggagggtgacacgcagctgcatctcacgatctaatattagagcaaacgcatttgtctgatcctccatttcctgagacggagccacatttgtgaattgattttgcctactgcaggcattgatccctgaactaaggacaccatttgttgagtaatacatgcgcagcagttgagaaagtttaaggctcggtgcttgagtcctccaactggctacatttttagccaaaattaaaccatcaaggccaccgcgaatctccgcatcggttgcctcaaggttgttgcgctgcgataggaagtaccaatggggtagaactgtgtcattccatccaccggtagccccaacggaagcgggattgccattcgacactggtagttggaccaacgtgacttccgccaactccccagccaaagttgccgcccacctgttgtcaattgtattgcttgtctgggactgactacgaccacgagcgcgtcgctgggaagccagggtcaatagcgtattaagttgcacagtctgctgctggacaccagctgcaatgccggcgatcagagtccctccagatatcgttccccaacgtgttcgtactaggccatcctcgacagggcattggctagtctcagggccggcataagcccagtcggattcgtagtccaattctcccaattgttcgtattttgatacggagtcggaagatcgtcctcgtttcgagcgtgcctccagccattcagaagcgcttataaaattattttcatgctccttttttaatgatctcggcagtcgctgggctcgatactgagagagttgattgcacacattgttttcatcgccgcgcgttcttgtgtcaaaggtgcttgatagcataaaatggagggagcaccgctccactctcgtcaatgaactgttaggaaaggtattggcgtttcccggaataagacgtgagagcaaaatttttaactttggaaactgaaagcctgttggactgtacggtattaccccgtcagccacatttattcccgcagccttcttaatgccatcttgacggaaacgatgcagcaaggctaccgacacggttcgaatatcggcttgtactcctgaactagctgcgtagctgttttctactttttcgataagagaaatgagcgtgtccatgttggctggtagacgattatcccgattcataaagtatgacgtattataacactccaccaatgagggcggaatttgcaacatagcattttcttgtgccttagttttcaggataagggcagcagctagacagcaaactgctgccaaaagttgttgcaatttcatggttagggttctcgttttcgtcgtggtaactaaaaattgaattgcatcaaatattattatattttacatatgaaatcggactaaacattggatatgcaatgtgcgtatcaatttgaaaacagtcaggtgagtcaggtccggtatatatgtacatacatatatgagtggtatatgtattcgatgatatcgctatcacattttatgagatcctcagactactggtgtagtttgtcctatatagattggaaatactgtacgactgataattgtgaaactttgcaatcggtgatacattgaaaaatgagtcaggtgtaaaaattacacataagaacattgtgggcccgcgccccaatttttaaacttgcttaagctaacatagtttaagttccagcgattagatatgaagttttgcgtatctcaaagcatgatcttgaattatttataacgtaaggcaattattgtgtacaaaaacgaaaaaccatatttttattcacgaagtaattttttaattaaccgttgataacttgcttaagattttatattttcactaccgcatcctaccacacccactaaccacactaccttgttttaccagctgtctcgcttgaactgagtgtttcattttctgaccaactacacctgtgcctcgcccatgagcaatcgcttttatcttttaagcaatgtttatcagtaaaaacgataagattaaacccatagaaaaacagacacagtggtaaagccaatagcgaaaagtaataatataatagtaaaataatatatatttattaataaaacaagagagaaactatataagagttcctcgaccatcagttacgcgttactcccgttaatttctgtggcacatcgatggaaattgaggaataaagtgagaaaattgagaattcaataattgttcaaaagtgtgtgtgtgacagtggtcggcggtttgaaattggcaagacaaaaattaaaacgaagaaaataaaaacatttttccaaactgtatgcgtggcagttttggcaaatgaa

SEQ ID NO: 19946 - DNA, 1528 bp, DROSOPHILA
ttaccacgacgaaaacgagaaccctaaccatgaaattgcaacaacttttggcagcagtttgctgtctagctgctgcccttatcctgaaaactaaggcacaagaaaatgctatgttgcaaattccgccctcattggtggagtgttataatacgtcatactttatgaatcgggataatcgtctaccagccaacatggacacgctcatttctcttatcgaaaaagtagaaaacagctacgcagctagttcaggagtacaagccgatattcgaaccgtgtcggtagccttgctgcatcgtttccgtcaagatggcattaagaaggctgcgggaataaatgtggctgacggggtaataccgtacagtccaacaggctttcagtttccaaagttaaaaattttgctctcacgtcttattccgggaaacgccaatacctttcctaacagttcattgacgagagtggagcggtgctccctccattttatgctatcaagcacctttgacacaagaacgcgcggcgatgaaaacaatgtgtgcaatcaactctctcagtatcgagcccagcgactgccgagatcattaaaaaaggagcatgaaaataattttataagcgcttctgaatggctggaggcacgctcgaaacgaggacgatcttccgactccgtatcaaaatacgaacaattgggagaattggactacgaatccgactgggcttatgccggccctgagactagccaatgccctgtcgaggatggcctagtacgaacacgttggggaacgatatctggagggactctgatcgccggcattgcagctggtgtccagcagcagactgtgcaacttaatacgctattgaccctggcttcccagcgacgcgctcgtggtcgtagtcagtcccagacaagcaatacaattgacaacaggtgggcggcaactttggctggggagttggcggaagtcacgttggtccaactaccagtgtcgaatggcaatcccgcttccgttggggctaccggtggatggaatgacacagttctaccccattggtacttcctatcgcagcgcaacaaccttgaggcaaccgatgcggagattcgcggtggccttgatggtttaattttggctaaaaatgtagccagttggaggactcaagcaccgagccttaaactttctcaactgctgcgcatgtattactcaacaaatggtgtccttagttcagggatcaatgcctgcagtaggcaaaatcaattcacaaatgtggctccgtctcaggaaatggaggatcagacaaatgcgtttgctctaatattagatcgtgagatgcagctgcgtgtcaccctccagccttcccttatttcccaatttgctggtaacgccaccgcatctctggtgacgtatgtgcgaaatatggattactttccgtctccgcaatggtctgaaatatccaatctagacacaataatgactgatatatatgtgtttgtcgacacctactggccctttggctgggttgttgattacgtaacgtaagt

SEQ ID NO: 19947 - protein, 498 aa, DROSOPHILA
MKLQQLLAAVCCLAAALILKTKAQENAMLQIPPSLVECYNTSYFMNRDNRLPANMDTLISLIEKVENSYAASSGVQADIRTVSVALLHRFRQDGIKKAAGINVADGVIPYSPTGFQFPKLKILLSRLIPGNANTFPNSSLTRVERCSLHFMLSSTFDTRTRGDENNVCNQLSQYRAQRLPRSLKKEHENNFISASEWLEARSKRGRSSDSVSKYEQLGELDYESDWAYAGPETSQCPVEDGLVRTRWGTISGGTLIAGIAAGVQQQTVQLNTLLTLASQRRARGRSQSQTSNTIDNRWAATLAGELAEVTLVQLPVSNGNPASVGATGGWNDTVLPHWYFLSQRNNLEATDAEIRGGLDGLILAKNVASWRTQAPSLKLSQLLRMYYSTNGVLSSGINACSRQNQFTNVAPSQEMEDQTNAFALILDREMQLRVTLQPSLISQFAGNATASLVTYVRNMDYFPSPQWSEISNLDTIMTDIYVFVDTYWPFGWVVDYVT

SEQ ID NO: 19948 - DNA, 4166 bp, DROSOPHILA
ttaatcaaatcgaaagaaataccaaaattgggctggtgccactcctccagaacgtggcgaccctgcaatggatgtgcatgtgttggatgtctttgattctgttcgattctaaattcgaaactcaatcatttataggcaactgactcatgacagaaacttccgttgcgaaaaacgtgtagccagaagatatgttagccaaatgcttctacatggcgctcttggattcgtatgtatgtatgtacatatagctatatatatctatatgtgtgctacggcagtatatggaaaccgctaaacaaacaaacaaacagccagggcgttatgtaaagtaaacaatttgaagacgaacccaggcgaacggaagggccccagaaagtgaagcgtttttaataggtttcccatttgtagcgcagaacgatgatgatacagtgacagcttggcaaggcaaatattgaaagtttctctggacattgcttgaggcccacaaaaatttgaaaaagggcagtgagatatagccaaaattattgttccgcaagcacaactaatatctattttaaaacaaacaacaagggaaagtctctaaaaataagaatgtctcaaccaaaccacggagaaacaatttgtttcagacaaatacaaatacgatgcttaaaacaaacaaatgccggaaagaaatcgtttctagaaagtactttttaaaacgtttttacgaccaattttgtttgacctttagaaaaatgaatatagaatttgaaatttggagtctaaagaatatttgtttgttttaaatttcgcgactaagctcaccctctcgaaggactactgtaattgtcaatttcgcctcccaaggccgaaccgcacccaaaatgtactctaatttacgacccataacaaaactgcacccgtcatgcgtctcacctgcttgtgcgccattccactccacggatggaagtggaatccagcctgctgacctgttgacccgtgccacgccccctccctcctacaggacgtagttgcgcagcttttcggtgggcagtgtccgattggcgaacgagacaatcgccgccgccggctggctgacggacaggtcgcagaacacatggcactggttgtccgtggagctgtgcgacctcctggccacgaaggcgaagatggtcttcttgtcagactcgccctcactggtccacatcctgttctccggatcgatggcacagtgcgagataacatccgccttgtagtgcttccggaagaacttcttgcgcgtattgtccgtgagcgtgatgccctgcgaggagaccttgaagtgcacctccgtgggctgcggcaagggttgctgaccgtacatctggcggatggccttgcggatggcctcgtttcctgtcagcgattccgtgtcgcaggagtagagccacagcacattggtggctgctccgtgggccaatagatgctgctgggcaggggttgtggcccgcaccggtggtactatatcccgatcgggcagacggaggagacatggcaacgccagctggcttatggaatgctcgaagacgagggcggacagtgaagtgaacaccggctcgtcatcgcagcccttcagatgcactccccccttcgtgggctcgatgaggaagtgacgcaccagctcctgtgaaccgggaggcggttgggacacccgcaccaccaggccataggaatccttgtacgtggtggagtccctgaccaggaacgtgcccggctgggcagaggccagcagagcgatggcatcttcgcgagtgagatttggtttgtaccagaactgggacgaactacgggcaaattgtacggaatcggcggacacctcgagtggctgcagtgcaggcggtacgccacgacgtggccctgtttggtagatcgactctgggggcaactgggtcgtcggcgccagagacgcagatgatgatgatgatgccccaaaaggcgtgcgcggcgtgaccggaaaggcgggcgtttctggcctactggtgggactaggcgtcatctgctgttggccattggtatttgggttgctcactctcttcgtactggtggcataaatgggcgaagctggtgctatagctggtactcctattgccggcaatggcgaggtggacttggatgtcgatgtggatgcggagagatcgcgacgagtgcgcgtgagtgtctcctccatgtggttctggccataaacggcgcccagttgctccaacggctccaactgctggcgtttgtgggtcgtttccaagctgttaattgtgtgataattgcgttccatggtccgccgattgaccacgccatctggcacatcctgatccagccgcagatcctcgaagtgaatattcctcgtggtatacggtgtaggttcgggcctaacatcatccagattcagattgaactcaaaatcgtagttgtatttcgttgatttcccattagacgaggggctcttgcggtatagggttccattgctatcgttcttcagcccaattccatagccatcgctcgggtagtattgcctctgcggcggagcgggtgccactctggcccgctccccggacgactccctatccagattcctatattcattgtagaccttttcgcgtcgctcccgcagcagctgctcgaaattatctctcaccggcgtcggcgttgcgctgctcgacgtgtagtggtatgtattggctatggtgttggtattggtcgaactggtgggactaacggcattgcccagcgttttgcgcaccagcaaagggctcgttagacgtgttggtggctttatcatatcgccagtaccgccattattgctagaactattcgaattcacattcgtattcgttggcccgaaatcaaagtctagaaaactatccactcgcgtcggtgtcggagtttttcgcaacggtgtcgaagttttggctatgccatagctaaatggcagcgagttctcgcgcgcgtgataaggtattccatatccattgccgtttccaattccatttccattaccaattccacttagattcccatttccattcgcctgcccattgccattcacattatagtttttatagtaattattgttattattggccgcggtgtattggtattgatatttgtggtcggcggcagcagcgctttcttcgtacggcgtccgcattgtttcgcgaattccaaaagactgattcaaaaaaaaaggtcgagaagatacaactcaaaccgtagagtcggcgttggcgttccgctctctctctctacctctctctcgcgtggcaagtcaagcagcaagtcaacctcctcaagtcagtttctggttcgccatgagtgggcacagtgggctaggccctcgtcaacccatcttttaggtaaacatttctaattatgaacttttaatagtgcgaccaacctggcgtatgggtaatatttttgacagatttgtggcaaaagtgcgtatgagcaacatttgaccttgttcgatcgtacgatagaaaaaaactttacagtaattgtaatcatttataacaagtattaaaactacattatcaatatatttcacaaaattgcaatattggttacttgtaaatttcgatttttggtgacaccaaaaactgtatcaaccaaatccagagatattgcgaaagtgaaagaacagctttataaatagaactgtcatcgggtatttatttaataatcccacgcccactgtgcctccaatgctcacaagtacacgccaaaaggtgttggatgccaagagagatcgttccatgagagagtgcacatagcggagacagggagagagatgcgatgtggagaacgcgagtcgaagagagtggagcgtcggtgatgtcatccccacttattgacgaatacacacgaaggagagccccagccaaacgcacgaactaatcaaaacaagcaatcgaagcctatacagattaggagccccgtaaagttcgatccgtgcacgttggacgcgaattttgatcaaagaacccgcacattgcagtcccaattggagaccaacgtgtgaagcgatcctattggagtgcaattgataacagctgtggaagatcgctccctcttggacacctctctccgtctctctcacgtaacaagaaacctcaattggggggctttttgaaatggtaattcgccgatggcac

SEQ ID NO: 19949 - DNA, 2166 bp, DROSOPHILA
acaatgcggacgccgtacgaagaaagcgctgctgccgccgaccacaaatatcaataccaatacaccgcggccaataataacaataattactataaaaactataatgtgaatggcaatgggcaggcgaatggaaatgggaatctaagtggaattggtaatggaaatggaattggaaacggcaatggatatggaataccttatcacgcgcgcgagaactcgctgccatttagctatggcatagccaaaacttcgacaccgttgcgaaaaactccgacaccgacgcgagtggatagttttctagactttgatttcgggccaacgaatacgaatgtgaattcgaatagttctagcaataatggcggtactggcgatatgataaagccaccaacacgtctaacgagccctttgctggtgcgcaaaacgctgggcaatgccgttagtcccaccagttcgaccaataccaacaccatagccaatacataccactacacgtcgagcagcgcaacgccgacgccggtgagagataatttcgagcagctgctgcgggagcgacgcgaaaaggtctacaatgaatataggaatctggatagggagtcgtccggggagcgggccagagtggcacccgctccgccgcagaggcaatactacccgagcgatggctatggaattgggctgaagaacgatagcaatggaaccctataccgcaagagcccctcgtctaatgggaaatcaacgaaatacaactacgattttgagttcaatctgaatctggatgatgttaggcccgaacctacaccgtataccacgaggaatattcacttcgaggatctgcggctggatcaggatgtgccagatggcgtggtcaatcggcggaccatggaacgcaattatcacacaattaacagcttggaaacgacccacaaacgccagcagttggagccgttggagcaactgggcgccgtttatggccagaaccacatggaggagacactcacgcgcactcgtcgcgatctctccgcatccacatcgacatccaagtccacctcgccattgccggcaataggagtaccagctatagcaccagcttcgcccatttatgccaccagtacgaagagagtgagcaacccaaataccaatggccaacagcagatgacgcctagtcccaccagtaggccagaaacgcccgcctttccggtcacgccgcgcacgccttttggggcatcatcatcatcatctgcgtctctggcgccgacgacccagttgcccccagagtcgatctaccaaacagggccacgtcgtggcgtaccgcctgcactgcagccactcgaggtgtccgccgattccgtacaatttgcccgtagttcgtcccagttctggtacaaaccaaatctcactcgcgaagatgccatcgctctgctggcctctgcccagccgggcacgttcctggtcagggactccaccacgtacaaggattcctatggcctggtggtgcgggtgtcccaaccgcctcccggttcacaggagctggtgcgtcacttcctcatcgagcccacgaaggggggagtgcatctgaagggctgcgatgacgagccggtgttcacttcactgtccgccctcgtcttcgagcattccataagccagctggcgttgccatgtctcctccgtctgcccgatcgggatatagtaccaccggtgcgggccacaacccctgcccagcagcatctattggcccacggagcagccaccaatgtgctgtggctctactcctgcgacacggaatcgctgacaggaaacgaggccatccgcaaggccatccgccagatgtacggtcagcaacccttgccgcagcccacggaggtgcacttcaaggtctcctcgcagggcatcacgctcacggacaatacgcgcaagaagttcttccggaagcactacaaggcggatgttatctcgcactgtgccatcgatccggagaacaggatgtggaccagtgagggcgagtctgacaagaagaccatcttcgccttcgtggccaggaggtcgcacagctccacggacaaccagtgccatgtgttctgcgacctgtccgtcagccagccggcggcggcgattgtctcgttcgccaatcggacactgcccaccgaaaagctgcgcaactacgtcctgtag

SEQ ID NO: 19950 - protein, 720 aa, DROSOPHILA
MRTPYEESAAAADHKYQYQYTAANNNNNYYKNYNVNGNGQANGNGNLSGIGNGNGIGNGNGYGIPYHARENSLPFSYGIAKTSTPLRKTPTPTRVDSFLDFDFGPTNTNVNSNSSSNNGGTGDMIKPPTRLTSPLLVRKTLGNAVSPTSSTNTNTIANTYHYTSSSATPTPVRDNFEQLLRERREKVYNEYRNLDRESSGERARVAPAPPQRQYYPSDGYGIGLKNDSNGTLYRKSPSSNGKSTKYNYDFEFNLNLDDVRPEPTPYTTRNIHFEDLRLDQDVPDGVVNRRTMERNYHTINSLETTHKRQQLEPLEQLGAVYGQNHMEETLTRTRRDLSASTSTSKSTSPLPAIGVPAIAPASPIYATSTKRVSNPNTNGQQQMTPSPTSRPETPAFPVTPRTPFGASSSSSASLAPTTQLPPESIYQTGPRRGVPPALQPLEVSADSVQFARSSSQFWYKPNLTREDAIALLASAQPGTFLVRDSTTYKDSYGLVVRVSQPPPGSQELVRHFLIEPTKGGVHLKGCDDEPVFTSLSALVFEHSISQLALPCLLRLPDRDIVPPVRATTPAQQHLLAHGAATNVLWLYSCDTESLTGNEAIRKAIRQMYGQQPLPQPTEVHFKVSSQGITLTDNTRKKFFRKHYKADVISHCAIDPENRMWTSEGESDKKTIFAFVARRSHSSTDNQCHVFCDLSVSQPAAAIVSFANRTLPTEKLRNYVL

SEQ ID NO: 19951 - DNA, 14686 bp, DROSOPHILA
ttttttttcttttgctagtgcaagaagaagaacttcttcagtgggttcagttcgtacaattagtataaaatgcaatgcactatatttatgctgttttttgtgtaagtcgtatatgggtaaatatagtacgttgttgttattaaaactaaaagtaatggtagtaaatacaaaatacgtagaggaagcagtaaatacgcaagcctaactcaaaagcgtgaaaacacaaatccaagttacaaatatttcgctttgcttaaatatgtattctatataatatagagctatgcatggctatgcgtgtggacagcaacaattcaagataaaccatttcgatttggcaccgatgcctcaaaaggtcccgaaaagccctctggggattaataattcctgaatgccccataaccataaccatctgggttttgagtgaccgctgccaagcatttgaatacactatatttgttcgcatatagttatttgaatggattataggatatcctcgagttgtaaaggcaaagaaattctattgttaatttttttgtgcaaatcttggcttatatacagacacttgctttacgccattatcattctccagacacacaaatatatctgcgcatatatatatatacgctgtttaactatagttgaattcttggtggtacgcgtatatgggttactcctaattacggttaccattactcacatacgaactaatgtctaagacaagctattgaagaggcggcgagtttcgcgtgggcgtggccgaggggcggagcgggtggaaacattattcgtggccagttgggcgggggcatacagctgaggaggaagcgtcgacggtttggcagttggattcgttgcgcgttacatcaagtgatggcggtggtgggaggtgggtccccctgcccaagaccagccctccacgcccggaatgctcctctgtcccgatcactcatcgcccggaaaagcgaaagcttgaggtgtgtggaatagggtttccggtctaggccgcttggctctgctgtggattggcggtggccgctgaagcctcggaagttcccgccactccggcacttccgccggacgtgccgctcaatgcagccgcagctccggctgttgcctgcgactgttgctgctggtcgacgccgtcgaagtagtcggaggcattgccgcggcaaattgggcaggtgcgattcgactggtaggtaatgtaggtaattgaatattttagatttattgtgacttttattttacattttaaagcacttactcgcagccatttgtccacgcacttggcgtggaattcatgggaacagggcaggacgcgcagtagctgacgtagctcaaagtcacacatgcacaccacacaggatgattggtcgcctggaggaaatataattgggtccgtaagtaaatagtggacaagtagttgaaacaaatcaataaattgtataaatataactttaaattgcagcatatttggtaaattttgtacatcaactgaaatttattttaaaaaatatagcacactttttcgggcagacttcaaattacgtatacgcacggttgccttcgccggtgtgtgacaaatgtatcttaaatatatcatcctacaattttgttttcctctatgtaaaaaaagctgttccactggtcggatttttacataatcttgcgaaagattaaatagctggttccggatctacaaagagacttattcactcaccgttgtgcacctccgggttgaacttgtagctgggcaactgatcgatctcattgcgggtgagtcccctcggcttggcctcacccaatcgctcggccaggctgagcagcgcctcgtagttctccgtctcattggtgtcgccagagctcagatcatgttggttataaggcgacagcgggaacatggccctatacaaaggatgagcattgggttatataatggacaaagagaattgagatctgtcgaacgtacaggaaattgagcaagaagccagggttgatgatgcccgacgtagcctgaatctggacaggagcttggtgggcggcgagcgactgcggcggcaggacgtgacgatgtccatggttcgccgtccagaaacgcggtatgcggcggtggggcgggaatgtgcggcggtccgatgagaagaggatctgctgcgcggtggttatctgggcgccggcagcgacggccgctgcagctgccgccgtggaatgtagatgatgggtggcggccgctgccgccgctccgctcagcggcgtgatatggatgcccggcggcagctggtgggcatgcggatgagcatgaggatgggcgtgaggatggccatgggcacccggcgcttcaatgggtcccagattggccgttgcaatggccaccacatcccgctgctgctgctgggcggtcaaggtggcctgggaaatcatttgctgggctgtggtataggtagagacattagataagcattggaatctagaactcagtacttaccctgaataagtggctgatgctgttgttgaagtggaggagcggccagtcctggtggtggggcggcggggaatggctgcgtgtagacaccgtgcaagtgacagggtgctagtctagcctgcgccggtataggataggtgcagaaggaggcccagaagggctccgagggacgcaactgcaggttcactggcacctggttcagattgaggtccaccatcagggaggcgggctgtggcggtgcttgtggatagccaaccgcttgctggtgactcggtggctgcggcggcgcctgcacctgctgcagaatgggacccaccgagctgctggaggtggctcctcccgagcttcctccactgctgcccaaatcccacggtgaacgctggacgtgcggcggtggcacctgctgctgaggaacgtagtgcggttgtggctgatgatggtgcatcgggtgatagttggatggcggctgctgttgctgctgctgaggatgatgaacctgatggccgtactgctgttgctgctgctgcgtggaggtagccacatcgcgcaaccgcgggcgtctaagtggcggacttccctgctgcatctgcagagaattacccgttaagttaataagctattgagaaaaagaccattctggaaactcacgtgtgccatcggacaacggtgttggggctgtggtccgttcgggggtcttccggagatgcggcggcgcttacgcgacggactgtcggagttgaggcctccgggtccgttgttcagcgacagcgaagagcccgacaggcccgaacccgagggcagttcacccataagtcctggtccgccggtcgaagtggacgcaccgttgttattaccataggccatgtgctggtaatgcgatccattgcgtccgtagccaccgcccccgctacctcctccgttgcgcataaagttgtacgaagaaccctcagctcgatcccgatggtcgggtcctccgttctgttcggagtttccaaagtgctacggatgaaggggttagtatttagatctttctatctctgctatatctctgtatacatcgagccctaactatacttatagttgtattaatcagcttacgttattcaagttcctgtcgttgtagttgcgctggtggtgtccggaattgatcaggccattcatggatgaggacgggttgttcaagttatcggacatataccgacgtccattgtggccatgtccgttgttatttccatttccgttgccggaatagtcccgcgattgagccggacacacgccacgtcggtagttcatataatcgggtggtccattggtattaccatttacgatcccgttcccgataccccgattgttattcccgttgttgtagccacgttggtgattgtggccaagattgggggaatttccgggtccctgaccttggctgtggctattgatgggtgcggatgcgttattaatttgatgttgttgttgttggggcagcatcgaagacgcagacgaagacgttgacgaagacccataaggaattatatcggtacaagaatttacattcacaacatcagtaggattactatttgttgttggattggttgaattgaaagttgttgcgttgattgaatttgaattcgttcgtgttagcggaagggattggcgattagtctgttgctgtgggctatgcaatggatggtactggtgtggcggatggtactggtatcggtattggtactggtattggtactggtactgactatgatgtggattggggtgatggttttgactacgtggcggcgggttatgctgattctgatcactagaactggtgttggaactggaattggaatgggaatgggatctgtggccaaaggatactactcgctgggcgggcggcgtgacagggccaagcgttaggcacaaacgggcaggattcagtctcaccagggaaacggacatggatccataggtgtgggatcccccacttcccggtacacatctcgtaaaaattggaattttggttctggttggggtgggcttggggattactacgctgactaatgggattattgctagcattgctgtttgtatggccgttgctgtgtggggagttgggggagtaggaatgcggtgggtattggcggtaactgtttgactgctgtggtgaactcgaatgcgggtagtggggtgtgtgcatttgggtgtggtgggggtgatggtgaccttggtggagggaatgattagtgtgaatgtggctctgagtgtgaccattgttgttgctgttgttgtgatgatgatgcgctttgctattgttataaatacaagttccgctagaattacttgtttgtacatcgctggattttcgattttgaggattgcagttgcagttttgttttagataatatgtaatacatatatacgtatatatagagagtataatattcggttgtacgagatacagttgaaaattgttcaatcaaatcaatgcagtagcagtgtgtggtagtattaaacacaacccatatatagttatttgtatgcatattacatgtacaggtagtaggtagtagtagtggtgtatatatgcagagtggtagccacacatacgttatttatatagttttttattttgcagtagatttcggttttttttggttttatatgaagaagaaagaaaaacgaaaaagataaaaataatatatatgtaaatggcaaaatgcaataattagatattagtttaatatagatatatatatatatataatatcgatatgtacacacatttagtataaacaaatacgtacgtactaattagtttcacatcgtttgcagatatttctatttccttttttttagttctgctcttttgttttgaatgcattttaggtggaaatttggttagatttctattttatttatttatttgttgctcgctttgtttttatgcacactacgcttaccaaaaatcgaaatagaaacggaaatcaaaacaacgaaacgccaatcgcacactgttcttcacactattcaaatttaacgtaacggcaaaaaggcaactgtaacgtaataggccgttctcactagctaaacacgagagaaatacattggatacgtatatatatatttgagagagatagagagagagtgctggtcatgctccaaaactatacgaaagagaacgtaaaccgaaaacgtaaataaactggtacaaaaacaactcgtacgtaagcttgagcttttcttcagcctgtgaaaaagctattacgaattactgttattattattatttttgcggtgtgggaacggatacggaaatggaacagaacgagatccaagagatcgtgatcgagctgggcacacaccataaagtagttcttatgactatgtatagttacttaaaaaaagtgggggaaaaggggcgtgtctaagcgccgaacgttttaatttaatcgtaacgtatgtaagccggtgtctgcgtaacgtattaactcttacgatctagatgcaaaagctgcgattgcaactggataaataacaactattgtacgtacagctgtgttttggataaaagcagtgaactattcttaaaaatattaacaaattatataaaacgatttgaaaaacataaaaatgaatttaaactgtatgccaaaacagacctttttaaaactgatatagcaacgctgaaatttaagtatatttgttagaagtgttttctttttcaactactattatttaaacacagctgtatctcaggtagacgacaaatcaaagaagagtacttgataaacagagtgtgacaatgaccatacaatgctgtacttgttgttattgttattattactattattgtggctcgcttaaagttacacacgcacacacacaaacagtcagtaatagaagagagcagaaagatagatatagaaagagagcaaggagtaaatcaaaaggagaaggatatgctcgagctttttaaaaagagttgaatttaacagttgtttttcggtaatttgtctgttttcattgttaaattgagttaacttttggttttttggattttctattaggttggtttgtcaaacattctaagccgcagtgtgcaaaatgcaaataaataagtaaaacattaagctgagtttgttgatcatttgcaaaactcgactcggttcgcctcgacctacgcaaagttaagcaaaatacatcaatcaatagtcatcaatatacttagctatcaatcaagaaactcaactaaaatgcatcattcataaaatgtcgaaatcgaaaaaattacaactagttacggtacggtttggataaagaggaaattttgtaactaaattcatacttggcttgcacttttcatatttatcatcgcatttatgttcgttcttggtttttttttttgcttttttgttttatttaacgaatagcattaaacgtgaagcgacactattgcgcaaaacgaaagtaaggttatcaaaaatcaaataaaaccgtatatcaaataataacgttgtgggtgggtttaggtcttgaaattgggagcaggtggaaaccctacctgatggattaaatagtgtacgaattgagacattctggcatatataattggcctacaaaaatgacaatatctgattaaaatattgtagtggatgtctggaaaaacaatagaatctgaatctgtggattaacttttaatcttataaaatgaatttctttttcattaatattatatggtggtgcacaagtaaattcgatttatatggaaaaaaccctcaatagataatttgaagttttaacgtcaactttcgatagccatgcaaaataatgtaacgaatgttactctaatttacacttaaattgaaatagtcctgtttcgatgcagcatgaaaagcacttacccacccaactaaataattgtaaattccttacaatagtcgcctgccgatggtcgatgtcaccgtcgatgtttcctttaccaatcaattagaactcacttaaatctactactgactcctgctctaaagatttaaaagcccgtaaaggtaatggtagtaattgccagctaaactacccacacaataaggaatcagggggaaagagaaggtggatggcttttaagataggtccttggggatgtactgaatgggccagagagtgacagagagagggggagaaagagagatagcatgctggtaagtacttaagtccgttagacgcgctttactcaaaatcaagaagaagcgttggggacaaagaaacaactacgaaacgaaagagaaattgctacgtaataaggtttggtacgccattttcaagtgcttttcatgcattttcttggggaactgtttgatcggtcttaagtctatgaaacattgaatgttcttcaagttattacaagatattatggaaattaagagtttctgattcggttaatacgcatacgatatcttctacgtaacttcacactgctcaaatttcgggtatggtaatttaaaagcggttaaaaaatgtacatacgataggtaaaccattaagtaaattcaaatcaaaactcagttcttgttggatagtataatgtgggtgtgtatgtgtagtttttgatgtcaatgctgggatagttacaacgttaattagtacataatggtatggtatggtaactgagtgggttaggatgtgggtttcgggtgccaatttcgacaaggaacaaaacacaaaatgtacagtacgcaagataacgcaagagagttacaaatgatcgagaagtataaatggtataacactatatccattgtgtgtcgccatcaaattggcaaggcaagcttttttgtttagtgcttcgaaaattcaacggttaggaccaattcaaatgtttttggttgcactactgaacgcgacattaattacaaaattctccctttagcctaaaagcgattttcggttcttgttgactttttttttcagttcaggtgtaatagagatagagatagaaagtagataaactgttctagtcgtgggggaagttacaaggatatgtcttgttaattatggatggatattcattgggggctttcgggagcggttcggattggatttgggggtaacgtttcgaattcgcttttcttttcaatgtcacttaaggctaaacatagagctcgattccaggaaaggatctcgagtgagtaggtggaaatggtttaaaaacgcaagcggctctcggctcttaccaatttgggtttgcatctttgttattgacattgttgctgttgttgttgctgctgatgttgccaccgttgttattgttgttgttgccaccgttgttattgttgttgccgctgttgccaccgtttaaattgacgttgcaccacggactgttgcccagccacaggttgttgttgccgttattgctggaccgctgctgcccctgttgctgttgctgctgttgttgttgttgctgctgctggacgtgcggatgtgtgtgtggcgagtataccatgcgaccgcccagcccgccaccaccgccgcgttgcgagcggaccgatgaagaattgcgggtaaagggccgacggctgctgcccccatgattgttgccgccggtggcattcgagttcagcatgctgctgccgcactgttgttgctgcagatgctgctgccgcactgttgttgttgctcctgcctgcggttgttgctactgcctgttgttgttgctgctgcttctgctgttgtggatgccactgctattgctattcgactttcgactgggcgagagctttctttgcgcttttcttgtaatcacacagctgcgggcggaattagaaacgagacgatttgcttattaagtggccgcttgaacacttaactatgcatcccggttccgtttgcaatctgaatacgattgggaccatccaaaactgatcataattgaacatttttgttttacaaatacaggcgactcaagggtagaaatgaaagcattattgtatagcattatcttttgtcctaaaaagagcttttttttctaggcccgaatcactcaagaaaatttactttacttccgcgaattcttgagaaattgataaatcatatcaggtatatttagttacaataactattagctgatattttgtattttaatcaaaaagttgagttcgttcaagttcgtgatgccaccaactcagattataatcgaaaacggaaaacggttttttacgctctagatgtttgtggattttaatttttggtatttgatattacatttttgagttttttattattatttgtttaggaagaagtattctaagccggacccgcgctccagaacagaaagcaaacaaccaacaagccaacatgctcaataacaaaacatttatggtttctctagtaggccaaatacttacttaggcaaggataataaaatttatatatataaatgtgagtatatattgatatgtatatatacgtgttggtgtgtttatgtgtggatatacgtaaatatttattggaatcgtaataaataaaacagcaacaatttttcagtttgtttaaagagtgtagctttaataggttttcaattatatggaactgagatgagatacgtgcgtggttagtttttcaactataggtataagtacgatataaatgtatataaattcatgtatagggggtatgtggaaaagctgccgatacaaatacagatacgatatatatagatatagatataaagttaacagttacgggtacataggtagtacatatgtatgtatgtgtatatgtgaactaactccgccgactccgtctgccatgatatgtggtaacgataaattttacactttcagcgtttccattttaagttgttaaacacaataacccatcgttaagccgcccctcccacatatacataacaggtccattaaaaagtccccgacctaccacagtaaacatttttttttctgccaaatttaagtttttcattcaacaaagttcgcttcaatttttcaataccatttatgtagtaggatttctcctttgctttcaaataggcgtcacttttcgcgatcacttcttcattcgacgttaatttcttcccagcgagcattcctttgagacctgaggatttggatatggaccgaaagctaacaaattctgtgtgaggacgaggacttatcaattgacctaatacatatttatgtgttttacatgaatgtgtcaacataacaaaaacaatattagtggccctgtttttttttttgtgtgtagcgctttgggtttcggtttctattctgctttcggcttcgggtttggtggatatgtatggatcgaggtcgaggggcggatgactgattacaaacttatcacttatcgcccggcgggcagttagtacaatcgaaagattccagatcaacagagcgacagttaaagagggttacacttaacgtacatgggccatgtgttgtgggtgtgtgtgtgtgtgtgctctataggtaggtaatatagtaaatactaggcgtaaaatagaaaacgaacatgtgcaaagtaaaacaaacagtgtgacaaagtcgtgttgtcgtatatagtatatagcttaaattgatgggttagagatcgaccgtatttgggaaccattaggagaacagaggacaattacaaataattattcagtctttgattgtttgtataattaacaggtttacaaaaaaaaaaaaaaaaataattaaagcttacaaactaaagctgtttggtttgccagttgcggtagaccgttgataggttggttggttgattggctcaggatggctgataggttggttggtattgtaggcagttcgaggattaaacgtttaagacttgcgctgagattcaggtgtgcagtttgcattttgcagattacatttgcatttgcgcttgcagtagttggtcagtgagtttgagatacagatacgaatatggccagatacaaaagtgtcaacggcacggcacggcaacgcaaggggcagatggcagtcttatgtggtacatacggggatgtatttagtatacactttcggtttagttgctttcggtatcagtatcgctatatattggtttttacgtgttgctatatacgagagtcaataggggaaacacttgatgatcggtattcgtttgagagacgtgtgtgttaaagaagcggggcacgtctggccgcggccgttaacaatgcaaatttaccaccaaaaccagcaataaaatattgtatgtatgctaaaacaaagaaaataaaagtaaaagaaaacattgctattacattcagttgagaaactaattacttgggttggtttagtttggttagcaataaatgtatgtatatgtggaataatattaaaatatagatctatatatataaagcctggttttaattgcggccaatgagtattaatgccaatgtaatgcaaattagacgtaaaatataggcaggcagtacaatatacaaatgcttgtttatcataacgataatggttgtaattgtggttcaatatacagttgcagttaaactaatagtgctgtaaactatttttggtttgtagtctctgagaaatggttacttgaatatgttgaagtggagtaaagtttcttctaagaagaaggttagtgttgcttaaaacagacatttaagtagaaatattatatatattatataatattatatatattatataatggaattctataatttgtaccccaaagatattctccgcaattatatagtgatatattcttagcataagaagttctttttcttttcataacataaatttcgatgcttttaaaatggaagcactaagattttggaagcaccctcttcgtataacgactgtgtcacggcataaaacccctctttgatcagggtatttgtggtaaatattattataaagataagataagtgcatttctaaacatagattataagacttaatgcagcgataacatatacttatgtatgtatgtatgtatataaagagcgacctcttcggtgctctccttcaacattgtaaatagactacatttccgtaatttaactattattttgaccacaaatgtgtgtgcgcgttcttctatgcatacttgggcagggtcggtgttcgagttggggtcacactacgccctctcaaaattaaaacaataaattataaaaaatatacgcatatacacacaaggaagcaggcatcaaaatattcgctttttccatggagtccggaccccaacacacatacacactcacaccgatgcacaaagaaaccgagagagggagagcagagagcggcactgagagcacgtgagaggacccacctactgtgcatacatgtgtctgttggcagctcctattgttgttgctattgcgtagtcatgacagtcaacttcatcgaatgctctttttcgcttttcttagtttcgttttctttacacacattgattatatgaatatatggatatgtataccaacgaaactcttgttggctagctggtttttggcaattacgctgcgctgtggcgtttcaaaacacgatgatggggctaaaaaaatgtgcctttgaggtatagacactggttaatttgcattgactgctgccacaacataactgcactttgcactcacacacacactaagatatgtttttcaacgcaaagcattcggggcggggttttaatattgctattgagctacaggcagagtaatccgaaatattaagaataataatactacacaccagacgcggagctcccgactcgacggcagacaaagacgcagtgtggtaaaatgtgcccagaccagacggggcgctcctctctctcacactctctttctctctctcgtttccgctgcgagtgtagatatatggatggaaaatcgaaactctgtggctgtggccagcccccgcggcccccttttgctatctcgcttgctcgcatggacaaaatcaacacaagttcacacacatacaggcacacggatgtgaactcacaatgacaaccacttcgtcaccagcagataaaaaagtgctggccttaaatcaattgcgttttatgtaattccactacattcgtacgttacgaaaacaagcactattcatattacacggtatacattattacttcctatcgagtccaaattgctaggcaggaaaggtcttaaatttttacgctttatgggagtttaccttgggttcgacctgacaaagagtgtggccgcggcgagactgtgagaaattaccaagtggtgtctgttatcttaatcccaaatactctagaaacatttgtatactagaatttgagatttaagcatattataaaagaaatttatttatatttaactaaaaatgcttcttaatattcgcaaaacagttttttaatagcaaagtaaaggaactggattttattttaataagtgtgtattctatttttttgtcatatttacacgttcacaaacacggccacactaatctccactgaaaacgctactcgcatttaactctagttgagaaaaacaagatttattaataaaaacattttagcttgcacctaaaagagtgtgcggtactataaaactaatcgtttaacaaatcggcaatacgaaaatgtaagtatctgcaccacattttgctccctaaatggtctaaaacagctcgcttttctcgacaaataaaaaaaaacagggcgcgtgcccagagtctcgccggcgagggtgagaaggaaaaggacaacaaggagaaggtcgccaaagagaaggacggcaaggcgaccagcggctcctcgcgcagggaccgcgaacgcaaacgccgcggatcggcgtcctccagcagcgactccagaagcaggtaaatcagccggcaaaggtctttcccacaaatggctgccatctgccaaccggaataagggttacttttaaaaggaagtccttcttcttctgtaaaacgtagcagatagtacgggaagaaaatagccttcgagcgaaaagattttgtaaaaattcacataccatatatggtaaaatttcatcacagttaggaagtgttttactttgtaccagcttcattgccgttttcttggttacgagaagtaaataaaacacttcactttttccagcacatcggacagcagctcttcgcggagcagttccgggtcatcgcgttccagctcaagcagctccagcgactcctcgagctcctcatcatc

SEQ ID NO: 19952 - DNA, 4325 bp, DROSOPHILA
caggtcgaacccaagcatacatacaatattttattgctggttttggtggtaaatttgcattgttaacggccgcggccagacgtgccccgcttctttaacacacacgtctctcaaacgaataccgatcatcaagtgtttcccctattgactctcgtatatagcaacacgtaaaaaccaatatatagcgatactgataccgaaagcaactaaaccgaaagtgtatactaaatacatccccgtatgtaccacataagactgccatctgccccttgcgttgccgtgccgtgccgttgacacttttgtatctggccatattcgtatctgtatctcaaactcactgaccaactactgcaagcgcaaatgcaaatgtaatctgcaaaatgcaaactgcacacctgaatctcagcgcaagtcttaaacgtttaatcctcgaactgcctacaataccaaccaacctatcagccatcctgagccaatcaaccaaccaacctatcaacggtctaccgcaactggcaaaccaaacagctttagtttgtaagctttaattatttttttttttttttttgtaaacctgttaattatacaaacaatcaaagactgaataattatttgtaattgtcctctgttctcctaatggttcccaaatacggtcgatctctaacccatcaatttaagctatatactatatacgacaacacgactttgtcacactgtttgttttactttgcacatgttcgttttctattttacgcctagtatttactatattacctacctatagagcacacacacacacacacccacaacacatggcccatgcaggagcaacaacaacagtgcggcagcagcatctgcagcaacaacagtgcggcagcagcatgctgaactcgaatgccaccggcggcaacaatcatgggggcagcagccgtcggccctttacccgcaattcttcatcggtccgctcgcaacgcggcggtggtggcgggctgggcggtcgcatggtatactcgccacacacacatccgcacgtccagcagcagcaacaacaacaacagcagcaacagcaacaggggcagcagcggtccagcaataacggcaacaacaacctgtggctgggcaacagtccgtggtgcaacgtcaatttaaacggtggcaacagcggcaacaacaataacaacggtggcaacaacaacaataacaacggtggcaacatcagcagcaacaacaacagcaacaatgtcaataacaaagatgcaaacccaaattgcgatgtacaaacaagtaattctagcggaacttgtatttataacaatagcaaagcgcatcatcatcacaacaacagcaacaacaatggtcacactcagagccacattcacactaatcattccctccaccaaggtcaccatcacccccaccacacccaaatgcacacaccccactacccgcattcgagttcaccacagcagtcaaacagttaccgccaatacccaccgcattcctactcccccaactccccacacagcaacggccatacaaacagcaatgctagcaataatcccattagtcagcgtagtaatccccaagcccaccccaaccagaaccaaaattccaatttttacgagatgtgtaccgggaattccaacaccagttctagtgatcagaatcagcataacccgccgccacgtagtcaaaaccatcaccccaatccacatcatagtcagtaccagtaccaataccagtaccaataccgataccagtaccatccgccacaccagtaccatccattgcatagcccacagcaacagactaatcgccaatcccttccgctaacacgaacgaattcaaattcaatcaacgcaacaactttcaattcaaccaatccaacaacaaatagtaatcctactgatgttgtgaatgtaaattcttgtaccgatataattccttatgggtcttcgtcaacgtcttcgtctgcgtcttcgatgctgccccaacaacaacaacatcaaattaataacgcatccgcacccatcaatagccacagccaaggtcagggacccggaaattcccccaatcttggccacaatcaccaacgtggctacaacaacgggaataacaatcggggtatcgggaacgggatcgtaaatggtaataccaatggaccacccgattatatgaactaccgacgtggcgtgtgtccggctcaatcgcgggactattccggcaacggaaatggaaataacaacggacatggccacaatggacgtcggtatatgtccgataacttgaacaacccgtcctcatccatgaatggcctgatcaattccggacaccaccagcgcaactacaacgacaggaacttgaataaccactttggaaactccgaacagaacggaggacccgaccatcgggatcgagctgagggttcttcgtacaactttatgcgcaacggaggaggtagcgggggcggtggctacggacgcaatggatcgcattaccagcacatggcctatggtaataacaacggtgcgtccacttcgaccggcggaccaggacttatgggtgaactgccctcgggttcgggcctgtcgggctcttcgctgtcgctgaacaacggacccggaggcctcaactccgacagtccgtcgcgtaagcgccgccgcatctccggaagacccccgaacggaccacagccccaacaccgttgtccgatggcacacatgcagcagggaagtccgccacttagacgcccgcggttgcgcgatgtggctacctccacgcagcagcagcaacagcagtacggccatcaggttcatcatcctcagcagcagcaacagcagccgccatccaactatcacccgatgcaccatcatcagccacaaccgcactacgttcctcagcagcaggtgccaccgccgcacgtccagcgttcaccgtgggatttgggcagcagtggaggaagctcgggaggagccacctccagcagctcggtgggtcccattctgcagcaggtgcaggcgccgccgcagccaccgagtcaccagcaagcggttggctatccacaagcaccgccacagcccgcctccctgatggtggacctcaatctgaaccaggtgccagtgaacctgcagttgcgtccctcggagcccttctgggcctccttctgcacctatcctataccggcgcaggctagactagcaccctgtcacttgcacggtgtctacacgcagccattccccgccgccccaccaccaggactggccgctcctccacttcaacaacagcatcagccacttattcaggcccagcaaatgatttcccaggccaccttgaccgcccagcagcagcagcgggatgtggtggccattgcaacggccaatctgggacccattgaagcgccgggtgcccatggccatcctcacgcccatcctcatgctcatccgcatgcccaccagctgccgccgggcatccatatcacgccgctgagcggagcggcggcagcggccgccacccatcatctacattccacggcggcagctgcagcggccgtcgctgccggcgcccagataaccaccgcgcagcagatcctcttctcatcggaccgccgcacattcccgccccaccgccgcataccgcgtttctggacggcgaaccatggacatcgtcacgtcctgccgccgcagtcgctcgccgcccaccaagctcctgtccagattcaggctacgtcgggcatcatcaaccctggcttcttgctcaatttcctggccatgttcccgctgtcgccttataaccaacatgatctgagctctggcgacaccaatgagacggagaactacgaggcgctgctcagcctggccgagcgattgggtgaggccaagccgaggggactcacccgcaatgagatcgatcagttgcccagctacaagttcaacccggaggtgcacaacggcgaccaatcatcctgtgtggtgtgcatgtgtgactttgagctacgtcagctactgcgcgtcctgccctgttcccatgaattccacgccaagtgcgtggacaaatggctgcgagtaagtgctttaaaatgtaaaataaaagtcacaataaatctaaaatattcaattacctacattacctaccagtcgaatcgcacctgcccaatttgccgcggcaatgcctccgactacttcgacggcgtcgaccagcagcaacagtcgcaggcaacagccggagctgcggctgcattgagcggcacgtccggcggaagtgccggagtggcgggaacttccgaggcttcagcggccaccgccaatccacagcagagccaagcggcctag

SEQ ID NO: 19953 - protein, 1171 aa, DROSOPHILA
MAHAGATTTVRQQHLQQQQCGSSMLNSNATGGNNHGGSSRRPFTRNSSSVRSQRGGGGGLGGRMVYSPHTHPHVQQQQQQQQQQQQQGQQRSSNNGNNNLWLGNSPWCNVNLNGGNSGNNNNNGGNNNNNNGGNISSNNNSNNVNNKDANPNCDVQTSNSSGTCIYNNSKAHHHHNNSNNNGHTQSHIHTNHSLHQGHHHPHHTQMHTPHYPHSSSPQQSNSYRQYPPHSYSPNSPHSNGHTNSNASNNPISQRSNPQAHPNQNQNSNFYEMCTGNSNTSSSDQNQHNPPPRSQNHHPNPHHSQYQYQYQYQYRYQYHPPHQYHPLHSPQQQTNRQSLPLTRTNSNSINATTFNSTNPTTNSNPTDVVNVNSCTDIIPYGSSSTSSSASSMLPQQQQHQINNASAPINSHSQGQGPGNSPNLGHNHQRGYNNGNNNRGIGNGIVNGNTNGPPDYMNYRRGVCPAQSRDYSGNGNGNNNGHGHNGRRYMSDNLNNPSSSMNGLINSGHHQRNYNDRNLNNHFGNSEQNGGPDHRDRAEGSSYNFMRNGGGSGGGGYGRNGSHYQHMAYGNNNGASTSTGGPGLMGELPSGSGLSGSSLSLNNGPGGLNSDSPSRKRRRISGRPPNGPQPQHRCPMAHMQQGSPPLRRPRLRDVATSTQQQQQQYGHQVHHPQQQQQQPPSNYHPMHHHQPQPHYVPQQQVPPPHVQRSPWDLGSSGGSSGGATSSSSVGPILQQVQAPPQPPSHQQAVGYPQAPPQPASLMVDLNLNQVPVNLQLRPSEPFWASFCTYPIPAQARLAPCHLHGVYTQPFPAAPPPGLAAPPLQQQHQPLIQAQQMISQATLTAQQQQRDVVAIATANLGPIEAPGAHGHPHAHPHAHPHAHQLPPGIHITPLSGAAAAAATHHLHSTAAAAAAVAAGAQITTAQQILFSSDRRTFPPHRRIPRFWTANHGHRHVLPPQSLAAHQAPVQIQATSGIINPGFLLNFLAMFPLSPYNQHDLSSGDTNETENYEALLSLAERLGEAKPRGLTRNEIDQLPSYKFNPEVHNGDQSSCVVCMCDFELRQLLRVLPCSHEFHAKCVDKWLRVSALKCKIKVTINLKYSITYITYQSNRTCPICRGNASDYFDGVDQQQQSQATAGAAAALSGTSGGSAGVAGTSEASAATANPQQSQAA

SEQ ID NO: 19954 - DNA, 3554 bp, DROSOPHILA
ctcgagctcctcatcatcgtcgtccagcgattcggatcgcagcgagaagaaccgaagacgtggcggcggcgctgctggcaaagacaaagacaaggataagcccagcgcccgatcacgttcccgctctcgcacccgttcccccaggcgtgtctccaaatctccaagaccgggcagcaaggcgcgaaaagagccggagcgagatcgcgatcgtcgtagtcggtcgagggatcgtgcccgccgtgctggatccaacgatagggcagccgccgatagcaataatgttaagcgggagcgttctcgctcagccagtcgttcacgatcgccacgccgtcgtggtcgcggctccgttgagaggacgccgccaccgaagcgaagggagcgctcccgttcgcggactcgctcgccttcgcccaaacaggtgcgcattcatgtcggtcggcttacccgcaacgttaccaaggaccatgtgttcgagatatttagcagctttggggatgtgaagaatgtggagtttcccgtagatcgttttcatcctaacttcggacgcggcgtggcgtttgtggaatatgccacacccgaggattgtgagtcggccatgaagcatatggatggcgggcagatagatggccaggagattacggtatccccggttgtcttagtaaaacagaggccgcccatgcgtcgtccttcgccaccgatgcgccgtccgcaaaacaaccgctggcgatccccaccccagttcaataggttcaacaatcgtggaggaggtggtggcggcggcggcggacgtcgtcagtcacccatgaggaaccggcgttcaccacggcgtcgctcccgctcccccattcgtcgtcgacgccgcagcaatagcagtgacagctctcgttagaggacactgatcgactcctagtttctacaattgacacgattattgcacttttctttatattataatccaaataataaaggtgagcaaataccacacacatagagagttagcttagtgtataaacgagcactcagcatcatcgagaggacatcccagcggatgatgaagcttgaaaaagcagctacgtttcttgatggtcaaatgggatttggggagagtagccgttggtttaggggttcttattcctatgagatcaccaccgcagaattcgaaaacttcgtgtttattgcgcagcaatgttttgatgccgccgcactcggatttaatgccactcagctcctccttggtgagagcctgggcaatctctctcatgggcagacgaccagaccatttatcttcgttagagtccagaatcagtttgaagatcttaaacactagaccatcaattatggtcttatccacctgcgtgcaatttcgaacgctctcctccttctcgcgcagcttaattttggcatctccggtcttatactttcttagctcttcttggacaaagtactccagatcttcaatagcctttgaggcttttctcttaattcccagcagagccaatcgcttggtgcttggtatttttagacggtcttgtaggatctcatagccacattcatgagagacctgagtgacgtattgaaagaaatcctggtaggcacttatcttcgtattccgcctgcgaaacttggctcccgacagttcaaagggacagcagggcagtaggaaatagttaatgttcaaacgaccagccaaaaccggtagccaaggagacaactcgtccgaatggttaccaatcaaccaatccacacccggaaaatccaagcggaagctgttgggctccacggccttttcaatgaggctcctttgggtatccggtggatagagggaccatagctttcgctttcttatatcgtagccataccctttgtagccctcggcgttgaggacatgaactaacagaccgtttccacaacccaaatcagcgaaggcagtgggctccgattgtgtttgactccacaaaactataagataagcagcgatagccaaatcctcgtaaatgaacttgagcggatccgtggactcctgtgcggtcttccagtgttccagcaggcgttgtgaatgcctctgtttcaactccttgtacagatcattgtacttttccacattaaccaaacctagtgacttcacctttgcttcatcctgcttggactgagaccagcttaagagctttggtctgagcacaaattccaaccagttggtgttcgatttggacttcagtttaaactctcctccaaggaggcccacggaaaagccttcaatgctatcgctggcaaattggcactcatagagacaattctcaaaatctgtaattaggaatataataagaattgtctaagaagtaagtaatattgtgattatcctcacccacaattccggtgcctaggatgttttccgccagtttcttggacagcagtttgaatccgatcgtaaatcctgtgcacgtgcgctggcttggatcctcttttagagacatcgccaactcctccgcactggattcacacactcgcccattctgctgctttgtcacttgggtaatgactacctcgaatatctttttattcaaagcatgatagtttttgatcagtattccaatcgcttgccagaattgtgcttcttctactgctgccatggtgtcgaaagcgaaaggtggctcaaggaaaacgaaaatattaagtatacgcacgatgggtagctgcgtctatcgatatttgtttggcgcgtatttaaaacgaacccttgctaacatattatcctgcgttagccatcgttattattaaacggatattaattcttggggtttattttaagttattaatgagaaaaatgtatcagataaagaaaactatattgtaaatacatacagtagtataaccttcaatatgaaaatgtagcctcaacatcgggataaatcaattaaaatggaaatgaaaataataataatttaataaaatccattagaaattttttttggagatctcgatagccaatcacttaaacatcgattgattgagacttatcgatatggtattgtgttgcgtaatcagctgggaaacacgcagctgaatcttcaaaattacctgttgcatttaatagattagacacaaattatataccatgtcattcctgcgaaaatcggtgcacctattgggttctgtggcgaggcgccaacgacacctgaaagtggtcagtacttggagtgatcagaggggtatgttgttatttgtttggttttacccatgacagattgaaggagcgatctcgacagctgcgcgggacttcagctcaaagccatcggaagattacgccaatttccccggtgccaaggctccatttgtcagcaaattgaacctcattcaaccggaagactatgcgccaataccaatttaccgggtgatggaccaggatggctatatagcggatgagacccaggatccccagctgggccgtgaggttgtggagaaaatgtttcgcgatatggtgctgctgaacaccatggacaaaatcctgtacgaatcccagcgacagggcagaatctcattctacatgaccaatttcg

SEQ ID NO: 19955 - DNA, 1493 bp, DROSOPHILA
aaaagatattcgaggtagtcattacccaagtgacaaagcagcagaatgggcgagtgtgtgaatccagtgcggaggagttggcgatgtctctaaaagaggatccaagccagcgcacgtgcacaggatttacgatcggattcaaactgctgtccaagaaactggcggaaaacatcctaggcaccggaattgtggattttgagaattgtctctatgagtgccaatttgccagcgatagcattgaaggcttttccgtgggcctccttggaggagagtttaaactgaagtccaaatcgaacaccaactggttggaatttgtgctcagaccaaagctcttaagctggtctcagtccaagcaggatgaagcaaaggtgaagtcactaggtttggttaatgtggaaaagtacaatgatctgtacaaggagttgaaacagaggcattcacaacgcctgctggaacactggaagaccgcacaggagtccacggatccgctcaagttcatttacgaggatttggctatcgctgcttatcttatagttttgtggagtcaaacacaatcggagcccactgccttcgctgatttgggttgtggaaacggtctgttagttcatgtcctcaacgccgagggctacaaagggtatggctacgatataagaaagcgaaagctatggtccctctatccaccggatacccaaaggagcctcattgaaaaggccgtggagcccaacagcttccgcttggattttccgggtgtggattggttgattggtaaccattcggacgagttgtctccttggctaccggttttggctggtcgtttgaacattaactatttcctactgccctgctgtccctttgaactgtcgggagccaagtttcgcaggcggaatacgaagataagtgcctaccaggatttctttcaatacgtcactcaggtctctcatgaatgtggctatgagatcctacaagaccgtctaaaaataccaagcaccaagcgattggctctgctgggaattaagagaaaagcctcaaaggctattgaagatctggagtactttgtccaagaagagctaagaaagtataagaccggagatgccaaaattaagctgcgcgagaaggaggagagcgttcgaaattgcacgcaggtggataagaccataattgatggtctagtgtttaagatcttcaaactgattctggactctaacgaagataaatggtctggtcgtctgcccatgagagagattgcccaggctctcaccaaggaggagctgagtggcattaaatccgagtgcggcggcatcaaaacattgctgcgcaataaacacgaagttttcgaattctgcggtggtgatctcataggaataagaacccctaaaccaacggctactctccccaaatcccatttgaccatcaagaaacgtagctgctttttcaagcttcatcatccgctgggatgtcctctcgatgatgctgagtgctcgtttatacactaa

SEQ ID NO: 19956 - protein, 469 aa, DROSOPHILA
MSLKEDPSQRTCTGFTIGFKLLSKKLAENILGTGIVDFENCLYECQFASDSIEGFSVGLLGGEFKLKSKSNTNWLEFVLRPKLLSWSQSKQDEAKVKSLGLVNVEKYNDLYKELKQRHSQRLLEHWKTAQESTDPLKFIYEDLAIAAYLIVLWSQTQSEPTAFADLGCGNGLLVHVLNAEGYKGYGYDIRKRKLWSLYPPDTQRSLIEKAVEPNSFRLDFPGVDWLIGNHSDELSPWLPVLAGRLNINYFLLPCCPFELSGAKFRRRNTKISAYQDFFQYVTQVSHECGYEILQDRLKIPSTKRLALLGIKRKASKAIEDLEYFVQEELRKYKTGDAKIKLREKEESVRNCTQVDKTIIDGLVFKIFKLILDSNEDKWSGRLPMREIAQALTKEELSGIKSECGGIKTLLRNKHEVFEFCGGDLIGIRTPKPTATLPKSHLTIKKRSCFFKLHHPLGCPLDDAECSFIH

SEQ ID NO: 19957 - DNA, 3794 bp, DROSOPHILA
gcacatgctgcctttaactttgctgccactttgggttgtccggctatcctcttctggtgagtaactttaagatacatattattttgataagataacctattttggatgtatttcttatcttatcaaaaataccattcaaataagtttcttcatgacgtacctttctccacagtcgaaacaacggctttgccatatccacaccatcgcatgaacagtacaagggcgatggaatcgccggtcgcggacctatgggctatggaattactaccattcgagtggatggcacagacgtcttcgccgtctataatgcgatgaaggctgccagggagtatgtcctcaaggagaacaagccggtggtgttcgaggcactggcctatcgagtgggtcaccattccacctcagatgatagtacagcctaccgaccagcggaggagatcgagatttggaactcggtggagcacccaatatccaagcttaagcgctacatggtgcacaaaggctggtttgacgagactgtcgaaaacgaatatgtcaaggacataaggaaaaaggttttgaagcagatcgcagtgtccgagaagaaactcaagcccaactggcgtgagatgttcgaaggcgtctacgcggagatgccggatcatttgattgagcagcgtagcgagctggaaaaacatatcgaggcccacaaggagcactatcccttgaaggactttgagaaatagattccagataggtgccataaagatgctaacaaatcagaaatcaaaacgaaccgagagactcgatcgaaagtgcatttattatgattaagcaataggcaaacagttttttgtgggttcaacccgtttgttatgactcatctgtacaggtgggtcggtggatatgtgaaattagacactttgggtttttgggttttctctgaccaacgaagaggataaacttggttgcatcctaggtcttaatttgcacatacaaagtgacccactctggtgcaggtgttatgaaaaggtgttaaaatttattaaatttgatttacatacaatatacatatactgaaacaatacgaatacaaatatatacttttgacttaacgcaacgcatcgcagacaaaaacgcgggtggagatgaagctacctgttgcaggatgactcgctgaagcttggctggaatgatgcaggaacgggagttgcccctttcaattggtgcgtagctgatagtcgccgttctgcgtgatgtaccgcacccatggcagcgcctgatagccgctcttctcgatgatcttcagatagcgcacctggatgcccgacgtggtaaagtagggaatctcgaagcgcacctgaattggcggcttgccctccgtattgtcctcgctttccacgctcggcagaccgaaatgtgcccgcattagatactccttgccacccgggaacgatttgatcgtccagatgattgcgttctgctccggtgcgtacttgcagcttccaatggtggtcttgaacttgggtgagtccgcgtcggcgggcactggtatgacgatttccacgttgttggccgtcgatcttcgcttgaactgagacttcgccttaatcatgtactccacacgggagtgggcatgccgctcgatcactgattcgatccaaatcaggggtttgacctgtcaacaggggtttagttagtcttgcattttggtgctaagtacataaaaatactcacatgcgtgttcagacgataggacatcagttcgaactcgccgtccggaggaatgaacgagattgtccggtcattctcgaagcgtgacaaccgcacgcactggtggaacttgacgtcctccagctctacggactttgacttgccgcggcccgtgctctcgaacagaaccttgtcgttgagacccagtcgcagctctggcattcccgacaagtagacgcgcatcttaatggcgcccacgatctcgctgcgcagcacattgccattggcgtttgcgagaagattcaccgactcgataacgtccaggaacacctcgttcttgcgatacttaatgccctcggaccgccaggatactgcattggtcacggccaccgggatgcggggctgtagctccagcttatgaccctcctgcgtaatgtattcctgtagaattttcgagtcggtggtctgcgggtagccaaagtcgagcaattcatccagcagctcgtagatgatcacgaaattgtcccgaatggactcctcctccagctccttgaagtattccacaaagacctgcgcgatcttgtgcagaaagacgaagaccagagcgatattaacgttcttattgcgcggcgtcgtggatacgatataaagattgttcgttttgatgtaggcaaatgtagtctccgccgtctgaaggatcggagtgattaggccctcctcctcgcgctccatcagcaatggcatgaatttgtcgatcacggccatgtcgatgttgtcaccgcggtagttccgcgatatcagcaccttgcccttcacgtccagaacgaaaatggccgacgaagacatgtctcttggttcccagcagctgccacttgtcccaggtgtaaaattcccaattggatcgagtgggaggtcgcttcgatggttctactgctcgcggcaggcgttgcgcgtggaagttggcaactgtcgcgaggtggcgatgagtgggctaggtctatcaatgggctggatttacatattccgtttcgtagactggaaaatgcgaatgaaaactccggaatttcttacgtcgccttttctgctgcttctttttcttattagttggcccaccagtgctgtgaaatgttcacatcaggtgttgggcagtgtggccaggtgagattggtctactgctgattaactagcgaattaagcttaaaggaaatgaaaaatgtgcaaggtgtaacatcttaaggtttctgtttttaaataaataccttttaaattattttcattttcccattggtacctttaaattcaaatcataaatatattggagaatgtaatctagcatcactattgtgccatccggcatttgtggccatccgcagtacggccacactgctagcccagacgctgcttttgtggaattgttaattatttatttcggcgagcatgcaaatgaacccgagcgtcacaatcgagcgcaaacgcgtcgactgcagtgtcctgccaaagggatggcagcgcgacgaggtccgaaagtccggcagcagcgccaataacaacgccagcagcaacaacaacagcagtgccacagccagcagcaacaacaacaataacaaggtggatgttttctactacaggtaaagaagaagagcagaattactatatagactactatatacctaaaatcggaacactgcacgctgtttaatcggataaacgtttataatcactttcactacctttctgttattacatccgcataaccacacacacacacaccatatacaccacacacacgcatacgcctatgtatacacacgcacacgaactaccacctaacccaccaaaaatatccatccaccgccgtgtctgttcagcagtcccacaggaaaaagggcggagggaaagccacaggacattgcaatccctgatttccagcctggcaaaatgccgcactgcgccctgccctcgccctccatttcgctgtaccgctgcagcgccatgccgctgcctatagcaagcgggggcggtaatggggccaccagcggatcggcggccaatgccctcaagcgcaagttcgcccggagtcaaggaggcaatgctgcaggagcagc

SEQ ID NO: 19958 - DNA, 1735 bp, DROSOPHILA
actaataagaaaaagaagcagcagaaaaggcgacgtaagaaattccggagttttcattcgcattttccagtctacgaaacggaatatgtaaatccagcccattgatagacctagcccactcatcgccacctcgcgacagttgccaacttccacgcgcaacgcctgccgcgagcagtagaaccatcgaagcgacctcccactcgatccaattgggaattttacacctgggacaagtggcagctgctgggaaccaagagacatgtcttcgtcggccattttcgttctggacgtgaagggcaaggtgctgatatcgcggaactaccgcggtgacaacatcgacatggccgtgatcgacaaattcatgccattgctgatggagcgcgaggaggagggcctaatcactccgatccttcagacggcggagactacatttgcctacatcaaaacgaacaatctttatatcgtatccacgacgccgcgcaataagaacgttaatatcgctctggtcttcgtctttctgcacaagatcgcgcaggtctttgtggaatacttcaaggagctggaggaggagtccattcgggacaatttcgtgatcatctacgagctgctggatgaattgctcgactttggctacccgcagaccaccgactcgaaaattctacaggaatacattacgcaggagggtcataagctggagctacagccccgcatcccggtggccgtgaccaatgcagtatcctggcggtccgagggcattaagtatcgcaagaacgaggtgttcctggacgttatcgagtcggtgaatcttctcgcaaacgccaatggcaatgtgctgcgcagcgagatcgtgggcgccattaagatgcgcgtctacttgtcgggaatgccagagctgcgactgggtctcaacgacaaggttctgttcgagagcacgggccgcggcaagtcaaagtccgtagagctggaggacgtcaagttccaccagtgcgtgcggttgtcacgcttcgagaatgaccggacaatctcgttcattcctccggacggcgagttcgaactgatgtcctatcgtctgaacacgcatgtcaaacccctgatttggatcgaatcagtgatcgagcggcatgcccactcccgtgtggagtacatgattaaggcgaagtctcagttcaagcgaagatcgacggccaacaacgtggaaatcgtcataccagtgcccgccgacgcggactcacccaagttcaagaccaccattggaagctgcaagtacgcaccggagcagaacgcaatcatctggacgatcaaatcgttcccgggtggcaaggagtatctaatgcgggcacatttcggtctgccgagcgtggaaagcgaggacaatacggagggcaagccgccaattcaggtgcgcttcgagattccctactttaccacgtcgggcatccaggtgcgctatctgaagatcatcgagaagagcggctatcaggcgctgccatgggtgcggtacatcacgcagaacggcgactatcagctacgcaccaattgaaaggggcaactcccgttcctgcatcattccagccaagcttcagcgagtcatcctgcaacaggtagcttcatctccacccgcgtttttgtctgcgatgcgttgcgttaagtcaaaagtatatatttgtattcgtattgtttcagtatatgtatattgtatgtaaatcaaatttaataaattttaacaccttttcat

SEQ ID NO: 19959 - protein, 426 aa, DROSOPHILA
MSSSAIFVLDVKGKVLISRNYRGDNIDMAVIDKFMPLLMEREEEGLITPILQTAETTFAYIKTNNLYIVSTTPRNKNVNIALVFVFLHKIAQVFVEYFKELEEESIRDNFVIIYELLDELLDFGYPQTTDSKILQEYITQEGHKLELQPRIPVAVTNAVSWRSEGIKYRKNEVFLDVIESVNLLANANGNVLRSEIVGAIKMRVYLSGMPELRLGLNDKVLFESTGRGKSKSVELEDVKFHQCVRLSRFENDRTISFIPPDGEFELMSYRLNTHVKPLIWIESVIERHAHSRVEYMIKAKSQFKRRSTANNVEIVIPVPADADSPKFKTTIGSCKYAPEQNAIIWTIKSFPGGKEYLMRAHFGLPSVESEDNTEGKPPIQVRFEIPYFTTSGIQVRYLKIIEKSGYQALPWVRYITQNGDYQLRTN

SEQ ID NO: 19960 - DNA, 5583 bp, DROSOPHILA
aatagatctctttagtatctgaatttgcctcttattacctaaagaccactaaatctgtttttctgatttctgtttattatttacttaatgattatactttttgtgcgctaagccaaacaaaaagtttacagatttcgaagcattggaaattcgattcagtttcgtgataatactaaacttatcattttgcgtttctgcctcatgcacaagccaaaagacaaggacctgtaaatatgtcccaagctttttcagcccactaactcatagactgagcgcttacctcggaggagtttcggccttactaattgataatgttgcactaacagttcgctggcaaaatatcgatacatattcattgttttgctgcatgcaacgccttactttcattcttgtataccttattgcttactctaaaacacgaaacaatggcttagattacatatgaatttcgcattaggaatttactgaattttgtttaggaataattttgcattaggactaccaaaatcgggaaagcatattttccaaattaaagagaacaaccaaacagtgattagtgattataataatttcgtagttgcttctatctagcattgtttaagtatttcttaagtctctcatcccttgtttcatcggaaaatatatcaatgaaatatttgtttcaaaatttatataactgaaaatatttcgtaggactcaaacattatgtagaggaattcaaaatatattttttttgaacaaccaacttgattttcgcttgagatcatacagctacaatcatgtgttattgcttcgattcgtaagtgcgttccttttattcctactgtgagcaaatgaacatacttaaatacttagggtcagttaatttgttgagcattctgatgatggccaaatgaagttgataaaccgcaccggaacacaaccaactaaattctcaaactaattggcacataaatgaaccaaatgccccaatttaaatgtttccaacaatgtccatatctcattggtactccaccctggccacgggcacgcccaaatcattgatctcaaagacaatcagcttccgtttcttgcggacattggccgatggaatcgattgcttgggtgtcgtcgtggtctttgtggatgtggtgaccgggatggattgctgctgcttcgttgcccctcctttcgttgttgccttcgtcgttgttgtggctgtggcagtggccactcctttgattaaactctcattcgttgttgcacccaattttctcttcggttccagcagtttcggatttcccttgggcttctctttagtcttatcattagtattttcctcgggtttcttcttggtaatttctactggtttttcctgtggattctccttggtcttgagcaacggtggcaaagctggaagatcgcaacgctggcggagatgacgatacactgcatccacccgctgtaccaagcgattcacatactttgtggtcgttcgatctacaatcgaaggagccttgatgcagtcgttgccaccgaattcacaaacctacaggggaataataaatttataaaatacatctttttttgagactttagtttatatactgacccgataatgctgcaggatggcctcctttggcggtacgttgagggatcccttgccaggtgcaaattcccacacgaagtggttgcccgcctcgacaactgcttccggtttacagatgtacttggatcgttgcttctgaggatgcagcttatagcgcctgaattcgtataggtacataatatcctttttgctttccttttagaggtcaccttaccttcgtgttttacgttgagtgactagattggcccgtactctggccagttggtcattaccaccctctattccagaactagccaggctgtcatccgcaaactgaagatagtagaaggcattctggaaggaataggctcctgtgttgcgattgcgaaagcgctgattaagtgatctatatataacaaaagtaattgttacaagtattaatataaggaatgtaaacaaattaagtaaatatctaacttcatctatatgtccttacccaatgagttcattcaacgtatccgagtagcgtggcacaataaactcgtccagatccaccagtgccagatacttgtagcgatacatggtgcggtagaggcagtcgtttagggccgcaaagagtccttcggttcgaatctccttctggctacgcatgcgcagattccacggcaggatgctgaccgtgggtcgttgatattgtgtccttagaacacggggcgtggcattgttggctgcctccgctggtgtgagtgcttccaaatcgtgtgcggtcagatttccgggcaccagacccttttgatagttctccaggacgcaggaggcgtgtggtcccaaagtgtggttgtagaaggtgaagtgggacacacccagcagtgcatagaactccaagtactccataagatacaacgcctggtcgtagttgaagtgcaagggtttcacgcagacggctatgcgatcgggtatgttatcgccactcggcggaggatgacccactggcgatcctttcttggcactcgaattacgcgctctgctcgccgcaaagtccgcatcctggtcggtgtttcgtagagtcagcaaattaccaggcggagcacgcaaacgggataccacgctcacgaaatgaggaactgacagcggtggagttcgtaccgggcacaggatgaaacaggcgctgtattttagattccagttctcgcgaataatctagaatgttcaatttttgtttgtattatgaatcacgagtaaggggtataaaaaatatatctatattcgaactgcattcttttgtatttcaagactatcagtgcaacaatatcaattgaatttctgtgcggacgtgtggaaagtgcggaataaagtgaagggctcaccttgacgcgagccatcacagtggccgaggagtacttggcacgtgccgtggaggagcccgcatcggtgccattgccagcactcggtccgtaccagaatcgacaccacacccgctccggtccccgagtcttggtggcgcccaccactcgcaccaggcgtgctccttcgcgccggtcgaagtaggcggagtagacaaagaacttgaagcgggtgccgttgacaacctgccaggcgccatcgatgggccgtgtgccaaacgggaaatggggcagggtctcctccaccttgtccggcagcacctggccccagggtatgagcggtacattgacgccaaacgctccggctccaccaccaccgccaccgccattgagaagcattccggccaggcgctgaccatcggcgcctgcggcttctgtgaaattggaaaatgcatgagacatgcggcgtatacgtaatgtcccattgtcgcagccatcttctttgtcgcccagccttttgtgctgggattcttaccttgaattttcaatttattgtcgcgcagctgaacaaatcctaatttattatcactcaaaatgctggcatccaatagatcgtagtcgtcctgcaaatagaatttatttatcaatcgaatgatgtgaattgtaaaatgaaagggaacctttaactatttattagataagtattttatttctgtaggtttaaagaagagaacaaatttgattcgaattagaaatattttacggtgaattagaaagtttcctaatttgtaaattaactaacaaaattctttggttagtcattcttttcttcagcctgtcaaatagcatattttgatattcccaccgctttttttaagccctaatgaacgagttggccactaagccgtttgtgggccgatttgcatagtccaacttaccttaacattatcataatccggcatcgagtcgcccatccgtccgcccagactggcaccgccaccgccgcccgccctcatggccaacatgccgctgtgggtgcgctcgtcgatcatgaagacctgcgcgaaatgaaaggcggaggaaagtcctttggtcaatttgaaattcaagtggctttcatcgttttgattaaaatttctgtgcgaatttacacttgcaacttaaaaatgttaatcatttccggctaactctctatgaaccatccaaattttgcaccagaattgcgacttgataacgtttagttccattcaatatcataatatcaaaatattttgtttataacaaatcatttcggagctcttctttgtcaatatttatggacatacctcagttagaatgattagtccaaagacggcgaagaaggtgatgacgataaggaagctcatgcctgatctttccctggtgccccattgcttcttgccccgcttcatggtgggcgtgagtgaggtcctggatccgtggtggtgatggtgctgctgcttctgctgatgcggctgcagttgctgttgctgctgctgctgttgcaattggtgctgatagcaggcgtgcgagtgaacctgctgtccgtaggcggattggtagtggcccagcagctgggacgtggagctggcggagccaacggagccccccggggattgctgcttgtactggggggggctccggctattcagcatgttggagtgcagggagcgggggattagatttcggtctcagggcgatacttttccctatgtttcgtataatttttgaacactcatgtgcagttattcatcgcttatgttattggctttccaacttagtgctattcaatttccattttctgggcaagctttatgcattttaaggttttcgaactgtttatttgcgaagaagctaagcaaaacaaatgggaaatggagagcggctcttttcagagagcggaaaggaaaagccgtgagcaaacggagattgcgctctcaggacacttttccttgctggccaattggaaaggaaaaatcaataaaatctgtgcaaagattggcttcaattattttctataaagcagctgggagtccttaaaaatgccaattatacatccatataatactttctttcagccgactttagtttcaaacgatgcttttatattattttcacatattgaaagcaatcactttggttatcaccttttcaatgcaaatttaattagcaacaaactttgattcttaagcacttatcgttatacgctctgattgtatcaaactatattcatagtaaatattgatttgttttgtttagttatttatttttggcattttatccaacattttactcgcgtcgacaacagcaggaaaacaatgcggcacagctgagtagctcaaggcgaaggacatgcgcacaggacattgaacgccaacagatgatatcgaacattgccagatattcgcaaaatttgctatcagatattatatattatttttgaactaaaatttaagcgaatacatttaaaaaaaaaattggaaattttattaagacaaccatattttttatttgattaaatatttttataaagattctttaataaattgcatatctaaaatatgttaattggttttctaaaatgatgtaggctttaacgtaacttatttaaaactatttaaatgactttttttcacatcatcttttaagattacg

SEQ ID NO: 19961 - DNA, 2412 bp, DROSOPHILA
atgctgaatagccggagccccccccagtacaagcagcaatccccggggggctccgttggctccgccagctccacgtcccagctgctgggccactaccaatccgcctacggacagcaggttcactcgcacgcctgctatcagcaccaattgcaacagcagcagcagcaacagcaactgcagccgcatcagcagaagcagcagcaccatcaccaccacggatccaggacctcactcacgcccaccatgaagcggggcaagaagcaatggggcaccagggaaagatcaggcatgagcttccttatcgtcatcaccttcttcgccgtctttggactaatcattctaactgaggtcttcatgatcgacgagcgcacccacagcggcatgttggccatgagggcgggcggcggtggcggtgccagtctgggcggacggatgggcgactcgatgccggattatgataatgttaaggacgactacgatctattggatgccagcattttgagtgataataaattaggatttgttcagctgcgcgacaataaattgaaaattcaagaagccgcaggcgccgatggtcagcgcctggccggaatgcttctcaatggcggtggcggtggtggtggagccggagcgtttggcgtcaatgtaccgctcataccctggggccaggtgctgccggacaaggtggaggagaccctgccccatttcccgtttggcacacggcccatcgatggcgcctggcaggttgtcaacggcacccgcttcaagttctttgtctactccgcctacttcgaccggcgcgaaggagcacgcctggtgcgagtggtgggcgccaccaagactcggggaccggagcgggtgtggtgtcgattctggtacggaccgagtgctggcaatggcaccgatgcgggctcctccacggcacgtgccaagtactcctcggccactgtgatggctcgcgtcaagattattcgcgagaactggaatctaaaatacagcgcctgtttcatcctgtgcccggtacgaactccaccgctgtcagttcctcatttcgtgagcgtggtatcccgtttgcgtgctccgcctggtaatttgctgactctacgaaacaccgaccaggatgcggactttgcggcgagcagagcgcgtaattcgagtgccaagaaaggatcgccagtgggtcatcctccgccgagtggcgataacatacccgatcgcatagccgtctgcgtgaaacccttgcacttcaactacgaccaggcgttgtatcttatggagtacttggagttctatgcactgctgggtgtgtcccacttcaccttctacaaccacactttgggaccacacgcctcctgcgtcctggagaactatcaaaagggtctggtgcccggaaatctgaccgcacacgatttggaagcactcacaccagcggaggcagccaacaatgccacgccccgtgttctaaggacacaatatcaacgacccacggtcagcatcctgccgtggaatctgcgcatgcgtagccagaaggagattcgaaccgaaggactctttgcggccctaaacgactgcctctaccgcaccatgtatcgctacaagtatctggcactggtggatctggacgagtttattgtgccacgctactcggatacgttgaatgaactcattggatcacttaatcagcgctttcgcaatcgcaacacaggagcctattccttccagaatgccttctactatcttcagtttgcggatgacagcctggctagttctggaatagagggtggtaatgaccaactggccagagtacgggccaatctagtcactcaacgtaaaacacgaaggcgctataagctgcatcctcagaagcaacgatccaagtacatctgtaaaccggaagcagttgtcgaggcgggcaaccacttcgtgtgggaatttgcacctggcaagggatccctcaacgtaccgccaaaggaggccatcctgcagcattatcgggtttgtgaattcggtggcaacgactgcatcaaggctccttcgattgtagatcgaacgaccacaaagtatgtgaatcgcttggtacagcggaaacccgaggaaaatactaatgataagactaaagagaagcccaagggaaatccgaaactgctggaaccgaagagaaaattgggtgcaacaacgaatgagagtttaatcaaaggagtggccactgccacagccacaacaacgacgaaggcaacaacgaaaggaggggcaacgaagcagcagcaatccatcccggtcaccacatccacaaagaccacgacgacacccaagcaatcgattccatcggccaatgtccgcaagaaacggaagctgattgtctttgagatcaatgatttgggcgtgcccgtggccagggtggagtaccaatga

SEQ ID NO: 19962 - protein, 803 aa, DROSOPHILA
MLNSRSPPQYKQQSPGGSVGSASSTSQLLGHYQSAYGQQVHSHACYQHQLQQQQQQQQLQPHQQKQQHHHHHGSRTSLTPTMKRGKKQWGTRERSGMSFLIVITFFAVFGLIILTEVFMIDERTHSGMLAMRAGGGGGASLGGRMGDSMPDYDNVKDDYDLLDASILSDNKLGFVQLRDNKLKIQEAAGADGQRLAGMLLNGGGGGGGAGAFGVNVPLIPWGQVLPDKVEETLPHFPFGTRPIDGAWQVVNGTRFKFFVYSAYFDRREGARLVRVVGATKTRGPERVWCRFWYGPSAGNGTDAGSSTARAKYSSATVMARVKIIRENWNLKYSACFILCPVRTPPLSVPHFVSVVSRLRAPPGNLLTLRNTDQDADFAASRARNSSAKKGSPVGHPPPSGDNIPDRIAVCVKPLHFNYDQALYLMEYLEFYALLGVSHFTFYNHTLGPHASCVLENYQKGLVPGNLTAHDLEALTPAEAANNATPRVLRTQYQRPTVSILPWNLRMRSQKEIRTEGLFAALNDCLYRTMYRYKYLALVDLDEFIVPRYSDTLNELIGSLNQRFRNRNTGAYSFQNAFYYLQFADDSLASSGIEGGNDQLARVRANLVTQRKTRRRYKLHPQKQRSKYICKPEAVVEAGNHFVWEFAPGKGSLNVPPKEAILQHYRVCEFGGNDCIKAPSIVDRTTTKYVNRLVQRKPEENTNDKTKEKPKGNPKLLEPKRKLGATTNESLIKGVATATATTTTKATTKGGATKQQQSIPVTTSTKTTTTPKQSIPSANVRKKRKLIVFEINDLGVPVARVEYQ

SEQ ID NO: 19963 - DNA, 4078 bp, DROSOPHILA
cggccaatcgccagcagcaacagatcgaactcaggtagagccaagtggatgagcacttgactcttgcatgtcagcgtgtcatgtcttgtttgccaggacgcaaggtctacagcctgcggcaattaaaaagcatcaaatgaaaaaatacccaaagaaacacacaattggcaaaacaattcgtagttgtcttcaaaaacgctgtagctctgtgccacctgagatttatgttccaccatctctgcatgctaaagctttactttacgctttgtctaatgtgctgttcggtgttttagctttttgaaggcgtttctctaatacatttccaatctttaatcccttacagccgagccctgcgcactgatgtctccctggtgcctcccattcgacagactgcctcgatcttcaagcaaccggtgacggtgattcgcaaccataaacaggatcccgccaaagcgaagaatgaacccaagcatggcactcgggagaagccgaaacagctgttctgggagaagcgactggaacgactacgcgcctgccacgacagtggcgaggagctagacgacatctcactgcccaagaccatacgcaccgttggccccaatgtcaacgaacagaccgtcctccagtcggtggccacggccctgcatatgctcaacgccggcgtacacggccagagttctacgaaggctgatttgaccaagaatgccatggcgtttatgaatcctgaacaaccgctaatgcacgcggtgatcatttcggaggacgacatacgcaaacaggaggatcgggtcggagttgcgcggcgaaagctgcaggatgcactcaagacatgagttcaatggttaacccccatgcatctaccaattccattgtaggctctaacatctctatcgtattgacccctattcgaaatctacatttaagactagtgtgtaataaaccaaatccaactccaatcgaggaattctggtttcttattggacatcgagaaagcttcgcttgtcttttccatgacaacagggctctgttatccaattttattacgctcagatgactttaaaatgctattttatacaagacagtttaaaaacgaattcgaactataatacataaaccgaattttcatacttagtcgatttgtttggcaaatccttggaacgaagcgttatctacgacgaggggatcattacctgacgaaattttcggtccaaagatttatggccaagtaaatcgatctccttcagtgtttaggtaaacctttaaagctggacagtttttgtgcttcatccccacattgtattttaaaatatatatactatacacatagatatcgttgcagagatgcgattagtctaggccctcctccatctcgtcatcctcgtaatctatgccatcgtagtccgtcgaagagcgtgtcgttagctgcaaggatgaatcaatcggaatttgcaattaactgagaattttgcacgtgctcaagctgaggctgtctacaagagtgtctggagccaacagaagacattgaaccagaactatcgaataagctccatcaagtcaagagtaaagaactacaaatttcagccaaaaatacccacctggttgtaaatcccacgccatgccgcaaacgctcccatggccaagacggctcccacgccggctactattttggtgttcagctcggagtctaggaacttgcgctccgaggccgtcagactggcctccgtgccactgggtgtctttgtgagcttgacggaactgtatccctcgatgcggaatatgtccttcgtgatgcggttgataaagttcactaggttttggcagcccttaatgtgattctgcagtggattgttaggcagtgcgatcttaaagatgatggcaagatagctgtagacaatggcatcaaactcgctgtaggtgtcgccaaagaaccacaccttgcgacccaatttccgggagagcaggttcaccacttttttggcattgacaacgagctgtaaagtaaaatgattaattgatagttaaagaaacgtcttgcttttcacaacattgataagatatattgataacaaaagaccaatacatgagaaactgtttcttattaatataaactgatgaaacgtttccaatcgaaatgcagcttgggtgtaaaacataggttagataaacaaattaaaaaatcctcggatttaaagatacaataatgtaatatgagacaatatgaaattgaaagcactcacgtagtcgccttcgtgcttgtccaacttgtcgttcacatcgaaaccggccatcacctgaaccacgtcgcaggcttccctttggtaggacgacgggtagtagaagttgaaggggaatggcgtgcgcttggcgtagaggccccgcgtggttgtgtcaaaattgtgaggctctccaaacaggaagtagtggtagtaggcatgcagattggtgaacacccagttggcgtaggcggtggacaaatgcttttgtttagtgcttaaatgcgcatctatcgggtaaccctgaaagaatacgtcgaattaagcccataaaaaaacacatatctataaatagagcctgcagtttgttcaccccggcattgttttgctcactcacctcgagatccagcacgcgcttaatttgcctatagcccgcgaacttctggttgccgatctgcagatacggcagcttcccggctcccgaacgcagcggattggagctggtctgcacgtccatggggcagcgggtgaatcgcaggaggcactgtttccggcaaagaggcgctttcatcagtttctttcatcatctgcgataatgggcaaaacaggcgtgctggccgccgtgtgatgcaacggaacttaccagagcacgtaaacattcaaaatctatggacggcagtccgtactcccccttgtacacatacagcatggctcccagttgcatctccattgtgtcctagtctatgctttgctcgtactcttgtatttagccggttttcaacagtccacctgcatatcagccatccgaatttgaatccaaaaatatatgccagaatttctggccgactgctgcgagtgcttcagactgataactactgggcactcgatatatcgctcgagcatatcggcgctttatcgattgccggccagggatgttgctactcgaagtttattttggctaatgaaaagatacggaattatgtttgagcttaattgctatttatgtttatctttattgctatttttattatactaccaaaaaattgtaagtttttatctatatgcatttttacatattcacattattttacattagctagatctagcgaatgttacccaaatgtttggtcaccgctgttatcacggagctatcgcaattggggcatctccaacccatctgtttgcgaaaaaaaacattaatttctgattttcgcagtaaattagttagcagtcatgaatctgataagcggcattaagttgtacatcgagaaaatgtgctccgagtcgggaccgggcatgaaaatcattctgctggacaaggagacggtaagtgcaaggactgacaatcaaatcccctgccatatgatcaaaaattcacatcattcgcagaccagtataatttcgatggcctttagccaatcggacatgctgcaacgggaggtgtacctatttgagcgcctggactcgggaagatccaacgagcggttaaagtatctaaaatgcatcgtctttatacgccccaccaagcagaacatccagctactggccaacgagttgcggaaccccaaatacagcgcctactacatttgtaagtgggtcagtagaagcaccttcggaatagtactaaactcataaatagatttcagcaacatcattccccggacggacattaaatacttggcagagtgcgacgaatccgaatcggtgcgagaagtgaaggaactgtatgcagactacctgtgcgtcaaccccaatctgttctcattaggcattcccaattgcatggcgaatcttaattggctgccggacgctctcaaccgcagcatgcagggcatcacagccgtgctgttgtcccttaagctgaa

SEQ ID NO: 19964 - DNA, 1466 bp, DROSOPHILA
tctgaagcactcgcagcagtcggccagaaattctggcatatatttttggattcaaattcggatggctgatatgcaggtggactgttgaaaaccggctaaatacaagagtacgagcaaagcatagactaggacacaatggagatgcaactgggagccatgctgtatgtgtacaagggggagtacggactgccgtccatagattttgaatgtttacgtgctctgtgcctcctgcgattcacccgctgccccatggacgtgcagaccagctccaatccgctgcgttcgggagccgggaagctgccgtatctgcagatcggcaaccagaagttcgcgggctataggcaaattaagcgcgtgctggatctcgagggttacccgatagatgcgcatttaagcactaaacaaaagcatttgtccaccgcctacgccaactgggtgttcaccaatctgcatgcctactaccactacttcctgtttggagagcctcacaattttgacacaaccacgcggggcctctacgccaagcgcacgccattccccttcaacttctactacccgtcgtcctaccaaagggaagcctgcgacgtggttcaggtgatggccggtttcgatgtgaacgacaagttggacaagcacgaaggcgactacctcgttgtcaatgccaaaaaagtggtgaacctgctctcccggaaattgggtcgcaaggtgtggttctttggcgacacctacagcgagtttgatgccattgtctacagctatcttgccatcatctttaagatcgcactgcctaacaatccactgcagaatcacattaagggctgccaaaacctagtgaactttatcaaccgcatcacgaaggacatattccgcatcgagggatacagttccgtcaagctcacaaagacacccagtggcacggaggccagtctgacggcctcggagcgcaagttcctagactccgagctgaacaccaaaatagtagccggcgtgggagccgtcttggccatgggagcgtttgcggcatggcgtgggatttacaaccagctaacgacacgctcttcgacggactacgatggcatagattacgaggatgacgagatggaggagggcctagactaatcgcatctctgcaacgatatctatgtgtatagtatatatattttaaaatacaatgtggggatgaagcacaaaaactgtccagctttaaaggtttacctaaacactgaaggagatcgatttacttggccataaatctttggaccgaaaatttcgtcaggtaatgatcccctcgtcgtagataacgcttcgttccaaggatttgccaaacaaatcgactaagtatgaaaattcggtttatgtattatagttcgaattcgtttttaaactgtcttgtataaaatagcattttaaagtcatctgagcgtaataaaattggataacagagccctgttgtcatggaaaagaca

SEQ ID NO: 19965 - protein, 327 aa, DROSOPHILA
MEMQLGAMLYVYKGEYGLPSIDFECLRALCLLRFTRCPMDVQTSSNPLRSGAGKLPYLQIGNQKFAGYRQIKRVLDLEGYPIDAHLSTKQKHLSTAYANWVFTNLHAYYHYFLFGEPHNFDTTTRGLYAKRTPFPFNFYYPSSYQREACDVVQVMAGFDVNDKLDKHEGDYLVVNAKKVVNLLSRKLGRKVWFFGDTYSEFDAIVYSYLAIIFKIALPNNPLQNHIKGCQNLVNFINRITKDIFRIEGYSSVKLTKTPSGTEASLTASERKFLDSELNTKIVAGVGAVLAMGAFAAWRGIYNQLTTRSSTDYDGIDYEDDEMEEGLD

SEQ ID NO: 19966 - DNA, 4299 bp, DROSOPHILA
taagttttaggccaatgcatttgagtttataagctgcagagatttgtggcgaatattaattatacgcaataattaatattaaattttagttagctcatgcatctccaagaaagttatctaagtctatatagctaagttaaatcttatgccttgcctcattgactgccccatcagccagaagcgaaactttatgcattcgctgttttatagttgttatttatgtcaaatcgttaacgaacccctgcaacgagtttgtgttctacgctgctccactttgcgtttccaagtttttttgccccatcagcccagcggattcgcccaaggcgacgtcactcgtttttttaccagctccgcatttcccctcacggttttccgcattctgtttagtacgtgctcacggcttcagttctgtttttttttctgccagccaactgatttcaaattttcacacaatcgcgtttttttttttcacataaaaaaagtgtaaacatgtcacggaggatagttagctttgagaatggaacttggtgcattccgaatattgttattatttgcgaactggaatagagaatataaatccaaacaatgcaatactcttaattgagcgcagcggatgaattacacggacgttgacaaactttcaccatgtgaattgctcgactgggggtcagccaccacataaggggagatctgtggcttagtttatggtttgtggtctccatatgtagctattccatgccatgccaccccatccgaaaacccaattccaatcccacccactgaaggtgaagcttttgcgcaacactcgaaatcaaattcatttaaactggcaccgctgatgatgatgacgtggacgccaccccaaagctttcgcatctaagtccgtagctgtatctgtgaatgaatccgtagctgtagctgtatctgtatctgtatatgtatctgtatcggtaagtgcacgagttttaggcacacgtgcatgaacagaacgggtttgaccgccggcccgacgagacggatttccctatcgcgccgtgacttcgatatcacggaaccttatcaactcgggtactcgaagatgtggccactgccataaatctcgtcacagtgattccagtgccaggagaggtggtggtcagacgccttagcaccaaaaaaaccagaacacagttccaattcgtgcgccgtcgagggcagacatgtcggtgtcctggtcgaagactttcgcggcattcaccgtcgcctggctcagtgccctgtgcctgctgcccgtggagacattctgtgacacctcctactacgagaagtactacgcggcgcggcgctatgtgcccctcaagcgaaatgctccgctggtcttcaactttaccctaacgctgccggatgcggatcaactggcgtccttcgagcggcccgccctggtgggcaatctgccagtgctgggcgcctggcaagcgggacgcgctgtgctcctcaaccgcactgcaatcctgaatgtttggagcgcctccgtggagataccgcaaaacagcagcgttgagtatcgctactttgccgccgccgttggccagagtggagccgtgcagattcgccgctgggagtcgcatgtccaggcaaggacctttaataccaccaagttcagtggcaatcgcagcgatgagttcggactcattggcaatgagcgccagttgtcgcgtggctggcttcaggactcgggcaacattctgcagttgaagctcttccgcgaggctctgagcttggaggagcaaccggaggtggggcaggagaagctgcgtctgcgtttgcaaccagtagatccaaagactctagcgcccatcctaagttcggcacgtgccaatgtggagtacgtgcgaatggcgtacggtgacagtaagctgcgggtgcagccggagtacggagtgccctacgccaccggtgacatcctcatgttccatgtgaacctggaacagctggatcgagtggcctatctggtggaagtttatgccgaacaaccggatgaggacctggtccgtctcctaggatactcgcacctgctgcacacctcgttctccggcactgaaggcgatgtgtccatcgaccttatttcgccgctctggcagcgcgtggtgggtcaactgcgtattgagtacctgcacattcggcccatggagaaggatggcttcgatctgcgcaccagcttcgccaactactggcgctccaattggacagccctggagattggccatcggggattgggaaaatctcttacggtcaccacgaatgcggctccgcttatcgagaacacggtggccaccatgctggcctcctctgaattgggcgctgatctcgtggagtttgatgtgcagctgaccagcgacctggtgcccatcatccaccatgatttttccattcgcgtctgcattgactcgaagaccccaacgagcaaagatgatttgaccgaggtgctgctaaaggacatatcctatgagcagctcaaggatctgaaaacctaccagatcgtgggcaacaagattgtcgagtatccggcgcacaacaacgtggaaccgccggagcagcgacttttccccacactgcaggacttctttgagcgggtgaacctgtccaccggattcgacatcgagatcaagtggccacagcagagggccgatggactgtttgagagcgaacagacgctggacaagaacctgttcgcggatcgcattctggctgtggtgcgacgacatggctgcggtcgactcaatgtgatcaagagcttcgacgcggacttatgctccctgctgcgcttcaagcagcacatgtacccggtgctcttcctctccagcagcaaggagaacgtcttcaacgatccccgcaccagcaccgtggagcagagcgtcaactttgcccaggccttcgatctgggcggcgtgtcacccaacgccgtgttcgtcaaggcggatccgggtttggtgcaacgggcaaaggcacaggtgcccattgtcctgctctggggctcggacctcaaggatcgggagtccatcgactggttcctgcagcagggacccactggagtcatctacgatcgactcgacctctggctgggcgccaacaggacgagtgcgttcgaggcggagcaggatctgccgggctacttccagctacagtgcgatccggcgcccaaggagcgcgaggtgaactccaccatcgaaagcatactgagtaatgttaacttcctgtagtgaattctgtagagccaccagagatatatacatcatgcaataaaataactaaaaaggatatctattgaaagtttatatttaatatttaatatggattcttttttggctatagaaattggaaaatactaaattttatttttgattacccttttaatcatagacaaaacgacatttcaaagtgactagcttacgagtatttgaataattgaaatatcgattgctcgttttatggcaagcaaaagggcacatttctttattaaatattaaaaacatgatttaaatataaatgattttgggtattacatccttttcttcgtcctgagaagcaggcgaaaaaaagaaaagccattaagctcgggatacttcgcttgatttatatgcgcaatttcagcgcaacttttgacagatacggattttgttttccctgctgataaacgtgaacgtgaacttgaaatttaaatctttaatgaaatcattgccatcacaacatcaaccgctgtcccacatgtcgtttcacttccacctccatttgcattcggattcgcacatggatagtacacactgcggtggtgctgatggatctgcttggtgctctctgtttttgttaccccttcgggatgctgggccaattacctgctgagcgatttgcattttttccggaggggattaggggtatccatgcatatgcaaatattatggcatttactgcggttatttatccgctccgtgggtgtaaatttagtttcagcaatttgttgcaactcgaaactgtgccgcctaattgggtttacagaaaatcaaaaataattgccatcatgccagcaaaacattctactggctcctatcagtcagtgcacttgaaatcgcaattatttgatttattatcttattaccttaggtggttcgttatcttagtaatccttgagcgaattgcgattagagcttgaagtaaacaatatttttgatttaactgctttgcagcgccagctgatggaggcctacatccggcagaagagagcctcgccgggaatggtccaggccagcgatttgcagatcaatc

SEQ ID NO: 19967 - DNA, 2299 bp, DROSOPHILA
gccggcccgacgagacggatttccctatcgcgccgtgacttcgatatcacggaaccttatcaactcgggtactcgaagatgtggccactgccataaatctcgtcacagtgattccagtgccaggagaggtggtggtcagacgccttagcaccaaaaaaaccagaacacagttccaattcgtgcgccgtcgagggcagacatgtcggtgtcctggtcgaagactttcgcggcattcaccgtcgcctggctcagtgccctgtgcctgctgcccgtggagacattctgtgacacctcctactacgagaagtactacgcggcgcggcgctatgtgcccctcaagcgaaatgctccgctggtcttcaactttaccctaacgctgccggatgcggatcaactggcgtccttcgagcggcccgccctggtgggcaatctgccagtgctgggcgcctggcaagcgggacgcgctgtgctcctcaaccgcactgcaatcctgaatgtttggagcgcctccgtggagataccgcaaaacagcagcgttgagtatcgctactttgccgccgccgttggccagagtggagccgtgcagattcgccgctgggagtcgcatgtccaggcaaggacctttaataccaccaagttcagtggcaatcgcagcgatgagttcggactcattggcaatgagcgccagttgtcgcgtggctggcttcaggactcgggcaacattctgcagttgaagctcttccgcgaggctctgagcttggaggagcaaccggaggtggggcaggagaagctgcgtctgcgtttgcaaccagtagatccaaagactctagcgcccatcctaagttcggcacgtgccaatgtggagtacgtgcgaatggcgtacggtgacagtaagctgcgggtgcagccggagtacggagtgccctacgccaccggtgacatcctcatgttccatgtgaacctggaacagctggatcgagtggcctatctggtggaagtttatgccgaacaaccggatgaggacctggtccgtctcctaggatactcgcacctgctgcacacctcgttctccggcactgaaggcgatgtgtccatcgaccttatttcgccgctctggcagcgcgtggtgggtcaactgcgtattgagtacctgcacattcggcccatggagaaggatggcttcgatctgcgcaccagcttcgccaactactggcgctccaattggacagccctggagattggccatcggggattgggaaaatctcttacggtcaccacgaatgcggctccgcttatcgagaacacggtggccaccatgctggcctcctctgaattgggcgctgatctcgtggagtttgatgtgcagctgaccagcgacctggtgcccatcatccaccatgatttttccattcgcgtctgcattgactcgaagaccccaacgagcaaagatgatttgaccgaggtgctgctaaaggacatatcctatgagcagctcaaggatctgaaaacctaccagatcgtgggcaacaagattgtcgagtatccggcgcacaacaacgtggaaccgccggagcagcgacttttccccacactgcaggacttctttgagcgggtgaacctgtccaccggattcgacatcgagatcaagtggccacagcagagggccgatggactgtttgagagcgaacagacgctggacaagaacctgttcgcggatcgcattctggctgtggtgcgacgacatggctgcggtcgactcaatgtgatcaagagcttcgacgcggacttatgctccctgctgcgcttcaagcagcacatgtacccggtgctcttcctctccagcagcaaggagaacgtcttcaacgatccccgcaccagcaccgtggagcagagcgtcaactttgcccaggccttcgatctgggcggcgtgtcacccaacgccgtgttcgtcaaggcggatccgggtttggtgcaacgggcaaaggcacaggtgcccattgtcctgctctggggctcggacctcaaggatcgggagtccatcgactggttcctgcagcagggacccactggagtcatctacgatcgactcgacctctggctgggcgccaacaggacgagtgcgttcgaggcggagcaggatctgccgggctacttccagctacagtgcgatccggcgcccaaggagcgcgaggtgaactccaccatcgaaagcatactgagtaatgttaacttcctgtagtgaattctgtagagccaccagagatatatacatcatgcaataaaataactaaaaaggata

SEQ ID NO: 19968 - protein, 679 aa, DROSOPHILA
MSVSWSKTFAAFTVAWLSALCLLPVETFCDTSYYEKYYAARRYVPLKRNAPLVFNFTLTLPDADQLASFERPALVGNLPVLGAWQAGRAVLLNRTAILNVWSASVEIPQNSSVEYRYFAAAVGQSGAVQIRRWESHVQARTFNTTKFSGNRSDEFGLIGNERQLSRGWLQDSGNILQLKLFREALSLEEQPEVGQEKLRLRLQPVDPKTLAPILSSARANVEYVRMAYGDSKLRVQPEYGVPYATGDILMFHVNLEQLDRVAYLVEVYAEQPDEDLVRLLGYSHLLHTSFSGTEGDVSIDLISPLWQRVVGQLRIEYLHIRPMEKDGFDLRTSFANYWRSNWTALEIGHRGLGKSLTVTTNAAPLIENTVATMLASSELGADLVEFDVQLTSDLVPIIHHDFSIRVCIDSKTPTSKDDLTEVLLKDISYEQLKDLKTYQIVGNKIVEYPAHNNVEPPEQRLFPTLQDFFERVNLSTGFDIEIKWPQQRADGLFESEQTLDKNLFADRILAVVRRHGCGRLNVIKSFDADLCSLLRFKQHMYPVLFLSSSKENVFNDPRTSTVEQSVNFAQAFDLGGVSPNAVFVKADPGLVQRAKAQVPIVLLWGSDLKDRESIDWFLQQGPTGVIYDRLDLWLGANRTSAFEAEQDLPGYFQLQCDPAPKEREVNSTIESILSNVNFL

SEQ ID NO: 19969 - DNA, 3090 bp, DROSOPHILA
agccaacaactttgaaaccaacggaaggaacgaccggccaagcctacaactctgaaaccaactgagggaaccgagtgccaagccaacaactttgaagccaactgagggaactacggcgaagcctacaactttgaaaccaactgagggaacgagtgccaagccaacaactttgaaaccaactgagggaactacggccaagcctacaactctgaagccaactgatggaactacggcgaagcctacaactttgaaaccaactgagggaacgagtgccaagccaacaactttgaaaccaacggaaggaacgacgggcaagcctacaactctgaagccaactgagggaactacggcgaagcctacaactctgaaaccaactgagggaacgagtgccaagccaacaactttgaaaccaacggaaggaacgacggccaagcctacaactctgaagccaactgagggaacgagtgccaagccaacaactttgaaaccaacggaaggaactacggcgaagcctacaactctgaagccaactgagggaacgagtgccaagccaacaactttgaaaccaacggaaggaacgacggccaagcctacaactctgaagccaactgacggaacaacgccagaacggacttctcagaagacgacaaccttgaagccaacatcggagaagacgacaaccgaatctcttcctccgtttaatatctttgatgtgataactggaacaccattaccaagcacgctcaatatttcataaagcaccatcaaacagaactacagtagtgataaaccattgaatccgtaattaatgtaaattttaattctagtaagctatcaacaacaaccacttagtaataaaatgatacattccaaagattttacaataactcatttaaaatgatttcttatacattaccaaaaaaaaaagaagtttgttttgtaactggttccaggtggggctccacgagtattagttttatatgctagggacctatttattttacaggggtatattgttgtccaaagtgttaccatcttcatcgctttcctcgctgtctaaatcattgttagcatcccgccagtcgcacaagctggggaacttttcgctgattcgatgctgggggcatttagatcccgccggaccagattggtagatgggttcgttgaaaatgttgttatagtcatagttgcacgtcaacatgaactggaagcgattggatttgggctccaggaaacggacaccggcacagccgacgcgattaactcgatccgaaacaagtaatgtgaagtgaccaattttcttgctgcggggaaaaaatattatatttaatattattgaatggagttttcatgacatttttaatgccttaaattcgaaatcctgtagagttcttaaaatctggaacaatttttaataaaaaagtttgggaactctttctctagtttttagcgacttacccttgcggatgtggatgatatctatcgatgaagctctgattggcatcctgatgttcgcggaaccagttgatcacgaaggatttcatgcgtcgcgaatgcgatttgaactctcttccaatccaaaagtaaccaatattttgaccactaaacttgaaacgcggtgtattccggcacttgtcgtgcgcgaattggcagcgtttggcatgcaaggcggccatttgctccagttcggtatcccaacgcagaagcggcatatgtgcggcgcttctatagccatccagatttccgctggcgatcttcgatctggccaaattgtgcatgtccaacaggagctgacgtcgcctctcgctcatttccaggagcttgggttccggtccacaggcgggtgaaaagctgccattgttgccacatgcggtatgcggcacatgcaccaaatgcgttccattgtacagctcacaaagtgcagccgcacagtagccgccagaggacgctggagtagtggtggttatagtttcgattaaggtctgagctccggctaatcccttttcgcaagccaaaacaaagaggagcactgcaggcgcccaaagggcaaacacgctgcacttgctcaacaatctcggcatctcgacgatcaacacgctactgaactgaggtcgagcggcactttgggtttatgaatgggttatggctaaccatcggatagctgcctacgccggcgtcgctgcttttcccacttctttgggctgggcagcgcggcggtgtccataactggttctatttagaaagaaattagccatgggaattagtggggctttaatatgaggacatcggatcgggccattcttaaaatattatcttaatcattggtttataatctttgctattattacgtggaaattagttgattagatggaaattattgtagctatttatagaatacaaccattaaggcgtagactctggaaataattgcattgaaacatagtatctatagtatcatagtatcttttttgcagtgcagtcttggtagcctgctaggcttttcgacacccagtgctcatccagcttccggcagtgcaccgcgttcgctgcaccagtagatcacccctatatcatcgccatatcaccaccgatttgcaccgatccgtggagaaccggtttggcgtcggctcatcgctccgggctctaatgttggatgtgggtatgcgtctggctctgggtctgggactggcccccgtgtaagtggtataatcagttacccggcggccagtgtgggaaaaatgctcgcttcaaggcaattgccgataagtagctgagtcggggaattattgacttttcgttcagctttacaagtcaactagcccggccaaaagccgttaacacaacagagacaagcgtcgtaaacccaaaaaaaaaataaataagaagaaaaaaaaaacggaaaaatagtaaaaataaaaaacaaatgtaaagaacgcagaaaaatacagaaattaatgaaacgtcgacagaaacgtgcctcacacctaatcggcgttaattaaaataacaatgcttcgacagctgaagcttcgcactaaacacaccaacaataccaaaatgcaaaatatgcaaaaaaaataaaccgaaaag

SEQ ID NO: 19970 - DNA, 936 bp, DROSOPHILA
atcgtcgagatgccgagattgttgagcaagtgcagcgtgtttgccctttgggcgcctgcagtgctcctctttgttttggcttgcgaaaagggattagccggagctcagaccttaatcgaaactataaccaccactactccagcgtcctctggcggctactgtgcggctgcactttgtgagctgtacaatggaacgcatttggtgcatgtgccgcataccgcatgtggcaacaatggcagcttttcacccgcctgtggaccggaacccaagctcctggaaatgagcgagaggcgacgtcagctcctgttggacatgcacaatttggccagatcgaagatcgccagcggaaatctggatggctatagaagcgccgcacatatgccgcttctgcgttgggataccgaactggagcaaatggccgccttgcatgccaaacgctgccaattcgcgcacgacaagtgccggaatacaccgcgtttcaagtttagtggtcaaaatattggttacttttggattggaagagagttcaaatcgcattcgcgacgcatgaaatccttcgtgatcaactggttccgcgaacatcaggatgccaatcagagcttcatcgatagatatcatccacatccgcaaggcaagaaaattggtcacttcacattacttgtttcggatcgagttaatcgcgtcggctgtgccggtgtccgtttcctggagcccaaatccaatcgcttccagttcatgttgacgtgcaactatgactataacaacattttcaacgaacccatctaccaatctggtccggcgggatctaaatgcccccagcatcgaatcagcgaaaagttccccagcttgtgcgactggcgggatgctaacaatgatttagacagcgaggaaagcgatgaagatggtaacactttggacaacaatatacccctgtaa

SEQ ID NO: 19971 - protein, 308 aa, DROSOPHILA
MPRLLSKCSVFALWAPAVLLFVLACEKGLAGAQTLIETITTTTPASSGGYCAAALCELYNGTHLVHVPHTACGNNGSFSPACGPEPKLLEMSERRRQLLLDMHNLARSKIASGNLDGYRSAAHMPLLRWDTELEQMAALHAKRCQFAHDKCRNTPRFKFSGQNIGYFWIGREFKSHSRRMKSFVINWFREHQDANQSFIDRYHPHPQGKKIGHFTLLVSDRVNRVGCAGVRFLEPKSNRFQFMLTCNYDYNNIFNEPIYQSGPAGSKCPQHRISEKFPSLCDWRDANNDLDSEESDEDGNTLDNNIPL

SEQ ID NO: 19972 - DNA, 3743 bp, DROSOPHILA
tcgacctctggctgggcgccaacaggacgagtgcgttcgaggcggagcaggatctgccgggctacttccagctacagtgcgatccggcgcccaaggagcgcgaggtgaactccaccatcgaaagcatactgagtaatgttaacttcctgtagtgaattctgtagagccaccagagatatatacatcatgcaataaaataactaaaaaggatatctattgaaagtttatatttaatatttaatatggattcttttttggctatagaaattggaaaatactaaattttatttttgattacccttttaatcatagacaaaacgacatttcaaagtgactagcttacgagtatttgaataattgaaatatcgattgctcgttttatggcaagcaaaagggcacatttctttattaaatattaaaaacatgatttaaatataaatgattttgggtattacatccttttcttcgtcctgagaagcaggcgaaaaaaagaaaagccattaagctcgggatacttcgcttgatttatatgcgcaatttcagcgcaacttttgacagatacggattttgttttccctgctgataaacgtgaacgtgaacttgaaatttaaatctttaatgaaatcattgccatcacaacatcaaccgctgtcccacatgtcgtttcacttccacctccatttgcattcggattcgcacatggatagtacacactgcggtggtgctgatggatctgcttggtgctctctgtttttgttaccccttcgggatgctgggccaattacctgctgagcgatttgcattttttccggaggggattaggggtatccatgcatatgcaaatattatggcatttactgcggttatttatccgctccgtgggtgtaaatttagtttcagcaatttgttgcaactcgaaactgtgccgcctaattgggtttacagaaaatcaaaaataattgccatcatgccagcaaaacattctactggctcctatcagtcagtgcacttgaaatcgcaattatttgatttattatcttattaccttaggtggttcgttatcttagtaatccttgagcgaattgcgattagagcttgaagtaaacaatatttttgatttaactgctttgcagcgccagctgatggaggcctacatccggcagaagagagcctcgccgggaatggtccaggccagcgatttgcagatcaatcgacccatgtccgggatgcgcagcaacagccgggagctgcacgcctacgacggacccatgcagttcatcagttcgccccaaaatccggaccagatactcaccaacggcagtcccggcggcatcaatccggttgccatgaacacgagtcgcaatcactcgaataacatgcgcagcctaagcaccatcaaccaggagggtaagtggtcgtacactccaagaaaaggtagttaggcttccatatataatcagaaacttagcagtagttataaccatggaactattttgcttttcagctgatctcatagaggagatctcatcgcacgagttggaggacgaggagagcagtccggtgacggtgattgagcagcaccagcagtcagcctcgcacagcgccaactcgacgcaatcgcagaaaccacgtgcccgccagcattcctttagcgacaatctggacgaggatgactacaccaatcgcaatgtggccggtgctgctccagtgcgtcccgccggcatggcctcatcgccgtacaaggacgcaacgctggacggcagcagcaacgggacggggaacggaactggcggcgagtccgagggagatgtcatcggcaatatcgaccagttcgtgatgcaaccagcgccacagggagtgctctacaagtgccgcattacgcgggacaggaagggcatggaccgcggcctctttcccatctactacttgcatctggaacgtgactacggcaagaagatatttctgctgggaggtgggttattgatagtgatcctctaaagagctgtctaaaatttgatacgcttatcaggtcgcaaacgcaagaagagcaagacatccaactacattgtcagctgcgatcccacggatttgtctcgcaatgccgatggcttctgtggcaaactgcgctctaatgtctttggcacatccttcacggtctttgacaacggcaacaaggagagcacagagagtcctcgactcgacttggccgtcatcatttatgtaagttcacaaagtcagtgcaaaggataactatcttaatatctaacttattcacaggacaccaacattttgggattcaaggggccacgcaacatgactgttatactgcccggcatgactgaggacgatcagcgtgtcaagatcagttcggcggatcccaaacagcagggcatccttgacctatggaaaatgaaggtaggcagcataggatattcaaaaaaaaaccacctactaattttcgaatttttaatagaacatggacaacatcgtggagctgcacaataagacgccagtgtggaacgatgaaacccaatcgtatgtgctcaactttcatgggcgcgtcacccaggcgtcggtgaagaactttcagttggtccacgactccgatccggagtacatagtaatgcagttcggccgcacctcggaggacgtcttcaccatggactatcgctatcccctgtgcgccatgcaggcattcgccattgccctcagtagtttcgatggcaaaatagcctgcgagtgagctggctgggatcctcgggttggcccgttgccttatgtacagctgattatctggagtgcggatcaagtcgctccgggcggatcattgttgaaattattatcggaaatctagtcactcgaagtcgggttttggtagaccatcgttgaaatgagtaatgtagttagtagctactcgtatcgcgtatcattgtataacgtatattcagaatgtgctcaccgattttataagaaattatttaggacaggtcctacaactttgtaaatctaaatgtgccccttttagcgataagttcacttgtaagcgattcgaagtcaaggtcatttaaagtaatatcagttttataatcagcatatagcaacaaatcaaggactaatgtaaactatttaaaatgccactactattagtcggtaagagagcactactaacttgtactaagctctaaataaatacaaacagctattgatcaaaaaatgaaactttgttgaaaattcgtttcttgttttatacgtatcatttattttagtacacgtcctaacgttatttaaataaatgcaagaccgtcaggccttcatatataaattacgtaatctatttacaaaaagaatatcagatctcacaatacgaatggcatggtacctgaaatccaatccacacacaaaaattgtataaatatcttcaaaacgagtatatgatcaaagaattacgttaataactaataagtacaacggaattgtgtggaatggaccacatatcttcactttgtgttatttttatcagactccgtatgtctcacagaatgtgggaaccttgcgttccactaactcaactcttgtctttttacatgctcataactgctatttgatttacgctagcttctgctacgatcgtttacgcgatttatgcgttggtcgatcctggggcagtttaaactcaagcggatcgtagtcctcatacgcgagcttgcgctctggcgccgactcaggtaacttgttgattttct

SEQ ID NO: 19973 - DNA, 1394 bp, DROSOPHILA
tcagtgcacttgaaatcgcaattatttgatttattatcttattaccttaggtgcgccagctgatggaggcctacatccggcagaagagagcctcgccgggaatggtccaggccagcgatttgcagatcaatcgacccatgtccgggatgcgcagcaacagccgggagctgcacgcctacgacggacccatgcagttcatcagttcgccccaaaatccggaccagatactcaccaacggcagtcccggcggcatcaatccggttgccatgaacacgagtcgcaatcactcgaataacatgcgcagcctaagcaccatcaaccaggaggctgatctcatagaggagatctcatcgcacgagttggaggacgaggagagcagtccggtgacggtgattgagcagcaccagcagtcagcctcgcacagcgccaactcgacgcaatcgcagaaaccacgtgcccgccagcattcctttagcgacaatctggacgaggatgactacaccaatcgcaatgtggccggtgctgctccagtgcgtcccgccggcatggcctcatcgccgtacaaggacgcaacgctggacggcagcagcaacgggacggggaacggaactggcggcgagtccgagggagatgtcatcggcaatatcgaccagttcgtgatgcaaccagcgccacagggagtgctctacaagtgccgcattacgcgggacaggaagggcatggaccgcggcctctttcccatctactacttgcatctggaacgtgactacggcaagaagatatttctgctgggaggtcgcaaacgcaagaagagcaagacatccaactacattgtcagctgcgatcccacggatttgtctcgcaatgccgatggcttctgtggcaaactgcgctctaatgtctttggcacatccttcacggtctttgacaacggcaacaaggagagcacagagagtcctcgactcgacttggccgtcatcatttatgacaccaacattttgggattcaaggggccacgcaacatgactgttatactgcccggcatgactgaggacgatcagcgtgtcaagatcagttcggcggatcccaaacagcagggcatccttgacctatggaaaatgaagaacatggacaacatcgtggagctgcacaataagacgccagtgtggaacgatgaaacccaatcgtatgtgctcaactttcatgggcgcgtcacccaggcgtcggtgaagaactttcagttggtccacgactccgatccggagtacatagtaatgcagttcggccgcacctcggaggacgtcttcaccatggactatcgctatcccctgtgcgccatgcaggcattcgccattgccctcagtagtttcgatggcaaaatagcctgcgagtga

SEQ ID NO: 19974 - protein, 443 aa, DROSOPHILA
MEAYIRQKRASPGMVQASDLQINRPMSGMRSNSRELHAYDGPMQFISSPQNPDQILTNGSPGGINPVAMNTSRNHSNNMRSLSTINQEADLIEEISSHELEDEESSPVTVIEQHQQSASHSANSTQSQKPRARQHSFSDNLDEDDYTNRNVAGAAPVRPAGMASSPYKDATLDGSSNGTGNGTGGESEGDVIGNIDQFVMQPAPQGVLYKCRITRDRKGMDRGLFPIYYLHLERDYGKKIFLLGGRKRKKSKTSNYIVSCDPTDLSRNADGFCGKLRSNVFGTSFTVFDNGNKESTESPRLDLAVIIYDTNILGFKGPRNMTVILPGMTEDDQRVKISSADPKQQGILDLWKMKNMDNIVELHNKTPVWNDETQSYVLNFHGRVTQASVKNFQLVHDSDPEYIVMQFGRTSEDVFTMDYRYPLCAMQAFAIALSSFDGKIACE

SEQ ID NO: 19975 - DNA, 3191 bp, DROSOPHILA
actgttgcagccggtagtcgagcatcacttggtcgatgggctgcagaatggcagtcatcttctccacaaatgcagcgtccaggggcgcagcaatgaaggtcctggttcgctcctcattcgtgtagatccgcagcccctgcaaagtggcggcgaatctaaaagaggattggtcatcaggatgggagatactagatttaacttggttaaacatctcaccccgcagagctgttgagggcgctttgcaaggatcgggagaattcatcgatctgatggtactgcagcaccactgttcgactcaggctcagatggagcgactcgttcggctgcagttccaagtgtggctccagacgagcaatggcctccgtttggaactcctccagctggtcaacacatgctgttgccggcacatagacgtaagtggcccagtttccccgttcatgcttgaaactacgcatgcggccgccatgttccgcgggatcatccaccacatcctcgacgaactcctcgggcttgggcttcttggggcccagcagggtggctgctttgggtagggccggtctttggcggttataatgtagaaatctacgggtattccagtaaaggacgttaccttttcaaggtgatcaacgcgggagtttgaatgttttcggtgcagtcctcatcctcggaggcggaggagctgctgccaccatagtccaccagggccatattattatttatttatgtatttttatttgattgcagtaaacaagaaatgaccaacagcacaatgttcggcggtttttatttacatttatcgattaaattgaaagtgatgtgtatttagcttggttttaaatttatgttgataaactattttgttttaagcaattaaattgcaattaataacattaaaaaaaagttataaaattcacttttaattatttaaatagtacttatttttttaacatttttttactgtaaaatttccactttaaatgtattgaccgttaaagccttaaaacttgtttttatttagactaaatccattgaaatgcacaaattggactactacaaactggcttcaatagccgggcattgctcgccatttttctccagcctcgactgctcccactggtagttgtagtacctacccaattggaagagctgcgtcagactcacgaagagattaaccgcgaacaagctgtagttcttgggaatgatcaccagagagtagcgcgtccagatgaggttcgttgccccaagagccagacatccgttaggcgaaatcttgtccgcaggacgcgtcaaatcactgagacccgcgataacgaggctctgtggtggaatataaacggaatggttgcggagattagggagatctggccgatagtgcagggtaagtccccccattgactgcaaatctgaatagcatgttggcaaagctccccccagtcaaaacagtaaaagtattatgaaatattccatgagccccacaaaccgcacaatcattcagttatcagaatctcgcgcgtggagaggaaaatggtatataagtacatatatacatatttatcgcgggcttgaacaggtttgccgagaactaaacaaataataataaaacacaatattcgcccacaggtttgtttatcagtacggtgataatgggaattggctaaggacgcagggttcatggttatgcaagtagtgcaaaaacttacccacttaacgattggagcccaaaagaatatggtcttgggtcctgaaggaaagatatgttagttcctctctgtgcttaaaatgcttctatttatgatcacctgctgggtgcatccacaagggtcgcatcttggggggcacatacttgtcgcaggccttgataagtccattatatgccctggagtgaagaccctttccggcggaagctgcagccgtgggcgcaggtgttgttggaggagtggcagacattccggaacgctactgtttttcctatattttccaacgtccaaccaatagcagatgcacagagtaactgctggtcaggtttgcgaattgagaggaattctatatggcctacctgtaatcaagtatttgttgagtatgggctgattgattggaagcgctggaataacaatcgcctgggactgcgataaaccagttgggaagtagtgctcctgaacaaactgaggcacaacagctccaaccaggcgtccatctacaactgagctttccgaaaagtccggggtccatgcacatatgtttatgtttctctagtattattagcttagcgctcctgttatcaccagcactatcagccactggaatacgacgacgccagcccctttttttgcactttgcttttgccgcaaaactaatataagctcttagttatattctccttttattggtttttaattaatttgtgttgactaattgtgtaaaactcaacacagttatcgaacagcgaatgtgcaaatagattcatcacacatggcgtatgagttatcttcttgataatccggttttattgcaatctaaggatttctactcttttgcaattattgtaataacagctcatttcatttaaatcagtcaaacataattgtattaaatcaaagaataagatattgattacctttgccttttggatatgttttcctaatttggcatacttaaaataatacttttaagaaaatatcttttagccagtttggttcatttatattactgaatataacccattgttgggccaccatgttgggccacatccactttaataaaacgaacaactacgtttatctagtgactaaagtcttaaaatgtattgatttatcattctcgtttcgatttaactatacgcaaagcctccacagttacaacttaagtaatacgaatcacgtcgataaggcggtgaaccataaataataatggttaacaggttgtaaaacgcagtttcgcgatctgctagtacagcttcctcttaatcctttcgtttacgttgcgcgttgtgggatttgtatgtacataaaagttcgattaaagtctatataaaggggacagcaccggtattcgattcgatatgtatctaattttgcaccgccggctgctgctgctcctgcttcagcttctcctgactctggtggtagtggtaggcccgtgccagctgcaccacctgcgtgatgcccacgaagagattcacggcgaacaggctg

SEQ ID NO: 19976 - DNA, 662 bp, DROSOPHILA
gacgcctggttggagctgttgtgcctcagtttgttcaggagcactacttcccaactggtttatcgcagtcccaggcgattgttattccagcgcttccaatcaatcagcccatactcaacaaatacttgattacaggaaaaacagtagcgttccggaatgtctgccactcctccaacaacacctgcgcccacggctgcagcttccgccggaaagggtcttcactccagggcatataatggacttatcaaggcctgcgacaagtatgtgccccccaagatgcgacccttgtggatgcacccagcaggacccaagaccatattcttttgggctccaatcgttaagtggagcctcgttatcgcgggtctcagtgatttgacgcgtcctgcggacaagatttcgcctaacggatgtctggctcttggggcaacgaacctcatctggacgcgctactctctggtgatcattcccaagaactacagcttgttcgcggttaatctcttcgtgagtctgacgcagctcttccaattgggtaggtactacaactaccagtgggagcagtcgaggctggagaaaaatggcgagcaatgcccggctattgaagccagtttgtagtagtccaatttgtgcatttcaatggatttagtctaaataaaaacaagttt

SEQ ID NO: 19977 - protein, 151 aa, DROSOPHILA
MSATPPTTPAPTAAASAGKGLHSRAYNGLIKACDKYVPPKMRPLWMHPAGPKTIFFWAPIVKWSLVIAGLSDLTRPADKISPNGCLALGATNLIWTRYSLVIIPKNYSLFAVNLFVSLTQLFQLGRYYNYQWEQSRLEKNGEQCPAIEASL

SEQ ID NO: 19978 - DNA, 3255 bp, DROSOPHILA
caggtgttgttggaggagtggcagacattccggaacgctactgtttttcctatattttccaacgtccaaccaatagcagatgcacagagtaactgctggtcaggtttgcgaattgagaggaattctatatggcctacctgtaatcaagtatttgttgagtatgggctgattgattggaagcgctggaataacaatcgcctgggactgcgataaaccagttgggaagtagtgctcctgaacaaactgaggcacaacagctccaaccaggcgtccatctacaactgagctttccgaaaagtccggggtccatgcacatatgtttatgtttctctagtattattagcttagcgctcctgttatcaccagcactatcagccactggaatacgacgacgccagcccctttttttgcactttgcttttgccgcaaaactaatataagctcttagttatattctccttttattggtttttaattaatttgtgttgactaattgtgtaaaactcaacacagttatcgaacagcgaatgtgcaaatagattcatcacacatggcgtatgagttatcttcttgataatccggttttattgcaatctaaggatttctactcttttgcaattattgtaataacagctcatttcatttaaatcagtcaaacataattgtattaaatcaaagaataagatattgattacctttgccttttggatatgttttcctaatttggcatacttaaaataatacttttaagaaaatatcttttagccagtttggttcatttatattactgaatataacccattgttgggccaccatgttgggccacatccactttaataaaacgaacaactacgtttatctagtgactaaagtcttaaaatgtattgatttatcattctcgtttcgatttaactatacgcaaagcctccacagttacaacttaagtaatacgaatcacgtcgataaggcggtgaaccataaataataatggttaacaggttgtaaaacgcagtttcgcgatctgctagtacagcttcctcttaatcctttcgtttacgttgcgcgttgtgggatttgtatgtacataaaagttcgattaaagtctatataaaggggacagcaccggtattcgattcgatatgtatctaattttgcaccgccggctgctgctgctcctgcttcagcttctcctgactctggtggtagtggtaggcccgtgccagctgcaccacctgcgtgatgcccacgaagagattcacggcgaacaggctgtagttcttgggtatgatcaccagcgagtaacgcgaccagatgatgcccgtggcagccagggcggcgcatccagacacggagatggtgtcggccggtcgggccaagtcactcaggccggcggcaacgagaccctggcaaaggagataaaggattcgattgcttatttaatttttgttttaactaaaggacgcgatatgcttaggcatcttcagtttctatgttttagtgccgctatgggagatctcaactggctgttctttgttttatttatttgtggcttgatatatgtatgtacataagtatgaggcatctatatgcctactatcgaaacaaacaaactaactaaataaatcaaaagtttttgatttttttgggaaactttttttcatagggttccacaacagaaggcaatccgctcacgaacacaaccgtatgcggttgttatcaagcgcaggttgctcgaaataatcaaataatttcatttaatggcacctgcgctcagatttgtctaccgtcgtttcggatttatggtgaactatagtatgtgtgcgataatgaaaatcagcgaaggtcgtgcgttgtccgagttatgtaatcccatccgtctggctttctgtctacttacccatttgaagacgggtgcccaaaagaatatcgtcttgggacctggaatcaaaccgaacctaaagatgtgctctttatgtagcatagtggtctatgtgaggcttaccagctggatgcatccacagtggccgcagcttggcgggcacaaatttgtcggcggcgccaatcatcccgttgtacagcttggagtggatgccctttccggcggaagggacggccgatggtggcggcgggggaacgggcggcggtggctgaacggctgtggacgacattttgttgttgttgctatttgtgcgaaaaaattccacgggttgcagtgatgataatttatgcgtccaaactcgttggctggcaatcacaaaataaaatctactatgaaacgctaaacaacaaaagccaaaaagcttcgtgagagagcgaaaaagacaaagagagcaaaagagagagctagcacccacacagccgcaaactcgaacagctgagcgcgctattttctaacgtgtttaatttgacacgttaaggaaatacctatacaattgtacctacaactcgtacttgactttctaaaaagtgcaaaaatcatgcattcatctttaggaacaggtttttgcacgatcacaggttcattagctatcgcacaacatccttgaccttgaggagagtgtgccaatttccgcaatttccgcagcaaaatgttgacggaagcaaatgtgtctgaatcgaatgcatcgctaccaatacaagtgcagcatctctataaatagcaggcaaatgcaagttttttaggagtcacgcgacaacagtgatgcgccatttttcactaatacaaaaaaattaatatctaaatcttatatttattaaatctcacaggaaatgacgtattaaaacacatacaattacacaattataaaaataattttagcaccgcaacagctggggtactacagctagacaatctgccatctcaaattctagtgttggtaaacgttgtcccgcctgcatatataagtcaaagtatactattttcgaaaaattaggtaaatttcagtaaaagatttgtactgcacgagctggaaccactttcataaagttaactttcatcacagaattcggaatgtcctataaataattatagaagcccatgtagatgatgggtaagttacacgtaaatattctgagtagttccaaaaacaaccgccaggcgaaactttctttatatgaaagaacgaatatgtaaaagtaaaatgaagagctatttattcccacactcctcaagatttaaaagtaaaacatacatcacatcactcaactaaatctaactgatttaaagtatcctatactgtatacagaacactagcg

SEQ ID NO: 19979 - DNA, 697 bp, DROSOPHILA
gtgattgccagccaacgagtttggacgcataaattatcatcactgcaacccgtggaattttttcgcacaaatagcaacaacaacaaaatgtcgtccacagccgttcagccaccgccgcccgttcccccgccgccaccatcggccgtcccttccgccggaaagggcatccactccaagctgtacaacgggatgattggcgccgccgacaaatttgtgcccgccaagctgcggccactgtggatgcatccagctggtcccaagacgatattcttttgggcacccgtcttcaaatggggtctcgttgccgccggcctgagtgacttggcccgaccggccgacaccatctccgtgtctggatgcgccgccctggctgccacgggcatcatctggtcgcgttactcgctggtgatcatacccaagaactacagcctgttcgccgtgaatctcttcgtgggcatcacgcaggtggtgcagctggcacgggcctaccactaccaccagagtcaggagaagctgaagcaggagcagcagcagccggcggtgcaaaattagatacatatcgaatcgaataccggtgctgtcccctttatatagactttaatcgaacttttatgtacatacaaatcccacaacgcgcaacgtaaacgaaaggattaagaggaagctgtactagcagatcgcgaaactgcgttttaca

SEQ ID NO: 19980 - protein, 154 aa, DROSOPHILA
MSSTAVQPPPPVPPPPPSAVPSAGKGIHSKLYNGMIGAADKFVPAKLRPLWMHPAGPKTIFFWAPVFKWGLVAAGLSDLARPADTISVSGCAALAATGIIWSRYSLVIIPKNYSLFAVNLFVGITQVVQLARAYHYHQSQEKLKQEQQQPAVQN

SEQ ID NO: 19981 - DNA, 2738 bp, DROSOPHILA
cgacagagctccggatccggactttgggtacgcacaagtacaagtatgcggacggagagcgcttttagagaggcgaagagcgcgtgagagatttgtttgcataaactgttgtaaatgttgcgggacctggagcattactaggcggggcacatcggtgggcagatgggcggatgccacaatgttgcactcaatgccatcgattttccgggcgttcagtcaaaacaaaccaccacaagcgaagtaagcgctcgtaaagagcgaaaaaaggggcctagcttcaacgggagctggagaggattgcatctcagctgagcgcaactttgttgcacgaccgacttttcccgaaggacgaccgggcgggcacgtgctccgtttacccttattccattttcccgccaagagcgacacatgcgcggtcccgcatccttgcactttcacttgccaggacgtgcgctctccgtgctcatggctctcccgctcgccgagcgcaaattaatggccgtgtgtgtttttgtaaaattactttgaccgagatacggggcactggagaaggataaggacatggcgatggctatgggcgctggaaccggagagccagccgcatgtcctctcccattttagtgacatggacgccattacaacggcgatggcctcgcacacgcacacaatcacacggccgcaaacaaacccgatttgccaactttgtttcaattcgccaataattacaatgttgcccagcgagtttcgagcaccgtttaacagatgggttctcacacaccgccctgtcgttcacatacttgttgaggtagttccatggcatccaaaactgaattacattttaataaaaatcagtgccaaatgcgcgacttgtacgtggattattgttgtgttatcgatacgccgataggctggcttctcttcctcatccctgccagccattcgcagcgaacacttatcgatacgcggtgatagttattccgtgtgttttcccatctctaacgcgttgtagtaaaggaaaaagagtgggaaaccaaaaattgatatttttctgaaagtctttcaaagttacgctttaaactagaagcaatcatgtccacggaggacttttacctacgctactacgtcggacacaagggcaagttcgggcacgaattcttggagttcgagttccggccggatggcaagctgcggtacgccaacaactccaactacaagaacgacaccatgatccgcaaggaggccttcgtccaccagtccgtgatggaagaactgaagcgaatcatcatcgactcggagatcatgcaggaggacgatctgccctggccgccaccagatcgcgtgggtcgacaggtcggtttgccgcactccgtaactagagctcaactaaacaaccatgtgtctttttcaggaactggagatcgtcatcggagacgagcacatctcgttcaccacctcgaaaacgggatcattggtggacgtgaaccggtcaaaagatcccgagggcctgcgatgcttttactacctggtgcaggatctcaagtgcctggtcttctcactcatcggcctgcatttcaagatcaagcccatataagccgtagccaccacctcaagcatagcctatttatcggacggacacatcgtattttataatggaacttctacgatacttgtaattgtataagctatacctttgtactttttggtacagtttgcagtgaataaaaaaggattggaagatactttgttttcaaagtcttgtgtacagtctagattgtgctatagaagtaaatagcaaatcttcgatgtagtagcagacaacaagtttaacaataatagcaaacacaatagtaaaccatttaacttttgatgttataatgtgtaggtatatttgaaaaatacaatttaatatctattgtgtttgaataatatacatactcgagataaaaatttaaagtcctttacatttgtacaattcgtatatgtctaaaacagcttaagctaagtgattaatatctcacaaactggcaaattgtcttaacgtttaagtacaagcagtaacttagcctaagataatgatcggtatcttaagaaactggaataaaatacgcactcacatacggttttgagacttgcaaagggtttggcttacatatgctactaaattcagtctttggggtgagtactttgctaacgaaagtacaaactaagggcctgcaggcgatgcaacactatagaaagctcttatagagccgaatgcgtaggtctcagagtcataattgtggctgctgatgcagcgccaaagtggctgagatattgttactgggtcgctccaaatagctgccatgtcctggcacgggcattgacattggcatctcaagatgctggtggtggtgattcagctgcgcttgctgtagatgctgctgcggaagttgctgctggtgggagagttgtgccttcaggagactgggagatgcctgcagcggagtgttgctggacacaccgacgctactgccgccaggactgggaccaccctccttcagcggaacgccgatagtgagacgcacatgaagaccagactccttgatgagattcactacatcgccgtgcgacatgccagctatctcgatgcggtttactgccactatgcgatcgcccaccttgagctctccacaacgatccgccggactgccgggtattagtttcccttaatacgttgatatgttagatgaattgaaaca

SEQ ID NO: 19982 - DNA, 680 bp, DROSOPHILA
gcgttgtagtaaaggaaaaagagtgggaaaccaaaaattgatatttttctgaaagtctttcaaagttacgctttaaactagaagcaatcatgtccacggaggacttttacctacgctactacgtcggacacaagggcaagttcgggcacgaattcttggagttcgagttccggccggatggcaagctgcggtacgccaacaactccaactacaagaacgacaccatgatccgcaaggaggccttcgtccaccagtccgtgatggaagaactgaagcgaatcatcatcgactcggagatcatgcaggaggacgatctgccctggccgccaccagatcgcgtgggtcgacaggaactggagatcgtcatcggagacgagcacatctcgttcaccacctcgaaaacgggatcattggtggacgtgaaccggtcaaaagatcccgagggcctgcgatgcttttactacctggtgcaggatctcaagtgcctggtcttctcactcatcggcctgcatttcaagatcaagcccatataagccgtagccaccacctcaagcatagcctatttatcggacggacacatcgtattttataatggaacttctacgatacttgtaattgtataagctatacctttgtactttttggtacagtttgcagtgaataaaaaaggattggaagat

SEQ ID NO: 19983 - protein, 147 aa, DROSOPHILA
MSTEDFYLRYYVGHKGKFGHEFLEFEFRPDGKLRYANNSNYKNDTMIRKEAFVHQSVMEELKRIIIDSEIMQEDDLPWPPPDRVGRQELEIVIGDEHISFTTSKTGSLVDVNRSKDPEGLRCFYYLVQDLKCLVFSLIGLHFKIKPI

SEQ ID NO: 19984 - DNA, 5580 bp, DROSOPHILA
aacgggcggcggtggctgaacggctgtggacgacattttgttgttgttgctatttgtgcgaaaaaattccacgggttgcagtgatgataatttatgcgtccaaactcgttggctggcaatcacaaaataaaatctactatgaaacgctaaacaacaaaagccaaaaagcttcgtgagagagcgaaaaagacaaagagagcaaaagagagagctagcacccacacagccgcaaactcgaacagctgagcgcgctattttctaacgtgtttaatttgacacgttaaggaaatacctatacaattgtacctacaactcgtacttgactttctaaaaagtgcaaaaatcatgcattcatctttaggaacaggtttttgcacgatcacaggttcattagctatcgcacaacatccttgaccttgaggagagtgtgccaatttccgcaatttccgcagcaaaatgttgacggaagcaaatgtgtctgaatcgaatgcatcgctaccaatacaagtgcagcatctctataaatagcaggcaaatgcaagttttttaggagtcacgcgacaacagtgatgcgccatttttcactaatacaaaaaaattaatatctaaatcttatatttattaaatctcacaggaaatgacgtattaaaacacatacaattacacaattataaaaataattttagcaccgcaacagctggggtactacagctagacaatctgccatctcaaattctagtgttggtaaacgttgtcccgcctgcatatataagtcaaagtatactattttcgaaaaattaggtaaatttcagtaaaagatttgtactgcacgagctggaaccactttcataaagttaactttcatcacagaattcggaatgtcctataaataattatagaagcccatgtagatgatgggtaagttacacgtaaatattctgagtagttccaaaaacaaccgccaggcgaaactttctttatatgaaagaacgaatatgtaaaagtaaaatgaagagctatttattcccacactcctcaagatttaaaagtaaaacatacatcacatcactcaactaaatctaactgatttaaagtatcctatactgtatacagaacactagcgaaactgatgctttgcagataagtcattaatacaatttgatccctcaattgagggaaacgcccagtcccttctgttgcaatccgaattcgattttcgatctgattgtttacaaatatttactcgatctgttgccatgtgaaagccgatttttcagctgccctgccaggtagacgggcaattgcgcattaatgggaaacgtgctcaagtgacgcactagctgaaataaacgctaattattaacagctcggccgacggacaactcgaatgcctggtcttgaaacgcgacacacttgttcttataaaattccgcttaacttatctgcctggaaacaaaatgatgagttgccttttgcttttatcgttttcatgttagaaatgtatacatatgtaatttcaattacaaatcagaagcgtaaatatttaaataatttcatataaatcaaataggtctacattctttttgaaatctgtttctcattcctgtgtttatattttggatgatctatagcagagtcgcttcaatcggagaagtccttgcattgcacattcacacacccaagagtgtgtgtatgtctgaattttgtaattttgttaacacagaattgagagaagctaaaacggctgcagcggattatccgttgtgtatcctccagagttcctattctcgtccctaaaacgaacccggctgtctaattgctgctgtgtggtggacaaaatataatgctattattatgtgaattggttgacggctcgtcgggcttgttcatacacaagcgattgtgtacgaataaacgccaaattatgtggtgttgcacgtgtttggttttcacttcactgctactgcgcggctgctttctgattaaatcgttaaaagttaaatgagttcatcgttagcctatcggcgtgtggatcgaaattgtattgtgcgccgtcggaggtcggtgccatgttagtctgttcgccctgtaaaggatgcatcaaaaacgttttagaataataacaaacggttgacttaaactgttagctcacctcatcagtgaagtattgatcgatgatctcataagctagtttgtagatttcaacgttttcgtggctctgcagacgctcgatcttggccaggccctcgcattcctcaatgcagttggccaccgcctcaacatgagaatcggccacttttaacatattgttcagaccatccaaaacaacctttaaaaaaaaggggaatgtgttactcaaaacaaatatgtgaagagacgcaaattatacttacatttataacttgcgtatcctggcatgaaaggaggtcacagaatggcggaatgacgccctccttgatcaaggtgaagacctgttcgcggttgccgctaatggtcagattgctgatggcccaggcagcctccttctgtgtctggaactcgcccttgcttaggttctcgataattttgggcaggagacccacgttaataacggcctgcacctgcgattgatttccagcggttatattggaaaggaaccaaaccgcctcctttcggatcttctccttgggatgcgagagcaggcccgggaagtaggagagcgcgtcgtagttgagcacaacctgtgtctgctcatccgatccagtcacaatattgccaacagcccgcagtgcggctgtctgtaccttgacctcgctgttgcccagcagtggtatcagcttgggtacaactccactttcaatgaccatctggatctgatcgttgccaccgtcagtcaaatagctgatggcccagaccgtgtccaccaggatgttcgtgtcggtgtgatgaatgagcacattgagtgcgggcaggatctcatgaatggtggctgtcgggggagccggatccttgttgcggcacaaattcacaataacccatgttacattgcgcaagaatgtgatggggatgtctggcttgatgaacgacaaaagtggctgcacgactccgtgcttaatgacaaaatcgcggagcaaaggaccatcgcctatgatgttgcccagggcccacacggcttgttcgcaaacattgggagcgggcgagttgagaagttgaaggaagagcggcacggcaccggcggcaacaacctatacaggattatattgcattaaaacaaagaaagtgctgagagggaaagctgaacgtacctcgttggtctgagccgatgtgccagaggcaatgttggtcagggcccaggcggcctcgaactggagcattgtgtgattgtgttgtttgaggcactccaccaggatgggcagaatgtcgctttggatcagatcgttgatgggtggattcttgtccgacgacagcagcttgcgggcagcctgaacagcggccagttgctgttccggcttggtggcgtctgcggctgcctttgccagcttcttcaggtcaatggacgaggacaactgctcctcctcatctgtgttcgagtccaaattgggcacattgcgacgcttgagaatggtctcttcgcgcttgttcttcctcagctcaacggtgacttcatttctccgacgtcgcatttcctgcaaattaattaatattataatgtttcccatttcagcggtaacttctaactactcacatcctggtctttccctttgtttttgaagttttgtaaacgattttgctccatagacgtcattttgtctgatttccttgtataagggtttgctttttcgattggctgttaaaaagtgagtttttaaaaactattgaatgcgatgttggcgacgtacgcctcctagcgtattcgatgaacaattaataatttgtttcaattgcacaccagccaatgggaaaaattattcgcacccacaccagcgcacatccacgaaaaaataacgtagaatcgaccaacacagttgcagcataacacgatggcgcaggcattgaaaaaaggaaatggcgaaaaaatacatgaaaattagcaatgcaacgggcgaaaaaagtgtttctcttggtcctcggtagaggatacttacgtttttagcaagtaaatcgggtttctcccacgacacatacactttctacgtcttttaaaagtgataaaattctttcctttttattaaaattgcaatcagtgacaacgacgtgagtgaagttggctgcggttggcaattcgggactgcccacttataggcagggtcgattgaagcaccaatcgtcagatctgaatttatgtcgacttattttttaaatttagaaattttaagtttactcagttggagttgtaagcttatgaaccagttgaacattatttaggaaatatttcatttgtcttaaaaagcattatagcaattcttattatttaggttttttcaagcaggcgcttgtcgtgacggtactattacacaactctagcaaagtatcgatatctttgagccctgcgaactgtagataccattacgagtgtcatcgctattattgaaacttctgtccaagcaagacgtgcagaaaaacgcttaatcgcgaacagcgacaaattcgctgatctgttgcggtaatctattagcatgcatagacactaggacgatccgcgcccagcgagagagcaatgacggagaacacagagaaaggggcgagcgtagaaacgcctcaagtggcggggtctcagacaaatcctccggttcaggagccacttgcactgaccaagattccgccaattaaggtaaagagcgaacgaccggacgcagaggtggaggccaaactccgggccatgaatgccaagatcaaggcggagatggtgactttgatgcggaggagcaacagcaatgaactgggcaacaatgacgagtcgggggagagcgagagctccgcgtcggcggacgacaagaagaacattaagcctgtaaagtcctcgaacgagatccttgccgagctgttcggcgtattcaatgccgctccaccagaggaacttctagacgacaatctgttcaagaaaaagaaaaaggtgaaaaaggagaagaaggataagaaggccaagaaaaagaagacgaccaagtcagatggcgaatgcagcgactcggaggcggaaggcaagcacaagcataaacgtaagaagcacaaacataaagacatcagagtcaaagacaaggagaaggatcgggaccgggacaaatctaaggagaaagatcgggaccgcgttacggacaaatcaaaggagaaggatcgggacagggacagggatagggacaaatccaaagataagtttacggcagcacaagctccctccgagaaggagaaagaaaagtctgagagccggaagcgcagcgctgtggagccttccagtcattccgaaaagcgcgaacgacatgaaagggagaagcatcgcgactgggaacgagaaagggaacgggaaaaggagcatgaaagggaacgcgtccgctccaacaatagcttttacaacgggcaacgtgaagcggatcgcttgaaaggatc

SEQ ID NO: 19985 - DNA, 3090 bp, DROSOPHILA
gacagaagtttcaataatagcgatgacactcgtaatggtatctacagttcgcagggctcaaagatatcgatactttgctagagttgtgtaatagtaccgtcacgacaagcgcctgcttgaaaaaacctaaataataagaattgctataatgctttttaagacaaatgaaatatttcctaaataatgttcaactggttcataagcttacaactccaactgagtaaacttaaaatttctaaatttaaaaaataagtcgacataaattcagatctgacgattggtgcttcaatcgaccctgcctataagtgggcagtcccgaattgccaaccgcagccaacttcactcacgtcgttgtcactgattgcaattttaataaaaaggaaagaattttatcacttttaaaagacgtagaaagtgtatgtgtcgtgggagaaacccgatttacttgctaaaaacgaggcgtacgtcgccaacatcgcattcaatagtttttaaaaactcactttttaacagccaatcgaaaaagcaaacccttatacaaggaaatcagacaaaatgacgtctatggagcaaaatcgtttacaaaacttcaaaaacaaagggaaagaccaggatgaaatgcgacgtcggagaaatgaagtcaccgttgagctgaggaagaacaagcgcgaagagaccattctcaagcgtcgcaatgtgcccaatttggactcgaacacagatgaggaggagcagttgtcctcgtccattgacctgaagaagctggcaaaggcagccgcagacgccaccaagccggaacagcaactggccgctgttcaggctgcccgcaagctgctgtcgtcggacaagaatccacccatcaacgatctgatccaaagcgacattctgcccatcctggtggagtgcctcaaacaacacaatcacacaatgctccagttcgaggccgcctgggccctgaccaacattgcctctggcacatcggctcagaccaacgaggttgttgccgccggtgccgtgccgctcttccttcaacttctcaactcgcccgctcccaatgtttgcgaacaagccgtgtgggccctgggcaacatcataggcgatggtcctttgctccgcgattttgtcattaagcacggagtcgtgcagccacttttgtcgttcatcaagccagacatccccatcacattcttgcgcaatgtaacatgggttattgtgaatttgtgccgcaacaaggatccggctcccccgacagccaccattcatgagatcctgcccgcactcaatgtgctcattcatcacaccgacacgaacatcctggtggacacggtctgggccatcagctatttgactgacggtggcaacgatcagatccagatggtcattgaaagtggagttgtacccaagctgataccactgctgggcaacagcgaggtcaaggtacagacagccgcactgcgggctgttggcaatattgtgactggatcggatgagcagacacaggttgtgctcaactacgacgcgctctcctacttcccgggcctgctctcgcatcccaaggagaagatccgaaaggaggcggtttggttcctttccaatataaccgctggaaatcaatcgcaggtgcaggccgttattaacgtgggtctcctgcccaaaattatcgagaacctaagcaagggcgagttccagacacagaaggaggctgcctgggccatcagcaatctgaccattagcggcaaccgcgaacaggtcttcaccttgatcaaggagggcgtcattccgccattctgtgacctcctttcatgccaggatacgcaagttataaatgttgttttggatggtctgaacaatatgttaaaagtggccgattctcatgttgaggcggtggccaactgcattgaggaatgcgagggcctggccaagatcgagcgtctgcagagccacgaaaacgttgaaatctacaaactagcttatgagatcatcgatcaatacttcactgatgagggcgaacagactaacatggcaccgacctccgacggcgcacaatacaatttcgatccacacgccgataggctaacgatgaactcatttaacttttaacgatttaatcagaaagcagccgcgcagtagcagtgaagtgaaaaccaaacacgtgcaacaccacataatttggcgtttattcgtacacaatcgcttgtgtatgaacaagcccgacgagccgtcaaccaattcacataataatagcattatattttgtccaccacacagcagcaattagacagccgggttcgttttagggacgagaataggaactctggaggatacacaacggataatccgctgcagccgttttagcttctctcaattctgtgttaacaaaattacaaaattcagacatacacacactcttgggtgtgtgaatgtgcaatgcaaggacttctccgattgaagcgactctgctatagatcatccaaaatataaacacaggaatgagaaacagatttcaaaaagaatgtagacctatttgatttatatgaaattatttaaatatttacgcttctgatttgtaattgaaattacatatgtatacatttctaacatgaaaacgataaaagcaaaaggcaactcatcattttgtttccaggcagataagttaagcggaattttataagaacaagtgtgtcgcgtttcaagaccaggcattcgagttgtccgtcggccgagctgttaataattagcgtttatttcagctagtgcgtcacttgagcacgtttcccattaatgcgcaattgcccgtctacctggcagggcagctgaaaaatcggctttcacatggcaacagatcgagtaaatatttgtaaacaatcagatcgaaaatcgaattcggattgcaacagaagggactgggcgtttccctcaattgagggatcaaattgtattaatgacttatctgcaaagcatcagtttcgctagtgttctgtatacagtataggatactttaaatcagttagatttagttgagtgatgtgatgtatgttttacttttaaatcttgaggagtgtgggaataaatagctcttcattttacttt

SEQ ID NO: 19986 - protein, 514 aa, DROSOPHILA
MTSMEQNRLQNFKNKGKDQDEMRRRRNEVTVELRKNKREETILKRRNVPNLDSNTDEEEQLSSSIDLKKLAKAAADATKPEQQLAAVQAARKLLSSDKNPPINDLIQSDILPILVECLKQHNHTMLQFEAAWALTNIASGTSAQTNEVVAAGAVPLFLQLLNSPAPNVCEQAVWALGNIIGDGPLLRDFVIKHGVVQPLLSFIKPDIPITFLRNVTWVIVNLCRNKDPAPPTATIHEILPALNVLIHHTDTNILVDTVWAISYLTDGGNDQIQMVIESGVVPKLIPLLGNSEVKVQTAALRAVGNIVTGSDEQTQVVLNYDALSYFPGLLSHPKEKIRKEAVWFLSNITAGNQSQVQAVINVGLLPKIIENLSKGEFQTQKEAAWAISNLTISGNREQVFTLIKEGVIPPFCDLLSCQDTQVINVVLDGLNNMLKVADSHVEAVANCIEECEGLAKIERLQSHENVEIYKLAYEIIDQYFTDEGEQTNMAPTSDGAQYNFDPHADRLTMNSFNF

SEQ ID NO: 19987 - DNA, 2889 bp, DROSOPHILA
aactgagcccagttaagaggcgttctgaaatggtttggtttggtttcgtctgggctgaggtttgggtttgggtttgggcctgggcttgaggtcgcctcgccgcattaaaacaaataaaatcaaataaacgtttattgcactgaaatgtttacgaggccacaacaaaaacaacaacgtcatttcgagggggggggagtaacaacaaaatgacagccatagtagtgaaaatctggcaatttaatcagcccggcagcgaaatgatggacaaatggccacagcaactttgtttggttaacactgggcatgaatttttggccaggagtggcgccaaaagtggcccactgtcataagcgtcaaccacgtgttttcattttttcattgcccttcttttcttttgactgacctgctttttaagtgtaatttttttggtcgtacatcccttgcttcgctgtaaattggccaatctttttccaatctcagcaacaaatggatcctcacaatcactaaaagcccataggttaagttcttttccttagaatttcgagaatagtgtgaccaactcagcagaccgctgacattcacaatatatcgatagttgaatggaatttttttctggtaattgtggtaacccttaagcactaatcgcaggagctatcttgacaatttacagccaaatatcttttttaaatacaataaatgaatatatttgacaatgttctactgaagctacaaatttccagtgctgtacgttgcataatttattatgaaaaaaaaaagttatacttattatgccagccgaacataataagaattttcgagactagagttcccatctgcaaagacatgacaaagcactggcaacccttttagcacgtgtcaaaaacgcaaagaaaaatacgatgacttttcagtctaaaagtcacatatctgatttggcgtgaggacctcagttgattcacatctcggagcggatattacttaatattatattaattaatatattcatttgcaaagcacagagttttcaaggtgagcatattaagaaaattcttttccacgcactttacccgtacaagttaataggttttcttaccaaaacaatggatttcaagaagctgaagaaaatggaggaggcggtgcgcatcggcggcaagggatctatgcgccgcaagcacaagagaaatccatccccggctgtggttgagaaacgagtgcaggccgaattggccatgttaccgttgaggaatattggagaaattcaagaggtgaccatcgagttcaccaattccagggaggttgtgttaaccatgccaaaggttcagggcacccctcccaattctttcttcgtggttagtggcgatctcgtgcgcaaatcgtcaacagctggcccatcgaaagtggccaaggcagccaatgcgcccaaggcacccatgccacctaagccacccaagccggaagctttttccgacaaaaagccagaatcaggggagtccattaaggtggccaagaagcccaagaagccgcgcaatcgtgttcgtcctcgcaacaagaaggttcaaatgatgctttccaaaaacaaagaggaagcagcaatggctggcggggattcggagccgaagcttagcaatggtaaatcaattttgatctcctctgaagatggtagcgatccgaataatgagaaggtgccatcggatgagtctgatgtggatcggaccgtcgtctgcgccaaagattcgctgggaagtttcggcgatgattccgacggcaaggaggacgatgacagtaaggagtcgatttacctatcttcctactccgattactatgattccgcggatgagcagctcaatccgaagacttatcgcgctcaggtgtcagaggacgaagattagacatattcatttgttgctacatttgtaccaattttctaaataaatcgcatactatatacgtacatactgcacttcatatatattttctctaaattttttggaaatacttataaaacatgtttaatcattgtaaaattttcattaaatgtttatctcacaagaacgtgatttcttacgctgcgttaagtttttgccagtcattatttcgtgttctctttcgtgttctctttcgcatggaataccttagagttgtcaaaattatttggtgaaatggccagagaataattaatcggccacaaataattggaatagctatcatcacaatttacaaccaaatacatatctattataaataaaaaaatgaatatatttcaaaaaaaatatatttatgctaccagagctgtaaattgtataatttattatgaaaaaaagcactaatacttattatgccagccgaacataataagaattttagagtctagagttcccatttgcaaggacatgacaaagccctggcaaccctttttaaaaaaaaagacgatgactttgcagtctacaagtcacatttctgatttggcgtgaggacttcagttgattcacatctcggagcggatattacttaatattatataaattaaaatataaatttgcaaagcacagaattttcaaggtgagcatttcaagagaattcttttccacgcactttacccatacaagttaataggttttcttaacaaaacaatggatttcaacaagcgacagaacatggaggaggtggtgcgcatcggaggcaaaggatctatgcgccgcaagcataagagaatcccatcagtagctgcggtcgatgagaagcgcgtgcaggcgacattggccaagataccgttaaagaatatcagcggaatccatgagttgaccatcgagttcaccgattccagtgaggttgtggtagtcatgcccaaggttcagggcatctctgccaatggtttgttagttgttaatg

SEQ ID NO: 19988 - DNA, 835 bp, DROSOPHILA
attcatttgcaaagcacagagttttcaaggttttcttaccaaaacaatggatttcaagaagctgaagaaaatggaggaggcggtgcgcatcggcggcaagggatctatgcgccgcaagcacaagagaaatccatccccggctgtggttgagaaacgagtgcaggccgaattggccatgttaccgttgaggaatattggagaaattcaagaggtgaccatcgagttcaccaattccagggaggttgtgttaaccatgccaaaggttcagggcacccctcccaattctttcttcgtggttagtggcgatctcgtgcgcaaatcgtcaacagctggcccatcgaaagtggccaaggcagccaatgcgcccaaggcacccatgccacctaagccacccaagccggaagctttttccgacaaaaagccagaatcaggggagtccattaaggtggccaagaagcccaagaagccgcgcaatcgtgttcgtcctcgcaacaagaaggttcaaatgatgctttccaaaaacaaagaggaagcagcaatggctggcggggattcggagccgaagcttagcaatggtaaatcaattttgatctcctctgaagatggtagcgatccgaataatgagaaggtgccatcggatgagtctgatgtggatcggaccgtcgtctgcgccaaagattcgctgggaagtttcggcgatgattccgacggcaaggaggacgatgacagtaaggagtcgatttacctatcttcctactccgattactatgattccgcggatgagcagctcaatccgaagacttatcgcgctcaggtgtcagaggacgaagattag

SEQ ID NO: 19989 - protein, 262 aa, DROSOPHILA
MDFKKLKKMEEAVRIGGKGSMRRKHKRNPSPAVVEKRVQAELAMLPLRNIGEIQEVTIEFTNSREVVLTMPKVQGTPPNSFFVVSGDLVRKSSTAGPSKVAKAANAPKAPMPPKPPKPEAFSDKKPESGESIKVAKKPKKPRNRVRPRNKKVQMMLSKNKEEAAMAGGDSEPKLSNGKSILISSEDGSDPNNEKVPSDESDVDRTVVCAKDSLGSFGDDSDGKEDDDSKESIYLSSYSDYYDSADEQLNPKTYRAQVSEDED

SEQ ID NO: 19990 - DNA, 4180 bp, DROSOPHILA
aaagatttcggaagcattttgcatatttgatactcatggcgataagtatattgattcccgcaatgtcggcaacgtgctccgatttttaggttgcgcgcccaccgaaaaagaggtcgaagatgtcattaaagccaccgattccgtcgactatccaggcgaagcccatttggtgaagttcatggaacacgtttccaaactgctgatggatcgacagttattcaatatactttaggtttgtttagcaactaacgatatttgtccacagaatggaaccagcctcgtcggaaaagcttctcgaggcctttgagaccctggatccagaaaataaaaaatatctgaccaaggagtacttcggcaaattaatggcggaggaaggagaacctttctccgctgaagaattggatgctatgtggcctgtggcaattgatcccattactggacacattccctacaccttctacataaatcaactcagggtaagatcgcatttcccaactacttttgattggattcatctaaaatttccagcacaagcctgatatctatgaaattgccgaggttatcaaggaggaactagcacaagccgaaaaagaaaagggcaagaaaccacaacaaccactgttttagatgcccctttaatcaagcaattgcaaataacgcggaaaataaatttatacattttataacaaataatttcctttctcgtttttactgttccacattgagatatagacggtcacactgccatgcgcaattcgagatggcatagtcgttgttctatgtttggatattaaaatgaattgtgtgaaaaatttaaggaactattttttgttttaagatattgcctgaaatgttacaatatatttattaaatccaataaaaaaaaatttacaatacatttaagcgcttttacaaatcatcgttgctctaaattaactgaatttgtaatcgatagcccgatacgtgctgctccatccctcattaccccaactcttctagaaaaacacgtcagcttttcacagccattcggaaaagaacacgtcagcagaaaggaaaactggtcggtcgatattgcaaaggtggatgagaaaattgcgtgagacggagccagaaaagcccgagtcggcggcgatgaagagattcaaaccagcagagcgtccgagaagcgcagtcgaagttcatgagacgacctaaaacaagcaaaagttaaaatacgctcttacaatgcaaatctaagtggaaagtcgcttttcacaattgcacacagcacacagcagtttatcatttagccccgaaccagttaaacatggcacccacagcaaacacagtgctaattaccgtgccgcggacagcaatcacatcgaataatctgcccaaattgcggcccgccccccttacggcagctctgctgaaggtgtcggccacgccctccgcctcgcccacgccctcgagttcgggatacgcatcctcgtcgaacatggatgacgataacatggctgcatcccagcccaaggccaagaagcgtcgcctggaccatctaacctgggaggagaaagtgcaaagaaagtaagtccacccaacttttaaccaaatttgagcgccttatttaactgttattatcgaacaacaggaagctaaagaaccgtgtggccgcccagacatcgcgtgaccgcaagaaggcacgcatggaggagatggactacgagatcaaggagctgacagacagaacggaaatactacagaacaagtgcgatagcctgcaggccatcaacgagtcactgctggccaagaaccacaagctggactcggagctggagctgctgcgccaagaactcgccgaactgaagcagcaacagcagcacaacaccagatgcatcagccaatccaacgccagcgcaggcgctgagggctgtgcgtccaccaaccttggatctgcagcatccaaagctgaccctctgccgcagggtatacaacaggtggacacacagtcgtcagcgcgtctgctggcggagcagctgaagagcagcaagagcctggcctcactctggaaagttgtggccctctgcctactctacaagacatgcttggcgtcgacgaagagttcgacgtcaagcgcctcgaagagctggccgaaagtctgctcgcagatatcacagcagacctggaaacaggcgctggagcgagcagcccagctgctgcccaagatgcaggcaacgcagagcgattgcctggaccaatggtggggcccgcagcagagcgcttggaatccgacgggcatagagctaatggcctgaatgttgagcaggaacaggaaaccgagcacaaggtcagcctaaatgtgcagatgttgaagataaatggaaacccacagcataccacagcagcgccagcctcgagaacagccacaatcacagcgacagcggccgcctcgcaactacaggccactccggacacagtgtacggcacgtatgatgccaagacgaactcgatcaccatcgtgatggacggggatgcggtgccggtgaacgaggccgtcgaggagatctactgtgacggcgtcagcgctggcgacgactcaacggacgtgatcatgaagtgtccgccgccagcgacgtctccgtcacaggtctatctcaacgtgatgaacgccgtcgacaattcggacgacgaggaaagcttcgatccgatcgaccgattcctacgtccgcgcgttaaggcgatctccccgttggccaaatcccccgcattgtctctacactcggccacctcggaccatggatacgagtccatactgggctctcccacatccgtggctctcactctgcccgcagatgaggacgatttcccctgggagagcaactttgacgagctgtttcccagtttgatctgagtttttcaagctgaaaacttcgttctgtctctcttttattgttaagtttggccggccgccgtttgtttaagttttttagttgataggctgtacataaattcataatcgaaggctttatatatgatactgtagttagagcgctaagtttagctgtaggtttccatttatatttaacaatctctaaccacataggcttatgattactcttatatgtatgtattgtgctcaaagaatttgaaaaaaaaacatttgactaaaaaatattcaaaatataaaccaaaccaaacaacaagctctttgtttttgtttactctaggcgaaacagaactttgaactgcgtatgataaatagttaatcacgccacttctctagcatcacgccacttttttatgacgcaatttctgcgtagatgatgggacagttttaggtgtaagcatatgagtcattttgtttttattaaccaaatatatatatattacaaaaagtgagttgaactgactgcagataatgcggataggtgaaataaaaccacaactatgctctgaaatatatgcaccttatttattagtatattattcattaataagacgaaatacagctctgtttttctccaaactgaactaggatttaaacaagattttgctaagctcgaaaaatatattttttaaagaatataaatagagccaccctaatgcgccagcaaaagcgaatttgtttcggaactagttcgaaaaagttgtttatagacttgaaccagtttttgcttacgaaccacatacctgtgattttgcagaaagataaacaatttttaaatgcaatagagtgtacggttaaacagaaatgacggaaccaacgagcaagacaccggatgcggttccggaatcacccgtatcactgcccatcgcctcccaatccatggatacggcgaccattgaagatttcgacgaggacaaaccggccaagggaaagaagaaagccaagaatccaaagggtcgccactcggattccgacatcggctccgaactgaagaagctggcccagcgccggatcaacgtagccggtgctccaaaaatgccacttaatggctacgtccgcttcatgaacgatcgacgcgaggaactgcgacgggagcagccacaacgtactgccctggagcacacaaggatcatcggcgaggagtggcatcagctgcccgaggagcgcaagttgccctacatcgaggcagccgccaaggacaaggccatgtaagctcacacttcgtttccaacccacaaaatctaaacatatctt

SEQ ID NO: 19991 - DNA, 2063 bp, DROSOPHILA
aaaacacgtcagcttttcacagccattcggaaaagaacacgtcagcagaaaggaaaactggtcggtcgatattgcaaaggtggatgagaaaattgcgtgagacggagccagaaaagcccgagtcggcggcgatgaagagattcaaaccagcagagcgtccgagaagcgcagtcgaagttcatgagacgacctaaaacaagcaaaagttaaaatacgctcttacaatgcaaatctaagtggaaagtcgcttttcacaattgcacacagcacacagcagtttatcatttagccccgaaccagttaaacatggcacccacagcaaacacagtgctaattaccgtgccgcggacagcaatcacatcgaataatctgcccaaattgcggcccgccccccttacggcagctctgctgaaggtgtcggccacgccctccgcctcgcccacgccctcgagttcgggatacgcatcctcgtcgaacatggatgacgataacatggctgcatcccagcccaaggccaagaagcgtcgcctggaccatctaacctgggaggagaaagtgcaaagaaagaagctaaagaaccgtgtggccgcccagacatcgcgtgaccgcaagaaggcacgcatggaggagatggactacgagatcaaggagctgacagacagaacggaaatactacagaacaagtgcgatagcctgcaggccatcaacgagtcactgctggccaagaaccacaagctggactcggagctggagctgctgcgccaagaactcgccgaactgaagcagcaacagcagcacaacaccagatgcatcagccaatccaacgccagcgcaggcgctgagggctggtatacaacaggtggacacacagtcgtcagcgcgtctgctggcggagcagctgaagagcagcaagagcctggcctcactctggaaagttgtggccctctgcctactctacaagacatgcttggcgtcgacgaagagttcgacgtcaagcgcctcgaagagctggccgaaagtctgctcgcagatatcacagcagacctggaaacaggcgctggagcgagcagcccagctgctgcccaagatgcaggcaacgcagagcgattgcctggaccaatggtggggcccgcagcagagcgcttggaatccgacgggcatagagctaatggcctgaatgttgagcaggaacaggaaaccgagcacaaggtcagcctaaatgtgcagatgttgaagataaatggaaacccacagcataccacagcagcgccagcctcgagaacagccacaatcacagcgacagcggccgcctcgcaactacaggccactccggacacagtgtacggcacgtatgatgccaagacgaactcgatcaccatcgtgatggacggggatgcggtgccggtgaacgaggccgtcgaggagatctactgtgacggcgtcagcgctggcgacgactcaacggacgtgatcatgaagtgtccgccgccagcgacgtctccgtcacaggtctatctcaacgtgatgaacgccgtcgacaattcggacgacgaggaaagcttcgatccgatcgaccgattcctacgtccgcgcgttaaggcgatctccccgttggccaaatcccccgcattgtctctacactcggccacctcggaccatggatacgagtccatactgggctctcccacatccgtggctctcactctgcccgcagatgaggacgatttcccctgggagagcaactttgacgagctgtttcccagtttgatctgagtttttcaagctgaaaacttcgttctgtctctcttttattgttaagtttggccggccgccgtttgtttaagttttttagttgataggctgtacataaattcataatcgaaggctttatatatgatactgtagttagagcgctaagtttagctgtaggtttccatttatatttaacaatctctaaccacataggcttatgattactcttatatgtatgtattgtgctcaaagaatttgaaaaaaaaacatttgactaaaaaatattcaaaatataaaccaaaccaaacaac

SEQ ID NO: 19992 - protein, 488 aa, DROSOPHILA
MAPTANTVLITVPRTAITSNNLPKLRPAPLTAALLKVSATPSASPTPSSSGYASSSNMDDDNMAASQPKAKKRRLDHLTWEEKVQRKKLKNRVAAQTSRDRKKARMEEMDYEIKELTDRTEILQNKCDSLQAINESLLAKNHKLDSELELLRQELAELKQQQQHNTRCISQSNASAGAEGWYTTGGHTVVSASAGGAAEEQQEPGLTLESCGPLPTLQDMLGVDEEFDVKRLEELAESLLADITADLETGAGASSPAAAQDAGNAERLPGPMVGPAAERLESDGHRANGLNVEQEQETEHKVSLNVQMLKINGNPQHTTAAPASRTATITATAAASQLQATPDTVYGTYDAKTNSITIVMDGDAVPVNEAVEEIYCDGVSAGDDSTDVIMKCPPPATSPSQVYLNVMNAVDNSDDEESFDPIDRFLRPRVKAISPLAKSPALSLHSATSDHGYESILGSPTSVALTLPADEDDFPWESNFDELFPSLI

SEQ ID NO: 19993 - DNA, 8485 bp, DROSOPHILA
cttatctgagatcatagatcgaagcctacggacatttatcgtttagtgataaaatatttaagtttttgaacatcacatttagcagtttggagatcgctcccttacagttttgaaattggcggcaatagctttctggttccataacagttttagatccgaaagtaagtataatatatcttgagaagttaatcaaatggttgtcagagtaatacatcgttggtgaaaaaaatttggtttccattttacaattatatcaaagcaatcggtattcggtttcgagagcgaagccgttatttcgaaaccgttaccgcgaaccggttcccagcgagccgcggctcgccagtcgcgaaaacacaacgaatgcacaatctagaggtggagaaatattgatgttggcgggcatcaaagcttccaatgtttttggcgaaaaacatcgatgtttaaaataaaaacaacaaaatttacctgcttaatttaatgattattttttaatattgcttaaataaaaaggcagtactttaagaaaagaaaaacaaacttattgtcgtctccgttttcatcagccgctggtccaatagttgctcctataaaacaaattaatacaattaaatggaaaagtaaaccagtatgcatacgagcaactgcaagtgcacaaatcgggagttcaaaactaacatttcagatattaatccatgtgctatgttatgcttttaataattgcattagaaaatatggaaaattaatttgtacttacaattcatacacttttcttctccgatgcgcagtagagatggaaaaacatcgatgttttctcgaaaaacatcgatgtttatgatttttcaaaaacatcgatgtttctccacctctacaacgaacgcacaatcacaagcgccgctcgcgagaacgagaacgggaactcgaaagaacctagatcgctgatcggagaaccgtggaacccgtggaaccgtaaccgtgaaagtggggaatcgaagatagaacggagagggtggtaggccgattccctctccccactgcccgttgaaattcagaatactaagctctcggttaaacgcggcgaaaaagaaagcaagctctgagcggctgaaaaaaaaatgaagtgaaataaaactgggatcgcggcaccagcaacaagttttagtggctcttctttgtgcgtttcgttcgtgtttgctgccctgcgctttgctcgccacattcgtcgccgacttttattttgttttgcccattttatcagaatcggagcacctccaaaaaagcccaagacgagctgagcctcagctgcgtcgaggtgagctgatccactccgctcccctttcgtgcgctgcccaccgctccccaccgctcacacccgatcccatccaatccaatccgatccgctccgctccgagtgcatagtgcatgcaaagtcgcggggctgggctttcggaattacacaacccacatggggcagcgccaacaaaggcctcagcagcaacaatagcgggcagccaagcattgccctgccctcgacttcgaccatggctcccaccaccagtccgccacccaagctggccaagttcaagtcctcgtcgctggaccacgagatctacacggccaatcgccgcggcaccattgccacggcctccagcgactggaaggcgctccgcggaggcgtcggtggaggagcaggaggacccggtagcgtacccaatccctctaacggacgctcccttcacgccggcggacccatgacacgggccgcctccacatcctcgctggctagcagtacgcgcacgatgactaactaccaggagtacaaaatggatatcatcaaccaggtgaggaccagaaatgggtgaccagtggctccgtcctttgctatggacaatttgggaattatttagttgaagtcttgagagtatgctgggactgttgccttataaagtaagcgtctgattcagcatatgttcaaaaaaatttacgagtgttactcagccaatggaattgcaaggaagttaaatagggagatattcaccagcaaagtgagtgtttcagcaaggaactattgaatgccttggattagctttaatcttttgcagaattctagaattccgatgggtattcttaaatataagaccaattcgtacacatagaggcagctatgtatgtatgtatgtggtccagaccaagcagatgtcttccttataggccagaattctctaaaattatacaattacagtcatttcggttggaaaattagaaaaactaagccaagataatacaaattaaatttgcaagtggttttaaaagcattatgaactttagcggtcaaggctttgttacaaataatttatattcttttgacaagttttcagggctcatatgcattgttttaatgttgaaatttacaatagatacttcttcgataaataagacttcttatagttcatagcaatgcgcctggtgatataaaagtttaatcaacacaaatacttaaatttcttaagaggttgaggacatgtgctttactttaaggtgtaattattttaaacatgactcggtttcaacccacatttaaatatatagttttgcgttaaaatagttaaaaaccttgataatagttatatatattagttgttatagttattctattccagccttatgttgccactcaatgttttttttttaaattattttaagtaatatctaacgttatcaacatagaatgagtcagaaaataaactggtcatgcatcggaacatgtgcacataattaaaaccgatttttgagacatacatataaatacaacagtttggtgattaaatattcagcaagtacgcaaaatgagaaacacaacacaaaactaaaagaaaaagctgttcaaacaaattgcctaatttcgtggacaaatttcgaaattgccaaaatgaaacggaacagacaactgcaaacagattccaatttaatgtgcagaactgtttgcggtatcaactaattttcgatggctctgatcgaggacgatccatccgaatctctgctatccaccatttgggtcttgactgtctcaacttaattgataaggcaaatatttttgtttccaccattcgtttatctgagactgataaaactatttactccgctcctccaggtgagcgacatgtaaagtgtttattaaatatatttgcctatgtggttgctttcgccgggctgataacttcttgaggaatttatcattaagcgcattgcggaagttttctcagaatgcagtcctctaaagtaaacgccattttctctgacaaatcagatggaatgggccataaccaggctgcatagaggttttcaaggaaaataatagcaactaaagaaaagggaagaaccgcgaaagcgccacgggtggaaccattataaacaagtattccaaaaataaaccgaccactaactatacaacccgaaagcctcaggtgatgaattcatcgaactctggccattcaagtaaatcttatggtatttggtcgcaccaaacccgccaaaaggaaagagttgggcgcacaagtgttcgccataacaagatcacgtaaacaaattgacggatttattaatatttcgctgggaggctggacgggttcggagtagcttcgatagacttttcaagacactagcttcaaggccggtgatttggcatgggcttgatttctttggctggccatgtcataagtcaagttggctccaaagtgagtaattgtctgtttacttggctgcggaatcgttggcgtgacgaacggtaattgtgcgacataaattgtcgaaggaaacttgcaactaaatgggtcggaattgaacgcaacatggtggggaatgccttaattacgccaaacgtttcgcgtctttcagattccataagtaaatttttagttgtcttaatgcctttccacagcacgtgctgatcgcttcttttgtttaagtcgttgttcaaagtttattaccgccatgtgcacctgccatcagtttggctgcatgtttagatactctgtaagaggtgtgattgaaatagcccaggtgtctacggaatcctgtaaacggattcagagcgacgtaaatagaacatatgcatgttcgccggaaaactcgaggcagtcgattgatattgtttaagtggcccgctgatggagcgaaattgcctggcaatgatcaaagcactgtagttaatttgattgtgattgaacttttggctttgtcgttctattccaggggaaatgtctgtgtggtcagtacatcagagcgcggctgcgacgggcaggagtcctcaaccggaaggtgacacagcgtttgcgcaacatcctggaccccggctcctcgcacgtggtctatgaagttttcccggcactgaacagcgtgagtgtactgccattcgccattgaatcttttcataacatggtataatccacagatgggcgaggaactggagcggatgcacccgcgggtgtacacaaacatatcgcgacagctgtcgagggccccgtttggcgagctggaggacagcgacatggcgcccatgttgctcaacctagttgccaaggatctttttcgctccagcatcacctggggcaagataatctcgatatttgccgtatgcggcggctttgccatagactgcgtgcgccagggacatttcgactacctacagtgcctgattgacggtctggctgagatcatagaggacgacctggtctactggctgatcgacaacggcggatggttgggcctgtcgcggcacatccgaccccgggtcggcgaatttacgttcttgggatggttgacgctgttcgtgactatctctgcaggcgcatatatggtctcaaacgtgtgtcggcgcattggaggtcaactgtattcgctgctgttctagattcgcttgggatcgcgtcgttaagaaatacaatcgtaccatttagtcaatgagagcttcaaatcattcctgcttccatgggcaccagtcgtttagtagtatgtaacggaccctgttttacgtataatattgttattccctttctcctctttttgtacatacaaggctattctaggcgcaataaagcgtgtgttgtaaacttttttttcgaatttggcgcgaagtctgggtgttatgcacggaactgcattactttatgtccgtgtttagcaacactggaaacgccgtggaggtgccaatattttgagtacgacaattcgtctttaaaatgttatagtgcccaatctttgactgttgaacagtgtatctgttaccagaaattaaagacgaatcgactaacataatctctcagttaaacaaaaaatataaaagttaactttgctgacaaaagtttttataattttgtaattactggttcaatgttctagtctttaaaataaatgttattaacattttaaattttgattgttagccttgccacccagctaaaacgcaaatacttacccagccctgtggcaacgcttcgatttccaaaaaccatttgttattattgctgtggatctgcccattattatttgttgtaaataaagattggagcaaattatgccatgtcatgtaagtgcactgattccgtgggtatgaacgtcgagtaacatgcacttgcagcgtccaaccaggccgaggagactaccccgaacctccacgtggaggatggagacttatccggaggcgccttgcagcaggaattcctctactgcgagagctgcggcaatgtatacgaggacaccgagtcttacgacagggcccacggtccgcaggccggctgctgcaccggcgctagcggggaattggatttcatcgaggaggtcgccgaagattgcatttcggaagaggtcggggaagaggacattgtctacgcagacgtacccctctgggagctggtggaggaagttccggccaacgtgaaggcggagaaggaccaaaacgagcctagcaattccgatcgctacttctgttacgactgccacagcattttcgagaaccgaaataaagctgaggagcacatatgtccgcgggcggaatccggcgggtccagccaacaagatggcgatgcgaaagcacccgtccggcgaaagttggccagtgtcagtgcaaggacgggtccgagagacgcatcatccgttattagctgcggaatctgcaacaccgtttttagctcggagaagtttctcaaattccacatgcgcattcatgagaatcgagctcccaagagcattcaggacgcccttcctataggcgcccatcagcagtacagcgagctggaccagttctactgcgaaatatgcaacaaaaggtatgcttatatctgcaatagaaagaaataccacgaatcatttccttatttaccagcttcgatgaaaccctcctgacggtacacaaacagatgcaccaacaggaatctagtgagattatgtgcagcatttgcaaccggaagtttgagaacgaagttacctatcagatgcaccaaaaaatccatgagaaaccgcgcgactccgagtcctcccgtaaattagcccagcgtactagtctcgataaggagaaacccgggtttccctgccagtactgcgagagggtgttcacccgcccctttgaaaaagtcaagcacgaacgggtccacaccggagaaaagccttacgcctgcgaggtctgcggcaagacatttcgggtgtcatattccctgacccttcatctgcgtacccacaccaacattcggccgtatgtgtgcacggtgtgcaacaagcggtgggtaaaatcaagtttcatagaattacagttttaaataacttattattttagctttaaatcgcaccaagtgtactcccaccacctgcgcatccacagctccgaacgacagttttcatgcgatgcgtgccccaagacttttcggacctccgtgcagctgtacgcccacaaaaacacccacaccaagccttaccggtgtgccgtgtgcaatcgcccattttcttcgatgtacgccgtcaagaatcacatgcagacccataaggagatcagcagcaaaggaagtgtcggctctggtacgccgaacattaagagtgcggccacctcgaagagccaggcagctgggaagttctattgtaatacttgtggagctgagtacgcacgtctcttcgccctgcgcctgcacatgaagtcggctcacggtttggtggaggagcaggagaatcccgccacctcaactgatgctgcacacgtcgctgagaccgatgattccgagactgcggtgttgatagcggcagccgaggcagatgccgcttacataaacgctgtggtaaacgatgtagacatcgtgggcaccgtacccacctacgaagagtgcgttgtggtgagttactagttctttgtatctcttcccaaacttacctttttctcttcctttattgcagtttgacgtggataacttccacagcgaggaagttattacagattggcttaagtagcagttcacagttttacatccaataaatatttgtctcaaaaatatgttgtaccttgagtattttatttttgcgttagctccccacacattgaaatccatccgcattgatgtaagctaataaacacatttgttttgatgtagaattaatgaaaggaaaagagcatatctaaactagcatatggatgcgaaatggtttatataagttgcacataaaatacaggaatacgaattaaatattgtgtgcaattgtgcaaatgtaaaactttattaggattataactggcgtgtaacaagtaaatatattgctggcgtacaattagaccagccgttgtgttggctgacgacgaacagggatataaacgcgatatttaactacaactaaatgtaaaaccttagactaaaaaaaacgtgtgattggtgtgtagcctaggcgttgaccttgtcctcgtcacccgtagtgtcgtcctcctccacctcgctgttgtcctcttcgcagatctccttcaggacctccaccaaattcttggcctcgtccagttcctggcgcatagtgtccatctcctcctcaagcccctcgatgcgctcgtgcagatggcggttttcggtgagcgagtcctccagcgccagtcgccgctgctcggccagcagcttgtagtagttctcgccgggttcggctgtgctagtgagatcctctgccgtgatgggcttgtcagcattgccaagcggaacggcctcagcatcagtctgggtatccgcatcctttgtggaaatcgcgggcgccgtgtccacgcatttgcgcttgccgtacttgggcgcgacttggacgccggccttcagacgactcagctgatccacgatggaggcgcgccctgaaccagtgaggttctccttatcgtttacgttgccctgcaagggtttcagggtctgtctctgctgcttcaggtgctccttctgctcggcctctgtctcgacttggatgtagaccctggcagcgctcgaag

SEQ ID NO: 19994 - DNA, 3079 bp, DROSOPHILA
gagagggtggtaggccgattccctctccccactgcccgttgaaattcagaatactaagctctcggttaaacgcggcgaaaaagaaagcaagctctgagcggctgaaaaaaaaatgaagtgaaataaaactgggatcgcggcaccagcaacaagttttagtggctcttctttgtgcgtttcgttcgtgtttgctgccctgcgctttgctcgccacattcgtcgccgacttttattttgttttgcccattttatcagaatcggagcacctccaaaaaagcccaagacgagctgagcctcagctgcgtcgaggtgagctgatccactccgctcccctttcgtgcgctgcccaccgctccccaccgctcacacccgatcccatccaatccaatccgatccgctccgctccgagtgcatagtgcatgcaaagtcgcggggctgggctttcggaattacacaacccacatggggcagcgccaacaaaggcctcagcagcaacaatagcgggcagccaagcattgccctgccctcgacttcgaccatggctcccaccaccagtccgccacccaagctggccaagttcaagtcctcgtcgctggaccacgagatctacacggccaatcgccgcggcaccattgccacggcctccagcgactggaaggcgctccgcggaggcgtcggtggaggagcaggaggacccggtagcgtacccaatccctctaacggacgctcccttcacgccggcggacccatgacacgggccgcctccacatcctcgctggctagcagtacgcgcacgatgactaactaccaggagtacaaaatggatatcatcaaccaggggaaatgtctgtgtggtcagtacatcagagcgcggctgcgacgggcaggagtcctcaaccggaaggtgacacagcgtttgcgcaacatcctggaccccggctcctcgcacgtggtctatgaagttttcccggcactgaacagcatgggcgaggaactggagcggatgcacccgcgggtgtacacaaacatatcgcgacagctgtcgagggccccgtttggcgagctggaggacagcgacatggcgcccatgttgctcaacctagttgccaaggatctttttcgctccagcatcacctggggcaagataatctcgatatttgccgtatgcggcggctttgccatagactgcgtgcgccagggacatttcgactacctacagtgcctgattgacggtctggctgagatcatagaggacgacctggtctactggctgatcgacaacggcggatggttgggcctgtcgcggcacatccgaccccgggtcggcgaatttacgttcttgggatggttgacgctgttccaacactggaaacgccgtggaggtgccaatattttgacgtccaaccaggccgaggagactaccccgaacctccacgtggaggatggagacttatccggaggcgccttgcagcaggaattcctctactgcgagagctgcggcaatgtatacgaggacaccgagtcttacgacagggcccacggtccgcaggccggctgctgcaccggcgctagcggggaattggatttcatcgaggaggtcgccgaagattgcatttcggaagaggtcggggaagaggacattgtctacgcagacgtacccctctgggagctggtggaggaagttccggccaacgtgaaggcggagaaggaccaaaacgagcctagcaattccgatcgctacttctgttacgactgccacagcattttcgagaaccgaaataaagctgaggagcacatatgtccgcgggcggaatccggcgggtccagccaacaagatggcgatgcgaaagcacccgtccggcgaaagttggccagtgtcagtgcaaggacgggtccgagagacgcatcatccgttattagctgcggaatctgcaacaccgtttttagctcggagaagtttctcaaattccacatgcgcattcatgagaatcgagctcccaagagcattcaggacgcccttcctataggcgcccatcagcagtacagcgagctggaccagttctactgcgaaatatgcaacaaaagcttcgatgaaaccctcctgacggtacacaaacagatgcaccaacaggaatctagtgagattatgtgcagcatttgcaaccggaagtttgagaacgaagttacctatcagatgcaccaaaaaatccatgagaaaccgcgcgactccgagtcctcccgtaaattagcccagcgtactagtctcgataaggagaaacccgggtttccctgccagtactgcgagagggtgttcacccgcccctttgaaaaagtcaagcacgaacgggtccacaccggagaaaagccttacgcctgcgaggtctgcggcaagacatttcgggtgtcatattccctgacccttcatctgcgtacccacaccaacattcggccgtatgtgtgcacggtgtgcaacaagcgctttaaatcgcaccaagtgtactcccaccacctgcgcatccacagctccgaacgacagttttcatgcgatgcgtgccccaagacttttcggacctccgtgcagctgtacgcccacaaaaacacccacaccaagccttaccggtgtgccgtgtgcaatcgcccattttcttcgatgtacgccgtcaagaatcacatgcagacccataaggagatcagcagcaaaggaagtgtcggctctggtacgccgaacattaagagtgcggccacctcgaagagccaggcagctgggaagttctattgtaatacttgtggagctgagtacgcacgtctcttcgccctgcgcctgcacatgaagtcggctcacggtttggtggaggagcaggagaatcccgccacctcaactgatgctgcacacgtcgctgagaccgatgattccgagactgcggtgttgatagcggcagccgaggcagatgccgcttacataaacgctgtggtaaacgatgtagacatcgtgggcaccgtacccacctacgaagagtgcgttgtgtttgacgtggataacttccacagcgaggaagttattacagattggcttaagtag

SEQ ID NO: 19995 - protein, 846 aa, DROSOPHILA
MAPTTSPPPKLAKFKSSSLDHEIYTANRRGTIATASSDWKALRGGVGGGAGGPGSVPNPSNGRSLHAGGPMTRAASTSSLASSTRTMTNYQEYKMDIINQGKCLCGQYIRARLRRAGVLNRKVTQRLRNILDPGSSHVVYEVFPALNSMGEELERMHPRVYTNISRQLSRAPFGELEDSDMAPMLLNLVAKDLFRSSITWGKIISIFAVCGGFAIDCVRQGHFDYLQCLIDGLAEIIEDDLVYWLIDNGGWLGLSRHIRPRVGEFTFLGWLTLFQHWKRRGGANILTSNQAEETTPNLHVEDGDLSGGALQQEFLYCESCGNVYEDTESYDRAHGPQAGCCTGASGELDFIEEVAEDCISEEVGEEDIVYADVPLWELVEEVPANVKAEKDQNEPSNSDRYFCYDCHSIFENRNKAEEHICPRAESGGSSQQDGDAKAPVRRKLASVSARTGPRDASSVISCGICNTVFSSEKFLKFHMRIHENRAPKSIQDALPIGAHQQYSELDQFYCEICNKSFDETLLTVHKQMHQQESSEIMCSICNRKFENEVTYQMHQKIHEKPRDSESSRKLAQRTSLDKEKPGFPCQYCERVFTRPFEKVKHERVHTGEKPYACEVCGKTFRVSYSLTLHLRTHTNIRPYVCTVCNKRFKSHQVYSHHLRIHSSERQFSCDACPKTFRTSVQLYAHKNTHTKPYRCAVCNRPFSSMYAVKNHMQTHKEISSKGSVGSGTPNIKSAATSKSQAAGKFYCNTCGAEYARLFALRLHMKSAHGLVEEQENPATSTDAAHVAETDDSETAVLIAAAEADAAYINAVVNDVDIVGTVPTYEECVVFDVDNFHSEEVITDWLK

SEQ ID NO: 19996 - DNA, 2830 bp, DROSOPHILA
agatacatttgcaaatatttatcttttcacgcacgcctcgctaattgccatcgatcagagataaactttctatcgggtaatgaagcaaagtggtcaatgccatgggcagaaattggaaaaatgtcaatgggggagataaataacattttcagtcactttcaaaattcgcaccttgtttatttctgctgccgttttgagttgttttgcttatttatttggctcgaaaacgagtgttaagcgagggatcgatgatcagttttgagcatccaagtgtcgaacactttccatttttatggtgattttcgttgtttctctttttttttctgaaaacgcgtatttctgaacacacatgcacatacacttgtcaacacaactgagagttgcagtggcacttgttaactgtggtattatggccaagtttttgaacttgttgtgggccaaaaacctcctggaaaacccgttggaatcgccgaacgacgttacacacctgcgacgatatgtgaaacgagttgctcgttttccatttaacgctgcattcaattgcaattcgattttcccgcaacgcgaaccgcactccacggaatatcgaaaacaaatgaaaactgaggtggcgcgttgagttgagttggaaaacctgttgctgccaaacgacgcacacagatgcaaatgctcagcgacaacaagcaaatgcagtctatttcgtcctttaaaaggcactggaaagtctcgaacttcactgtttgggtaacatgaaatctttagctaaacgattgtctcaactttaattgcaaattaatgggaaacaaattaaaaacacgaaacgaaaaacaaaacagaaaacaaaataacgcgacgctcaacacgactgcttcgcaggcagttatcgactgatgcttatcggtcgatattcaccacacctagtatgaccacaggggcgataccctttgcttggcgccattatcgatttccgatcgttattttcaaattcgaaatataaacagcaaacctttaataatgcttcaatcagaaaacatataaatcaggaaaaaataaatcgtattttaaaattatcagtttatttattaaattctaaagtatatacccgcgatggaagttggtggtaggcattacataaaatgagcatcgcacctccgcttgatatcactaaccttttgtagttaccctaaacaacgaactcgaggaaaagatttcggaagcattttgcatatttgatactcatggcgataagtatattgattcccgcaatgtcggcaacgtgctccgatttttaggttgcgcgcccaccgaaaaagaggtcgaagatgtcattaaagccaccgattccgtcgactatccaggcgaagcccatttggtgaagttcatggaacacgtttccaaactgctgatggatcgacagttattcaatatactttaggtttgtttagcaactaacgatatttgtccacagaatggaaccagcctcgtcggaaaagcttctcgaggcctttgagaccctggatccagaaaataaaaaatatctgaccaaggagtacttcggcaaattaatggcggaggaaggagaacctttctccgctgaagaattggatgctatgtggcctgtggcaattgatcccattactggacacattccctacaccttctacataaatcaactcagggtaagatcgcatttcccaactacttttgattggattcatctaaaatttccagcacaagcctgatatctatgaaattgccgaggttatcaaggaggaactagcacaagccgaaaaagaaaagggcaagaaaccacaacaaccactgttttagatgcccctttaatcaagcaattgcaaataacgcggaaaataaatttatacattttataacaaataatttcctttctcgtttttactgttccacattgagatatagacggtcacactgccatgcgcaattcgagatggcatagtcgttgttctatgtttggatattaaaatgaattgtgtgaaaaatttaaggaactattttttgttttaagatattgcctgaaatgttacaatatatttattaaatccaataaaaaaaaatttacaatacatttaagcgcttttacaaatcatcgttgctctaaattaactgaatttgtaatcgatagcccgatacgtgctgctccatccctcattaccccaactcttctagaaaaacacgtcagcttttcacagccattcggaaaagaacacgtcagcagaaaggaaaactggtcggtcgatattgcaaaggtggatgagaaaattgcgtgagacggagccagaaaagcccgagtcggcggcgatgaagagattcaaaccagcagagcgtccgagaagcgcagtcgaagttcatgagacgacctaaaacaagcaaaagttaaaatacgctcttacaatgcaaatctaagtggaaagtcgcttttcacaattgcacacagcacacagcagtttatcatttagccccgaaccagttaaacatggcacccacagcaaacacagtgctaattaccgtgccgcggacagcaatcacatcgaataatctgcccaaattgcggcccgccccccttacggcagctctgctgaaggtgtcggccacgccctccgcctcgcccacgccctcgagttcgggatacgcatcctcgtcgaacatggatgacgataacatggctgcatcccagcccaaggccaagaagcgtcgcctggaccatctaacctgggaggagaaagtgcaaagaaagtaagtccacccaacttttaaccaaatttgagcgccttatttaactgttattatcgaacaa

SEQ ID NO: 19997 - DNA, 668 bp, DROSOPHILA
gcaaacctttaataatgcttcaatcagaaaacatataaatcaggaaaaaataaatcgtattttaaaattatcagtttatttattaaattctaaagtatatacccgcgatggaagttggtgttaccctaaacaacgaactcgaggaaaagatttcggaagcattttgcatatttgatactcatggcgataagtatattgattcccgcaatgtcggcaacgtgctccgatttttaggttgcgcgcccaccgaaaaagaggtcgaagatgtcattaaagccaccgattccgtcgactatccaggcgaagcccatttggtgaagttcatggaacacgtttccaaactgctgatggatcgacaaatggaaccagcctcgtcggaaaagcttctcgaggcctttgagaccctggatccagaaaataaaaaatatctgaccaaggagtacttcggcaaattaatggcggaggaaggagaacctttctccgctgaagaattggatgctatgtggcctgtggcaattgatcccattactggacacattccctacaccttctacataaatcaactcaggcacaagcctgatatctatgaaattgccgaggttatcaaggaggaactagcacaagccgaaaaagaaaagggcaagaaaccacaacaaccactgttttag

SEQ ID NO: 19998 - protein, 186 aa, DROSOPHILA
MEVGVTLNNELEEKISEAFCIFDTHGDKYIDSRNVGNVLRFLGCAPTEKEVEDVIKATDSVDYPGEAHLVKFMEHVSKLLMDRQMEPASSEKLLEAFETLDPENKKYLTKEYFGKLMAEEGEPFSAEELDAMWPVAIDPITGHIPYTFYINQLRHKPDIYEIAEVIKEELAQAEKEKGKKPQQPLF

SEQ ID NO: 19999 - DNA, 9263 bp, DROSOPHILA
gatacggatgcggatgccattgaattgaaatggaattggaagtggaatcggaactgaacctgagaaaacttgtgttcgtaaccctttgaaattctggccaaaaagtcaaaaaaaaattattaaataaactttcgttgataggggaagaaaatggaaaaataggcagcgataaatttggtttaattgtgggaagacaataaatattcataaaatacactaaccgattattgtgtttggtaaataagctaacatttattggcttgagaatggaatgctttaataaattagatagacacgaaaccattttggttaatatgcaatatttagtagaagcaaatgagctgcaaactataataatttccaaatcactgcgacttaattattttggtaacacttgtacttgtacttgtaagtgtttgttttgcttagctctttgtcggcttttcgaagacagccacacccccttatccggccacccagttcatttgccttgggtcgtcatgcagtttttcgcctttttgcatgccattgactgacgcttcaacttttggattttggatgacttgcagtcgccggcggcttttctctgcgagtagcacagcgctttttctttgtaatacatacatatttatttattgtttaaagcataaaatacaatacaatgctataataaattaattatttattttaaataacttttatacacgagctgcgagcatgaaaaggcacttttcacgcggcggggcataccctcgtcgatccgcatgttagcttcttggttctctttgtgtgtgtgcgtttgttgtctttttttttattttgttttctttctttgtttgttttaatggatgcccccctgtcccctggactttcactttatggcaactgggggacagatggagctctaagctctcagctcttagctcttagttgatgatgatgaggcagcaataaataggttcaagcggcgctgatgagttcgatgctaactagtgactgactaatgcttggcctcctcctcgttgaccacgatcggttcgatctccttgacttcggcgggggtctcctcctcgtccggcaggacgcgcacctccacgcgattcgaggagctgatcgactgctcctgctcctcgtccttttcctcgccgttggcctgctcctggtccagatcgtgttcgtgatcattgtgctcatcggagcggctttgggccttgtggttctggggaaggttctgctgctgctgctgctggttgggctgctcgatggccgtgaggatggactgcagcaaaccctgcgacaggatctcctcgtgattggcatcgccgtgggcgacaccaggagcattgttcagggaaccgccgaactgcacttggaagttctgcgtcggctgttgtccattcagctggatgctctgcgacttctgggcggacagaacatcgagtccatccaaaccgggcagctggtggggatcggtgccatcgggcagtgctgccacggagttcttttgcgatgcatatccggtgtgatcgtagtccaggtcatttccagatggcggtggaccatagctgtccgccggcccggtgaccaattgctgggtgtgctgttccgccactgggatgctctgcgagatggcattgtaggcaccggcggatgcggcggaaacgctgccaaagtgctgctgcacaaactgctgttgctgctgcagttgctgttgctgctgcacctggtagccattgctgctcaccagattcggaccgtgaccgcaatcgtgcacgatgataggctgctgctgctgctgcacctgctgcaaattgaagcggggagcctgttgcggcaatggaagtccttgggagtggaactgtgaggcgctgtagctgttctccgagtggtggtgatgctgctgctgctgctgttgctgttggtagaagagtggtccggatggagcggcgggcaagtactgttgagttggtggtggtggtggtcccaggggacgcacattggccagtggtggtggtggtggcagatactggggctccggtggtggtggtggtcccggtggtccgaactgcttctggtggacaaaggcgggaccaggctgtggggcaggcagctgctgctgcaggctcaattggggcgcagatggtggtggtggtggtggctggtacagggcctgtggagaaggcagtggctgtgtcgctgatccggaaacgggaatctcattggccgctgggggaatataggtctgcggttgctgctgtggctttacaccgaactgatccagatgctggacggtggctccaatggactccaggagaccggcgggcacgggtggacgataggccaccggcttgttgggttgaccggcgccgtgctgcgggaagggctggggattgccagatggtgctccatactggatgttcacattggattgcgattgcgagtgcgcatggctgctgctgctggtgagggctgcaaactggggtggtggaggtccgtaattaccacttggtggtggtggcggtccatagttgccactgggtggtggtggaggtccgtagtttccactaggtggtggtggaggtccgtagtttccactgggtggtggtggaggaggtccatagttaccactgggtggtggtggtggaggtccatagttaccacttggtggtggtggtggaggtccagagtgtccgatagtctggtacttctgggcgtgcacagatccgggagcgaaggaatccgaaggaggcttggaatacgaatcatccagggaaccaatggcggcctgtgagtaaagtggtgttaaaatgagataaggtagagttaaagggccagcccagccagttgggctcaaactcacctgcaaggcttccgcttcaatggagttgcctcctggtccggtgatcacattggctccatcgccgccaccctgaagggccaccgccacgagctgttcgtcagtgagtccgtcgatgatgctgccaccactgccgctaccagtggtaccaccgcccaagctgtattgcgttccaaaggaggatccgccatgtccttgggccacctggctatagccaccctgcgtttcgatgtggttctgctccacgtaggctcccactggcgccgggatcggtttccagccatcgcaggccgtgtggaatggagcctgtgaaccgctaacactgtgtgtgtgtcccgaggagtcgatctggatctgcacctgcttcactggtccgggaccactgggtccacttggcctggagtgtccgcccgtcaggataatcgttgcggctggtccgtttccgttgccgggcagggacacaggcagtggtggtggtccgtagttcggtggcggggcatcgaagatctgcttgggcggcagattcagcggtccggaggcaggtggtccgtacgaggtggctggctggtgggcgggcttgaagagtggtgcggcatgtggcgagggcaacagctgcggtggtggtggtggaccgtactgaagcttcggtggtccgtattgtggagccgggcggtgctggatcttcaatggcggcggtggaccgtactgtgttggtggtggaccatactgaggcgccggcttcggtggtggtggaccatactgtggggcaggctgcgggggtggaccgtattgtggtgcaggcttcggtggtggtggaccgtactgctgtgccggcttgtgctggatgtgcgggggtccatagaagggcttgggcactccgaagtgggtcttgatctgctcgtgcagcgagctaccgccaccaccgcctcctccgccgcctcccaggaagttcagcttgggtgggccgtatttgatggacggcggaccgtactccctgaagggaatctgctgcggcacgccgtattcccggtggggcacgtgctgctgctgtggcggtgggccgtactggggggctgggcgtggcggcggaccgtatgtgtcgaatcctgcctcgcggcgcttcacatccttgccgtgcaacaccgcctgggcggcgcagaggcagcaggcggtcagcaaagtcaggcggagcagcatctgcgggcgaaagtagcggtaaatgtgggtcagtcatttgtcaagatagcatctggcgggaaaatagctagccccgagcgattggaccggaagttaatctcctcgagggagccaagccataaaaaacttaactcagaaaatcaagtttacaaaactcgcaaaaaaaagatggtccatcgtaagcgtacaaattgcaattgaatgtgattctgaataaagtctctatctagtcttaaaagtatcttataactgcaagggtatctaaacttcagcttgttgaagttactttatgtccagccaattttttttcataaatgtaacaaatgattgcaacagaaagagttgtaatatgacgggttagtcatcgtagtattcattgagtgacatccgcacaaagtgtctccagttgccatccatctcggccatctcaaccatctcagccatcatccggcctcaaccccttttaaccactacccatttgttagctgtctcagtgacctttttggccgccggcaacttgtcaaggcttgtcagaggtcatgggtcacaggccgcggctcacaggtcccctcaattcgctcgccatttcagccaggtgtcgttttccgttagctggtgacagtgtgtgtgtctctgtgtgtgtgtgtgtgggtcaccctaatgccaaccccatgcccaagtatgtaaccattatatgcgctaatttgcaaacctacgacccgcctcgatttacttgactctcggaaaacactgtgcagcaaggttgggttgtataataacatttaaagtagtaatataacatttacatttgaatttaatagttgaactttgacaatcgcttaacaattttattgccaaatttgacatgacacatagaaatgctatagagtgtcatataattaatattattattgcacacaactttataataattatcccaacgaaacttcaaatacattgctaaatactcgagagccgtaaaacatttctcatgaattattttttggccaacgtcggaggcgctaattaatccattaaggccaagtttgttgcgtggtgtaattggcattgcggttgcgcagaaaacgttggcgtattacgctctaattaaaacataacccggccagacttgccaccatcgtcattatgatcatcatcatcatcattactttccttatggatgtcgccgctcaacgtgatcatcaataattcagcaggcgagtggcgactttgtgtcagttaaatatgtaacaaaataacaaacaactgaaaagccaaaacagaatcaacgaaataaccgaaaataaccattggccaagtcggaatggaaaggggtatttaattggttttatgtttaacaacaatagcaaataagccaatcaaaacgggccaaagaaaaacgatatcaaaacggcgcttctttcaaaattccacgcacaacacgcgatttagccgcttgtaatgccaataaatgtagcaaaaggcacgcggatcgaccgcaaaaaggtgacgaagctggaatgcccttatataagaaagtgatggtttcgttacgtaagaggtgaaggtatcatgaagatgagtgaatgaatcatgcattttgtaaatacgacttttttattaacgatttagttagataagtttgtgtttgtgttaaagatttctgggatttatataactatctttttgtttaataacattatttgtttcgctaatatcttaaatgtatctatttaatttttgcaacctaagtgtcgaagtttttaaattctattacatgtgctattcatttaagttcgataattccacttgacctcacatatatacgaaattctcttatgcaaataccgtgctcaactgcttaagatgaaaaaaaccgacttcaaaagaaccaaaccagcgtcatccaaccactagccaagtgtaatagccaagttattatgccatttgccatgatcgcatcgtctctttctggattgcataatgcgggcaatcagcaatctttggaaatggaaaagtgcacctcaatggtcagcgatgcgcattgaatacgagtaccacaatgagccacaaaatgtgttgttacttcttttcgctttttgggtttttttattttatttttttttttttttactttttggccagcggcggcgttaaaatgtcataagcggtcgaaacggagaagaagatacaaaaaaaaaaaaatacaaataaaaaagagccgcgccgaaaaggtaactttcacttggctccgggtgtatctctattttttccatgtatctgcgtatctgtgaggttcgcttcgtggggatgagtaggtgtcacaaatgttggcagtgaaattatgcgccgcataatgaaaatacattataaaagaaatggcaaacaattaaagggggtgctggtaatggtgtgctgggcatgggcgtctgtttgccgaaggtgttgagggagagacgggggagttgccccgttgcccattgtctgtgaaccgtgtgaagtgacccgcatgtggccaccacttgcaactcaattccattgtggatcgcttttcatcagtcccgtattcgagtcactaagccacttggtcgcatatgtacagttgggcttagaaatgcagttcgaatgtaaagtattggattcatttagcaaaaaattgaaaaattatccattttgacaaatgggtattaagcgatttaagtatggcttaattcggcatttaaactatttcacaatcatattaaatgcaatgcgagtaaatgttttaaaaaattttaaagcctagaaggctattttttttccatctcatcaccatatgtatatgtgacccacaatcgaccacctgtcactggtcaccgtttttgcgagcggtcacttcttcagtcaccgctttctttggccggcgtgttcgatttctgttcattagcatagcccacaaatatttgttattgatgctaaacaattgacaacaacggcagacggcaaacaaataaaaccccggctatagcaacagcaacagcaacaaaaaaaaaaaaacaacatataaacaaacagacgggccggcaaaactttcactctcgctgagaagacgtaaatttagttcgaagatgaaggggccagaaaacgaggcaaaagttcagccgggaagcgattccggaatgccaaaagggttgccgggtgggaggacggggacctaagtttttggccacagctgcctgttctgttcccaaaagtcgagaatcgtaatctccgttaattaaatttcccccaccacagcgccccacaacagcgggcaaatgtgaatgcgaaattatttatgaatcaatttcgataatgaataaattatgtccggagacaggagggccagcttccgaccgtcttctgccagcaaatgaataatctgggccaggatttgccaggcaatccgtgtcctgcatcaattttcgtttggaccaacccggggtaaccctcatcaattagcagaggtcgtgtcacaaggtcaaagggccaaggcgcaggcgtgcccaacgaaaaaaaaaaaaaaacaaaggtctatttgcaccgaagctataggatttcgattttaccggcttatctaattttcgaacaatacttaaatctatttacatgcaccatttactattattcttcattattcttttaatgtgagagttacaatttcctttggcaaagtttgtatcacaataatctgcccatttaaatatcctaaattgttttccgtgcacttggattttttccaaagttttgggaaatctatttggcacccaaggggtcggataacttttactttcgctggcatttccctcaagtcccatagtctctactcctaattgggcttgtgtttgagtttcttccgtaatcctttgcactcgagtccaattagaaaagcgattctttaccatgccagctgcttatcctcgtgggttattctcggcacaaaagcactcgaacaaaaaatgttgttgtttcaattcgattgttgaaggcactgcacacaaaaaggatccgtagctcgtaaaaaaaaaaaattggaaaaaaaatgcaaataaatcgcggcactcacgaaacggatcacgggatcggttcggaacggttcgaatcggtacggatcgcttggggatctcctttaaactcagatctcggatctgatctctcgacaacggatcggcgacggcgaccgctgcttgtcagtcgcgagttgaaaatgctgccgctcagatgataacgccagctcatataggtaatagcccggccaaacgtcgacgtcgctgccgccgcgcagccgctgtagaaaccgaaaccgaaaccgaaaccgattcccattccgagtccgaatccaaatccgaatcggaatcggaatatccgagtcccccagttcgaatcgaaaccgaaagtgaagaaatttcataaacccagagcaaggtgccgagtcttaagggacagaagaagctggaactgaagctgagagctttttccctctctcgcgaccagttttgcaacattttcacatcgataccttggcatcgaagcgctgggagcaaccttgctacatggggcaagaccgccgccccatcatcaccatcatcatcgaaatcgtcgtcatcgcagtgccgcgatgccaagtgtcattttttgcaagtcgaagttgaggatccttgtcaaagttcagagccttgccttgaacaccgacttgagtggtgattttcgagtggctcagtctggggctcttgaccaatgtaaacatgactaagttaatgggtttcccaaacgaacgcttcctcatgatcgccaagtgttagtcaggaaaacaagggagtttcatcatgagttgcaaatgggttggaccaatacttgtatttatttgcttttcaattggtttttgtttggaaaaatgttgcattttcctatacatttttctttacactttaatgttttttaaatcaactctctatgatgaagtctacctaacaaaataaatgtagatgtttccaagacacactgcatttataatatatttataagatttttaacttcgtttacaactgcggcttgtgttttctatccaattcaaaattggatgtgaaattcatacgattccatttctatttcgattaatatgtatggtatggtatttacataatttccatttcatattacttaatagtcgcgtcgtctgcgaaagtcatgc

SEQ ID NO: 20000 - DNA, 3268 bp, DROSOPHILA
acaagcagcggtcgccgtcgccgatccgttgtcgagagatcagatccgagatctgagtttaaaggagatccccaagcgatccgtaccgattcgaaccgttccgaaccgatcccgtgatccgtttcgtgagtgccgcgatttatttgcattttttttccaattttttttttttacgagctacggatcctttttgtgtgcagtgccttcaacaatcgaattgaaacaacaacattttttgttcgagtgcttttgtgccgagaataacccacgaggataagcagctggcatgatgctgctccgcctgactttgctgaccgcctgctgcctctgcgccgcccaggcggtgttgcacggcaaggatgtgaagcgccgcgaggcaggattcgacacatacggtccgccgccacgcccagccccccagtacggcccaccgccacagcagcagcacgtgccccaccgggaatacggcgtgccgcagcagattcccttcagggagtacggtccgccgtccatcaaatacggcccacccaagctgaacttcctgggaggcggcggaggaggcggtggtggcggtagctcgctgcacgagcagatcaagacccacttcggagtgcccaagcccttctatggacccccgcacatccagcacaagccggcacagcagtacggtccaccaccaccgaagcctgcaccacaatacggtccacccccgcagcctgccccacagtatggtccaccaccaccgaagccggcgcctcagtatggtccaccaccaacacagtacggtccaccgccgccattgaagatccagcaccgcccggctccacaatacggaccaccgaagcttcagtacggtccaccaccaccaccgcagctgttgccctcgccacatgccgcaccactcttcaagcccgcccaccagccagccacctcgtacggaccacctgcctccggaccgctgaatctgccgcccaagcagatcttcgatgccccgccaccgaactacggaccaccaccactgcctgtgtccctgcccggcaacggaaacggaccagccgcaacgattatcctgacgggcggacactccaggccaagtggacccagtggtcccggaccagtgaagcaggtgcagatccagatcgactcctcgggacacacacacagtgttagcggttcacaggctccattccacacggcctgcgatggctggaaaccgatcccggcgccagtgggagcctacgtggagcagaaccacatcgaaacgcagggtggctatagccaggtggcccaaggacatggcggatcctcctttggaacgcaatacagcttgggcggtggtaccactggtagcggcagtggtggcagcatcatcgacggactcactgacgaacagctcgtggcggtggcccttcagggtggcggcgatggagccaatgtgatcaccggaccaggaggcaactccattgaagcggaagccttgcaggccgccattggttccctggatgattcgtattccaagcctccttcggattccttcgctcccggatctgtgcacgcccagaagtaccagactatcggacactctggacctccaccaccaccaccaagtggtaactatggacctccaccaccaccacccagtggtaactatggacctcctccaccaccacccagtggaaactacggacctccaccaccacctagtggaaactacggacctccaccaccacccagtggcaactatggaccgccaccaccaccaagtggtaattacggacctccaccaccccagtttgcagccctcaccagcagcagcagccatgcgcactcgcaatcgcaatccaatgtgaacatccagtatggagcaccatctggcaatccccagcccttcccgcagcacggcgccggtcaacccaacaagccggtggcctatcgtccacccgtgcccgccggtctcctggagtccattggagccaccgtccagcatctggatcagttcggtgtaaagccacagcagcaaccgcagacctatattcccccagcggccaatgagattcccgtttccggatcagcgacacagccactgccttctccacaggccctgtaccagccaccaccaccaccaccatctgcgccccaattgagcctgcagcagcagctgcctgccccacagcctggtcccgcctttgtccaccagaagcagttcggaccaccgggaccaccaccaccaccggagccccagtatctgccaccaccaccaccactggccaatgtgcgtcccctgggaccaccaccaccaccaactcaacagtacttgcccgccgctccatccggaccactcttctaccaacagcaacagcagcagcagcagcatcaccaccactcggagaacagctacagcgcctcacagttccactcccaaggacttccattgccgcaacaggctccccgcttcaatttgcagcaggtgcagcagcagcagcagcctatcatcgtgcacgattgcggtcacggtccgaatctggtgagcagcaatggctaccaggtgcagcagcaacagcaactgcagcagcaacagcagtttgtgcagcagcactttggcagcgtttccgccgcatccgccggtgcctacaatgccatctcgcagagcatcccagtggcggaacagcacacccagcaattggtcaccgggccggcggacagctatggtccaccgccatctggaaatgacctggactacgatcacaccggatatgcatcgcaaaagaactccgtggcagcactgcccgatggcaccgatccccaccagctgcccggtttggatggactcgatgttctgtccgcccagaagtcgcagagcatccagctgaatggacaacagccgacgcagaacttccaagtgcagttcggcggttccctgaacaatgctcctggtgtcgcccacggcgatgccaatcacgaggagatcctgtcgcagggtttgctgcagtccatcctcacggccatcgagcagcccaaccagcagcagcagcagcagaaccttccccagaaccacaaggcccaaagccgctccgatgagcacaatgatcacgaacacgatctggaccaggagcaggccaacggcgaggaaaaggacgaggagcaggagcagtcgatcagctcctcgaatcgcgtggaggtgcgcgtcctgccggacgaggaggagacccccgccgaagtcaaggagatcgaaccgatcgtggtcaacgaggaggaggccaagcattag

SEQ ID NO: 20001 - protein, 993 aa, DROSOPHILA
MMLLRLTLLTACCLCAAQAVLHGKDVKRREAGFDTYGPPPRPAPQYGPPPQQQHVPHREYGVPQQIPFREYGPPSIKYGPPKLNFLGGGGGGGGGGSSLHEQIKTHFGVPKPFYGPPHIQHKPAQQYGPPPPKPAPQYGPPPQPAPQYGPPPPKPAPQYGPPPTQYGPPPPLKIQHRPAPQYGPPKLQYGPPPPPQLLPSPHAAPLFKPAHQPATSYGPPASGPLNLPPKQIFDAPPPNYGPPPLPVSLPGNGNGPAATIILTGGHSRPSGPSGPGPVKQVQIQIDSSGHTHSVSGSQAPFHTACDGWKPIPAPVGAYVEQNHIETQGGYSQVAQGHGGSSFGTQYSLGGGTTGSGSGGSIIDGLTDEQLVAVALQGGGDGANVITGPGGNSIEAEALQAAIGSLDDSYSKPPSDSFAPGSVHAQKYQTIGHSGPPPPPPSGNYGPPPPPPSGNYGPPPPPPSGNYGPPPPPSGNYGPPPPPSGNYGPPPPPSGNYGPPPPQFAALTSSSSHAHSQSQSNVNIQYGAPSGNPQPFPQHGAGQPNKPVAYRPPVPAGLLESIGATVQHLDQFGVKPQQQPQTYIPPAANEIPVSGSATQPLPSPQALYQPPPPPPSAPQLSLQQQLPAPQPGPAFVHQKQFGPPGPPPPPEPQYLPPPPPLANVRPLGPPPPPTQQYLPAAPSGPLFYQQQQQQQQHHHHSENSYSASQFHSQGLPLPQQAPRFNLQQVQQQQQPIIVHDCGHGPNLVSSNGYQVQQQQQLQQQQQFVQQHFGSVSAASAGAYNAISQSIPVAEQHTQQLVTGPADSYGPPPSGNDLDYDHTGYASQKNSVAALPDGTDPHQLPGLDGLDVLSAQKSQSIQLNGQQPTQNFQVQFGGSLNNAPGVAHGDANHEEILSQGLLQSILTAIEQPNQQQQQQNLPQNHKAQSRSDEHNDHEHDLDQEQANGEEKDEEQEQSISSSNRVEVRVLPDEEETPAEVKEIEPIVVNEEEAKH

SEQ ID NO: 20002 - DNA, 5308 bp, DROSOPHILA
tttcccacacaaaaactcagccgcatcacatgtgtgaatattaaacgatataatatatgtatgtagtatagccccagttggctataaataagcatgaaataccgctcgaaaaattacaaaatgtgtctcggatttgctcagaatgcctatgctttattcgcccaaattgttagattcccaaaatgccgaatataaatatggactcattgtttatttgtttgaagctgcattatttcaatgtcgttggctaatttgcgcccgtcgatacttttcagttaaatagcgatcttttatttcatttatttttgtttttgtgcgccaaatggtgaacacatgttttccggtccgaaatttggtacggattgtatctatgcgcaatagaaaagatagaaagtaagagtatctgctccacgccaacattttttttttaatataaattacaaaagcttttgatcactttcgattctgtagcctacttcatttcctgcccacttgacacttcgaatagccgataagtattatctatggcagatgctttgactaatcactgccttgattcgataatgtggagtattcacgagacaagaacctcattcatgtttcgaggtttgtgctcttgtgctatcaacataaatatttcctgattgatttcaatggaatattgaacgggtggagtccgttcctctgctgacagcttaaagttgatcgcactggcttatcacgacccctaattatttaatcgatgctcaatgctcaagtggctgtattaacttaaccctttccccatcgccagagaaattgtaccgattagccgtggtgacgcgacgcatatctgcagagctttatcagtcgaatgcgtcacaattgaaattcaacaattgaacttaattagtgggatggttactgactccgaacactcttaatatttatttcggtgaccaatgaagtgaatatgtttatctcccctttttaggccacaatgaaatcaaagtacgaaaacatgaagatcatctacaatcgcagcaagatcggctggtactgggctccgttgttcgtatcatgctggtttctgctcttctatctggtggtaatacccagcttccatcgcatgccgcagctaaagacgctcgaggatgagcgccagcagccgggtcagttcatcggggagcgggcggagaacacccttctgaggctttccaagattggacccaaggtcgtgggcagtgcggccaacgaacaggtggctgttcagtttcttctcagcgagataggtgacatcatcgacgatgctcgaacggatctctacgatatcgagaaggatgttcaggttgcctccggtaactatcttctctggtccatggtcaatgtctatcagagcattcagaatgtggtggtcaagctatcgccgaagaatgcaaccagtgaagctgctcttttgatcaattcccacttcgattcggtgccgggaagctcgggtgccggagacgccggaatgatgtgcgtgattatgttggaagttctccgggttatcacgaaatacgagaccccactaacctactcggttgtattcctcttcaacggagccgaggagaatccactgcagggcagccatgcattcatcacccaacatccttgggcccaaaacattaggtatgtgtagtccttaaatacaatttacgatattaactaaacaaactatattattttttagagcggtcattaatttggactcggctggcagtggaggacgagaaattctatttcaatccggacccgatcatccttggctcatgaaggtaaatttcccattagtttttacattttggaatttagttaatcttgttcatatcttttaagtactatggcaaaaacatagttcatccgtttgcctccactatcggtgaggaattgttccaaaatggctttgttccctcagagaccgattatcgcgtgttccgtgactacggccatatacccggtaatataaagtgaagtacaaaaatgcgcctaatcattaagactttcggtttggcaggtctcgatatggcacagactttgaatggctatgtataccataccaaatatgatcgctttaatctcatcccgcggcgaacttaccaattgactggtgaaaatattttggctctggtcaaggccctggccaacgcagaagaactggagaatccatcggtgggttcttcgaaaaatttgtgtaaaaaaagtatagtttttaataagaaatctaccaactttagaaatacgccgagggacacatgatattcttcgacatgatgggctggttctttgtctattatccggagaccacgggcattatcatcaacattaccgtgtgtgtcctggtctgcgtcaccatcgtattgtacatctggatgatgtccagcagtacgggcatgttccgacgacgaatctgggcaaagtttggcattctggccgctctccagttggctggagttgctctgggcattggtctggtcatatcgatagccctgttcctggacgcggtgaatctaccgatgtcctggttttcgcaaaactggatgctcttcggcttgtacttctgccccatgatttttggtatgggcattgtgccagctatttactttagtcgcactaaagaggtgagtttgagatattgttaatgtaacttaataaatatcataatttaactaaatccttttcagcatggtttacccctgggctatggcattcaactattgatgcattcgcattgcctgatcttgaccattatcaccgccataatggtgagctatagtattcgttccgcctttgtcataatgctctgcatcggcttctacactctgtccgtgctgatcaatttggtaactaaggcacacaaaacaagtaagaccgatcccctttataattaattaattaattaataaataattattaattatctttcagatttcctgtggctcataccgcactgcatttgccaggtgctgccattcatgttctatacttactgctgctatgccttctatgtggtttttgtgcccatgcagggacgcgagtgtaatacaaatccggagattctaatgggtttctttacggcgctaatggttctactatttgcaccctttctggtgcccttgttctgtctgttccgcaagtccaagacaattatctcaatgtttggcatctgcacgatagtgtttatcatatttgccgcaacaccgattgcctttccttacgccgagaagacggcgccccaaagattcttcgctgtggtatgtcctttatttttttagatttttactttatagttcctaagtattttattctcttacagcacacagcaagaaccttccacaatggcgatccagcgagcacagtgagtcataaggactcgggatactttgtccttccggtcgatcgacgtcctcacaccgtggatgatattctctttgaaaacacaaactttacaaagtcagaacgtattgattgtgactcggagctcatgtgcggatttcccatttacagctcacgctggttaaatgcagtgtaagttgtaaaaacatcaatcaacttacctttactcatcgttttatttgttttcagtgataacagctattttgttcctggtcccgagccaaatagggaatatattcccactctgactattttggaaaaatcgagtaattcagatacaaatattaggtttgatcttgagatctcaggaccggatcacacgagcatattcattctgcccttaaacgatagcaaattggtggattggtccttcattagggatccgctggatggaaatgtaaagccaccatactacgtgtactggtcatatgcattagatcccaaacccttgcagttttcactggaattcgaggtaataatattaattaaatattatactttagaggggtagttaactcactacttatttccagcacgaagatccaaattggtcgggaggcactttcaaaatagccctaatgggtcatcgaatacacgatgacatgtatattacggaggatttccgtgagttcctggccacgtttccgccgtgggcgcatgttagctcctggctgggatcctacaatagttggcagctttaagtgtagactcaaagttccttcacgaactcaactcaatcccatttttgccatgacacctcagctactcttaattctggtactgttgatggagtgtaccaattttacctaatccaacgaacaaagtgtcgataagcatggcacgtcctaaattgtattagtatttacgattagaacactgtagttactactttgtaattttattaaaatatactataaattatttattaagatacgccaactttggagtctatattctcatcgccgcctaaacaatccagctctcgagggccgagaaccaatcggtggtatatgtccaatcggggaaggttgcgaggaattccttgtattcctcggtgtagtactctggatggtattggaagtgctcggatacgaccagcttcatgtagggtccgtctgtgttgccctcctcgtgctcgagctccacccaaaagttgagcggctcctcggtttgggagtatatggcatagatcagatagggaggtgtgtgcttctccaccaaaggtgtatgatcgaaggaccaatctgtcaccttgacattgtcaagcggatctatgtacatcataacgcgatcgctggccctcaggttgtactcatatcgtaccttgttgccatccagagattgtttagacagctgggtaaggtttatgttcattggaatcacaggtggcgagctgtagatccaacgagcagagtctctgtgatgcaagcagaaaaaagtttagataccaactaaggtcaggttacggtctctaacatacttccattctatccagcgaccactatacaatggaagtccacagtacggttctgcggcacaggtggctgccgtccagctttccggctcggcgttcttgaaagttgtgtcatccaattcatggagtcgtgtatccacaggttgaatataataacccgagtcctgcttacttgtaccatccaaattgtggaatgttcgttgtgtgtgctgaaggataaattaagggataagctatacaaatatatggttaaatatatttaagaacctaccagcacatagtaacgctgaggagccaattgcttcacaaatggaaaaccggcggatgtgcaggccaagatgatgaaaataattgtgatcacaccaaacgatgagaatataatcttgggctttcggaacttgtgcataatgggaatctgca

SEQ ID NO: 20003 - DNA, 2758 bp, DROSOPHILA
atgaagatcatctacaatcgcagcaagatcggctggtactgggctccgttgttcgtatcatgctggtttctgctcttctatctggtggtaatacccagcttccatcgcatgccgcagctaaagacgctcgaggatgagcgccagcagccgggtcagttcatcggggagcgggcggagaacacccttctgaggctttccaagattggacccaaggtcgtgggcagtgcggccaacgaacaggtggctgttcagtttcttctcagcgagataggtgacatcatcgacgatgctcgaacggatctctacgatatcgagaaggatgttcaggttgcctccggtaactatcttctctggtccatggtcaatgtctatcagagcattcagaatgtggtggtcaagctatcgccgaagaatgcaaccagtgaagctgctcttttgatcaattcccacttcgattcggtgccgggaagctcgggtgccggagacgccggaatgatgtgcgtgattatgttggaagttctccgggttatcacgaaatacgagaccccactaacctactcggttgtattcctcttcaacggagccgaggagaatccactgcagggcagccatgcattcatcacccaacatccttgggcccaaaacattagagcggtcattaatttggactcggctggcagtggaggacgagaaattctatttcaatccggacccgatcatccttggctcatgaagtactatggcaaaaacatagttcatccgtttgcctccactatcggtgaggaattgttccaaaatggctttgttccctcagagaccgattatcgcgtgttccgtgactacggccatatacccggtctcgatatggcacagactttgaatggctatgtataccataccaaatatgatcgctttaatctcatcccgcggcgaacttaccaattgactggtgaaaatattttggctctggtcaaggccctggccaacgcagaagaactggagaatccatcgaaatacgccgagggacacatgatattcttcgacatgatgggctggttctttgtctattatccggagaccacgggcattatcatcaacattaccgtgtgtgtcctggtctgcgtcaccatcgtattgtacatctggatgatgtccagcagtacgggcatgttccgacgacgaatctgggcaaagtttggcattctggccgctctccagttggctggagttgctctgggcattggtctggtcatatcgatagccctgttcctggacgcggtgaatctaccgatgtcctggttttcgcaaaactggatgctcttcggcttgtacttctgccccatgatttttggtatgggcattgtgccagctatttactttagtcgcactaaagagcatggtttacccctgggctatggcattcaactattgatgcattcgcattgcctgatcttgaccattatcaccgccataatggtgagctatagtattcgttccgcctttgtcataatgctctgcatcggcttctacactctgtccgtgctgatcaatttggtaactaaggcacacaaaacaaatttcctgtggctcataccgcactgcatttgccaggtgctgccattcatgttctatacttactgctgctatgccttctatgtggtttttgtgcccatgcagggacgcgagtgtaatacaaatccggagattctaatgggtttctttacggcgctaatggttctactatttgcaccctttctggtgcccttgttctgtctgttccgcaagtccaagacaattatctcaatgtttggcatctgcacgatagtgtttatcatatttgccgcaacaccgattgcctttccttacgccgagaagacggcgccccaaagattcttcgctgtgcacacagcaagaaccttccacaatggcgatccagcgagcacagtgagtcataaggactcgggatactttgtccttccggtcgatcgacgtcctcacaccgtggatgatattctctttgaaaacacaaactttacaaagtcagaacgtattgattgtgactcggagctcatgtgcggatttcccatttacagctcacgctggttaaatgcagttgataacagctattttgttcctggtcccgagccaaatagggaatatattcccactctgactattttggaaaaatcgagtaattcagatacaaatattaggtttgatcttgagatctcaggaccggatcacacgagcatattcattctgcccttaaacgatagcaaattggtggattggtccttcattagggatccgctggatggaaatgtaaagccaccatactacgtgtactggtcatatgcattagatcccaaacccttgcagttttcactggaattcgagcacgaagatccaaattggtcgggaggcactttcaaaatagccctaatgggtcatcgaatacacgatgacatgtatattacggaggatttccgtgagttcctggccacgtttccgccgtgggcgcatgttagctcctggctgggatcctacaatagttggcagctttaagtgtagactcaaagttccttcacgaactcaactcaatcccatttttgccatgacacctcagctactcttaattctggtactgttgatggagtgtaccaattttacctaatccaacgaacaaagtgtcgataagcatggcacgtcctaaattgtattagtatttacgattagaacactgtagttactactttgt

SEQ ID NO: 20004 - protein, 854 aa, DROSOPHILA
MKIIYNRSKIGWYWAPLFVSCWFLLFYLVVIPSFHRMPQLKTLEDERQQPGQFIGERAENTLLRLSKIGPKVVGSAANEQVAVQFLLSEIGDIIDDARTDLYDIEKDVQVASGNYLLWSMVNVYQSIQNVVVKLSPKNATSEAALLINSHFDSVPGSSGAGDAGMMCVIMLEVLRVITKYETPLTYSVVFLFNGAEENPLQGSHAFITQHPWAQNIRAVINLDSAGSGGREILFQSGPDHPWLMKYYGKNIVHPFASTIGEELFQNGFVPSETDYRVFRDYGHIPGLDMAQTLNGYVYHTKYDRFNLIPRRTYQLTGENILALVKALANAEELENPSKYAEGHMIFFDMMGWFFVYYPETTGIIINITVCVLVCVTIVLYIWMMSSSTGMFRRRIWAKFGILAALQLAGVALGIGLVISIALFLDAVNLPMSWFSQNWMLFGLYFCPMIFGMGIVPAIYFSRTKEHGLPLGYGIQLLMHSHCLILTIITAIMVSYSIRSAFVIMLCIGFYTLSVLINLVTKAHKTNFLWLIPHCICQVLPFMFYTYCCYAFYVVFVPMQGRECNTNPEILMGFFTALMVLLFAPFLVPLFCLFRKSKTIISMFGICTIVFIIFAATPIAFPYAEKTAPQRFFAVHTARTFHNGDPASTVSHKDSGYFVLPVDRRPHTVDDILFENTNFTKSERIDCDSELMCGFPIYSSRWLNAVDNSYFVPGPEPNREYIPTLTILEKSSNSDTNIRFDLEISGPDHTSIFILPLNDSKLVDWSFIRDPLDGNVKPPYYVYWSYALDPKPLQFSLEFEHEDPNWSGGTFKIALMGHRIHDDMYITEDFREFLATFPPWAHVSSWLGSYNSWQL

SEQ ID NO: 20005 - DNA, 6724 bp, DROSOPHILA
gaattttctcattgtttgttttctttaccttacttttggtatcaattacaaatctttaatgcctatttgcagtcctacgaatttcacacgcgatccccgaccgccaggtggcgctctagtcgcacaaagttagaaacattcagtttgggatgtttgtatttagcatttgtcctctttctttcgttaccatgttgcttttgcattattatcataactatgatcattctccatcacacacatatactcgtacatatataaatattgctattccagccgatctctagatcggggctaactcgtaaataacgccagcgaaaaatccaaaatgagaacaaacaaggatatttcgaagctctgcggcgagtgttgactttggtgggcactgtacggattggtggtgtcatcgattcctggcggcactgtactcaaacctcaagatcccatcatgcccagataatactaataataataggtattatttatggggcctgcacttcgagccgcttggcaatgatatatattcgactatttaggtgtgtgttttctttttagttgtttctgtcatttgtcttgatctttaattaatagaacacaaaaatatatgtatatatatagatttgctttgttgttgtataaacgtacgtacgtatcgactatgcaacttggcctatgcgcgctacataaagatacaaatgtatgtatccacactaaatatctgtatattcacatataatctttgaatataaccagctcatagcataaaaagactatttcaaatagtttttattactctagcactactttgtcaacgacaacgtcagtatatcaatataggttgctcctaacacactctcaacccccttttgcatcctgtctatgctgcactcctaatatatcatatccttgtttgtaatagtaattaagtgaatgtatttgcttctcgctctccgagcttgttggcctcccgtttgaaatcttgagcacttgccgggtatccccttcactcgaacatggccatcgatgaggtgggcaccacctccagcagcagctgaaagaatagcgtcaccttgtctgcaaacagaagaacgttagcgttatgaattgtaatatgatatcttttagtttactcactcataaatctcggcgtcattccgagcttgacgaacggcacatagaagatcaggcccgcgaatatgaagagcagggcatagagatactcaacgcgcggtgtctcgaatattggtgccgccacgagatacacggagatgaccaagaccacaacgggaatgatgatcggcaccttgtagggccgcggatagttgggtttggtgtagcgcatcacgatcagggccagcatcgctccgccgtagaatatccaggcggtgaagctgaagaaatcaatcagcgaatcaattgtgccatggagcaccattgccgaggcaatcagcgactggagacggggataagtacgcacagagaaagatacagagaaagaggggagtttagaacgaggatcggatcgatacatgggcattcacaggttttgtcaaaaaattaaaatgtggataacaaatggattggcggtagtaaatacaaaaaaaaaaaagtggaatatttgggtctgctaatatgatggcaatatgaagcaattcggggtaagctaactaaattttgggtcaagttttagacacttacgtggaatatcagccccggagcaggtgtaagacgacgcacatggacataggagaggatatccagcagatgaccctctcgactggccgcaaagcacagactgcaatggcagtagaacagatcatagattataatggtggttccgttcccgacacatatagttcagaagttctaaggtcttcctttttagcttcaagtcaatccttaccgcccagctgcgaagagcgttccattggcgctgccaaaggtgctgatggtgacgctgagtggcatcagccaggcgagcgcgcccaggatgcgattgccgaaggtgacggccaccgcctccgactcgatcatctcctgcggcgacatggccgccaggtaggagatgttgatcagcgcatagcagagcgtgaccagcggtatgccgatgatgatcgagcgcggtagattcttgctgggattcttgatctcctcggttacgtagttcaggttgttccagccatcgtaggcccacagacccgtgtagaaggccgtggcgatggcgcccacattgggcattgggccattaaatgcattcgacagatgctgcgtgttgccctgcatcagtttccaggctccgccgcagatcacgaccacaacggccaccagtttggcggcggtgaatacgttctgcacggccattcccaggttgacgctgtagcagttcacgaacaggatcatcactgtacagtggagagggtgaatcattaatattcattggtatgttaaacgatatggtggttatagggatcaataccacatagaatttaaagtaatctatcttattagctcgatagctgtggtagtgatcccctttcctccgatgttaccgcttcttaccaattgccaccagggcgaccatcttgaccacacccctgggcggatcgcattccgtcacaaaggcctcaacggcgtactgtgcaaatgataagcatattatagccatttgagatggcttcaacaccaaagtcgatacccatgagaacagaaacgccggcgccggtccataggcatccataaagtaggcccattccgcccccgacgacgtgttcatcgtgccaagttcagcgtatgccagagcgcctgaaagtgggcaatcaaggataattagacaaagttacaaaggataagcatctataagtaaaaactatatatgtaaggatgaggcatattagtattaagttgctaagtataagtatcttatatttgaccaatcaatcaactttaattttacatttacttttgaaaacgagtaatcaaccaatgcgatgattatcattggtaatcatagaaagaaatagatctttatattttttttctttttatgattttaaaactagaatgcactttttccgagtgtatagtgcacgcgattggaaggtgtgagattccgcgaaagtttggctcctcgccagccgtgcaacaagttgtgacgagagtgcagggtcgaattttgggacttggccacttgacgtcgttaagtgggtcagttgcacgtggcgcacatttcgggcaggaggggattttatggttctggtgactacttacccagcagagagagcacaccacaggcaagccagattataaagctaactccaacggaaccagtgcgaaccagtaaaccggagggtgacacaaaaattccagaccctgtggattgacaaaagggagaagatatagatacagaatatagatatagatatatgtagctgcgaatatagatatatgttgatataagtaaaatgctgccacagctgcgcttcggaaaaaacagctgattaagggcccacattgttttccctactttccccatcgtttcgatttcccgtatgctaatgagcggctggcggggctctacatagtacatatataccatttgagtgggcgttgcggacgtcatcagtgggcggacaaaagtttcggcgaaagctccgaccacgcggcgaatgcgcaataccggcaaatagtggtttttccttgcagagaaactcacacagaggttgtatgaggccggcgaagcggtatggaaaaaatatatgaagttcgttggatattcgatccagaggcgtgcaacaatttcggctgcgtgccacaagctggcgccattgcctaaggtcaaagtgcagcagcgacaacagacgccattcgtgtcataaatatgtatttcaatacagcccagttttgaagccaaatacagcagcgtcccaatttgtagtgataactgggcagaaagtataattgccaatactacgcttttatataaagtgatctattttgaattacatatatttgtgctattaattaattaatttcttgttttataaagattcaaacaagagatgttctttttaccaaacactaaaatatacaaatatactttgatatattactgtgattgaccaccgctgtatggggtccaattttctagggctgcccttttcgccccctaaaaatatgcctggaaattggccttaatccacgccatcctccgcactcctcccaccagccgtctgatggcactttcattctcaggccgcttgcgtacccatctacatatatatccatacagacagacaatacatacatacacatatatatatataggtgggcctaaagctgtgtatatgtatatgtactatgtgcatatacagtataattcgcttagctgcatcgatagttagctgcatcggcaagatatctgcattatttttccatttttttgtgtgaatagaaaatagaaaatagaaaaaaaaaaattaagttagctgcatttttaagttacctgcatcgaggcattgtgcaaagtactcgaggcagctaagcgaattatactgtagctaaatttatgcgtacgtatttttggccatgcgcgtctccaatttgaaccaaaaaaaaaaggcaaggaaaataaaccgaatgaaaattgtgcctcaatatttttcaccgactcccagagcgaaagatgtattaaaaaaaaaaaacaagaacgaacggaacagcaaatttgacacaatccgtggaaaactgcgtgttcgtgtgtttttttgggcgacactttggattttctcttttcccgtcgcttcgacattcctgcctcatgttttatgcatttgttttgacaattgctttggagcgaagcatccccgaatggattgtacactcacctatcatagttccaacaattaaagccaccccactgaagaggcccagcctgaaatgacaaaaaaaaagagaataatattgtaaattcaacgaaattatcaaataaattaaaaatactgctttttggggtagatttttaaggtaaagacatgatttcatcactcgaatctgcatgttaaagtcaaaagtcgataaatattgacggatggatgtcaaaaatagatccgtgtacttgttaattttgagtatgttaagtaaatcacttaattgacagcaaggtgtaaatcaagtgaatagcgcgtttttagccaagtaaatagaaactgtttacgtctacactgaaaacatttggtatttacaacaaggctagaaatggcactttgtcttgtttgctttaatatgagttttgatcattaaagtaagccaagtggcttgtcatttataacttatgttaacaagctaaaaaataaatgaataaatgaataaataattcaataaaaatgaataaactacttgaaaattgaattttaagcctacattttgacatttaaatactcagaagagcaatcgccttcatttttggaatcaattgagtagcattaatgtcctatcctaacaacctgaccatttcgagtacacgattctggtcctgctgcactgaggcaatcgttaccttctctcgaggtgaacaacgtggttctgcgttgagccattcctctccagcggcttccgcatccgcccggtccctgatgagtcggtctctggcgcttcgggcccttctgtcccaagagacccattggcgcacatggtcccgttgctcgttgtttttgttggcacattatgtcctgcaggatcagcaacatcaccatatcaccgcgaaggatagcaaaaaaagagagagcagaacacagggattagcattaatcgtagcactaaaaaaaaagtatcacacgcatagatatgagtatttcgatgccagaagggcacgttttttttttgacgtgtagacagagtttatgaatggacttcacacaacacacgcacacatacacacacaagcacacacacacacacacctctgttattatctgttgaattatttttgcatgcgttcttttgcaagcaaaatagttgtgatattttatcgcgcatggcatggacggataacaagttgctaaaattatttcgccgcgaaattcagctctcagcgaatacgaatatatatgaagaaatatatatatatatatatttatatatatagttaagaatatatatataaatgttctgaaaggagtgcgggccaaaaaaaagtgtagcgcagtgggcggcgaatcgcaggcaactgttcgcatcccaaatggcagcggcgtcaaatagtccgcccggtgaaagctttccgccgagagccacatgagcgccacacgagtgccacacgaacgccacacgagcgccacacgagtgccacacgagcggcagccgagcgccggaaaaacagccgaacagacgaaaagcgagaaaaacgaccggcgttgggagaataactaaccactttctccaaacgagattgcgttcgagattcgagatgagttcgactggtttgggcctttggccgtctcttatatcacactcatcgaggataataatagtgctcgaaggacgaacttaacgatatctagacgtaaatgcttttgataacaggataaaatatcacactaaagaatagtattttaggtaaagggggtttttgagatttatatcgaggctaacaacaatagagaagtgcaggccaactttcttatcgatggaggatgtagcagtaatgtcacgaaaatattattgtacaaaa

SEQ ID NO: 20006 - DNA, 1551 bp, DROSOPHILA
ggacataatgtgccaacaaaaacaacgagcaacgggaccatgtgcgccaatgggtctcttgggacagaagggcccgaagcgccagagaccgactcatcagggaccgggcggatgcggaagccgctggagaggaatggctcaacgcagaaccacgttgttcacctcgagagaaggctgggcctcttcagtggggtggctttaattgttggaactatgatagggtctggaatttttgtgtcaccctccggtttactggttcgcactggttccgttggagttagctttataatctggcttgcctgtggtgtgctctctctgctgggcgctctggcatacgctgaacttggcacgatgaacacgtcgtcgggggcggaatgggcctactttatggatgcctatggaccggcgccggcgtttctgttctcatgggtatcgactttggtgttgaagccatctcaaatggctataatatgcttatcatttgcacagtacgccgttgaggcctttgtgacggaatgcgatccgcccaggggtgtggtcaagatggtcgccctggtggcaattgtgatgatcctgttcgtgaactgctacagcgtcaacctgggaatggccgtgcagaacgtattcaccgccgccaaactggtggccgttgtggtcgtgatctgcggcggagcctggaaactgatgcagggcaacacgcagcatctgtcgaatgcatttaatggcccaatgcccaatgtgggcgccatcgccacggccttctacacgggtctgtgggcctacgatggctggaacaacctgaactacgtaaccgaggagatcaagaatcccagcaagaatctaccgcgctcgatcatcatcggcataccgctggtcacgctctgctatgcgctgatcaacatctcctacctggcggccatgtcgccgcaggagatgatcgagtcggaggcggtggccgtcaccttcggcaatcgcatcctgggcgcgctcgcctggctgatgccactcagcgtcaccatcagcacctttggcagcgccaatggaacgctcttcgcagctgggcgtctgtgctttgcggccagtcgagagggtcatctgctggatatcctctcctatgtccatgtgcgtcgtcttacacctgctccggggctgatattccactcgctgattgcctcggcaatggtgctccatggcacaattgattcgctgattgatttcttcagcttcaccgcctggatattctacggcggagcgatgctggccctgatcgtgatgcgctacaccaaacccaactatccgcggccctacaaggtgccgatcatcattcccgttgtggtcttggtcatctccgtgtatctcgtggcggcaccaatattcgagacaccgcgcgttgagtatctctatgccctgctcttcatattcgcgggcctgatcttctatgtgccgttcgtcaagctcggaatgacgccgagatttatgaacaaggtgacgctattctttcagctgctgctggaggtggtgcccacctcatcgatggccatgttcgagtga

SEQ ID NO: 20007 - protein, 445 aa, DROSOPHILA
MIGSGIFVSPSGLLVRTGSVGVSFIIWLACGVLSLLGALAYAELGTMNTSSGAEWAYFMDAYGPAPAFLFSWVSTLVLKPSQMAIICLSFAQYAVEAFVTECDPPRGVVKMVALVAIVMILFVNCYSVNLGMAVQNVFTAAKLVAVVVVICGGAWKLMQGNTQHLSNAFNGPMPNVGAIATAFYTGLWAYDGWNNLNYVTEEIKNPSKNLPRSIIIGIPLVTLCYALINISYLAAMSPQEMIESEAVAVTFGNRILGALAWLMPLSVTISTFGSANGTLFAAGRLCFAASREGHLLDILSYVHVRRLTPAPGLIFHSLIASAMVLHGTIDSLIDFFSFTAWIFYGGAMLALIVMRYTKPNYPRPYKVPIIIPVVVLVISVYLVAAPIFETPRVEYLYALLFIFAGLIFYVPFVKLGMTPRFMNKVTLFFQLLLEVVPTSSMAMFE

SEQ ID NO: 20008 - DNA, 3758 bp, DROSOPHILA
attctaacacaactacgaagcaaatagcgaaagcgaatatatactaatcctaaaagttaagataaagaatgcaggtgcaatgaggtagcaacgaaacgaaacaaaatccaagaaatcgactatgcttgatatgtatccggataacacgaaagcgcacatcaaacacgactaataatatattaaatatttttgttacttgcgaacaatattatttcatttatgaatattatcttttgtttgtcatcaatatttattattttacttagttcgtatgcatacgaacgttctgcacatttatttgaatattattatttgatacataaataaactatattttgtgttgtacaattttatatgcagtaaacatttttagtaaataaagaagtcaaatcaaaaaacttgtacttgtttgtatacaatatcgatggaaataaaaccgacgatttggctcttgaatacatggcccatacaaaaataaaacacttgtagaggtgcagagaagccaagtgtagcaaaaccttttcatactgttacgtttttgtttaaattcgttacatgagtatacatacttcataacatacaatattttcatatttcatagtttggacttgctgatcgatgtgtaacgccaactttaaattgttagctactagcgttacaatcaactaacttttaactctagattatataccgatattgcatagtcacttaatttgaatagtttgaaaagctatatgaacattaaatgcatatgttaagtatgttaatagtttacgtatttactatgaaaaaccttcaacagtaagtttttatagttggcatcgagataatttccatttgtacaacttatcccatatgagatcagcaatataatatgcttaacaactgaatatacaatatttgtttaaaaatagcaacaaaactcgtagatacattttgtaaagttattgtgtacaatattgcttggctaggtaacttttatatatttctcacataccatttaagtggctagactgtccacctggacttccatcagctcttgcacaatgcgatactcatgacagtcggagcacagtaggcgaccattcgaacggtttgagcgctgcgccttctcatgacagacaatgtgcactagtttgagattctttagggagaatatttctagaaagtactccagtactgagatatcgaccacttgcttcttatgaattgaacacttggtctgcggatgactcacaagttcttccacatttgcaacaagtgcgggaaggattgtgcggcacagttcgatttggtggtccagattccagacctgaaacaaaatgagattctcacgcgaagcgtacggattaatagtgtgctgcttagagcagctgttgccattctccgaataggagccctggcaatagaagtcacccaagtcggagcacaaggaagtggaccattcgtcgaggatgcagttttccttggtgtactccctaatcacctgcctcagtctcttgctgggtatcctgccagcgtctgtttcctcgtcgcccaagtgctgcttcaggaattcatgcttttgcttgcaattccggtcaaacatcatggagaaaaagtcgcaaccgatgagcaggtatcgaaacttctccagcacagagtttatcacttgtcgggccttggcattttggcggtacaagggattgcgggtcagctcctccttggccttatagtagtagcctcgcacacgtgtctgggcacgtgtggccatagcttcctccttagagtggaagcgctcctcgccgcccgtgaaccactccacgtgctcggcctttaagctgaggtgggtcttgctgttatccaggacgcgtcgctgcttttggtgttcatactccgttatcatgcggcggaacttttccggatgctgttcgataaaatcgtagaaaatgtcagccacctttagcaaaggcgattgttgtcgcatcttctcaaactcaaaatcggcatctaatagaagacagattaattgtgattaagttaaatatttaaactgcagctcacctgttgtaatgactgcatccgggccagacactatgaacagcgtctgggcgggtaggctttttaagtactcatcgtcggacacctcgaagccatcagaagccaaatacaaatgtggctcgagaagctaaaaggtaaaaaaaaaacgatttaattgtaatgcccttgacatggccgaattataacgaggccaggtcgcccaattcctggttcaggggccttcagtttgtttcacatttctctttttttttttttgccaggcaaggacgttccatcaacaggtggttagctctactatacaggacatgcgcattggcatttactagtggcattgaaagagagccaaacaaacgcggaagccactgccagggacatggccttgaaaattaccagagccaggaactttcagcccatctacgtgggtgggtgtatatttcgcgcttttacgcaggagtttttcctgttttttttttcttaccgggaacttgctttttgccttggctatcagcatttccagggaattggctccgattccgtatttcctcgttcgctcgttgtcagtaaccttgtagccacgcattggagcacctgctgttcccctggattcggatgagctcacatccttgagaacttcgcctgttggctggctgcttttcttgttattcgagctgctgcgtgttgtcggtgacatgattgcatctctaatgtagctgatcatcgttctggctcataataaagtcaactttggaatgtagtcctcgcagcaagtttccttatccgcggacaaagcaaaataaactagcagaacaaggcatttttcgcgcttctcaacactagattctcattgaaagattctttagttgtgctgcaattttagctaaaaattgcaaaaagctatataataataatttattttttcccgtgttttgtaattaacgaaatattttttatatttttattaatcaattcaaattgataaaattttcatttattcttaaattaaataatgtgtaaattaataaaatgaaaatagccaaattaataaaatacaagttgaacggcgcatttcccaccactattgccttcagtgttttgcagcacttatgcatctaaaaacagctgttcgggtaatcattttttttgttaaaagtttctgtggaaaaactataacaaacgtagtcttagtgtacaatgatctgggctacgggctccgcgtaatccgcagctcacccggaaaggcgttttacgatgaatctacggccgcgatgccgcaagtggctgcccctagccacccagcaacttcgactgcggaaccttaacagaattcagggattcaatattgagtcctggccgcatgagaagtcgctggagctagatgatccggatgatgtgctcctctactacacactacacacggacaaggctagcgaagcgttctacaccagcgaaaagctgccgcagcgtcaccaacagcaaaagtgggcggagatttgtacggacgacgaggcctggcggaaaaccaatgcgcagtgtgtctgtgtcaaggtgtggaagcactattcggcggaaagaagagatggccaaccgcctgaggttgagcaaagacataaggatgttttcgggtaaataggagactttgcttgcaaatagaactctgctatcatcaaccaacttacttccagaagatcccagttaacgcccagcaggctgccacgccc

SEQ ID NO: 20009 - DNA, 1353 bp, DROSOPHILA
atgatcagctacattagagatgcaatcatgtcaccgacaacacgcagcagctcgaataacaagaaaagcagccagccaacaggcgaagttctcaaggatgtgagctcatccgaatccaggggaacagcaggtgctccaatgcgtggctacaaggttactgacaacgagcgaacgaggaaatacggaatcggagccaattccctggaaatgctgatagccaaggcaaaaagcaagttcccgcttctcgagccacatttgtatttggcttctgatggcttcgaggtgtccgacgatgagtacttaaaaagcctacccgcccagacgctgttcatagtgtctggcccggatgcagtcattacaacagatgccgattttgagtttgagaagatgcgacaacaatcgcctttgctaaaggtggctgacattttctacgattttatcgaacagcatccggaaaagttccgccgcatgataacggagtatgaacaccaaaagcagcgacgcgtcctggataacagcaagacccacctcagcttaaaggccgagcacgtggagtggttcacgggcggcgaggagcgcttccactctaaggaggaagctatggccacacgtgcccagacacgtgtgcgaggctactactataaggccaaggaggagctgacccgcaatcccttgtaccgccaaaatgccaaggcccgacaagtgataaactctgtgctggagaagtttcgatacctgctcatcggttgcgactttttctccatgatgtttgaccggaattgcaagcaaaagcatgaattcctgaagcagcacttgggcgacgaggaaacagacgctggcaggatacccagcaagagactgaggcaggtgattagggagtacaccaaggaaaactgcatcctcgacgaatggtccacttccttgtgctccgacttgggtgacttctattgccagggctcctattcggagaatggcaacagctgctctaagcagcacactattaatccgtacgcttcgcgtgagaatctcattttgtttcaggtctggaatctggaccaccaaatcgaactgtgccgcacaatccttcccgcacttgttgcaaatgtggaagaacttgtgagtcatccgcagaccaagtgttcaattcataagaagcaagtggtcgatatctcagtactggagtactttctagaaatattctccctaaagaatctcaaactagtgcacattgtctgtcatgagaaggcgcagcgctcaaaccgttcgaatggtcgcctactgtgctccgactgtcatgagtatcgcattgtgcaagagctgatggaagtccaggtggacagtctagccacttaa

SEQ ID NO: 20010 - protein, 450 aa, DROSOPHILA
MISYIRDAIMSPTTRSSSNNKKSSQPTGEVLKDVSSSESRGTAGAPMRGYKVTDNERTRKYGIGANSLEMLIAKAKSKFPLLEPHLYLASDGFEVSDDEYLKSLPAQTLFIVSGPDAVITTDADFEFEKMRQQSPLLKVADIFYDFIEQHPEKFRRMITEYEHQKQRRVLDNSKTHLSLKAEHVEWFTGGEERFHSKEEAMATRAQTRVRGYYYKAKEELTRNPLYRQNAKARQVINSVLEKFRYLLIGCDFFSMMFDRNCKQKHEFLKQHLGDEETDAGRIPSKRLRQVIREYTKENCILDEWSTSLCSDLGDFYCQGSYSENGNSCSKQHTINPYASRENLILFQVWNLDHQIELCRTILPALVANVEELVSHPQTKCSIHKKQVVDISVLEYFLEIFSLKNLKLVHIVCHEKAQRSNRSNGRLLCSDCHEYRIVQELMEVQVDSLAT

SEQ ID NO: 20011 - DNA, 3411 bp, DROSOPHILA
ccgtcgacaattcggacgacgaggaaagcttcgatccgatcgaccgattcctacgtccgcgcgttaaggcgatctccccgttggccaaatcccccgcattgtctctacactcggccacctcggaccatggatacgagtccatactgggctctcccacatccgtggctctcactctgcccgcagatgaggacgatttcccctgggagagcaactttgacgagctgtttcccagtttgatctgagtttttcaagctgaaaacttcgttctgtctctcttttattgttaagtttggccggccgccgtttgtttaagttttttagttgataggctgtacataaattcataatcgaaggctttatatatgatactgtagttagagcgctaagtttagctgtaggtttccatttatatttaacaatctctaaccacataggcttatgattactcttatatgtatgtattgtgctcaaagaatttgaaaaaaaaacatttgactaaaaaatattcaaaatataaaccaaaccaaacaacaagctctttgtttttgtttactctaggcgaaacagaactttgaactgcgtatgataaatagttaatcacgccacttctctagcatcacgccacttttttatgacgcaatttctgcgtagatgatgggacagttttaggtgtaagcatatgagtcattttgtttttattaaccaaatatatatatattacaaaaagtgagttgaactgactgcagataatgcggataggtgaaataaaaccacaactatgctctgaaatatatgcaccttatttattagtatattattcattaataagacgaaatacagctctgtttttctccaaactgaactaggatttaaacaagattttgctaagctcgaaaaatatattttttaaagaatataaatagagccaccctaatgcgccagcaaaagcgaatttgtttcggaactagttcgaaaaagttgtttatagacttgaaccagtttttgcttacgaaccacatacctgtgattttgcagaaagataaacaatttttaaatgcaatagagtgtacggttaaacagaaatgacggaaccaacgagcaagacaccggatgcggttccggaatcacccgtatcactgcccatcgcctcccaatccatggatacggcgaccattgaagatttcgacgaggacaaaccggccaagggaaagaagaaagccaagaatccaaagggtcgccactcggattccgacatcggctccgaactgaagaagctggcccagcgccggatcaacgtagccggtgctccaaaaatgccacttaatggctacgtccgcttcatgaacgatcgacgcgaggaactgcgacgggagcagccacaacgtactgccctggagcacacaaggatcatcggcgaggagtggcatcagctgcccgaggagcgcaagttgccctacatcgaggcagccgccaaggacaaggccatgtaagctcacacttcgtttccaacccacaaaatctaaacatatcttcccattttcgtagatatcaggagcagttgcaaatgtttctcaaggaacaccccgaaattgtggccaacgagttggccaaagccaagaaagccacaaaactggatggttcgcccaaggaaaagacgccgaagggtgaatcagccttgggcaaggcgaagaagaccaaggcaaagccggttaagcggcagagcgaggatccggatgatgtgcctctggccaaggtgaagcgtgcccagacaccaccgcctcccacaccgccagcggctccagtacagccccctcccagcagcgtgccacctgcgacacctgcaccacgaccgctgcagcccggcgagatacccatctacaccaacgagttcatcgaacacaatcgcagcacggagaatgagctgaggacgctgcgcaaggccaagaccgatctggagcagcagaacgctgtgctggaacagcacgtagataatacgaaagccgggtacgccaaggtgatgggcgaggtaactgagctcatggaggagaaccaacgcctggagacctatttgcgcgccttgcgccagaaactggtcgcagctctcggcggaatctcgatgccaccactggagccaagtggtcccagcgttggcaacattgacaagtacatccggcacttagccgggctcgtcactcagccaagcaacgtcactttgattaaggcacgagaggcgctgcgtaaagtggacaccagtagcttgctaaaaccgtgattcatagtacagtattcatagcgttaataacttcaccataaacaatagtcatagtcatagaacaatagttatcaatgccaaggatatcaaaagagaaaaccgaataacaataaaatatccgcagcatttgtatgtagccaagttttgggagcgcccacttttgtatttgttaacgtctgtaagttaggagactactcgtatgtacccaagaatatcctcatttttagttgtccttgggagcgtcaacgccgagagcgaggctgcgatgagagggaaaacgtggcactttacgtggtcctgccgtgatcagtccggcatcgccatccacggaactctgcagccttggcgccttggtccgacgattcaaacagttgcgtagaatatagtagcctcccagcatcaggggaatcaccattaccgggtgacacgctatcccaagcacaaacagaaatgtggacatcatcaggttgattagggcctctgtggatcgggtcgtgccgattgagtaaggcgaacatggtcgtgagcgatacacttacgttcaatgctcgaaatggtggccactgttgtgtagatcgcatacgaaatggcttcaagcacactataaatatagtagatcagcattttggatttgttgaatttcctggtggaactgaactgctaaagcgattcgggcaactgggaaaagtcaaaaagtacaactgaagcaaaggttcctacgactatgaaacaataagaaaaactaaattaactaaattaatcaaaatagaatttatacttgcttctcgcagcgaaaggtttctttattattaaacaaaatagtcgacgtttcacttcgcgtaaataaactaaagcgtttctcttagttgttttcgattttttgtttcttaggaacagcagaactaaacaaaaataaattaaaacttaaaagaaaatcgtttttcgtttgatgtttgttttcaaaaagtataggttctaaattatagcatacatttaaggttttataacaaaaataatttaatgagataataaatcaagggcgcagacttcaaaaatattccattgaatcgttgggcaagaggcagaggtcgtgcaaaactcctggcatctccccaagatcatggccatcacttcggttg

SEQ ID NO: 20012 - DNA, 1352 bp, DROSOPHILA
ttttgcttacgaaccacatacctgtgattttgcagaaagataaacaatttttaaatgcaatagagtgtacggttaaacagaaatgacggaaccaacgagcaagacaccggatgcggttccggaatcacccgtatcactgcccatcgcctcccaatccatggatacggcgaccattgaagatttcgacgaggacaaaccggccaagggaaagaagaaagccaagaatccaaagggtcgccactcggattccgacatcggctccgaactgaagaagctggcccagcgccggatcaacgtagccggtgctccaaaaatgccacttaatggctacgtccgcttcatgaacgatcgacgcgaggaactgcgacgggagcagccacaacgtactgccctggagcacacaaggatcatcggcgaggagtggcatcagctgcccgaggagcgcaagttgccctacatcgaggcagccgccaaggacaaggccatatatcaggagcagttgcaaatgtttctcaaggaacaccccgaaattgtggccaacgagttggccaaagccaagaaagccacaaaactggatggttcgcccaaggaaaagacgccgaagggtgaatcagccttgggcaaggcgaagaagaccaaggcaaagccggttaagcggcagagcgaggatccggatgatgtgcctctggccaaggtgaagcgtgcccagacaccaccgcctcccacaccgccagcggctccagtacagccccctcccagcagcgtgccacctgcgacacctgcaccacgaccgctgcagcccggcgagatacccatctacaccaacgagttcatcgaacacaatcgcagcacggagaatgagctgaggacgctgcgcaaggccaagaccgatctggagcagcagaacgctgtgctggaacagcacgtagataatacgaaagccgggtacgccaaggtgatgggcgaggtaactgagctcatggaggagaaccaacgcctggagacctatttgcgcgccttgcgccagaaactggtcgcagctctcggcggaatctcgatgccaccactggagccaagtggtcccagcgttggcaacattgacaagtacatccggcacttagccgggctcgtcactcagccaagcaacgtcactttgattaaggcacgagaggcgctgcgtaaagtggacaccagtagcttgctaaaaccgtgattcatagtacagtattcatagcgttaataacttcaccataaacaatagtcatagtcatagaacaatagttatcaatgccaaggatatcaaaagagaaaaccgaataacaataaaatatccgcagcatttgtatgtagcc

SEQ ID NO: 20013 - protein, 376 aa, DROSOPHILA
MTEPTSKTPDAVPESPVSLPIASQSMDTATIEDFDEDKPAKGKKKAKNPKGRHSDSDIGSELKKLAQRRINVAGAPKMPLNGYVRFMNDRREELRREQPQRTALEHTRIIGEEWHQLPEERKLPYIEAAAKDKAIYQEQLQMFLKEHPEIVANELAKAKKATKLDGSPKEKTPKGESALGKAKKTKAKPVKRQSEDPDDVPLAKVKRAQTPPPPTPPAAPVQPPPSSVPPATPAPRPLQPGEIPIYTNEFIEHNRSTENELRTLRKAKTDLEQQNAVLEQHVDNTKAGYAKVMGEVTELMEENQRLETYLRALRQKLVAALGGISMPPLEPSGPSVGNIDKYIRHLAGLVTQPSNVTLIKAREALRKVDTSSLLKP

SEQ ID NO: 20014 - DNA, 4750 bp, DROSOPHILA
gtttggcttgcgtatttccggcatttctgtatttctcgaaaataacatcttttctttttgtaagatgataaaaaggttaggatgttaaaggtggtcgtggtcccacgatgaaagaagacatttttattagtagtttataattcgtatatttatttcgataatacacctattatgaatacagttcgcatctttgattgtttgtattaatttgctttggtacagttagggactttttcttatcagtatgctatttattaaaagtaatgaaaaacttgttacgatactttagatttggataaaaaccagaattaattataacagacattctaaaaaaataatcactgatacatacatacgttttaaaagattgcattcgtataaatattcgagcattagaagtagaatactgtcggaatggaattagtcgaattaacatacagataaggaaacgtccctaatgactatactaatacaaagttcagtggagatttcgctcttttcaagggcgcctcaaacattgttcctaacactctggtcagaattcaacaataaaattagagaatacatttgaaaacaaacaaataattgattcaaataatgttcagcaattacgatacgttaaatttgtcgttttcaaagtgaatgctttggtttcttatatttttcggtgtttggtttcgcttttataaaggacaactcgaactacggaacaatctgaggctggctgcttccatcgtggctaactattagcatgtgtactaactggtgaatagctgcgctatgctcccacatacaacatcaaccatacccataacaacgcgcttacatatctttggcgagtgaccactacgttcaattgaatcgaaaaaagggaagagacttgtgatgtgtgtaacgtatacaatgtcaaagagctacagttagagagtgtttttcgtgtgtggttttcttaaaacgacgacagattttgtgtttgacccttccgaaccagtccgaggtcctaaacaaccactgctcctgcctccgaacggctaactggtagatcgggacaattcttccaggtgtccgaaagcggatcataacattcgacagcattgatagtcacttgggctcggtagaagtttacctcgcagggctggcagagaagcatacaaaaacaatgattaaattatgaatcaaataaattgaaatatacttgttacctgatcaccgccagctacgtagagcaagccatcggcggcgaccacggcaggaatggctctgggcacgtttaatgcacacactgtagtccacttatcctcgtcgaagctgtagcgttccacggagctgagaatgtcctgactgatgctactgcctccaaccacatacaagtagcgatccagaacggccacacccatttgacagcgagctgtttgcatgcgggccagctcgttccactcttttgtcactggattgaagctgcaatggatttttataaaaatatataactacgaatataaatattttttgttaaatacctgattaaatccggcagatgacgggttgttgttgtgcagccaccgacaatgtaaatgagaccctcgaaactgaccacacccatgctgaatctaggctgcggcatgctgcccattaatttccagagatcctgctccggatcatagcactccatggagccgccgatgtcgtcgcctatccaaccgcctacggcaaacagatttccgcccatggtgcaaagaccgaactcgcagcgcggcacaatcatcggggcaatcggttgccaaacatcgttctgtggatcatagacctcgccattggccagaatctgtgaaccgcgctctcctcctaccacatagatcttgccattcaatgctgatacacctggcaggatgcgtcccacctccataggcgccgtttccgtccactcgcgccggaatatatcgaatttggccaccgtctcgaagatgcagtcggccgagttccaggttcgcggcgtatcccgatgagatccaccaatgatatatatgttcttcttggccagctgacgcggacatacccgcagcggcaccaattgtccgcgcttggacgcaatgtcccggcaaatggagcgcagggctatcttcacggacatgtcgcgacagtcgtccttcagagccttgtcgatcacctttaccggaacaagcgccatgcgcacgtgggacaggacatcgaagacgtagcagcggcgctgcgtcacgtcgtgcttaatccaacgaagcgccgcctggaacacctgcgactcggagtctacacgcagcagctccgagttcagtagctgcgagagtagagtttgtggcgtttctaggaactcatcttcaagcgttacctgaacgaagaaaggaaagtaccaatcagttaaaatagaaatatatatttttgccaaatgctcaaatttaaacgataaattattaggttcaaggcagaaatgaaaataactttaaatattattattttgatattttttatcgtttatctcgttgaatattttcgtttccaataaatatagaacattgcttgactatttccatgacccacttttcgtttgggcggtacacctacaaatcaagcctttcaagtgcatccaactcaccgctgggaaattcgcgtggacaaagttcagtgcactcttggccaacgactcgcagttgtgggcctcggcgaagcgtaaaatgcccagggcattggaggcgtgcagctcgcggcagaggaactcgcagcacccgtcgaccacctcgtttagctgcagcatgtcggcggcggccaggagctcctggacattggactgtaagatcaaagaagggattagaatttggagaccaagcgactaggtgtatggactcacctgggtgatttcgcagcgacccgtatagatgaagtcaagcaggatgtgcaggatatcgccgtcgattgtgtgcagcacaacggatttttgcttgacctcatttaacccgagctcgggtcgaaacatggcctcgaagtaggcactggctgcactcaggacagcccggtgggcactcaatgttgccattccggcgatgatctccacgtcgcagaaacgggactgctcgcgcagttggttgagattggaaagcaccttgaacggatattgggcgttgcagtaggagggcaggtttgtgcgatggctggccgctgtggctccagatcccagattttggccaaagaagtcaccgtcgccgccgccgccggtgggattctgattggcgttctgattggcattcgcattcggactggtattgccattgtattcgtgtatctggtatgttttcaacggtggcatttcgtcaactgttgggtttttacttttcggcgatcttgaatccgatatcgccttaataaatgcacttttcgggggcgacagcacagctcagactcttcgcattcaattgtttggcttaattaaacttaattgctgcactctgcgctcacttcaccctttgttgttgctgctgctgctgttgttgttgtcgcagtccgtttatttttctccaatcaaaaggcgagcacacacacccacacacgcaatacaaacgactgcaggcaaaaggttagcatatcacaaattaaaacaaccgaagtccgctactaagacagctatttccccattaagatgaaatagtgtttttaatatttacaaactggcatatttctttgacttttcaatgcactttagtatgtagctggaactggagtcgatgtttttgggcgactatcgatgttgatagaagttgcactatgcctgaatatcgataagttcagtttttatccagaacttattgatagtaatcgctgctatcatctttggtccacctcttgttgttatttaattatttgtattttattttcaatgaattttcaatgaaaagctgacaaaatgatatcgcgcaaactactaaaccttcgactgggttacctggcacgccgttgggccagcacggatccgctgagcattcagaacgagaagctgcaggcttatttggagtctctacgccaggaatactacgccgtgcgagtcaacgccgccggaaacagcaaatcctacgcccgtctcgcccagctggagggcgtggtcagtgccctggagcagcgacgcgtactagaacggcacatcaccagcgccaaggacatggaagcggagaaggacgaggatatgcgtgagctaatgcgcgaggagaacgaagtctatgtggatctactgggcaagcaggatcaggccttactgcaggagctgcttacgctctctgacgatgaggagtatccggctctgatcttcggcctgaatgccggcgccggtggccaggaggcaatgctattcgcccaagaattgtacgaaatgtacaccggctatttcgagcacatgggctgggagtgggaggagtttgccagcgagggcaccgacatcgggggtctgcggcacgctagtctgatggtgagcggcgaggatgccttccgctggctgcgctatgaggctggagttcaccgcgtacagcgggtgccggccactgaaaagtctggacgcatgcacaccagcaccgcctcaattacagtgattccccgacccgccgacatccaagtgcacatcgctgagaaggatctgaagatcgagacgaagcgagcgagtggagctggtggacagcatgttaacaccaccgactcggctgtaagaattgttcatctgcccacgggtctggcggtg

SEQ ID NO: 20015 - DNA, 2300 bp, DROSOPHILA
tcgactccagttccagctacatactaaagtgcattgaaaagtcaaagaaatatgccagtttgtaaatattaaaaacactatttcatcttaatggggaaatagctgtcttagtagcggacttcggttgttttaatttgtgatatgctaaccttttgcctgcagtcgtttgtattgcgtgtgtgggtgtgtgtgctcgccttttgattggagaaaaataaacggactgcgacaacaacaacagcagcagcagcaacaacaaagggtgaagtgagcgcagagtgcagcaattaagtttaattaagccaaacaattgaatgcgaagagtctgagctgtgctgtcgcccccgaaaagtgcatttattaaggcgatatcggattcaagatcgccgaaaagtaaaaacccaacagttgacgaaatgccaccgttgaaaacataccagatacacgaatacaatggcaataccagtccgaatgcgaatgccaatcagaacgccaatcagaatcccaccggcggcggcggcgacggtgacttctttggccaaaatctgggatctggagccacagcggccagccatcgcacaaacctgccctcctactgcaacgcccaatatccgttcaaggtgctttccaatctcaaccaactgcgcgagcagtcccgtttctgcgacgtggagatcatcgccggaatggcaacattgagtgcccaccgggctgtcctgagtgcagccagtgcctacttcgaggccatgtttcgacccgagctcgggttaaatgaggtcaagcaaaaatccgttgtgctgcacacaatcgacggcgatatcctgcacatcctgcttgacttcatctatacgggtcgctgcgaaatcacccagtccaatgtccaggagctcctggccgccgccgacatgctgcagctaaacgaggtggtcgacgggtgctgcgagttcctctgccgcgagctgcacgcctccaatgccctgggcattttacgcttcgccgaggcccacaactgcgagtcgttggccaagagtgcactgaactttgtccacgcgaatttcccagcggtaacgcttgaagatgagttcctagaaacgccacaaactctactctcgcagctactgaactcggagctgctgcgtgtagactccgagtcgcaggtgttccaggcggcgcttcgttggattaagcacgacgtgacgcagcgccgctgctacgtcttcgatgtcctgtcccacgtgcgcatggcgcttgttccggtaaaggtgatcgacaaggctctgaaggacgactgtcgcgacatgtccgtgaagatagccctgcgctccatttgccgggacattgcgtccaagcgcggacaattggtgccgctgcgggtatgtccgcgtcagctggccaagaagaacatatatatcattggtggatctcatcgggatacgccgcgaacctggaactcggccgactgcatcttcgagacggtggccaaattcgatatattccggcgcgagtggacggaaacggcgcctatggaggtgggacgcatcctgccaggtgtatcagcattgaatggcaagatctatgtggtaggaggagagcgcggttcacagattctggccaatggcgaggtctatgatccacagaacgatgtttggcaaccgattgccccgatgattgtgccgcgctgcgagttcggtctttgcaccatgggcggaaatctgtttgccgtaggcggttggataggcgacgacatcggcggctccatggagtgctatgatccggagcaggatctctggaaattaatgggcagcatgccgcagcctagattcagcatgggtgtggtcagtttcgagggtctcatttacattgtcggtggctgcacaacaacaacccgtcatctgccggatttaatcagcttcaatccagtgacaaaagagtggaacgagctggcccgcatgcaaacagctcgctgtcaaatgggtgtggccgttctggatcgctacttgtatgtggttggaggcagtagcatcagtcaggacattctcagctccgtggaacgctacagcttcgacgaggataagtggactacagtgtgtgcattaaacgtgcccagagccattcctgccgtggtcgccgccgatggcttgctctacgtagctggcggtgatcagccctgcgaggtaaacttctaccgagcccaagtgactatcaatgctgtcgaatgttatgatccgctttcggacacctggaagaattgtcccgatctaccagttagccgttcggaggcaggagcagtggttgtttag

SEQ ID NO: 20016 - protein, 627 aa, DROSOPHILA
MPPLKTYQIHEYNGNTSPNANANQNANQNPTGGGGDGDFFGQNLGSGATAASHRTNLPSYCNAQYPFKVLSNLNQLREQSRFCDVEIIAGMATLSAHRAVLSAASAYFEAMFRPELGLNEVKQKSVVLHTIDGDILHILLDFIYTGRCEITQSNVQELLAAADMLQLNEVVDGCCEFLCRELHASNALGILRFAEAHNCESLAKSALNFVHANFPAVTLEDEFLETPQTLLSQLLNSELLRVDSESQVFQAALRWIKHDVTQRRCYVFDVLSHVRMALVPVKVIDKALKDDCRDMSVKIALRSICRDIASKRGQLVPLRVCPRQLAKKNIYIIGGSHRDTPRTWNSADCIFETVAKFDIFRREWTETAPMEVGRILPGVSALNGKIYVVGGERGSQILANGEVYDPQNDVWQPIAPMIVPRCEFGLCTMGGNLFAVGGWIGDDIGGSMECYDPEQDLWKLMGSMPQPRFSMGVVSFEGLIYIVGGCTTTTRHLPDLISFNPVTKEWNELARMQTARCQMGVAVLDRYLYVVGGSSISQDILSSVERYSFDEDKWTTVCALNVPRAIPAVVAADGLLYVAGGDQPCEVNFYRAQVTINAVECYDPLSDTWKNCPDLPVSRSEAGAVVV

SEQ ID NO: 20017 - DNA, 5389 bp, DROSOPHILA
tcctttagtgccttggatactaggcggtgtttctcctgccgctgctcctgttccctacgctgggcgtccaggatttcatcgacggatatctctttgagtggcagtttctgctccttttcacggtccttttacgcatatttaaagggtgttaatcagtcatattgaaaaagtatcgagtaaagcttactatttcgcccagtagcaccacattctccccgcgaatgatgaagactccgcgaggaatgtcgccgtattcgttgcccacatgtatccgctcgatggtgcgttgcagcaccaggttggcgaactggtccacggaccgcaggtatccaatcagagtccgtccgtctctcaaaagtaccatcagtttctctgcaatgcgccggttttcaacgactggccttcctttcattcggatttactcactgtcaacctcttccaggaggtgagccgtgcccgccagcggatttaagtcgtccatgctatgaaaatatgtgggatttagataaataaataaactgaagcaactaaactttggtctaaattttagtatttaatattaatgtaaccctcgctgaagggtttaaaaaaccacaatgctctagaaaaaaatactaaaaatattactacactgttcaacgaaacttataagatattgcttactgaaattgatgtttttagttttaaaatgcatagatattaaatagttattattaattttcaaacagttaaaaataagatttctgctctaacatcaaatatttttacgctgttcacagagttacaaaataaaaagaagttgaccaaaaaaatatcaaaacttgtactcaatccatgcaaatttttcacagccccatcgataacgatggtacaaattctatacctcgatagtaccatcgatagtttgccggcacagggaattgtgaattatcccggaataggcgaataatgaagtaagtggcagaacgggataaatgaaagtactcctttaacaacccagtccacaggctcagcgtggacggcctgttggtgtactttccgtacgagtacatctacccggaacaatatgcctacatgctggaacttaagcgtagcctggacgccaagggccactgcctgttggagatgccctcgggaacgggcaagacggccacgctgctctccctgatcgttgcctacatggtggagcatccggaaacggtgcgcaagctcatctactgctcgcgtactgttccggagatcgagaaagtgatcgccgagctgcagaacctgatggtttactacgagcgccactgccccaatccaccacccttcaccggtctggtgctcagctctaggaagaacatgtgcatccatccggaggtcagtaaggagcgcgagggcaaggccgtggacggtaaatgttacggactcactgccagctacattcgcgaacggcacgagatggacaccgagacgcccatttgtaagactattgttatccatatgtaaccattatttcaactgcgaacttgtaggccagtactttgagggatttagcctggaaggcaaggagtccacattgccggtcggcgtctacagcatcgatgatcttaaggaatacggtcggtcgcgcaactggtgtccctactttttggctcgctatgctgtgagttttttcgtttgaaaatttcaagactagatttgactatatcttgcattctttaccagattgcccatgctcacattgtggtatacagttaccactatctattagatccgaaaattgcccaggtggtatctaaggaaatgagccgcgagtcctgtgtggtctttgatgaggcgcacaacatcgacaacgtttgcatcgattcgatgagtgtgaagatcaacagacgcaccgtggagcgaagcacgaatgctttgaaccatctaactaaactggttcaggagtaagttgttcaggatatgcgactggtttatggccaaaaaaaacattcttaatctacagcattcgcgaagaggacacaaatcgtctgaacgaggagtatcagcgcatggtgcagggtctgaaggatgccagtgtgcagcgcgacacggacatgatcctggccaatccggtcctgccaaacgatgtcctaaccgaggtggtgcccggaaatattaggaacgccgatcatttccttagctttctgcgtcgattcatcgagtatataaagacaagactgcgcgttcatcatgtcgttcaggagtcacctgcgggcttccttaaggatatttcctccaagatttgtatagagagaaagcctctgcgtttttgtgctgagcgcctgtccagtctgctgcgcacgcttgagatcagtgatttgacggagtatggagcccttacactggtgagctttcaaattccatacaaggtaaaagcgatattaatgctctttctattttcagattacacactttgccaccctggtgtccacctacacaaagggcttcacaatcattatagaacccttcgacgataaaacgccgactgtttcgaatcccattttgcactttagttgcctagactcttccattgccatggctccggtattttcgagatttcaaaccgtggtcatcacttctggcacattgtcacccatggacatgtacccgaagatactcgatttcgatccagtggtgatgagcagctttaccatgacactagcccgtccgtgtcttcttcctatggtagttaatctatataatccaacaatcagtcatcacaattatctgaatgtttattccaaacagattgtatcgaagggcaacgaccaggtgaccatttcgtccaagttcgagacgcgagaagacaccgccgtcattcgaaactatggccagcttttggtggaggtggcaaagacagtgcccgacggtattgtatgcttcttcacctcctatttgtacttggagtctgtggtggcctcttggtatgatcagggaatcgtcgataccctgcttcgctacaagcttctattcattgagactcaggacaatgccgagaccagctacgccctgatgaactatgttaaggtaatatacatatatgctttcaattcttagaaaaccacgactggattgctatggcttctaaccaaatgttcttgacacagcagcctcgctctcattatgatccgctcccttggtggttggatcatgttcagaccactagttcgcagggttatctaatattacttgaattatttgacattttttcgacaaaaatccaatgagcatttggataagcatgcatgtgcaaccagtctcaccgcaatgatgttcccattttgtggtttttaaatgttatgtttgctcacagaacggatatttatccccttcgcttgttcgcaaagttgactaaccccaatcaaccctcccatttcgacttgcaggcctgcgattgtggtcgtggagcagtgctgttggctgtggcgcgtggcaaggtctccgagggtgtggatttcgaccatcattatggtcgcgcggtgctcatgttcggcatcccctacgtgtacacgcagtcgcgtattctgaaggcccggttggactacctgcgggatcagtttcagatacgtgagaatgacttcctgaccttcgacgccatgcgtcatgctgcccagtgcgtgggtcgtgcactgcgcggcaagacggactacggcatcatgatcttcgcggacaagcgcttttcgcgccacgacaagaggtcgcgtttgcccaagtggatccaagagcatctggtggacagcttctgcaacctgagcacggaggaggccgtccagctggcccgtcgttggctgcggcgcatggcgcaaccgttcacacgtgaggaccagctgggcatctcgctgctgaccctcgcccagctggagaacatggagcaggagaagctggagcggcaggctcagggcaagcagggcgttggcggcgaggtgcaggagctgtgagatgtggaaggtgctctgccaaccggctctttgtcgactgccttccgggaataactcaacacagcacaagccgtcagctaatgacattgaatgccattaaatgcggatcacaacggcgatgctggaaaatttaaaagtaaaattttttgtttttcggctgccatgcaaatcgaacgtaaatgtccaattaatggctaattaatattatttataatttcgcgggcatgactaacttaactggccgctcaaggcggcgaaagggcgcaagcgcagcgcgagttttgctcttgcagttgtatttgtatctatacctgtgattgtatccggatttgttgagctgcaaatttagaactaagcgatcgtgaagtacactagcacacaaagtatgctaacacaatgtaaaataaagtaaatatttctttaaatatactaggtgttttagttcaactccaaacttatgaatactttaaccgaatcctaaaatctaggacacctagcttaccagaagaatcatgattttatagagtaactttgatgattggcatataatatagtgcggctgtggaaaaatatggttcgttgcatgcaatcgaactgcattttagtcataataattgatgatgcgccttcctggctggatgcccgccgtaattcaatttcaggggctcgcaaacgggctccaaatgaaccgcgatgaccgaacaaatttctgacatgcacgatttagcctgaaaatggcattgttgttgtaaaacgaacgctatcgcctcataattgccaatgacccgtttacgatgccgtccagtcgcagcggggttatcaaattgaaattattgtcaagccggggtccaaagccaggcaccaacgtttccttaatggccgtgttttcttcttatcacttttgcctttcttaattgttatattttggaaatacatatgtttactctgtcagaagttatgccaataaagtatccaaaatgcttgaccgccaaacaagtaaccaaattctgtttcgatttcctggagtcctcggaccaatcagctgtcgagcttaaaacggagccgagagccaaaagctccaaagcccaaagtgcccccacaatagccggagagcaattacagttaacgcaaaatgataaaactgtcgagcattgctcgccctctctctctctctctctctctcgcggcagaactttcgatttttcataataaaaaggttacaactaaatctcaggcggtttagtcggcagataaattcggagcgagcgcgccaaatacaaaagtccgccacgcgttcagagccccaatctcaagtcccatagttcaaacagttccgagcccgtgtcctcgcagagtccaccaatcccagccaaacatcaactccaatcaatcgaacatgaagccccagacaagcgagcaaaatg

SEQ ID NO: 20018 - DNA, 2736 bp, DROSOPHILA
tccacaggctcagcgtggacggcctgttggtgtactttccgtacgagtacatctacccggaacaatatgcctacatgctggaacttaagcgtagcctggacgccaagggccactgcctgttggagatgccctcgggaacgggcaagacggccacgctgctctccctgatcgttgcctacatggtggagcatccggaaacggtgcgcaagctcatctactgctcgcgtactgttccggagatcgagaaagtgatcgccgagctgcagaacctgatggtttactacgagcgccactgccccaatccaccacccttcaccggtctggtgctcagctctaggaagaacatgtgcatccatccggaggtcagtaaggagcgcgagggcaaggccgtggacggtaaatgttacggactcactgccagctacattcgcgaacggcacgagatggacaccgagacgcccatttgccagtactttgagggatttagcctggaaggcaaggagtccacattgccggtcggcgtctacagcatcgatgatcttaaggaatacggtcggtcgcgcaactggtgtccctactttttggctcgctatgctattgcccatgctcacattgtggtatacagttaccactatctattagatccgaaaattgcccaggtggtatctaaggaaatgagccgcgagtcctgtgtggtctttgatgaggcgcacaacatcgacaacgtttgcatcgattcgatgagtgtgaagatcaacagacgcaccgtggagcgaagcacgaatgctttgaaccatctaactaaactggttcaggacattcgcgaagaggacacaaatcgtctgaacgaggagtatcagcgcatggtgcagggtctgaaggatgccagtgtgcagcgcgacacggacatgatcctggccaatccggtcctgccaaacgatgtcctaaccgaggtggtgcccggaaatattaggaacgccgatcatttccttagctttctgcgtcgattcatcgagtatataaagacaagactgcgcgttcatcatgtcgttcaggagtcacctgcgggcttccttaaggatatttcctccaagatttgtatagagagaaagcctctgcgtttttgtgctgagcgcctgtccagtctgctgcgcacgcttgagatcagtgatttgacggagtatggagcccttacactgattacacactttgccaccctggtgtccacctacacaaagggcttcacaatcattatagaacccttcgacgataaaacgccgactgtttcgaatcccattttgcactttagttgcctagactcttccattgccatggctccggtattttcgagatttcaaaccgtggtcatcacttctggcacattgtcacccatggacatgtacccgaagatactcgatttcgatccagtggtgatgagcagctttaccatgacactagcccgtccgtgtcttcttcctatgattgtatcgaagggcaacgaccaggtgaccatttcgtccaagttcgagacgcgagaagacaccgccgtcattcgaaactatggccagcttttggtggaggtggcaaagacagtgcccgacggtattgtatgcttcttcacctcctatttgtacttggagtctgtggtggcctcttggtatgatcagggaatcgtcgataccctgcttcgctacaagcttctattcattgagactcaggacaatgccgagaccagctacgccctgatgaactatgttaaggcctgcgattgtggtcgtggagcagtgctgttggctgtggcgcgtggcaaggtctccgagggtgtggatttcgaccatcattatggtcgcgcggtgctcatgttcggcatcccctacgtgtacacgcagtcgcgtattctgaaggcccggttggactacctgcgggatcagtttcagatacgtgagaatgacttcctgaccttcgacgccatgcgtcatgctgcccagtgcgtgggtcgtgcactgcgcggcaagacggactacggcatcatgatcttcgcggacaagcgcttttcgcgccacgacaagaggtcgcgtttgcccaagtggatccaagagcatctggtggacagcttctgcaacctgagcacggaggaggccgtccagctggcccgtcgttggctgcggcgcatggcgcaaccgttcacacgtgaggaccagctgggcatctcgctgctgaccctcgcccagctggagaacatggagcaggagaagctggagcggcaggctcagggcaagcagggcgttggcggcgaggtgcaggagctgtgagatgtggaaggtgctctgccaaccggctctttgtcgactgccttccgggaataactcaacacagcacaagccgtcagctaatgacattgaatgccattaaatgcggatcacaacggcgatgctggaaaatttaaaagtaaaattttttgtttttcggctgccatgcaaatcgaacgtaaatgtccaattaatggctaattaatattatttataatttcgcgggcatgactaacttaactggccgctcaaggcggcgaaagggcgcaagcgcagcgcgagttttgctcttgcagttgtatttgtatctatacctgtgattgtatccggatttgttgagctgcaaatttagaactaagcgatcgtgaagtacactagcacacaaagtatgctaacacaatgtaaaataaagtaaatatttctttaa

SEQ ID NO: 20019 - protein, 745 aa, DROSOPHILA
MLELKRSLDAKGHCLLEMPSGTGKTATLLSLIVAYMVEHPETVRKLIYCSRTVPEIEKVIAELQNLMVYYERHCPNPPPFTGLVLSSRKNMCIHPEVSKEREGKAVDGKCYGLTASYIRERHEMDTETPICQYFEGFSLEGKESTLPVGVYSIDDLKEYGRSRNWCPYFLARYAIAHAHIVVYSYHYLLDPKIAQVVSKEMSRESCVVFDEAHNIDNVCIDSMSVKINRRTVERSTNALNHLTKLVQDIREEDTNRLNEEYQRMVQGLKDASVQRDTDMILANPVLPNDVLTEVVPGNIRNADHFLSFLRRFIEYIKTRLRVHHVVQESPAGFLKDISSKICIERKPLRFCAERLSSLLRTLEISDLTEYGALTLITHFATLVSTYTKGFTIIIEPFDDKTPTVSNPILHFSCLDSSIAMAPVFSRFQTVVITSGTLSPMDMYPKILDFDPVVMSSFTMTLARPCLLPMIVSKGNDQVTISSKFETREDTAVIRNYGQLLVEVAKTVPDGIVCFFTSYLYLESVVASWYDQGIVDTLLRYKLLFIETQDNAETSYALMNYVKACDCGRGAVLLAVARGKVSEGVDFDHHYGRAVLMFGIPYVYTQSRILKARLDYLRDQFQIRENDFLTFDAMRHAAQCVGRALRGKTDYGIMIFADKRFSRHDKRSRLPKWIQEHLVDSFCNLSTEEAVQLARRWLRRMAQPFTREDQLGISLLTLAQLENMEQEKLERQAQGKQGVGGEVQEL

SEQ ID NO: 20020 - DNA, 2816 bp, DROSOPHILA
agcccgttttcctttcccaacccgggctccttggatccggctgcactgggccatagaattgtctgggacacgtggccccatgtacttgccatcatcatcccgcacagccatacgaatcctgttcgtttttttgtcgttgttggatgaaagttcattaataaactttcattgctgctgtcgaattcagctgcagcaaccatctccgggcactgaaatgttgttcggccttagcttcaacaagtggcatcatgctcctgtggttatcatcccccggtgacctcctttccctttggccacatcgccatccccatccccatcccagaagggctttatttaatgggaaaacgctgcgaaaacgctcatgcatccgcgctcatttaattgctgcagaaatggttttttattgacttttacttgaactcctcctcaaaatgaattatatcaatgtgcagagcatcatggttttgtccctgggtttgccttacttctggggaaaactgatgtttttcgtttcaattattctcctgattactaatttcggaaaataagttttcttcaatcaagtttttcaaccatatacgaaccatctgcatttgaaacaaatatgcgatattgttttgtaaatttaaaatttttcatgttagaacagtcctaaaataaagtgtttaagcttaaattcctaattgaacccttatcgttttcaaagattttcaaaacttttttcgagcaacatgacgtacgtgtagggtgtaggtgaattgcagaatggttcttccgttctgtccctgctctctcggctcataaaccaagcaattattcaatttccacggactgcgatggtcgcaatagctgcttcggacagtttacgacgagtggttggttgttaagttggttctcgagattctggacctccgggctcttttttccgccattataggttcaaggttgttgctgaagcgcttcgtcgagattatatttctgaaagagtgaaacaatcttgtttgcagattttacggaaggcctcaaaatgatgcactaccgcaaggccgagaatgtggagaaggagctgagcaagagcgatctgccattcgaggactgcatgccaaagtcccaaaaggattttttgtggatgcatgtgagtagcactaacaatgtttcaaatccttgcctgaaagcatccattttgcgaaggtaaaaggcggtaccaaagtgagcaatgtgattgagtttgctcaggaggcgctgaacaagggcgagcacagatgcgtggtgtggagcggatccggcggaggagtggtgaagaccatatcctgtgccgaggtcctcaagcggagccaccccctctaccaggtgacgcgcatggcctacaccaggtgagtcggcaataagcagccaatgtgcaataacttttataatgtactacgcaaagtgtggaggagcactggaagccgcaaatggaaggcctggaggagattatagtcacacgccaaatacccaccctgcacatcctcatgagtctggacgagctgccggatactatagatgggtaagctagaacggaatatcaaatgcatcagtagcgttaaagtatattccgattagcttacaaaagccaaatacgtccactgatttttgggatggcggaggagcacagcaacagccacatccacgttcccagccccgccatcagcagcagccacataaaccaggggctgggcgtgggggtcggccgaacaaacggaccagacccggacgcaataaaccaggccaacaacccgaaaaacctgccgctgaagagaatttacccgccagttagagtcaaggttgagataagcggaccatgcgaagattttcttatttgccctttgtaaggatgtacaaataaagcccaatttatcacaaaagaccagcggtattaacgcaattgcgggcaataaaagattagctctccgaagataagcgcggtctttgtataattcttctttatagaactcttatagaactcttctcaaacttacagtagatgctctttaattcgaatgtgaagtaatctaaattagaaagtttaataagcaattataaagtacaagtagaagaagagaaatgtaaatatatatcggtaatttcgttaatttatttttgcaaagatttcgttatagcttagtatgtcaatggccccaagttgtttaaaaaggaatgaagcgaatatgctgccttatgctaagataatattatacagtttctatacctaggacaataaacaatactttgtgggttcccttatcagttgaaattcgaaatcggtgagttggtgttagttgtttgtcaaatacaaattcaatacccagaaattaaaatatagctgataatgtgtgctaaagcatctattaaatgtggacagtaagtaccaatgcagaacaaaccgtttatttgatattttaggtcagaaaaattagattgttcttattcacagcgattgaaccaaattttaattatttatcaagaactacaaaataaaaattgtgtcgaatgtgatgtttaaatcctttactcatgggatatgattgaaaaaggatgtttccagcccaaattagcagatcagtccgccgaaggaacttttactgtaattccgcattcattgctgtgcacacaaagcacttaggaaaagctgcacaaatctaatctggcggatttcaatggcgttatcatcccacgaatgtgcaggtgccggtgctggttagtgtgaaaaatgctgggcctgcgacgagttctgcgattgggtgcactgcgtcagcttcgctcgttaagtggcaagc

SEQ ID NO: 20021 - DNA, 648 bp, DROSOPHILA
tttgcagattttacggaaggcctcaaaatgatgcactaccgcaaggccgagaatgtggagaaggagctgagcaagagcgatctgccattcgaggactgcatgccaaagtcccaaaaggattttttgtggatgcatgtaaaaggcggtaccaaagtgagcaatgtgattgagtttgctcaggaggcgctgaacaagggcgagcacagatgcgtggtgtggagcggatccggcggaggagtggtgaagaccatatcctgtgccgaggtcctcaagcggagccaccccctctaccaggtgacgcgcatggcctacaccagtgtggaggagcactggaagccgcaaatggaaggcctggaggagattatagtcacacgccaaatacccaccctgcacatcctcatgagtctggacgagctgccggatactatagatggcttacaaaagccaaatacgtccactgatttttgggatggcggaggagcacagcaacagccacatccacgttcccagccccgccatcagcagcagccacataaaccaggggctgggcgtgggggtcggccgaacaaacggaccagacccggacgcaataaaccaggccaacaacccgaaaaacctgccgctgaagagaatttacccgccagttag

SEQ ID NO: 20022 - protein, 205 aa, DROSOPHILA
MHYRKAENVEKELSKSDLPFEDCMPKSQKDFLWMHVKGGTKVSNVIEFAQEALNKGEHRCVVWSGSGGGVVKTISCAEVLKRSHPLYQVTRMAYTSVEEHWKPQMEGLEEIIVTRQIPTLHILMSLDELPDTIDGLQKPNTSTDFWDGGGAQQQPHPRSQPRHQQQPHKPGAGRGGRPNKRTRPGRNKPGQQPEKPAAEENLPAS

SEQ ID NO: 20023 - DNA, 3251 bp, DROSOPHILA
ctgcacttgctacacgggcgacgagcagtttggcaaggctttgcaacagtgcaaggaggcactggatattatgaaggatgctcaggtctactgtgatcgtgctgacgcattgctgggcaccgaaatgtacgacgatgccatacactccttccaagcagctctcgacctggaagagagcaacacccgcgctaaagaaggcatccagagggcaaagaagctgcagaagcagtcagagcgcagggattactataagatattaggcgttaagcgtagcgccagcaaacaggagattgtgaaggcctacaggaaggcggcgcaaaagtggcatccggacaacttccgcgacgaggaaaagaaggtggccgagaaaaagtttattgacattgccgcagccaaggaggttctcacggatcccgagaagcgtcgtcaattcgacaacggcgaggatccattagatcctgagagcaatcagcgtggcggcttccatggcgaacatccgtttggacacttccaacacgggtcgccgttccagttcaagttccacttcaattagtcagccagcagccatttgctttgtgatgtcctagccgcgatccccgatatcctttaacgattttacactgttttgttcatttaaatggcgtgtaaatagtagcataaagcataaataaacccatggtccgttgtcagagagtaccacaaacaaacacaaatcgcaacaaaacacactgagcacttacatttaattagtttatttaatacaatacaataattataatgtagtacatttttctaattatgtataaaaagaaacaatatgcgagaacaagcaattaaagacttggcaaattgagttgaatatttgttagttttgaacatgtttggaattgaagtagtagtcttaaggtgcaaagtcgtcataaatattccttcgctgtagtctgtggttgaaatgcgtggagtaaccaaaaccaaatgtattccgcgatatgaacgcttctcaggcgttgggtgtcaataccacgtacaccatggtggccagcatcactgacactaccaatattaagtagaatttgagattatatttttgatccaatgacaccgccagtgcacggaactgcgccataggcgaaacctgatcgtggtgtcttaccagaggttttctagccagcggcgagaagcgattcttttggaaatggctattgatgggtacttcctcgacttcggactcgctctccgtctccatgggttcgcctgcgtcattcggctgatcgtagaattcatttagttgtggatatagagtgtttactgcggtggtcggctggagcaggcgaccacgggccagattggatccactaactggaacactctgtcgctggcgaatgggtgctggagctggtgctgggccaccaaaaggcctagcggatccgctgaaagtgtttcttggcgaaatgggtgaaagttttggattgtacgtagatgactcctcgtagctggttgagtttaagttggtttgagtcagcaggggacgcgaaaaacccaaatctgtgggtctgtatgtcgaaggttcgatgcgtggctcgtatgtgggaagtgcgtgaagagtggcggctggcacatggggtctttcgtaggtgtagctgcgtggtatatcctcctgttcgtacagcggctggtcaacttcgcgtgtgtaagatgtggtcaaaactccggatttggctagagaaacataacgtctaggctgctggtccttggagtaattaggcaccggagagtccaccatgtaggagtcgtcgtcctccgactgggagctcatatccgacaccgtggtagtagtctgcacagatcttcccgagatcgaggtgttgtctagtccataggcgattgtgcgacgactttgttcgctgatcttgttgttgttgctgctagtgcgtcctgcactcttgccgggcgtacgacgcactggctccgatgtgggcgtcgttacctggctgccgtgtacggtctcacgcctcggaatcgctttcttacttgcagatttgcttttgttcagcggaaccccggtgattttggcctttagtcggcgaattatgacgctgcgggtgctgtccgtcacgggaacaccgggcaggccgtgctccaggcacttggccagcagctccttgttgcccaacgtgtccaggtaagaaaggtccgacattattttccgccgtggtgaaactcaaaacacacaaaaatagcaatgtcgtcacaatgttgtctattagtgatggaacggcagcgatagaatgttcaatctaagtgcacgcctatcgattgctgctaaagtaatgttgtttgacaaactatagctagatttcatatgctggatgagctgtgcacgaaagtaaaaacaattttttaacatcagacagaagaacaaactacttgaagaaaaacttaactcgatattttatgtgcaatcgcctcatgtgcagtgttataaaatgcctacaactaaacatttacagcagtgctgccagacctggttggatacgcttgctatggtttatttcaactaacgcccgacggtcacacagttagttttatgaaaatcgaacgcgcaacaggtgttcaatcgcaaacaagacgctcgaattaaacgaatcgccgcgcggaaagcgctcgccaagccaaagaaaatccccaagtcgcagtgcggaaaactgaggagatatagcatcgtaacataaacagtggattgtggaaaaacaatcgtgaatcatttgcacctgtttggcggccaatatttcttcacctttttgcttttctgcgcctgcgtgtgtgcctcacttcgcttattacacttttgtttacctcaatcgcgggtgttattaaagtttttggcatcgatttcgagtagcaaagcaagtggctggaaacattcgacaatttgctggctgcaattgcagcatattttccatttagccaagcaagagcaagggaaacaaaaacagcaacaacagcagcagtagaagcagcagcataaacataaaccaaaaaaccggttaaagcggacaagagcgagaaaggcgccccaaaaaagagcaagcgggacaaaaacaaacacataaaacgtgaaaaacaacaacgaatcaaagtagatataaatactaaacgaaaaaaaaaatatcctcgtatttgggtttttgtttttttgttaagcgcaaacagaaaataagtgcgtttgttctttgtttaaacgtgttgac

SEQ ID NO: 20024 - DNA, 1251 bp, DROSOPHILA
tgacgacattgctatttttgtgtgttttgagtttcaccacggcggaaaataatgtcggacctttcttacctggacacgttgggcaacaaggagctgctggccaagtgcctggagcacggcctgcccggtgttcccgtgacggacagcacccgcagcgtcataattcgccgactaaaggccaaaatcaccggggttccgctgaacaaaagcaaatctgcaagtaagaaagcgattccgaggcgtgagaccgtacacggcagccaggtaacgacgcccacatcggagccagtgcgtcgtacgcccggcaagagtgcaggacgcactagcagcaacaacaacaagatcagcgaacaaagtcgtcgcacaatcgcctatggactagacaacacctcgatctcgggaagatctgtgcagactactaccacggtgtcggatatgagctcccagtcggaggacgacgactcctacatggtggactctccggtgcctaattactccaaggaccagcagcctagacgttatgtttctctagccaaatccggagttttgaccacatcttacacacgcgaagttgaccagccgctgtacgaacaggaggatataccacgcagctacacctacgaaagaccccatgtgccagccgccactcttcacgcacttcccacatacgagccacgcatcgaaccttcgacatacagacccacagatttgggtttttcgcgtcccctgctgactcaaaccaacttaaactcaaccagctacgaggagtcatctacgtacaatccaaaactttcacccatttcgccaagaaacactttcagcggatccgctaggccttttggtggcccagcaccagctccagcacccattcgccagcgacagagtgttccagttagtggatccaatctggcccgtggtcgcctgctccagccgaccaccgcagtaaacactctatatccacaactaaatgaattctacgatcagccgaatgacgcaggcgaacccatggagacggagagcgagtccgaagtcgaggaagtacccatcaatagccatttccaaaagaatcgcttctcgccgctggctagaaaacctctggtaagacaccacgatcaggtttcgcctatggcgcagttccgtgcactggcggtgtcattggatcaaaaatataatctcaaattctacttaatattggtagtgtcagtgatgctggccaccatggtgtacgtggtattgacacccaacgcctga

SEQ ID NO: 20025 - protein, 399 aa, DROSOPHILA
MSDLSYLDTLGNKELLAKCLEHGLPGVPVTDSTRSVIIRRLKAKITGVPLNKSKSASKKAIPRRETVHGSQVTTPTSEPVRRTPGKSAGRTSSNNNKISEQSRRTIAYGLDNTSISGRSVQTTTTVSDMSSQSEDDDSYMVDSPVPNYSKDQQPRRYVSLAKSGVLTTSYTREVDQPLYEQEDIPRSYTYERPHVPAATLHALPTYEPRIEPSTYRPTDLGFSRPLLTQTNLNSTSYEESSTYNPKLSPISPRNTFSGSARPFGGPAPAPAPIRQRQSVPVSGSNLARGRLLQPTTAVNTLYPQLNEFYDQPNDAGEPMETESESEVEEVPINSHFQKNRFSPLARKPLVRHHDQVSPMAQFRALAVSLDQKYNLKFYLILVVSVMLATMVYVVLTPNA

SEQ ID NO: 20026 - DNA, 3244 bp, DROSOPHILA
caaagactggagcagcagctgcgcaagaacagcggcgatgccaccaattacagcagctcgagcagcatcacactgaagcgcagcaattccggcagcgacaagcaggagaggagcgaccatccggatgacgacaacagcgacagcgacgagagcggctacgtggagttccaggagaaggagcgaccgggtcagcagccgctgatcagcgaggcaagcgttacgctggccaagattgcgaccgtcaagccgcaggtaccaccaaagccggctccacgtcgctcgctcagtctcaacgcggtggccaccggcgcctcagcgggctcatccgctggtaaggctccgggcaccgctgtctgagcgaaatgctttaattacaacggaaacccgtctacaaattgttatttctgcacacccgtcagcgaccatagcaaaacacaaagtgcaagaaattgaaatcctagttgtagattagctattagcacctagtcgttaagtcatttgttgttggttcatcgagaggaaaacctaacgatattcgcccatcccccattttccatcccatcatctaaatctgtgccccttgatccaaaaataatgaatttatattgtacgcatttgtaaataaattagtcgccctacgcactgcatgtactatatacatttacacgattgtcattgatgaactgtatcttacttatcaatataaattattatctgaacggtgtgtgtgctgcacagaggaaagtgtgaacaataacaattggttaaattatatatatatgatatcaaaatttgatttatgttacatttagaacgaattatagccctaaaatagaaagaacctaaaccaattttgtactgtttgttctctgtgaccttattgattcgcttgtgattatatcgattccattcccccagaggacaggcattcttgtgcgtttatgaattttaatttcattccaaacttgaggcaattacattggacatttagcagatctatctactggcagattgtgctgctgctgggcagcaagttttgttgacgcaacatataacaaaccgtgccgcggaaatcgcgcagcgaatggtcctgcagctgctgatcgaagacctgttgcatgtggaaacgaatacgaatgtgaataagaaaaccagttgagtgcattcgattacggcgacgattgatcgcggctactcatacttacgccattgtagacgatggtgggaatgaagctcgggctgtactgtttggtcaccagctccgcctgcagctgcaatttggtgcccgtctcgctggacaggcagtggaccacatcggtgagcaggcctgcctcattggcacactgcgtatggaatggtaaaggtatatataatgggtacaatgcacacaatgggcgttaatcagttgggcaaacacagcacaacgagtacgcggaaggtagattacctgatcaatgcgggaataatccggagctagcatctggcacaccacgaatttaacctgcgccgcctggtttgcggtgctgttgatgacgcaactctggaggcgattgcccttgcactcagccggtccgtgctggcagtggaagatggcaccattgcgctccgactgcgattttccgaagggcactaagagtatatcaatgtagtccccgaactcctcgtaaacgggtcctagctgatgcatgaagttcctgctgtccgggcacaaggactcgtaaaggagggtgatgtgcagctaaaaaaggaattattcagtcgaaagataaaaatcatatgatgcctttcaccttaactattaattaggcttcgcattataccagtaattattcattttgggctactgaataattctagaatctagattcagataaatttacataaagaaagtagtgttttcttaatcatattactagttctagccgaatttaaatagtatagagaacacagcttaaaagaatttgttcacttaatgtaaacaaaaaagccaaaggcgttggattgcaatcaaaccttgttggactggcgcttctcccgtggcttctcctcgagcttcgcccatccgagggacagaacgagaagcagaaggcttgcggtggacgccaacttcgtcatcttgtgactagtaatttgagctttggttagccaaatcgatcgaccttcgacgaagtgcgggaatgaaggcttctgtgtccgcagcgaatgccaagcccaagctaacgcgaccgtcggactcgattttagttgagcaactgagcgccgccgttttgtcacattcggtgcttaattttggctagcagcgaactgggaacgggcagagctgttttaccacctctcatcgacgttctcgcaggcaagccggtttcttgactcagcctgatttcgatttaaaaagcttaactaagcattcatacatttaacggattcgcaatacgataattaacacttttggcttagtgcaaatattgggaagaagttactatgaaggctaataaactttttattacttgtcaataactatgctattatatttattgtattatatttatgtacttctttgttagataagcataatttaaagatacagtatctcacctgtttcatattcaacttaagctgctccttgatttcctggcatatattttcaagtaccgagtaatatgtgaaagtctgccatatcagaagagacagcataaaggatagtattatattcacacttagtctgttcatgtctgcaataaatataccaactagtaactacgttttccatatcaaactaatttgcatggccaatttcacggaagcgtttaaaatacaattatttgctttatttgagtctaaacggtgtagcgcgaactatttaaatgcaatcgattggcgactgtggctacagttatcgatagattttacttttaaaaaccgtgactcaatgaatctaaattatcaactatgaattataatgaattactattttcaatttcttgttattttattaacaacataactttgcttacctttcatttataaataccgtgatcgaaaattggagtcactaaagtcacggcagaaaagttcatctctattaagccaaagccaaacaaagaagcacacaaaagtttataccatagtttattgtttaccaaaaatatgacctgtagttaaacagcagttaagcaatggaggacctgtgtcgaatttgtggcggggcctcggaaaacatgctgggcattttcgacgatcaggt

SEQ ID NO: 20027 - DNA, 771 bp, DROSOPHILA
ctaaaatcgagtccgacggtcgcgttagcttgggcttggcattcgctgcggacacagaagccttcattcccgcacttcgtcgaaggtcgatcgatttggctaaccaaagctcaaattactagtcacaagatgacgaagttggcgtccaccgcaagccttctgcttctcgttctgtccctcggatgggcgaagctcgaggagaagccacgggagaagcgccagtccaacaagctgcacatcaccctcctttacgagtccttgtgcccggacagcaggaacttcatgcatcagctaggacccgtttacgaggagttcggggactacattgatatactcttagtgcccttcggaaaatcgcagtcggagcgcaatggtgccatcttccactgccagcacggaccggctgagtgcaagggcaatcgcctccagagttgcgtcatcaacagcaccgcaaaccaggcggcgcaggttaaattcgtggtgtgccagatgctagctccggattattcccgcattgatcagtgtgccaatgaggcaggcctgctcaccgatgtggtccactgcctgtccagcgagacgggcaccaaattgcagctgcaggcggagctggtgaccaaacagtacagcccgagcttcattcccaccatcgtctacaatggcgtcttcgatcagcagctgcaggaccattcgctgcgcgatttccgcggcacggtttgttatatgttgcgtcaacaaaacttgctgcccagcagcagcacaatctgccagtag

SEQ ID NO: 20028 - protein, 213 aa, DROSOPHILA
MTKLASTASLLLLVLSLGWAKLEEKPREKRQSNKLHITLLYESLCPDSRNFMHQLGPVYEEFGDYIDILLVPFGKSQSERNGAIFHCQHGPAECKGNRLQSCVINSTANQAAQVKFVVCQMLAPDYSRIDQCANEAGLLTDVVHCLSSETGTKLQLQAELVTKQYSPSFIPTIVYNGVFDQQLQDHSLRDFRGTVCYMLRQQNLLPSSSTICQ

SEQ ID NO: 20029 - DNA, 3135 bp, DROSOPHILA
gggagtttcgattttctgcgggggaggtgggacagtgacaacaccgctcggcggcacaagttcaacagaaaatgtggggcgaccggaggtcgtataaacaaaagcacagtgcacccgagtgcggaaatcgcggctgtaagtgcttcaaatgcacgcaggagtcgggaatcggggaggaactttcgattcacccaatcgctggatttcaattgattacttaacacgctctgtcgcgagaaaaataggctatctctactgccgcggcccttaaaaatatagaaaagtcgtatagtccaccacactagcaccacacgtccgttcgcactccaattggaacatcatctgaccgttgccgtaacagcggctgttaatgcagcccgtcgagggtggaaatttcgatagcatgtatcgaaatatggaaaagttgtagtttcagaaaacagagttacagcgacttacaacatgattcccattaaatattaacagttgctgcttacctaagaaagttaaacaattgtaattttaatgcgatatgaagttatcgatagtgcccgcgcgcgaataatgttgtttgggtactgttagcgtgaaacactgttacgttaccccacagatgttcgattaagccctctgttaatgagaatgaaccgccaactttatcgataatgttggttatgaagcgtacgcgcagtaagatcaaactaatttatgaagaggtgattaaaatatttggatagacgctcttatacgtaatatattaaaatttataaaaagcttaaagagcctcactagctgaatataaagtaaaatattgtctcttttaatccatatggttattacatttttaattatttgcgttggataagatttctgagaaacctcttttgaaattctattcgtattttatataataacttttacagatccccagggaatcgttttgtatactattttgttgcttcctctataacttgataatactgaagtggcgtcacactggctaggaacaggttaggctgtcatcaccctccgcttcgtcagctgtaaaagagacaaaaagtagaaatggaagctaaaaagccggtcctaccgttaatgtcaaacagttgtaactcacaaagaatttgaaggccaaacattagagcgaatcccgcaacggcggccacaagggccctccatccggcatggctctcaatgaggatctcaaagaagactacgtacagcaaggttccacaggcgatgccctggaggactccggatggcagactgggctgacccgctgccacctgctggctgatgccgaggccaacaccgataccgatgggtgtaacaatggagaatgtcaccaggtacaagatggccagcgaactgcgtgtgcgggcgaccagaagctccatacccacgcagaaggccaacaccaacttgtgggcggagaccgctccaaacatgaaccacacagtgctcacagtgccctccagaccaatggccatgccctcgaacagttcgtggagcgaaagggcgaggataatgcccagccccctggcagaggatccatcgtccgctggcacgggcatgtgcgagtggccgtggtgatccttgtgtggctgcggttccgtatccttaacttccacttcttccttcgcctgtggattgaggagaacactgtgacgaatgctgcgtcctctttcgaaagccagactggccaccgactctttccgactaagctttccctggtggtgccgcacgaggctggtcatcagctcgtccaacgcgtacatcaggaaaaagcccgtgcacagcagcatctccgccagagcgaagggcgtcttgacaagcgagccgcattcctggagcgcttccaccacctcgatcacctcgggcagcatgtgcaggaaggtggtgcagatgagcacaccgccgccgaaaaagagtaggcaccgcaccaccaatgacgagcgggtttcctccggactcgccttcgtccaatggaagcacctgttcaggacgtagggaaggctgccgcaaagcacggtgatcaccacgagcaccaccatggaaactattttggccaccagcagcgcatggtgatccacgtcttgcgtttgctcttgtgacatagttgcggtagcgctcatcttcacctcccgagttgatagcttcgactgtgctggctggaactcacaaccaggctaatggtttatatttccagtcatatatcagcgggagccgattgaaatctgatcgctgattgatacgcggattcactggcagacagcgggcaagcctcgcagcctagtattgttatcaattcgccgtcccctggacaggtgtctctcgtcggcccaccgataaccgaaccatagccgtctgttctttgcgaattttatgattgagggaagtttcgtaatgtgcaggaacttcggaagtatttcccgaatattattattattgatacactgagataatttatttgtccatccaaggcggtctcatcttaggtttatatggtaaggattgcaggcatggaattaaaatcgcagcacattttttaaaaagttaaaaagattctagccatatatgtaaatattcttgaccaggatcagatgatttcgccacgcttgttttttaattttactaaatttgtttataaaataaatttacatttatcaaaataaaggtgtgataaatgcagaaacttccatgccaaaagttgttcgaatcggatcatttatttaaaagttatgggcaatttggtaattagtatgtagcaaccggtaggtggagctaatgtgcgcactcggagaatgtccttttgttgatgccacttataaatttccctcgcagaagggcgtttaaagggtatctcatggtcgatgacctgaccttgccgtcctctttccccatatttataaagccaaaaagcccacgctttatttttcggtagtttctttgaatttctctataggcttaattgttttcatataaaattcgagtataccctaggggcatgtgaaatggctcttccctttggcctctccaactgaaataataagagtggtaatttggtttttcagtcatttgggctttttagtatgcttacttgctatctggaggccaaacatcaggacgaatccc

SEQ ID NO: 20030 - DNA, 1059 bp, DROSOPHILA
atgagcgctaccgcaactatgtcacaagagcaaacgcaagacgtggatcaccatgcgctgctggtggccaaaatagtttccatggtggtgctcgtggtgatcaccgtgctttgcggcagccttccctacgtcctgaacaggtgcttccattggacgaaggcgagtccggaggaaacccgctcgtcattggtggtgcggtgcctactctttttcggcggcggtgtgctcatctgcaccaccttcctgcacatgctgcccgaggtgatcgaggtggtggaagcgctccaggaatgcggctcgcttgtcaagacgcccttcgctctggcggagatgctgctgtgcacgggctttttcctgatgtacgcgttggacgagctgatgaccagcctcgtgcggcaccaccagggaaagcttagtcggaaagagtcggtggccagtctggctttcgaaagaggacgcagcattcgtcacagtgttctcctcaatccacaggcgaaggaagaagtggaagttaaggatacggaaccgcagccacacaaggatcaccacggccactcgcacatgcccgtgccagcggacgatggatcctctgccagggggctgggcattatcctcgccctttcgctccacgaactgttcgagggcatggccattggtctggagggcactgtgagcactgtgtggttcatgtttggagcggtctccgcccacaagttggtgttggccttctgcgtgggtatggagcttctggtcgcccgcacacgcagttcgctggccatcttgtacctggtgacattctccattgttacacccatcggtatcggtgttggcctcggcatcagccagcaggtggcagcgggtcagcccagtctgccatccggagtcctccagggcatcgcctgtggaaccttgctgtacgtagtcttctttgagatcctcattgagagccatgccggatggagggcccttgtggccgccgttgcgggattcgctctaatgtttggccttcaaattctttctgacgaagcggagggtgatgacagcctaacctgttcctag

SEQ ID NO: 20031 - protein, 352 aa, DROSOPHILA
MSATATMSQEQTQDVDHHALLVAKIVSMVVLVVITVLCGSLPYVLNRCFHWTKASPEETRSSLVVRCLLFFGGGVLICTTFLHMLPEVIEVVEALQECGSLVKTPFALAEMLLCTGFFLMYALDELMTSLVRHHQGKLSRKESVASLAFERGRSIRHSVLLNPQAKEEVEVKDTEPQPHKDHHGHSHMPVPADDGSSARGLGIILALSLHELFEGMAIGLEGTVSTVWFMFGAVSAHKLVLAFCVGMELLVARTRSSLAILYLVTFSIVTPIGIGVGLGISQQVAAGQPSLPSGVLQGIACGTLLYVVFFEILIESHAGWRALVAAVAGFALMFGLQILSDEAEGDDSLTCS

SEQ ID NO: 20032 - DNA, 3891 bp, DROSOPHILA
tcacctgttcttaaaattgtatatctcattccacagggttcacagcaattcacacgtatgccaaaactgcgaagagcgttttctgttcaaggccgatctggataaccaccaatgttatcgcaatagcaattccaccgtcgagtgcccggaatgcttaaaggtcttttcaagcacccagagcctggacagccacaaatgcaaggatatgcaggagcgttcgccctttcagtgcccccactgtcagcaggcctttactcgcgaacaaaacctcaaggcgcacctgttgatccacgcggaatcgaaacagggaaacggaccccacaaatgttcatactgccaaacgggattcttcaacaagtcggccctcaaggtgcacatccatgcgcacatgggcgaacggccgcatgcctgtcccttctgcgtgtccaacttccgttccaagcaggcccttaaggtccacatccgcatacacacgggcgagaagccctaccaatgcccccactgccccaagactttttcggacaacaataacctggcgaagcaccgacgacgccactcggatgaacggccctacaagtgttccatctgcctgcaggacttccgggagaaacatcatctgaagcggcactttctgggcaagcatcgggatggagatcaaaagctaaagctaaagtgataccttaaattcttgaccaaataccacggcttactcgaataaataaattaggattcggttatgtttatatctcattgtttctatagttcatattgggatttaattgaatttaggatttatattttcgtagaattcgaacagcactttgaaaaccatttggagtggcaacaccgtttttctgtaaatcaaaattcgatgtagacacgacgatatagacagcgttgccattcggccgtgatttgttcacgtggcaccaccattttgataaacaagctaaacaacccttaaatcgctcgaaaagagcaatggaaaaaaacaacaagttgtatgtttataaattataagtcttacaaattgtaattgtggtttccgtttgcttagaacatcaaagcagctaccaacacacaaaaaataccgaatatttctcgacgtaattttccctagacgtccttacaattcgtcgtgttcgctttgatctttgtcttgcttagattcatcatccttctcctcatcgtcatcatcctcgtcctcatcgtccttgtcggaagcctttttcgcctcctcctcgtccttcttgcgctgcacctcatcctgggcctccttcattttcttctcgcccgcctgggtgttcttgacttcggcagcagccttagcggccagctccacgtcgtccgtgatcaggacgttgtcgaagatagtgccggacttgacctgccagagatcgaagcccagggtgcagatctccttgcgcagatacagcttgtcgtcgggcacatactcgggattggcgatctcgggatgctcccaggcgcccttgtagttggggttgtccagctgctttggctgccactcgcccttgaactcagggttgtcgatcatcggtggctcccactcgccgtccatctcatcgtcccaatcctcaggctttgtggcatctgggtcgggaatgtgctctggtttgtcccagtcctcgggcttcttgtcatcgggatcgggaatggtggcctacagagatttacgttgttgtttaataacaatgagccaaaccggtttttcgatgggctaaagtctgatttgggcggggatttacaacttaccctatcgtcccagtcttcgggcttggtggcggtgggatccttgatcttcttgggggccaggaagtcccagtcgtcctccaggttgccagactccaccttctcgttgtcgatgagcacctcgtacgtgttgtcgggtctgacaatcagcgtgtagaagtgggtgtacacgtcatctttgcagcggatgtctttgctgattaggtggttcttgcccttgtagctgaagatcacatggaccttcttggtgccgggtccgcagatgtccgggccgaacatgatctcgtacggcgactcgccgtgcatgtcggtctggtcgagggagcagtcgaacagcttcacatagccgccgccgcagtcgatattctgctcgtgcttcacggagaactgcaccacgaggggcttgtcctcgttggagaagccatcaaacttgcggctggccgcgtagaatcgagcatcctgagaggtctgaatgcctatataatgtgtgtccacatcaatacgaatgcgcgccgcgcggaggtggggggcgagaaaaaatgtgtatacagttactatagctactcgaaaacgtacacgtagtggtttttcttcttcttcctcttcttcttcgtgcccatgttctccgcatacacgggcacatacaaatgcagataacacgccgacgaaaaataaaaatggcagaacgagcgaagagaaagatttggaaaagggagtgacgacacatcgacacatatacgctacctttgtcggcctcagcatcgttgtagaaggtaccgggggtgaggacgaattttccgaactccttgccaggatgtttgctgtagatccacgtatcctcccagttttctacgggaacaagcgggggagtgcttttattattcttctatttttattgtctctcctttcgttattcattgaaggggagcggaggaccacatggcggccatagaacgcgatgactaccacttaccgttgtcgaaattctccttcagataaacctcggcactaataaagccgactgtcgccagcaacactatcactgttttgcaccacatcatgtgaacgatcccgcaccactttttggactgactcttccaactccgatggttgtccgaactcggttaaagttaagtactaaatgccggcaagaaagtgctatttatttattgcatctaaatcgtgcgtgtcggagcgggacggcttgttactgaaattggtttgctggaacgttttcattggcccaaatcaggccaatcagggatgtctacgtattctttttcaccggccagggctgatttcgataagcaatcgcatgctgccctgtcgctatcgattgcttgagctggaattagaaacactaaagtgaccgtttgctaattaaattaaattataaaatatataaaattaatatattctggcatacaattaatcacttgcagcaggctaagctaagaaaacataaaattactccaataacaattcttctactacttaacaattgtagtagttacaggaagaacagttgtgcttccagaacattcctaagctttttaacggcttaagggttttgaaaattttaactcacacttacatcacatgttaacaattaagttttcacccgataaagttcatagtatttaaaaagttagaatgttaattatacattataatacaaatcaaaaacaaataaaggaattccaaaactttgcacctgtatttcgttaattttaggaacttttttatctataagtgctaacttttacatttgactttattacattaaaaaattacaattttcgctggaaatgtattatattaataaaaaagataaatagccagaaatagaaaagtgaaattaaattaattaaaacaaaaaagctttggtatttataccaatagaccttctaaggtattttttaagacctagctttgtggcagatacggtaagttcgtgtcgagcccacgtgttgagccaatcttatcaaacgccgattcgaatgcggcattaaacaaatggattcccttaacaacggatggttcagcgaactgcaggccgatctctggcccggtcagtcattctccctgaaagtcaaggaggtcatccacaaggagaagtcc

SEQ ID NO: 20033 - DNA, 1407 bp, DROSOPHILA
agttcggacaaccatcggagttggaagagtcagtccaaaaagtggtgcgggatcgttcacatgatgtggtgcaaaacagtgatagtgttgctggcgacagtcggctttattagtgccgaggtttatctgaaggagaatttcgacaacgaaaactgggaggatacgtggatctacagcaaacatcctggcaaggagttcggaaaattcgtcctcacccccggtaccttctacaacgatgctgaggccgacaaaggcattcagacctctcaggatgctcgattctacgcggccagccgcaagtttgatggcttctccaacgaggacaagcccctcgtggtgcagttctccgtgaagcacgagcagaatatcgactgcggcggcggctatgtgaagctgttcgactgctccctcgaccagaccgacatgcacggcgagtcgccgtacgagatcatgttcggcccggacatctgcggacccggcaccaagaaggtccatgtgatcttcagctacaagggcaagaaccacctaatcagcaaagacatccgctgcaaagatgacgtgtacacccacttctacacgctgattgtcagacccgacaacacgtacgaggtgctcatcgacaacgagaaggtggagtctggcaacctggaggacgactgggacttcctggcccccaagaagatcaaggatcccaccgccaccaagcccgaagactgggacgatagggccaccattcccgatcccgatgacaagaagcccgaggactgggacaaaccagagcacattcccgacccagatgccacaaagcctgaggattgggacgatgagatggacggcgagtgggagccaccgatgatcgacaaccctgagttcaagggcgagtggcagccaaagcagctggacaaccccaactacaagggcgcctgggagcatcccgagatcgccaatcccgagtatgtgcccgacgacaagctgtatctgcgcaaggagatctgcaccctgggcttcgatctctggcaggtcaagtccggcactatcttcgacaacgtcctgatcacggacgacgtggagctggccgctaaggctgctgccgaagtcaagaacacccaggcgggcgagaagaaaatgaaggaggcccaggatgaggtgcagcgcaagaaggacgaggaggaggcgaaaaaggcttccgacaaggacgatgaggacgaggatgatgacgatgaggagaaggatgatgaatctaagcaagacaaagatcaaagcgaacacgacgaattgtaaggacgtctagggaaaattacgtcgagaaatattcggtattttttgtgtgttggtagctgctttgatgttctaagcaaacggaaaccacaattacaatttgtaagacttataatttataaacataca

SEQ ID NO: 20034 - protein, 406 aa, DROSOPHILA
MMWCKTVIVLLATVGFISAEVYLKENFDNENWEDTWIYSKHPGKEFGKFVLTPGTFYNDAEADKGIQTSQDARFYAASRKFDGFSNEDKPLVVQFSVKHEQNIDCGGGYVKLFDCSLDQTDMHGESPYEIMFGPDICGPGTKKVHVIFSYKGKNHLISKDIRCKDDVYTHFYTLIVRPDNTYEVLIDNEKVESGNLEDDWDFLAPKKIKDPTATKPEDWDDRATIPDPDDKKPEDWDKPEHIPDPDATKPEDWDDEMDGEWEPPMIDNPEFKGEWQPKQLDNPNYKGAWEHPEIANPEYVPDDKLYLRKEICTLGFDLWQVKSGTIFDNVLITDDVELAAKAAAEVKNTQAGEKKMKEAQDEVQRKKDEEEAKKASDKDDEDEDDDDEEKDDESKQDKDQSEHDEL

SEQ ID NO: 20035 - DNA, 3877 bp, DROSOPHILA
aaatgctttttagaattcgatgataatataagattaattcaagtaagctacacatttttcatttaaaggcatcacttaaaactttattattacattcctttcacttaaagtgcgtgggttaaaacacttagaactgtgtaaataaatatttttatatattagtaacgttttaaaatacataatttactaccagaaataaggcgaggtatatttcttcttgactggatctcctttgtccatctatctcctggaggtcttagagaggtagggctggatatgaattgaaatcctggcaaagactaaaatttcaatggcatggggtttacggtggattcgcagctgtgtatggtgggaaatgccatattataaaacattaatatattatattgagatatcaacaccagtaatgggttctttagtactgatattctttattctaacactgccgtacttctcctttaggtacttttgcacattggtattgtacttgcttcggggattaacttctgcttttttcgctgatggaccgaaagtttcattaatattttttaaggcagtaggttgagtggaaggcaaaaggtccggttggagttcatcgatttgtcccttctttcttgagcagcctgttgattgcaaggaactctgccgggaatccttatcgagctcatctaagtaggagaaaaacaagaataagttaaaatttgagcactaattttatttggcattttattgcctttctgtttgagctcttccttttcccggtcaccagctatatttgaatagagctcccgattccgcgatgaaatggattccgcctgattgtctagattttcagtatatgtgttgctgtttaatctcacgtctttataatttctcgtgtgcatatactcgctgccattcgaattggatgttttaaataaagtgtaatttttatttgatggttcattgatagcacttaatggatccagcactattttactttcccttataactccagaacttagggcgctgatggcggtggcttcttcactgccaggtgactgaacgggcaaactagtgggttgcaaataagtgtgctggccgggatggaactgcttgaatctcttaaatattaggcatgttaccaacgaaaatagaatcgacatgctgagaaaacccatggctataaggcagactattgcaaagaagttgctgtcgatgagggaaatcctttccatatccttttgcaccaccacacttatgtgaaccgaatccttgccaccgggattttccgccagacaggtatagacgccctcatcgctcttacgggcattaactatcgttagacgtgacacaaaaacatcatgtccgaattttcgaatctttgattcatcctcacgcaacagttctatgtagatgcgctgcttttgcagacttttcaccggcttggagcgggattcgtatacttgattggtgtaatcccaggcaataaccgtattgggagatccgtggacgcgacatataagcgttacgttctccttggaagtgttgatggaagtactgagtgttggatacacaatcttcggcttgcaggcaaacgcctccggctgatcctcgatccacagacgaccacgtaactgcaaaggataatggcaggatgtgggcggtgtatacaggttcatgcctataacgaagtcacgaaacatctgaagatcgcatgtgcagttccaaggattctcgaccagcgataatgctgtgagcttagtcaagtcctggaaactctccactctcagtttggtcagctcattgttgtccagatagatctgcgagagaagtggtactcccacaaaggccttggcatcgatgctaaccaagcgattgcgcttaagttcgatcttgtgcagatacttgagattacgaaagactccatggcgaagtgcttgcaacaggttgccattcaggaatatcgcccgcactttcgaaagacagtcgaacacattgggtagcaggtcgacaagtagattattggacaagtcgagctctattaggatctgcagttgggtgaaacttcgctgattcaggtacttcagggtgccatttcggatgagtaacttttgaagattttgcaagtgggtcgtgaggaatgcgttctcctccaggtagaatatatgattgtgtgacaaatccagcacttgaacctccggactgaggtactctgggactccactcagactcaaattgcgacagtcggccgtcttcttgccagagttccatttgcagtgacagtttccacagtccaatagccaatcggcactggcacttcggaatatgagtgccaagcagtatatcttaaataggaatagcgacaggtgctttaaggaaatactacatggatcgaagctaagcttgatggccattgagatttttctaaggaacggaaggtctagcacatcccagttagtctgggttattgtttgatgcacatttgattgtttttgcttaattttcgctcatgtccagtgtccgtcattaaatcgttgttcgcctagcattataatcctgaaagccatgctgtaaagtaaaaagaaaaggtatttcattagtttattctcatttaaatgtaaataaatatttgaaactgcctttctcttcgatgatatatgtatgtaggctgacaagaagttcccattacctgccccaagggaactgccacttcaaggccacttttcccgttttctctttaacagtatggcattaaacattgaaaaattgcgtgtacggctgtctgacactggccgtgggaaaatgctgcactttgttggcttaccagatttagaaaaacaatataaatttactatcgcgccacgccttaagctcgtttcgaaaatgttcttccagagacctcggcgtatattcatcaactgtttttctattttggtactgccccacttaccagagtgttaacagtatttcggcgcatgtcaagtagattttctgctttcctttttcttttatgtaaattaacattagtattttgttgttttaccgaatattatatttaaattaaatgttactgcttttgaattattcgcattaaattatatgtatttgctttattcattgttacacatctgatatatccaacataaccatttttacattaacttatagacagctactgaaaaaaataagataaataatttaaacaaatttgacacgtttccatattatattgcttttatgccgcataaaatatttatatttgtcaaacaacatatgtttgtcaataatacgtacctcttgtcagttcgaatggttatatgtacacatatgtttaagatttatgtataagtcttaaagcaacttttatatttgggcgaaatgtttttaagattgtccgttacaaaataaaaagatttgtttatatttgcttcgcagacaaaaacatcaactacccctaaaagtaggcaattcttactgagcaacagctacgttgagtcatttttcgtgtgcgcacacttagaattcccaactgcttctggccgtttggtcatggagagcctgttcgttttccgtttcaagttatcgcttctcggccttatggctaagatcaaagtgtagtatctgttcttatcagcttaacatctgatagttcctccattggaggacaacaaatgttaaactgatttttggaatcagacggagtgctaggagcttgctccacctctgtcgcgggttggcccggtattgcagtaccgccgggatttcggcccaacttaataataaatataaaaccaatttgaaatgacttgtgctaaaactagactgagttttatcataaacaagttaaaaacttagatttcaagatttaaaaaatctttaccccaaacagttaaac

SEQ ID NO: 20036 - DNA, 1518 bp, DROSOPHILA
ctggaagaacattttcgaaacgagcttaaggcgtggcgcgatagtaaatttatattgtttttctaaatctgcatggctttcaggattataatgctaggcgaacaacgatttaatgacggacactggacatgagcgaaaattaagcaaaaacaatcaaatgtgcatcaaacaataacccagactaactgggatgtgctagaccttccgttccttagaaaaatctcaatggccatcaagcttagcttcgatccatgtagtatttccttaaagcacctgtcgctattcctatttaagatatactgcttggcactcatattccgaagtgccagtgccgattggctattggactgtggaaactgtcactgcaaatggaactctggcaagaagacggccgactgtcgcaatttgagtctgagtggagtcccagagtacctcagtccggaggttcaagtgctggatttgtcacacaatcatatattctacctggaggagaacgcattcctcacgacccacttgcaaaatcttcaaaagttactcatccgaaatggcaccctgaagtacctgaatcagcgaagtttcacccaactgcagatcctaatagagctcgacttgtccaataatctacttgtcgacctgctacccaatgtgttcgactgtctttcgaaagtgcgggcgatattcctgaatggcaacctgttgcaagcacttcgccatggagtctttcgtaatctcaagtatctgcacaagatcgaacttaagcgcaatcgcttggttagcatcgatgccaaggcctttgtgggagtaccacttctctcgcagatctatctggacaacaatgagctgaccaaactgagagtggagagtttccaggacttgactaagctcacagcattatcgctggtcgagaatccttggaactgcacatgcgatcttcagatgtttcgtgacttcgttataggcatgaacctgtatacaccgcccacatcctgccattatcctttgcagttacgtggtcgtctgtggatcgaggatcagccggaggcgtttgcctgcaagccgaagattgtgtatccaacactcagtacttccatcaacacttccaaggagaacgtaacgcttatatgtcgcgtccacggatctcccaatacggttattgcctgggattacaccaatcaagtatacgaatcccgctccaagccggtgaaaagtctgcaaaagcagcgcatctacatagaactgttgcgtgaggatgaatcaaagattcgaaaattcggacatgatgtttttgtgtcacgtctaacgatagttaatgcccgtaagagcgatgagggcgtctatacctgtctggcggaaaatcccggtggcaaggattcggttcacataagtgtggtggtgcaaaaggatatggaaaggatttccctcatcgacagcaacttctttgcaatagtctgccttatagccatgggttttctcagcattcacctggcagtgaagaagccaccgccatcagcgccctaa

SEQ ID NO: 20037 - protein, 430 aa, DROSOPHILA
MAIKLSFDPCSISLKHLSLFLFKIYCLALIFRSASADWLLDCGNCHCKWNSGKKTADCRNLSLSGVPEYLSPEVQVLDLSHNHIFYLEENAFLTTHLQNLQKLLIRNGTLKYLNQRSFTQLQILIELDLSNNLLVDLLPNVFDCLSKVRAIFLNGNLLQALRHGVFRNLKYLHKIELKRNRLVSIDAKAFVGVPLLSQIYLDNNELTKLRVESFQDLTKLTALSLVENPWNCTCDLQMFRDFVIGMNLYTPPTSCHYPLQLRGRLWIEDQPEAFACKPKIVYPTLSTSINTSKENVTLICRVHGSPNTVIAWDYTNQVYESRSKPVKSLQKQRIYIELLREDESKIRKFGHDVFVSRLTIVNARKSDEGVYTCLAENPGGKDSVHISVVVQKDMERISLIDSNFFAIVCLIAMGFLSIHLAVKKPPPSAP

SEQ ID NO: 20038 - DNA, 2918 bp, DROSOPHILA
gcagcgcatggtgatccacgtcttgcgtttgctcttgtgacatagttgcggtagcgctcatcttcacctcccgagttgatagcttcgactgtgctggctggaactcacaaccaggctaatggtttatatttccagtcatatatcagcgggagccgattgaaatctgatcgctgattgatacgcggattcactggcagacagcgggcaagcctcgcagcctagtattgttatcaattcgccgtcccctggacaggtgtctctcgtcggcccaccgataaccgaaccatagccgtctgttctttgcgaattttatgattgagggaagtttcgtaatgtgcaggaacttcggaagtatttcccgaatattattattattgatacactgagataatttatttgtccatccaaggcggtctcatcttaggtttatatggtaaggattgcaggcatggaattaaaatcgcagcacattttttaaaaagttaaaaagattctagccatatatgtaaatattcttgaccaggatcagatgatttcgccacgcttgttttttaattttactaaatttgtttataaaataaatttacatttatcaaaataaaggtgtgataaatgcagaaacttccatgccaaaagttgttcgaatcggatcatttatttaaaagttatgggcaatttggtaattagtatgtagcaaccggtaggtggagctaatgtgcgcactcggagaatgtccttttgttgatgccacttataaatttccctcgcagaagggcgtttaaagggtatctcatggtcgatgacctgaccttgccgtcctctttccccatatttataaagccaaaaagcccacgctttatttttcggtagtttctttgaatttctctataggcttaattgttttcatataaaattcgagtataccctaggggcatgtgaaatggctcttccctttggcctctccaactgaaataataagagtggtaatttggtttttcagtcatttgggctttttagtatgcttacttgctatctggaggccaaacatcaggacgaatcccaccatcgacgagagtaaaatgcgtatgccggcatggtttttggccacaatttcaaagaagaccacgtagatgagggtgccacaggccagcccctggaggattcctgataccgtgctgggctgattagccgcggcagattcgctaactgcaattccgatgcccacgccaatcggagttacgatcgagaagacgaggaggtaaaccacggccagcagccagcgggtatgggccatcatgatctccatgccgatgcagaaggccagaacaagcttgtggacggaaatggctccggtcatgaaccacaccgtgctcacactcatctccaggccaatggccatgccgccgaagagttcgtgcagggagagggccacgattattccgaggccacgcagccagttgggctccttggggctttcttctggctggaccacaatctctgtccgcagctcctcgcccgcatccttgatcgtgaccacctcccgtagcttcctttgctgccgccgacgaaccacaaagtgcatggtttcctcaatgcagtacatcagatagaagccagtgcagagcagaacctccggcaggccgaagggagtgggggccagcatgcggcagtcctggagagcgttcaccacctcgaccacctccggcagcatgtggatgaaggtggtggctatgagaacccctccaccgaaattaagcagacacagcaccactttgaattcgcgagcattgttctcgggcctctgggtccacttgtagaagcgatccagaagatagggaataaagcagaagatcagggtaacgaggaagagcaccactatggccacgatcttggccacgattaagtgttggtctaccattgcaaacggagtaactggcccgatatcaagccattcactttttatagtggaattgatatctattcagttagtggaaggtatcggcgaattgtcgaatatttacacatattaagggcttagtggtttcgacttaagttggccgagcaatgtgctttagcgaaaggtatacggcaaaatttcggcatgatatctttcggtcattatctacctttcgatttaacacattttgccacattagccattatttccctggctcccagcatgagctcatcggtctgttttgccgcattagaatgtcagtgggagttttcagactgaaatttcagctggcgaaaacaaataatttgttgtcaacggcaggcaaagccttgtgcacccaggaatctatgtgctatcactaggttgtggagacagtttcgcctgataacttcgaaattgagatatcaccgccaaatgccccatactaacatagttcgtgagtcagattaaacatgtacctgtacctgtaaatattgtgaagcaaaggaaattataaaataaatcactcgttgggtaatctttgaatagtttttgaatatataatggcgttattgcaacggataaacggataaacttattatttaaccacgagtttgggagattacatttgtcatcgtcctttaattctaggcaaggttttgaattcttaatatgaggtatttcgatttttccattgacaatcacgttcttcttctcaagtacacaactaaagtagcaattgattttacttttctttgctcaaaccaacctgctgtatgcattgttttttaatttagtttatttctagttgtgaataaaaagcataaataagatctcagagtaattacttacttcaagagaaaaaaccgatagtagagaccaatggggtcagcaagagggtcacgacaaacgacctgtttattttgaagactgaatttaaagatagcagtcaaccacatagcagtcatcttttgcatcaatt

SEQ ID NO: 20039 - DNA, 918 bp, DROSOPHILA
atggtagaccaacacttaatcgtggccaagatcgtggccatagtggtgctcttcctcgttaccctgatcttctgctttattccctatcttctggatcgcttctacaagtggacccagaggcccgagaacaatgctcgcgaattcaaagtggtgctgtgtctgcttaatttcggtggaggggttctcatagccaccaccttcatccacatgctgccggaggtggtcgaggtggtgaacgctctccaggactgccgcatgctggcccccactcccttcggcctgccggaggttctgctctgcactggcttctatctgatgtactgcattgaggaaaccatgcactttgtggttcgtcggcggcagcaaaggaagctacgggaggtggtcacgatcaaggatgcgggcgaggagctgcggacagagattgtggtccagccagaagaaagccccaaggagcccaactggctgcgtggcctcggaataatcgtggccctctccctgcacgaactcttcggcggcatggccattggcctggagatgagtgtgagcacggtgtggttcatgaccggagccatttccgtccacaagcttgttctggccttctgcatcggcatggagatcatgatggcccatacccgctggctgctggccgtggtttacctcctcgtcttctcgatcgtaactccgattggcgtgggcatcggaattgcagttagcgaatctgccgcggctaatcagcccagcacggtatcaggaatcctccaggggctggcctgtggcaccctcatctacgtggtcttctttgaaattgtggccaaaaaccatgccggcatacgcattttactctcgtcgatggtgggattcgtcctgatgtttggcctccagatagcaagtaagcatactaaaaagcccaaatga

SEQ ID NO: 20040 - protein, 305 aa, DROSOPHILA
MVDQHLIVAKIVAIVVLFLVTLIFCFIPYLLDRFYKWTQRPENNAREFKVVLCLLNFGGGVLIATTFIHMLPEVVEVVNALQDCRMLAPTPFGLPEVLLCTGFYLMYCIEETMHFVVRRRQQRKLREVVTIKDAGEELRTEIVVQPEESPKEPNWLRGLGIIVALSLHELFGGMAIGLEMSVSTVWFMTGAISVHKLVLAFCIGMEIMMAHTRWLLAVVYLLVFSIVTPIGVGIGIAVSESAAANQPSTVSGILQGLACGTLIYVVFFEIVAKNHAGIRILLSSMVGFVLMFGLQIASKHTKKPK

SEQ ID NO: 20041 - DNA, 5089 bp, DROSOPHILA
tggaattcttctcagagcaagaaattttgatccgctttgaacacttcttggataaatctgaaggaagggtgattagcttcaacattcgggatatattcgatagtcttggcggtttggcgattagggaaacaaccttggatggaaatatgccactgagcgatatgaagcgattcaagttccatgcacaagaatccggaaccaagccgtcatccgtggaatattctacggcacagcacaagccacttgaggctgtcaaatcggatgaggcctcactttttgctgtaacactatatcctatgcaaattcgcacttttattattaaaacagagtaagaaaagtataagaaataaatgatcaaaattaaaattacattattcttatctttttggggtcataatcattatcggctacttctgcatgtggagctttccctttcctgaagattatagctcgcttgagtgtaatcccaaaatggaatggtgctcgcaatagtatacacattgtaatctttaagtgggcaattaccaattaaaatccatttaagttattgaatgataagaattgcaattcatgccaaatcgaagtacattttgattacgttagaaacactggagcactgcatgtggcccaaataaaacgcatggtacttaccctttgagacctctcactagcggttggttttaagttaattacctctctcgactagttaaaattcaaaacattctgaagtgttgattacttatcagataaccccccattgagaagtttataaaagtggcaacttttattgtatagccagttcttgttgtgcagttgctggttagggaactctgcaagatgagttctgtaaagaacttggccattttgttggccttgtttgcctcttatattgtccaatctgaggctgtttgttatgaggtgagaaaaacaatagatctttgatctttgcattggtattaaaatgttctttatacagtcatgtcccgaaacaaagtccaatatgatcaatattcacttggtgccacactcccatgatgacttgggttggctaaaaacggtcgatcagtactattatggcaataagcacaacattcaacatgctggagttcaatatatatttgataccgttgttgccgagctgagcaaggactcacgtcgccgcttcatccaggtggagacgggtttcttcgccaagtggtgggaggatcagtcggaaaccaagaagaaactggtcaaaacattggtgaacgagggtcgtctggaattcactggtggcgcgtggagcatgaacgatgaagctgccgtgaactaccagagtgtaattgaccagtttgccgttggcttaaagtaagttcataacaaatcagcattccttcattacataatcgtaataacaccatattttaaaggttcttgaatgacaactttggggtctgtggtcgccctcgcgtcggctggcagatcgatgcctttggtcactctcgggagcaggcctcgatgtttgcccaaatggctttcgatggtcagttttttgcacgcatggatcagaatgacaagaacaaacgagtggataacctgggccttgaaatggtctgggatgccagcgagaccctggaggaaatggacttcttcacgggcatgctctacaatcactactctgctccacctggcttttgctttgactcactctgccaagatgatcccattattgatggaaagagctacgacaacaatgtcaagtccagggtagatgattttctcaactatgcttccaatttggctggctattatcgctctaatcacatcatggtgccaatgggtgatgattttcaatatgaaaatgcctacatgaactacaagaacatggacaaactgatcaagtgggttactacaatatttctattagaaagtataatttagtaatttattatctttaggtatgtcaatgagcgtcaagccagcggctccaagtataatatcttctattcaactgctggatgctatctgaactccctgcacaagagcctccaaagcttcccgaacaagacacaggacttcctgccccattcccatgaggccaagagcttttggaccggcttcttcacctctcgtcccacccagaagcgatttgaacgcgatggcaaccatatcctccaagtggccaagcaactgagtgtgctagcagatctttcaggcgaagaacaacataaagacttggactatctgcgtcagattatggctgttatgcagcaccacgatgccatcacaggcaccgagaaacaggaagtgtccaatgactacgatcgccttttgtacgatgccattttgggaggtgccaacacagcccgcgatgctcttcgagtgcttaccaatcagccaaatggagagttccagagctgtctaaaattgaatataagcgagtgcgcttttaccaaggaaaatgcagatgacttcatggttactctgtacaatccattggctcacacgtctacgcagtatgtgcgagttcctgtcaaggaggacagctaccaggttaccgacgagaagggtggattggttgcttctgagctggtcccagttccctgggaagtcctgtccctggaattccgcaacaacgacactcaacatgagctggttttcaaggcatccgttaataaaatcgcaacttactttatcaaaaagatcgataaaactacagaagttgatatcactgtgaacactcaaactgaacagtctgtcaatgaggaggaatcaaatgtgaaagttcccaaacgttttaagaaagttcactccttgaaaaccgatttagaaacccttgatgatcaagagacaattgttcaaaattcggtaagttttacaatattaacaaaaataggtaatatatacctaaatattttctttccttactagcttataaaactagtgatcgacaataacacaggacgtctgaagaccgttgaaatgaacggagtttccgaggatattgatcagacctttggaatgtacaagactgcaagatcctgccattacatattccgccaggatgcagacttggaacttgtggaagatgcttttgatttcacagtttacgatggtgaatccgtcaaggaagtccaccagcacgttaacgagtggatctcgcaagtcatccgcatctacgagggtgtcaatcgagtggagtttgagtggctagtgggacctgttccaattgacgatgagctgggcaaagagatcgtcaccatcttcaaaagtggcatctcttccggtggagtcttctacaccgactccaatggtcgtgaaatgatgagaagagaaaaggacaagcgggaggactttagtcccgatttaagtgagcagcctgtgagcggaaactactatccagtcacgtcgaggatggctctacaggacagtagcaagcgaatggtcctgctcaatgaccgttctcagggaggcgccagcttggaggacggacgtttggagatgatgctgcatcgtcgtcacattttcgccgacggctcaggagctgcagaagccatcaatgaacaacagttcggaaagggactgattgcccgtggaaaactgtttctttacctcaacgctatcgaagatggagccactgcatccgaacgggtggccgagaaagagattcatttgcccttctggaagttcttcagcaaatctaataacatccaaagtgatgtaactaagacgttgtccgattttaacgacttaccccagtccgttcatctgcttactctagagccctattccaaggacgaaatcttgttgcgtttggagaactttttggatcagactgagggcaatgtggtcagtttcagtattcggcaaattttcgatgatcttggtggactggagattcgtgaaacgaccttggatggcaaccttccactaagcgatatgaagcgtctaaagttccaccatgatggttctggtcctagtcactcagttccggagtactttaccagtctgcataagcctttggcagctgataaaactcaggatgcctcggagttcagtgttaccttaaagcccatgcaaatccgtactttcatcattaaaaaagagtaaagctgcgtcataaatactgcaaaaatatgtattaaattattcgaaaatattttaacgaacatggctattaatgatattaataacgctgtcatactattcggtttattgtaatgcctatcaaatagacgaaccgcaatgataattacaagttggctatgtcgaatcgagattatcagtatcagccgctccgcaggattttcatatatgccgcttacaatgcagatacatttactgcattggcttccaaccactcatgagtcccattcccactgaaaacacctcaaatcccgccctgagtcggcataagtcctttggttatttggtgaacccgtggcttccactcttccccgctttgcattttgcctgtgggttttcggtgttgtgcaatgcctcgctcttatatctccatataaatgtatatatacatatatatatatatatatatatatatatatatacaagtagaagtgatatctgttgttgttggtctaatgctgctaatgtctggcactcgaaaaaagatttgcgcccaataccccttggttttggcccctgcccactaaatacttttgtgccaacaccacactcgcattgcaggaggactgtggtcctgggcttttattattaagttcgccacgggagactttaatctttcgtctcctggttgggacagccagctaacacacacacagactcacagatacccacagctttacacagctacaccctcggctctactccatttcacttcagtgcgatgcaaaacaatgagctcctgaattcatgccatatgtgtgtgtacggagtctagcgtcctgggagatgggaaaaattatttaatattgcccgtcttaggcgatgaggcgtggcaagttgaggcgttgtttggtactaatccttggcgagcattagacacggaatttaatttagttccagatgcaggctgaaaagacacacagagccaaaatatcaacaaaaatgaaatgaacaacccgaaaaa

SEQ ID NO: 20042 - DNA, 2907 bp, DROSOPHILA
atgatcaatattcacttggtgccacactcccatgatgacttgggttggctaaaaacggtcgatcagtactattatggcaataagcacaacattcaacatgctggagttcaatatatatttgataccgttgttgccgagctgagcaaggactcacgtcgccgcttcatccaggtggagacgggtttcttcgccaagtggtgggaggatcagtcggaaaccaagaagaaactggtcaaaacattggtgaacgagggtcgtctggaattcactggtggcgcgtggagcatgaacgatgaagctgccgtgaactaccagagtgtaattgaccagtttgccgttggcttaaagttcttgaatgacaactttggggtctgtggtcgccctcgcgtcggctggcagatcgatgcctttggtcactctcgggagcaggcctcgatgtttgcccaaatggctttcgatggtcagttttttgcacgcatggatcagaatgacaagaacaaacgagtggataacctgggccttgaaatggtctgggatgccagcgagaccctggaggaaatggacttcttcacgggcatgctctacaatcactactctgctccacctggcttttgctttgactcactctgccaagatgatcccattattgatggaaagagctacgacaacaatgtcaagtccagggtagatgattttctcaactatgcttccaatttggctggctattatcgctctaatcacatcatggtgccaatgggtgatgattttcaatatgaaaatgcctacatgaactacaagaacatggacaaactgatcaagtatgtcaatgagcgtcaagccagcggctccaagtataatatcttctattcaactgctggatgctatctgaactccctgcacaagagcctccaaagcttcccgaacaagacacaggacttcctgccccattcccatgaggccaagagcttttggaccggcttcttcacctctcgtcccacccagaagcgatttgaacgcgatggcaaccatatcctccaagtggccaagcaactgagtgtgctagcagatctttcaggcgaagaacaacataaagacttggactatctgcgtcagattatggctgttatgcagcaccacgatgccatcacaggcaccgagaaacaggaagtgtccaatgactacgatcgccttttgtacgatgccattttgggaggtgccaacacagcccgcgatgctcttcgagtgcttaccaatcagccaaatggagagttccagagctgtctaaaattgaatataagcgagtgcgcttttaccaaggaaaatgcagatgacttcatggttactctgtacaatccattggctcacacgtctacgcagtatgtgcgagttcctgtcaaggaggacagctaccaggttaccgacgagaagggtggattggttgcttctgagctggtcccagttccctgggaagtcctgtccctggaattccgcaacaacgacactcaacatgagctggttttcaaggcatccgttaataaaatcgcaacttactttatcaaaaagatcgataaaactacagaagttgatatcactgtgaacactcaaactgaacagtctgtcaatgaggaggaatcaaatgtgaaagttcccaaacgttttaagaaagttcactccttgaaaaccgatttagaaacccttgatgatcaagagacaattgttcaaaattcgcttataaaactagtgatcgacaataacacaggacgtctgaagaccgttgaaatgaacggagtttccgaggatattgatcagacctttggaatgtacaagactgcaagatcctgccattacatattccgccaggatgcagacttggaacttgtggaagatgcttttgatttcacagtttacgatggtgaatccgtcaaggaagtccaccagcacgttaacgagtggatctcgcaagtcatccgcatctacgagggtgtcaatcgagtggagtttgagtggctagtgggacctgttccaattgacgatgagctgggcaaagagatcgtcaccatcttcaaaagtggcatctcttccggtggagtcttctacaccgactccaatggtcgtgaaatgatgagaagagaaaaggacaagcgggaggactttagtcccgatttaagtgagcagcctgtgagcggaaactactatccagtcacgtcgaggatggctctacaggacagtagcaagcgaatggtcctgctcaatgaccgttctcagggaggcgccagcttggaggacggacgtttggagatgatgctgcatcgtcgtcacattttcgccgacggctcaggagctgcagaagccatcaatgaacaacagttcggaaagggactgattgcccgtggaaaactgtttctttacctcaacgctatcgaagatggagccactgcatccgaacgggtggccgagaaagagattcatttgcccttctggaagttcttcagcaaatctaataacatccaaagtgatgtaactaagacgttgtccgattttaacgacttaccccagtccgttcatctgcttactctagagccctattccaaggacgaaatcttgttgcgtttggagaactttttggatcagactgagggcaatgtggtcagtttcagtattcggcaaattttcgatgatcttggtggactggagattcgtgaaacgaccttggatggcaaccttccactaagcgatatgaagcgtctaaagttccaccatgatggttctggtcctagtcactcagttccggagtactttaccagtctgcataagcctttggcagctgataaaactcaggatgcctcggagttcagtgttaccttaaagcccatgcaaatccgtactttcatcattaaaaaagagtaa

SEQ ID NO: 20043 - protein, 968 aa, DROSOPHILA
MINIHLVPHSHDDLGWLKTVDQYYYGNKHNIQHAGVQYIFDTVVAELSKDSRRRFIQVETGFFAKWWEDQSETKKKLVKTLVNEGRLEFTGGAWSMNDEAAVNYQSVIDQFAVGLKFLNDNFGVCGRPRVGWQIDAFGHSREQASMFAQMAFDGQFFARMDQNDKNKRVDNLGLEMVWDASETLEEMDFFTGMLYNHYSAPPGFCFDSLCQDDPIIDGKSYDNNVKSRVDDFLNYASNLAGYYRSNHIMVPMGDDFQYENAYMNYKNMDKLIKYVNERQASGSKYNIFYSTAGCYLNSLHKSLQSFPNKTQDFLPHSHEAKSFWTGFFTSRPTQKRFERDGNHILQVAKQLSVLADLSGEEQHKDLDYLRQIMAVMQHHDAITGTEKQEVSNDYDRLLYDAILGGANTARDALRVLTNQPNGEFQSCLKLNISECAFTKENADDFMVTLYNPLAHTSTQYVRVPVKEDSYQVTDEKGGLVASELVPVPWEVLSLEFRNNDTQHELVFKASVNKIATYFIKKIDKTTEVDITVNTQTEQSVNEEESNVKVPKRFKKVHSLKTDLETLDDQETIVQNSLIKLVIDNNTGRLKTVEMNGVSEDIDQTFGMYKTARSCHYIFRQDADLELVEDAFDFTVYDGESVKEVHQHVNEWISQVIRIYEGVNRVEFEWLVGPVPIDDELGKEIVTIFKSGISSGGVFYTDSNGREMMRREKDKREDFSPDLSEQPVSGNYYPVTSRMALQDSSKRMVLLNDRSQGGASLEDGRLEMMLHRRHIFADGSGAAEAINEQQFGKGLIARGKLFLYLNAIEDGATASERVAEKEIHLPFWKFFSKSNNIQSDVTKTLSDFNDLPQSVHLLTLEPYSKDEILLRLENFLDQTEGNVVSFSIRQIFDDLGGLEIRETTLDGNLPLSDMKRLKFHHDGSGPSHSVPEYFTSLHKPLAADKTQDASEFSVTLKPMQIRTFIIKKE

SEQ ID NO: 20044 - DNA, 2966 bp, DROSOPHILA
ttggtacctcgatctgaattttggccacaatctaatctaggcacttgaccaattcgaatacctcaatgtaaaacttcttcggtcgaacaaaaagatcgtataaattcccaaacgcacacgaacatggcaacaaaattgatttgagtctatgggttttttatgttttaaaaaacaaatggaaatttacgtcaaggaagaaaaaaagaaaaccaaacatgctgtttgtcttggccaactcctgttgtccacaatcaaaagttttaccactgctttttaagaagttcgaattttgttaagttgattctttattctgtattctttattcgctggaattggagtgcgaggcaagttcgtttgccaaattggagatttaagcacgtaaatgcgaaggacacgtaaacaatttaattttatttactgaaagaaatgaaatgatgttttatgatgggggcagaattaaaaatacaaccccgaggcgacgttaaaggccaattacgaaattttccatttgtaccaccataaatgacacatcgttgggcacaaacatatgttctttcgaacaaatgggcatgtgtacatacatatgtatgtttcgataagggtcgattggccaactaatcagtcaagtagcgattcattgattgatgtatgtacgtcaatcaatcagtttatcatcggctcgcaacgcttaaaaagccaatgttcatggttcggaaagcgaaagttcaattaagtgataagcattataatgcgtttagaaccttaaagttttgagtaatgtcatataagtaaacgtgacttgggattttttcatttttcggttgttttaattgttcagattgttggagctataaaactaaatggcgagtgcgtgacataataacacgatgtgggttcatgaggcttcaatcctaaccctagaaatggttttacgctcttctgggagaacatgttaataatttagctataacagtttaatatttgcaccatatttcgttttataacgctttgtttaataaccttgttactcggaaacgccaaattttaaacgattattgagaaaatgaaccagaaaccttggtaacaatgaaactaacttcctagaccgctgaagaatcgatagtggattcttccggcgcctcacttgtggattcttcgggagcctcggtcgtcgattcttcgggtgcctcacttgtggattctacaggcgcctcggttgtcgattcttcgggctcctctgtggtggattcttcgggcgcctcgctggaggattcttcgggagcctcgctggtggattcttcaggctcctcggtggtggtttcttccggagcctgagtggtatcctcagaaccgctaccatcctcagagtcggtggtgctttcctccggtgcctgagtggtggattcctccggaacttcaggggccagggtggtggtgtcctccgaggaaccgctgccttcttcagagccggtggtgatttcctctggtgcctgactggtagattcttctggaacctcgggtgccagagtggtctcctccgcgggactggtaacatccgtggtggataccacatcatcctcggtggtcaactcaggcagatccgttggtggtggtggaggagggcgctgtccaccgtggccttgaccattaccatgaccatgactgttgccatgatgaccatgatggttgtttccgtgtccgtttccttggccgaggccttgattgtttccgtgagattgtccctgaccattttcgccatcccactgaccctgaccgttgccatttggattccactgattttggctattccacctctgttcctgcacgatttcatcgtcaccggagccccaaccgaacctcctggcccagttgctgccaaaatttccgaaccaaccgccattggggcggccagaagccactgccaccaaggcagtgaagaggataagagttaggaccttcatttcgctattgtttcgattatactaccgggttctgcagatggacatagcttttatagaaagctgataaccacttccattcactgccagacatttcgacctcacactgccacattcttatctaatcgcaggtaacctgtctgatagtcagaccaacaataatcgtaattatcatatttatctgaacatgaattcggattggttgtttactgtttgccctgaacttaggatacgtaaatacttcttggaaggaacaccaacaaataaaagataatatttaaatttttccaaagaagcacctgtccagactctgtataaatttcgggtaatttctttatgatcaagcaaaatccaaatcccctttttcatgtggtgtaaagaaattgcgatatgcgttgttgggcggatcgtaaagtgatagtatcaggtgttttttaaccgcccccccaaggtaattgtttttgaattttattttgtggctacgtgtgagtcatgaattagcttgaagttttcacacttatcagtgaagagctgttatcacgaaattcccaattgatcatcgtggaaaaaacgtagaacaacacaccgataagcttgcaagattttgtgtaacgataatttcccgaattgtgggaaaaacaaaaggtgatataaaaaatatgcgatagccgaggcccttaagattgctcaccatcgatgctaataataattttaatttccatcaacaaacaaaacaaaaaaagaataaacttcgagcacagaactgtatataaacacagggacttaaaactttttgcattacctcgtcaggattttattatgccatgcgctgggaaacttcttccagccaaacagcgaatctaacgtactaaatatgtatgtatttcgttctaggatgactttctgctggccaagaggaacaaaccatcgctgtccattgtcaatccgctggatgtgctgcgccagcgtctgctcctggaaatcgcacgcaggcaaatgaaggagaac

SEQ ID NO: 20045 - DNA, 966 bp, DROSOPHILA
gcgaaatgaaggtcctaactcttatcctcttcactgccttggtggcagtggcttctggccgccccaatggcggttggttcggaaattttggcagcaactgggccaggaggttcggttggggctccggtgacgatgaaatcgtgcaggaacagaggtggaatagccaaaatcagtggaatccaaatggcaacggtcagggtcagtgggatggcgaaaatggtcagggacaatctcacggaaacaatcaaggcctcggccaaggaaacggacacggaaacaaccatcatggtcatcatggcaacagtcatggtcatggtaatggtcaaggccacggtggacagcgccctcctccaccaccaccaacggatctgcctgagttgaccaccgaggatgatgtggtatccaccacggatgttaccagtcccgcggaggagaccactctggcacccgaggttccagaagaatctaccagtcaggcaccagaggaaatcaccaccggctctgaagaaggcagcggttcctcggaggacaccaccaccctggcccctgaagttccggaggaatccaccactcaggcaccggaggaaagcaccaccgactctgaggatggtagcggttctgaggataccactcaggctccggaagaaaccaccaccgaggagcctgaagaatccaccagcgaggctcccgaagaatcctccagcgaggcgcccgaagaatccaccacagaggagcccgaagaatcgacaaccgaggcgcctgtagaatccacaagtgaggcacccgaagaatcgacgaccgaggctcccgaagaatccacaagtgaggcgccggaagaatccactatcgattcttcagcggtctaggaagttagtttcattgttaccaaggtttctggttcattttctcaataatcgtttaaaatttggcgtttccgagtaacaaggttattaaacaaagcgttat

SEQ ID NO: 20046 - protein, 286 aa, DROSOPHILA
MKVLTLILFTALVAVASGRPNGGWFGNFGSNWARRFGWGSGDDEIVQEQRWNSQNQWNPNGNGQGQWDGENGQGQSHGNNQGLGQGNGHGNNHHGHHGNSHGHGNGQGHGGQRPPPPPPTDLPELTTEDDVVSTTDVTSPAEETTLAPEVPEESTSQAPEEITTGSEEGSGSSEDTTTLAPEVPEESTTQAPEESTTDSEDGSGSEDTTQAPEETTTEEPEESTSEAPEESSSEAPEESTTEEPEESTTEAPVESTSEAPEESTTEAPEESTSEAPEESTIDSSAV

SEQ ID NO: 20047 - DNA, 4919 bp, DROSOPHILA
tggatagtgtagcggatgctacagaaatgttcttgtgaattcacacacttgccatgtgagtgtggctatagttagttgtttcagaattaagcaaaaataacagcagcagcaagaacagcgaaaaatcattttgttggcccaccaactgcttgagttttctatttttaacactaaaattgtaggtggctgtgtcggaaagagacggatggccacgaatactttgttgttggccaacacatcaccgtgtgtgtatgtatgtacgttgtacatatatatgtacatatgtatgccacatctgcaagtattgaatttatgcttttttataggtaaattccttcctttctccaaaattcacacaaattcgaatatcgtctccggggaaaatctcccacgctcgacaatttctatattgtgatccaacttcaatagatcagtgcgaatccccaattttcatcctgctatccaccggcttgtccaaatcacagggttagggattgggttgtgattcgtggtgtggcggatgagaagttttgtggggggggggttatagagaagaagacgtcgtgccgacaaaaacataatctggcgccgagcccagacattcatctgcattgcttctgttgttgtaatgtttattattatacgtatacgtaatatgtgtgtctgccttggtcgatagcgaacgcgaaaatgagagatcttgtttttttaaaaaattactaagaattactactcgtacagtggtgattgtatatatttaaggttgtgtcctttacctaggccatcgacgttaactggtcagcaggagagcttaagtaaagattgaataaaattggtttggcccacgctaattggtgcattgtaaactggaatctgaatccctagcgttcgattttagcaagcaccaacacacactggatttttcggttatttgggttatgcagtcaataaggaaatacatatttacatatcgaattgcgggcattgcggaataatcttttcatttcaactttggtattactggaatcaggaaaattatggtggaataagggtaaaacattgtcaatgaattaatttgggggaaacaaagtttcaaagtaggtaattataaggagagtgcaagatagaaggttcccagtactgttcacggaaaacttacccataaccctgggcgggcatgtttcatgatctggacctgcagtcgtttgatagaatagatattggattgataaattgtccttttgcattttggctcaaagagggttcgaaacaccgccggaagagaaattattattatatatagatagctatattaaatgttaagtatgccgccacttagcttcggttagttacaagtagtatacgtatttatagatagagtacagacatacgcaaaagatattgatttatggaatagaatgtacagaataggtagttttgaaagtagttctagtacctagctgtatgatttttagtcacaagagagctaaactgtttgtgttcgctaaaaactgcaactgctttgaaaaagaatatcatcatttcaagtgtccgacactagagtgttcggagtgctaaacgtttgaagaactatgtatgtgctacggttaagtcattcacacttacagaacagaacggctacgaagtcggtgtcctcgatgatcttctgcaatatcttggcattgacctcctcgatgcgatcgggcaagtccatggcctccaaggaggtgaggaaatcgagcactccttcctcgtccatgagatccccatcatatatgatgggctccttttccctgcggttttcgagatatggattcgattcgattaggtcttgtgtcttgtttgtggtgggggaattacctacctgaagtaggtgagggcggggaagttcttgatgccatactgtttggctagtcgtttgtcgttgattttcacgaagtccacaccgaaggagtcggtgtcatcgtcgattttctcgagttccgctaaaaccttatcacaggtcacgcagcttcgcgcatctgaaatcgtagaagccgagcgtgtgagtactaaagatcgattatatgtagataccggcagcgattgacagtcggcaactgctgcatgtgacgccacaagagaccataactaaattcccattcgaattgaaagcccaaagcccaaagccctggcagaagtggagccaaatgccgcaaagattattcattcctatatagtagatgcaggatgcatcatcggaccgcgcaatcgaaaataagcctgaatgaatgaatgaaatgacagcagcgccaggccaattctgtgctattaatgcggcagcaactgccaacaaatatgctgaaattctaaattaattcataaaattcatgcggccactattagggaaatgaattgcagcccacaaaagaccaccgttggcccacgtctctacaaacgttctggttggttaaacggcagaccagactgcaaaatcggaatcattaatacatcgccgagtaaacagccatttcgattgtttggcaatccgttcaaaacaatctttcactgcttggaaagtaatcgcgagttggccgaataccccccccccctgcctactccatactcctaatgctgttatttacgggctccaacactaaggtgtttcctgtgtacaccaggtgctttggaaaatccactgcaggatgtttgatttaaaatcatcagagtgctatcgcatgcagtgcaataacataaatagcgttcacttgaaataataaacacatttagcttatcgatagaattcgtttacatattgaactatctgcgatttaattgccaaaactattcaatgctctgccatttgcgtagatattccatgattatttcgattgtcggccagcgtcattgggcctgaggcttttggacttaaaatattttcattgtcaacaattatttttggaattgccgccaatgctaatgaaacacatcgtgaggtatatgtacatatacatataaaggagaatattacaatccgaagatcactttcgtgtttattaactttgacattggggaacagcgcgcaaatgcccaatctatatttaaactgattaaagagatttaataaataagccattctttcacgcgaacggtaaccattttttttttttttttttttttggttacccaaaaacaggtcaccaatgggacccactggacaaggggattgaaaataaatttaaaagggcaggaaatctgttggcaactgctggaaggaaattaaattctgcttcataggtatgtaggtatattttgtgccaaaagtttgcgccaaaatagactaaaaaaccgaaaatataaaaagctgcaaagacgatttctcacagccaagagagatttctctactcataaacagatcgcaaagatagcgcagaaatgaaaaaaatatagaaaagggaaggcagcacagactactggcaactcggggaggaaatgaagaaatagaaaaaaaataaaaaattaacccgaatgaaaatcgcggacatttcgagcaacgaatttttcacatattttcatttgtatgtgaatttttagaattttcactagcgaaaatttatataatatggcttctgttactatttcgagtccggtacggtccggtctgacgataaatgagcggtgcccggacgaccccgagagcactggcataaccaccctcccacttacaccagaaaacggccacgtaatccttgtcggccaggagcttctccagctgcttggcattgacctcctcgatgacggcctccggctccggaggcgccactggctgcgagcccttcttgttgttgttgttgcctgcaccactcacatgtccgggaaaactcagggccagcagagcacacacgagcagcgagagagtcttgaggcgggtgaaagtcatcctgcgatcggttacggttctgatgtgctttaggcccttaacgcgaacatgcgtgcgcgtgtctgctcgttttggtgtgttctacagtttatagtgttataattgtataattgattcgttctcgtcgtttggggtctttcgttattaaaatttgtattcctttgagaatcggtcactatttttagttgataatggtgtttcttctttcgcaatttattttatgtataacaactttttgttcactgatacatatatacggggttcgtatatgcacaggcgagatatatgtggggtatatacgagaataattagattatatatgtggtttcttgcttctattaattgaacgttttccgcggactgtactctttgctcttcagattttgttccactccgtgcagaggtccgctcgcaactgaaattattttggtggaatctcggtgccattcaagaggccttgcccgagctttagggatcgggatcgtggacttcgtgctttggcgcagcttttccgctcccccgaaaagctttcgcgtcgagcacaggagcgccaatcgagtgagcagtgtggtgaaatcaggcaaagagcaagagtttcccttttgaattgcagttctctgtttatgcattcggtgcaaacaagaaagtgactacgaatagtcctataaaaacaaactcggagaatcgctttcattatgcgctacaacaattcacagtactttgtattccccattttccctttggtaaacacttttaacaatgtgtttcgagctaacattttgtcaacgttatgcttagtctaaaatagaaaggattaaacttccctttgctaagagacataacgtgacattgttgaatctttaagttttatagttccaaaaatctatgcgtttatagagataggaggacatgaacagatcgaatcggttaatgatcctcaataagaataaatgtaaattctagggacggaaacgtttccttccagcagtcaactattatg

SEQ ID NO: 20048 - DNA, 594 bp, DROSOPHILA
atgactttcacccgcctcaagactctctcgctgctcgtgtgtgctctgctggccctgagttttcccggacatgtgagtggtgcaggcaacaacaacaacaagaagggctcgcagccagtggcgcctccggagccggaggccgtcatcgaggaggtcaatgccaagcagctggagaagctcctggccgacaaggattacgtggccgttttctggtatgcgcgaagctgcgtgacctgtgataaggttttagcggaactcgagaaaatcgacgatgacaccgactccttcggtgtggacttcgtgaaaatcaacgacaaacgactagccaaacagtatggcatcaagaacttccccgccctcacctacttcagggaaaaggagcccatcatatatgatggggatctcatggacgaggaaggagtgctcgatttcctcacctccttggaggccatggacttgcccgatcgcatcgaggaggtcaatgccaagatattgcagaagatcatcgaggacaccgacttcgtagccgttctgttctgtccagatcatgaaacatgcccgcccagggttatggtaataccaaagttgaaatga

SEQ ID NO: 20049 - protein, 197 aa, DROSOPHILA
MTFTRLKTLSLLVCALLALSFPGHVSGAGNNNNKKGSQPVAPPEPEAVIEEVNAKQLEKLLADKDYVAVFWYARSCVTCDKVLAELEKIDDDTDSFGVDFVKINDKRLAKQYGIKNFPALTYFREKEPIIYDGDLMDEEGVLDFLTSLEAMDLPDRIEEVNAKILQKIIEDTDFVAVLFCPDHETCPPRVMVIPKLK

SEQ ID NO: 20050 - DNA, 2959 bp, DROSOPHILA
ctggtggcgcgactggcgcactatcgagtcgattacatacagcccgggtactttgtactccggcttgcacttcaagatgaacttctccacactctggacgacgtgcttatacagcttgatggcccgcatcgccgacttggtgatggcggccatcttcgctttggaaatgggcggtcggctgtcatagagtccggagagctaaggagaaatatagatgttacagtacggctatagtttacggatatctgggacatggagttatcgttatcgggtgctggccaaaaagcaaccctgagcggtgctgttcggtgctctgcctgcgcctccagcaggatctgtatacctcccgcacattggacaatccgaataccgacttcaagcggacattgtgcaaccacgccggctgctccataacgaacctcgtttctaatgcatctatagcttacctcattgttgaaggcaaccacggtttccatgttcaattgcttggttcactcacggcacgcacacacaatatttagttttgcatactttggttggtcaacacaatcgtttaaaactggcgaaaaacaattttctcgacctttctgcggtttccacggcttttaaaaaaactttttacaaagcgtgaaaaaaatggctgccctaaagcctgaagcgttgccagacctgtaaagttgacattttcaaggcatttctggaaattgtgctgttaatggcagtgtgaccgtatgtggtgcataacgtttcggtattaaaaaattttccaaatatttataaaaaataaaacgaaatagaattttcattatggaatccaaaagtttcatataaaaaaataatgacaacaaaataaaaatgaccttaaataaatttaaatgaaatcaaatcttcttaaatgtactaccttttaaaaataatcgctatcggcggtgtcgatctttttagcattgtgtcgatgacaatacatctggcaacactggtcaatattaaacatatattaaacaaattaaaatgagctcaaaccaccgtcctctggacgattcggatatcctcctaatacaaaccatccgcgagacgccgtcgctgtacgatccccagctgccctcctttcggctgtcgcagcgcaaagaggaggactgggcaaaagtggcggatttgctaaacatctccatctcagacgctcggcgacggtggacgtgtctgcgggatcgctattcgcgggagcttaagcagaagcgcctgcatccgtccggcgagtttggtcacaatgacttctttcggaagatggacttcctgcgggactttgtgcgcaagagacgcgagcgcagaggacgcgaacgggatcgggaacaaaagccaaccgggtggatgaaggttgatttacagcgacggcgtcgtacccgcctgcctattgacacagagaccttgatcgaggagcaaggttcgcacgcctacgatgagggcgaggagcaacacgactacgacgctaagctggagtctcataccacacaatcggagacgtattcggtggtcgtggaggcggacgatgggcaggagcccgaacaggagagcttcgatgagttcctgggggatgcggagtgcgagcaaaaggtcaaggtggtcacaattcatccggaaatcgctgctccgaatgcgacgtccgcacctgagcctattgagtctaaccacgcggatctgaactacttggtctgtatgccgcccaatgcgaatcaggagcgagagcattccgccccagaattacccaatcccacggccgtcatcacccaaaagacttgcgaaacagaggacgacttcttttgcaagtcgattgccgcgtatttgcgccaactgtcgcgcgtgcacaagatcaaggccaaggtggagatgtaccagattctagagaagtacatactgctcgaggagtgcggaaaggggtcgggtgcgggcggatcaggctaagcaggttgcatgcaatatgtacataggttttaacatagttttttaatgcagtacaaatatacaaagagacgaaaatcttttgagcttaatctaactttgtgcttaggaaaaaatggagtcttagcagaagtcctcgttgattatgttggcatctacggccaggcctcgttcctttagtgccttggatactaggcggtgtttctcctgccgctgctcctgttccctacgctgggcgtccaggatttcatcgacggatatctctttgagtggcagtttctgctccttttcacggtccttttacgcatatttaaagggtgttaatcagtcatattgaaaaagtatcgagtaaagcttactatttcgcccagtagcaccacattctccccgcgaatgatgaagactccgcgaggaatgtcgccgtattcgttgcccacatgtatccgctcgatggtgcgttgcagcaccaggttggcgaactggtccacggaccgcaggtatccaatcagagtccgtccgtctctcaaaagtaccatcagtttctctgcaatgcgccggttttcaacgactggccttcctttcattcggatttactcactgtcaacctcttccaggaggtgagccgtgcccgccagcggatttaagtcgtccatgctatgaaaatatgtgggatttagataaataaataaactgaagcaactaaactttggtctaaattttagtatttaatattaatgtaaccctcgctgaagggtttaaaaaaccacaatgctctagaaaaaaatactaaaaatattactacactgttcaacgaaacttataagatattgcttactgaaattgatgtttttagttttaaaatgcatagatattaaatagttattattaattttcaaacagttaaaaataagatttctgctctaacatcaaatatttttacgctgttcacagagttacaaaataaaaagaagttgaccaaaaaaatatcaaaacttgtactcaa

SEQ ID NO: 20051 - DNA, 959 bp, DROSOPHILA
aacaaattaaaatgagctcaaaccaccgtcctctggacgattcggatatcctcctaatacaaaccatccgcgagacgccgtcgctgtacgatccccagctgccctcctttcggctgtcgcagcgcaaagaggaggactgggcaaaagtggcggatttgctaaacatctccatctcagacgctcggcgacggtggacgtgtctgcgggatcgctattcgcgggagcttaagcagaagcgcctgcatccgtccggcgagtttggtcacaatgacttctttcggaagatggacttcctgcgggactttgtgcgcaagagacgcgagcgcagaggacgcgaacgggatcgggaacaaaagccaaccgggtggatgaaggttgatttacagcgacggcgtcgtacccgcctgcctattgacacagagaccttgatcgaggagcaaggttcgcacgcctacgatgagggcgaggagcaacacgactacgacgctaagctggagtctcataccacacaatcggagacgtattcggtggtcgtggaggcggacgatgggcaggagcccgaacaggagagcttcgatgagttcctgggggatgcggagtgcgagcaaaaggtcaaggtggtcacaattcatccggaaatcgctgctccgaatgcgacgtccgcacctgagcctattgagtctaaccacgcggatctgaactacttggtctgtatgccgcccaatgcgaatcaggagcgagagcattccgccccagaattacccaatcccacggccgtcatcacccaaaagacttgcgaaacagaggacgacttcttttgcaagtcgattgccgcgtatttgcgccaactgtcgcgcgtgcacaagatcaaggccaaggtggagatgtaccagattctagagaagtacatactgctcgaggagtgcggaaaggggtcgggtgcgggcggatcaggctaa

SEQ ID NO: 20052 - protein, 315 aa, DROSOPHILA
MSSNHRPLDDSDILLIQTIRETPSLYDPQLPSFRLSQRKEEDWAKVADLLNISISDARRRWTCLRDRYSRELKQKRLHPSGEFGHNDFFRKMDFLRDFVRKRRERRGRERDREQKPTGWMKVDLQRRRRTRLPIDTETLIEEQGSHAYDEGEEQHDYDAKLESHTTQSETYSVVVEADDGQEPEQESFDEFLGDAECEQKVKVVTIHPEIAAPNATSAPEPIESNHADLNYLVCMPPNANQEREHSAPELPNPTAVITQKTCETEDDFFCKSIAAYLRQLSRVHKIKAKVEMYQILEKYILLEECGKGSGAGGSG

SEQ ID NO: 20053 - DNA, 4999 bp, DROSOPHILA
tgaagcagttcaagttccacgctgagggttcaggaattaggggatcagaacctgagtactacacctcgtcccacaagccgctgtccgctaaccagacgcaagatgccgccgagttcgctgtcacattgtatccaatgcagattcgaacattcatcattaaacatgaataattgtatttcaatgaaaatcaaagaaataaataaaattatgtctgaataaaaacactgttgttttgctttaacttattaggaaataagtccctcatacatacagggaagtaatacgagtcatatgaaaattttttaaaactttacaaaattcaattaaccgcacgggtttaacccaattaactctgaggttttactttagaagttagtggagtattaccatgtttatatggaattaacagttacggcctcatataattcaagttacttatgactgttgattacttttattttataagcagtgtgcagaaacctttcccactcactacagagagtctcaatcatataatttttatttaaaaaaatgtatattaaattctttttcaatacgctaagttatcaataagggcgcaagtgcatttcaggagcttcaatccttgaagtggttgataaataatgggtccaattcttatcgctacgtggagggtgggcattctaaaaaaaagtattcaccaagtttttaataacccactaattgctaattaggttaccttatcttagtgaccatcatgtattttcttatcaatgccttcttagaaacggtgcgccctataaaggagcagtcttggtttaatgggaattcagtacttggtaatgacaagatgacttatttgggtcgcattttattcctgtccatcttattggtgctcttcgcaaaacaatccgaagcagtttgtggctatgaggtaatataaatttgttgatgcttttcaaaatgatatcactatatcctttgatattatttgcagtcatgtcccgaaacaaaagcgaacatggttaacatccatttggttcctcactcccacaacgatgtgggctggttgaagacagttgatcagtcttattatggttacaagaacaaaattcatcatgccggtgtccaatatatattggatagtgtggtgtcccagctcctccaggatcccaagcgtcgtttcattcaggtggagacggcattctttgccaagtggtggaacgtccagtcagagtccatgaaaaaggtggtcaccaaactggtcaacgagggacgtttcgagtttactggcggagcttggagtatgaacgatgaggcaaatgtcaattaccagggtgttattgatcaattcactgtgggattaaagtgggttaattagaaacactaatattccttagtctttgattactctaatcttcgtaggttcctcaacgagacgtttggctcctgtggtcgtcctcgagttggctggcagatcgatacttttggacactcccgcgagcaggctgcaattttcgcgcacatgggctacgatggacagttcttttcacgaatggatcataacgacaaggacacacgtatgaatgacttgacaatggagatgatttgggatgccagtgaatcgatgagcggcgtcagtctcttcagcggcatgttgtacaacttttactcggacactccaggcttttgcttcgacatactttgcactgatcagcccattattgatggtgacagcgaagaaaataatgtgaaacagagggtagatgactttataagttatgcaaagaatgtgtctgaggtgtatatcactaatcacatcatggttcctatgggcggtgatttccagtacgaggacgcaaaagttaactacaaaaatatggacaaactgatcaagtaggtgtgattaagaaacacaaatcgtttataactttcttttgcgttaggtacatcaatgaacgtcaagcgtctggttcaaaatacaatatcttctactccactccaagctgctatctgaactccttgcaccagagcctagagtcctggccaaacaagactcaggactttttcccatacgctcacgagaagaatagcttttggactggattctttacttcccgacccactcagaaacgattcgagcgtgatggaaatcacatgttgcaggtggccaagcagctttctgtactcgcgaatcttactagcgaagagcataaaatagacctggattatctgcgccaggtcatgggagtgatgcaacatcatgatgccattacgggcacggagaagcaggctgtctcggatgactatgatcgaatgatgtacgaggccattgttggggcatctaacaatgcccgcgatgccctgcgtcttttgaccaacatgccttatggagagtttgagagttgcctgaggttgaacatcagcgagtgtgctttcaccaaggatggtgctgataacgttttggtgaccctatacaatcccctggcccacagctccactcagtatgttcgcattcctgttaaggaggagaactatcaagtaaccgatgagaagggcagaacagttccatcggaggtggttccagtgccgtggcaagttttggcattggagtacagatccaatgatacccagcacgagttagttttcaaggcaacggtaaataaggtatccagttactctatcaaaaaagtcgagagctcagaggtcaaacattcatcgataaagaagattaatcccagagaagataacaattcagagactgttgtagaaaactcggtaagtgcatttgattgtctaataacttaaatgttttttatccctacgatatataacccataggttgttaaactagtgatggacaaccatacaggacgattgaagtcggtcgaaatgaacggtgtgtctgagaaaatagtccagaactttggcgtttacaagagtcacacatcctgcgcctacacattccgccaggatggagatatagaattgtttgaaaatgattttgagttcacagtctatgaaggaagtttggtcaaggaagtccatcagcatgtgaacgactggatttcgcaagtgatccgtatctacgagggcgtaagcagagtggagttggagtggatggtgggccctattcccatcgatgataaactaggtagtgaatttgtgacaaactttaagagtgagatttcttcgaacggagttttctataccgattcaaatggacgtgaattgatgaaacgtgtgaaggataaacgcgaggacttcgtttccgacttaagccgacagcctgtgagcggaaacttctatccagtcacatcgagaattgctcttcaagacgataccaagcgtttggtcctcctgaatgaccgctcccagggtggagccagtttggaggatggtgccctagagatgctgatccatcgtcgtcatctcttcaacgacggtggtggagtgggtgaagccctgaatgagacgcaatatggcaaaggtctgattgcccgaggaaaactttacctcattctcgattccgcgacagatggagatactgtgacggaacgtaagactgagaaagagctcttccttcccttttggaagttctttagcaaaactggtggagtcgaaataactccatccaaatcccttcccgactttaatgatcttccgcaatccgttcacctactcaccctggaattcttctcagagcaagaaattttgatccgctttgaacacttcttggataaatctgaaggaagggtgattagcttcaacattcgggatatattcgatagtcttggcggtttggcgattagggaaacaaccttggatggaaatatgccactgagcgatatgaagcgattcaagttccatgcacaagaatccggaaccaagccgtcatccgtggaatattctacggcacagcacaagccacttgaggctgtcaaatcggatgaggcctcactttttgctgtaacactatatcctatgcaaattcgcacttttattattaaaacagagtaagaaaagtataagaaataaatgatcaaaattaaaattacattattcttatctttttggggtcataatcattatcggctacttctgcatgtggagctttccctttcctgaagattatagctcgcttgagtgtaatcccaaaatggaatggtgctcgcaatagtatacacattgtaatctttaagtgggcaattaccaattaaaatccatttaagttattgaatgataagaattgcaattcatgccaaatcgaagtacattttgattacgttagaaacactggagcactgcatgtggcccaaataaaacgcatggtacttaccctttgagacctctcactagcggttggttttaagttaattacctctctcgactagttaaaattcaaaacattctgaagtgttgattacttatcagataaccccccattgagaagtttataaaagtggcaacttttattgtatagccagttcttgttgtgcagttgctggttagggaactctgcaagatgagttctgtaaagaacttggccattttgttggccttgtttgcctcttatattgtccaatctgaggctgtttgttatgaggtgagaaaaacaatagatctttgatctttgcattggtattaaaatgttctttatacagtcatgtcccgaaacaaagtccaatatgatcaatattcacttggtgccacactcccatgatgacttgggttggctaaaaacggtcgatcagtactattatggcaataagcacaacattcaacatgctggagttcaatatatatttgataccgttgttgccgagctgagcaaggactcacgtcgccgcttcatccaggtggagacgggtttcttcgccaagtggtgggaggatcagtcggaaaccaagaagaaactggtcaaaacattggtgaacgagggtcgtctggaattcactggtggcgcgtggagcatgaacgatgaagctgccgtgaactaccagagtgtaattgaccagtt

SEQ ID NO: 20054 - DNA, 2829 bp, DROSOPHILA
atggttaacatccatttggttcctcactcccacaacgatgtgggctggttgaagacagttgatcagtcttattatggttacaagaacaaaattcatcatgccggtgtccaatatatattggatagtgtggtgtcccagctcctccaggatcccaagcgtcgtttcattcaggtggagacggcattctttgccaagtggtggaacgtccagtcagagtccatgaaaaaggtggtcaccaaactggtcaacgagggacgtttcgagtttactggcggagcttggagtatgaacgatgaggcaaatgtcaattaccagggtgttattgatcaattcactgtgggattaaagttcctcaacgagacgtttggctcctgtggtcgtcctcgagttggctggcagatcgatacttttggacactcccgcgagcaggctgcaattttcgcgcacatgggctacgatggacagttcttttcacgaatggatcataacgacaaggacacacgtatgaatgacttgacaatggagatgatttgggatgccagtgaatcgatgagcggcgtcagtctcttcagcggcatgttgtacaacttttactcggacactccaggcttttgcttcgacatactttgcactgatcagcccattattgatggtgacagcgaagaaaataatgtgaaacagagggtagatgactttataagttatgcaaagaatgtgtctgaggtgtatatcactaatcacatcatggttcctatgggcggtgatttccagtacgaggacgcaaaagttaactacaaaaatatggacaaactgatcaagtacatcaatgaacgtcaagcgtctggttcaaaatacaatatcttctactccactccaagctgctatctgaactccttgcaccagagcctagagtcctggccaaacaagactcaggactttttcccatacgctcacgagaagaatagcttttggactggattctttacttcccgacccactcagaaacgattcgagcgtgatggaaatcacatgttgcaggtggccaagcagctttctgtactcgcgaatcttactagcgaagagcataaaatagacctggattatctgcgccaggtcatgggagtgatgcaacatcatgatgccattacgggcacggagaagcaggctgtctcggatgactatgatcgaatgatgtacgaggccattgttggggcatctaacaatgcccgcgatgccctgcgtcttttgaccaacatgccttatggagagtttgagagttgcctgaggttgaacatcagcgagtgtgctttcaccaaggatggtgctgataacgttttggtgaccctatacaatcccctggcccacagctccactcagtatgttcgcattcctgttaaggaggagaactatcaagtaaccgatgagaagggcagaacagttccatcggaggtggttccagtgccgtggcaagttttggcattggagtacagatccaatgatacccagcacgagttagttttcaaggcaacggtaaataaggtatccagttactctatcaaaaaagtcgagagctcagaggtcaaacattcatcgataaagaagattaatcccagagaagataacaattcagagactgttgtagaaaactcggttgttaaactagtgatggacaaccatacaggacgattgaagtcggtcgaaatgaacggtgtgtctgagaaaatagtccagaactttggcgtttacaagagtcacacatcctgcgcctacacattccgccaggatggagatatagaattgtttgaaaatgattttgagttcacagtctatgaaggaagtttggtcaaggaagtccatcagcatgtgaacgactggatttcgcaagtgatccgtatctacgagggcgtaagcagagtggagttggagtggatggtgggccctattcccatcgatgataaactaggtagtgaatttgtgacaaactttaagagtgagatttcttcgaacggagttttctataccgattcaaatggacgtgaattgatgaaacgtgtgaaggataaacgcgaggacttcgtttccgacttaagccgacagcctgtgagcggaaacttctatccagtcacatcgagaattgctcttcaagacgataccaagcgtttggtcctcctgaatgaccgctcccagggtggagccagtttggaggatggtgccctagagatgctgatccatcgtcgtcatctcttcaacgacggtggtggagtgggtgaagccctgaatgagacgcaatatggcaaaggtctgattgcccgaggaaaactttacctcattctcgattccgcgacagatggagatactgtgacggaacgtaagactgagaaagagctcttccttcccttttggaagttctttagcaaaactggtggagtcgaaataactccatccaaatcccttcccgactttaatgatcttccgcaatccgttcacctactcaccctggaattcttctcagagcaagaaattttgatccgctttgaacacttcttggataaatctgaaggaagggtgattagcttcaacattcgggatatattcgatagtcttggcggtttggcgattagggaaacaaccttggatggaaatatgccactgagcgatatgaagcgattcaagttccatgcacaagaatccggaaccaagccgtcatccgtggaatattctacggcacagcacaagccacttgaggctgtcaaatcggatgaggcctcactttttgctgtaacactatatcctatgcaaattcgcacttttattattaaaacagagtaa

SEQ ID NO: 20055 - protein, 942 aa, DROSOPHILA
MVNIHLVPHSHNDVGWLKTVDQSYYGYKNKIHHAGVQYILDSVVSQLLQDPKRRFIQVETAFFAKWWNVQSESMKKVVTKLVNEGRFEFTGGAWSMNDEANVNYQGVIDQFTVGLKFLNETFGSCGRPRVGWQIDTFGHSREQAAIFAHMGYDGQFFSRMDHNDKDTRMNDLTMEMIWDASESMSGVSLFSGMLYNFYSDTPGFCFDILCTDQPIIDGDSEENNVKQRVDDFISYAKNVSEVYITNHIMVPMGGDFQYEDAKVNYKNMDKLIKYINERQASGSKYNIFYSTPSCYLNSLHQSLESWPNKTQDFFPYAHEKNSFWTGFFTSRPTQKRFERDGNHMLQVAKQLSVLANLTSEEHKIDLDYLRQVMGVMQHHDAITGTEKQAVSDDYDRMMYEAIVGASNNARDALRLLTNMPYGEFESCLRLNISECAFTKDGADNVLVTLYNPLAHSSTQYVRIPVKEENYQVTDEKGRTVPSEVVPVPWQVLALEYRSNDTQHELVFKATVNKVSSYSIKKVESSEVKHSSIKKINPREDNNSETVVENSVVKLVMDNHTGRLKSVEMNGVSEKIVQNFGVYKSHTSCAYTFRQDGDIELFENDFEFTVYEGSLVKEVHQHVNDWISQVIRIYEGVSRVELEWMVGPIPIDDKLGSEFVTNFKSEISSNGVFYTDSNGRELMKRVKDKREDFVSDLSRQPVSGNFYPVTSRIALQDDTKRLVLLNDRSQGGASLEDGALEMLIHRRHLFNDGGGVGEALNETQYGKGLIARGKLYLILDSATDGDTVTERKTEKELFLPFWKFFSKTGGVEITPSKSLPDFNDLPQSVHLLTLEFFSEQEILIRFEHFLDKSEGRVISFNIRDIFDSLGGLAIRETTLDGNMPLSDMKRFKFHAQESGTKPSSVEYSTAQHKPLEAVKSDEASLFAVTLYPMQIRTFIIKTE

SEQ ID NO: 20056 - DNA, 5482 bp, DROSOPHILA
ttggttagctgatagatgagtggagtaacatctaaatcactgaagcacattgaatgtacagatcactcacctcttcgagaaccacggaggtcttgagtcggcgacagggatcacagtagtcggaggccaatgtgttctccggtgtcttggtagcacatggatccggcttgggttcgggcacattggatcccaaaccactaccatgtggcccactgtcactgtcacgtttacccttcggattcatgggatcctggccgcgcaatacgcattcctgcaggaactcttcctcgatgtcgatcagtttcttgatggcacagtcccgcttcaggaagttcttgatcacggacagattgcggggcacggcgccgataacgtcgaagtcatcgctacggagctggaggcggtgcgccatgactttggttctccaagatgaatggaggggcggatggttggaagggggttcgaatttgggggagtagctcgtttcgagtggaatgtttaaatgaactacaacttgacgtctggccccaagttgagtgggtttcaaggatatgcaaacaatagttgagattaagttggcgccaaggataaagtgcacgtttgagggcaaaagcttggtacactctatttaataatatatattaagggtaaacgctacacttatcccaataaggtagctttactttcctaacaagtaaattgacctaccacccaaagctagtttttaacatttgatggcactattttcgtggctagtgctgtagttctatcgcctcctggccgagcaacaagttcgtgcgcggttttacagccactggatgccaaaccgtgggcctgcgctcagctcggtttagttccgctcacttaatctccggcaagcgaaactcggagcagagcttgcccgttggatggtctgttggctattgattggagctttccgccgctcaaagctccgctcgagaggttcttattgccaccgctggccacagcagccaccagaagagcagagccacccgaagcgccaacacgcgaagacaaagtccggcagacagcagcgcaaaaagagacagatagcagtgagaaaatcatcgaggaaaaaagattgtgtgctagccgtcaaattgagttccattcgagtggcaaacaaacctgagtagccgcaccgccatgagctttacccgccaactgtccgagatgagtgccagcgagctgaacgatgccatcgacgacaccaacttcccgcaggcccacatcctttcgcgcggacgcaacaacagcgtctgctcaacaagtagcacctcgggcacctcctcgctggcggacaggcagcagaaccaggcggaggaggccactgccattgcgggcacacccgtcgaggaggtggcgccagctcctgctctcgtcccgttggccggcaaccagagaccccgcctcatcctgaagaccaacggcagcagtccggatagtgatggtacacaaccgaaaacaccactgacaccgcgtacatcgacaacgccaggtagtggtgggtagtggtccaggaccaggtcaggggatccagagctatgtttgctgcgaccgatttagttagtcaatgaactaggaggaggaggagtgcttgacaaactctttttgagcataaaccgtacgcctatcagtgggttagtgtttcggttcagaggtcagaagatgcgcctcggaatggggaatagtacttagacagccacacacagccaacgaaggggggcaatgccttcctatctcgcatgataacgattctcatcatgtttccatccgtatttccatttacaggccacgagaagtgcacgttccaccacgacctggagctggaccacaagccgccgacgcgagaggccctccttccggacatggcacgctcgtatcgtctactcttgggcggcctgggcgagaatcccgatcgccagggactgatcaagacgccggagcgggcagccaaggccatgctgtacttcaccaagggctacgaccagagtctcgagggtaagcacaccacacatttcaagcaattagcaccgggtcagtgatcgaagttgctcatcctggttttcccagcgagtgggaactagtttcatgtcggtgaatcaccatttacgggggttcctcggtccgctatggtgcattagcctaattacctgaccactcgagagataaagcacatgaacatagggagccattaggcaatttcgggcttgtccaatcaagtggacgcatccaaaatccattcaatatcctatgaaatatgagatttgactagtaaagtttttggtctcatgtttggcgtgcatttcgacttgcagtcgcttttgaacttgtcatgtaatcaatgtgagtcgtttgagaaacaaaacagaattgcgaattatatggttgctacaccagcatacctaaccggttgcccgagaaatcaggttctacggtttgtcaaataaaatcgcatgtaaatttaagatcaacagcaacagcagcaggccatttgaaagctaaattcgttgaacgaaagtgaatagccttcggcatcggcaatagaatgggttggattgtgtttaacccgaattcaaagaacccaagaagccgagccaacgtgacttgccaatctggtgttgggggaactccacccccctccccaccacacacacaagatgcttgttggattgtttgttagatggctcactggctacttggctacttcttggcttcttcgctggttggtcaggaaacgcactgaagctttccggtctgtatattaagagcggtaaagtgggtgggtgtgcggtgcggcggcggcttctattcaaggaatgggaatctcaagagcacatcgtttaaaacgagtgtggcgaaagctcacactccacaagaaccataagcccatccagtcaagtcaagtcaagtcaacctccccccaagacccgcaacctcacacacgcacacacacacacaaacactcgctaagcaaccactttagcactcacagtcgcttgaacttaacattcagtattcagttatgcagcaaataaatctaacacgaattacgcgcgccataaatcacgggtagcgaaggaacgccacttgagtagcttcgtggttgtgggacattgggcgaacttttcaataacgactccgtggcgcaacggtagcgcgtccgactccagatcggaaggttgcgtgttcaaatcacgtcggggtcaggcgatgatgaattcctttttcgtactttttttttactacaccatttcaaattttttttaatagatgttctcaatggcgccgttttcgacgaggatcatgacgaaatggtggtggtcaaggatattgaaatgttctccatgtgcgagcatcatctggtgcccttctacggcaaagtttccatcggttatttgccgtgcaacaagattctcggactcagtaaattggcacggtaagataaacttagtaatgcatattagatgatctttcatataatttgcgatcccatagcattgtcgaaatattttcgcgtcgcctgcaagtccaggagcgcttaactaagcagatcgcagtggccgtgactcaggccgtgcaacccgctggagtagcagtggtcgtagagggagtgtaagtattaaatatatatacatatatattttaaagaatattatagtttaacgaatggctttcctcctatacagccacatgtgcatggtgatgcgtggcgtgcagaagatcaacagcaaaactgttacctcaactatgctgggcgtgttccgagacgatcccaagacccgtgaggaattcctgaacttagtcaatagcaaatagagtgggcactagaggacgctactgaaatccgagaccaactaaacccctacaatatttttggaggcgcttatatacaaacaaacaaaaatgaaacgaaacacagggtccattagtttatgtttttaggattgatttcatttagttagtgcaatgattgcgcagccattttccttgttgatttgtgtaaaaattgttgaaaaattttgttagcaaaatacgttttttagatagatgaatgtaatgagaagcgagattcgaagaggacgagatttgaataccggtgttgggtagttttatgttcaattttatatgcagttttatggcacttgaacgataatttttacaacgtatacatacgattaatgcattgtgcaataagggaacaactgataataaatcacggcaaattgtttagggaatttacaatttataaacagttcacatcaaattaatcagatctatagttatgtatgtatgttaacctatataaagagttgcattcataatgttcctcgacagggaccaaagtatattggaagattttaaatgttaaaattatatgctcattatgtaaatgacgttgcttgtagtgagtcaaagctgcttattaattatacaataaattatgtatttaaataacgttaaaatgaaggattttttataaaatgtataaaaaaagaaatatcccaaaaacaacaggagctttctcgaatgaccccgacgtgatttgaacacgcaaccttccgatctggagtcggacgcgctaccgttgcgccacggagtctactgaaatggaggctactaagtgacaggaatcccccaacaccaacaggttgttggttccagtcgtgtagtatccatcatagtgctttgtttgaaatgcagcaagagcatcggtggttcagtggtagaatgctcgcctgccacgcgggcggcccgggttcgattcccggccgatgcataatttttttttaaatttatttcgtatataacgaatcaaaaaaaaaaaaaaaaaacagtgtaaaatatgattcaaagaaataaatataaatattttttattcaacttcttagtttgataaatatataatctattacttgcaaatcctactgtgtacctttcgtttggacccaaaattattggataacaatttcacaataatttaataatgaagtcataagaaaatatatcacggcgacgtacctaaaataatgggttaaatagtaaaaaaacatacaaaaagtttctcgacaattacgtgcaacttacaccaaaccatattttgagcaggccgatgttttgatgcatcgataacaacaaaaatcgtcaataaatatccccgaaactcccaccactagtcgtcgtttcgttgtcttgtggaaaagtttggttggcagtgatactttttgatttaattcttttcgcgctaattaattgcttttcttgatctaacaccacccatacgaatcaccgttagcacgggtggcacttgctaagcaggcccccgagaaatttaaaagactgaaagcccccaaatagaaataaaatcgctgcaccttgacagacgtgtctgtgtgcatcgcgatttctaatcactcgcaagactttcttccacaaaaagtgagcagaaaagagcccacaa

SEQ ID NO: 20057 - DNA, 1736 bp, DROSOPHILA
agagcagagccacccgaagcgccaacacgcgaagacaaagtccggcagacagcagcgcaaaaagagacagatagcagtgagaaaatcatcgaggaaaaaagattgtgtgctagccgtcaaattgagttccattcgagtggcaaacaaacctgagtagccgcaccgccatgagctttacccgccaactgtccgagatgagtgccagcgagctgaacgatgccatcgacgacaccaacttcccgcaggcccacatcctttcgcgcggacgcaacaacagcgtctgctcaacaagtagcacctcgggcacctcctcgctggcggacaggcagcagaaccaggcggaggaggccactgccattgcgggcacacccgtcgaggaggtggcgccagctcctgctctcgtcccgttggccggcaaccagagaccccgcctcatcctgaagaccaacggcagcagtccggatagtgatggccacgagaagtgcacgttccaccacgacctggagctggaccacaagccgccgacgcgagaggccctccttccggacatggcacgctcgtatcgtctactcttgggcggcctgggcgagaatcccgatcgccagggactgatcaagacgccggagcgggcagccaaggccatgctgtacttcaccaagggctacgaccagagtctcgaggatgttctcaatggcgccgttttcgacgaggatcatgacgaaatggtggtggtcaaggatattgaaatgttctccatgtgcgagcatcatctggtgcccttctacggcaaagtttccatcggttatttgccgtgcaacaagattctcggactcagtaaattggcacgcattgtcgaaatattttcgcgtcgcctgcaagtccaggagcgcttaactaagcagatcgcagtggccgtgactcaggccgtgcaacccgctggagtagcagtggtcgtagagggagtccacatgtgcatggtgatgcgtggcgtgcagaagatcaacagcaaaactgttacctcaactatgctgggcgtgttccgagacgatcccaagacccgtgaggaattcctgaacttagtcaatagcaaatagagtgggcactagaggacgctactgaaatccgagaccaactaaacccctacaatatttttggaggcgcttatatacaaacaaacaaaaatgaaacgaaacacagggtccattagtttatgtttttaggattgatttcatttagttagtgcaatgattgcgcagccattttccttgttgatttgtgtaaaaattgttgaaaaattttgttagcaaaatacgttttttagatagatgaatgtaatgagaagcgagattcgaagaggacgagatttgaataccggtgttgggtagttttatgttcaattttatatgcagttttatggcacttgaacgataatttttacaacgtatacatacgattaatgcattgtgcaataagggaacaactgataataaatcacggcaaattgtttagggaatttacaatttataaacagttcacatcaaattaatcagatctatagttatgtatgtatgttaacctatataaagagttgcattcataatgttcctcgacagggaccaaagtatattggaagattttaaatgttaaaattatatgctcattatgtaaatgacgttgcttgtagtgagtcaaagctgcttattaattatacaataaattatgtatttaaataacgt

SEQ ID NO: 20058 - protein, 308 aa, DROSOPHILA
MSFTRQLSEMSASELNDAIDDTNFPQAHILSRGRNNSVCSTSSTSGTSSLADRQQNQAEEATAIAGTPVEEVAPAPALVPLAGNQRPRLILKTNGSSPDSDGHEKCTFHHDLELDHKPPTREALLPDMARSYRLLLGGLGENPDRQGLIKTPERAAKAMLYFTKGYDQSLEDVLNGAVFDEDHDEMVVVKDIEMFSMCEHHLVPFYGKVSIGYLPCNKILGLSKLARIVEIFSRRLQVQERLTKQIAVAVTQAVQPAGVAVVVEGVHMCMVMRGVQKINSKTVTSTMLGVFRDDPKTREEFLNLVNSK

SEQ ID NO: 20059 - DNA, 9291 bp, DROSOPHILA
tggccgctcaaggcggcgaaagggcgcaagcgcagcgcgagttttgctcttgcagttgtatttgtatctatacctgtgattgtatccggatttgttgagctgcaaatttagaactaagcgatcgtgaagtacactagcacacaaagtatgctaacacaatgtaaaataaagtaaatatttctttaaatatactaggtgttttagttcaactccaaacttatgaatactttaaccgaatcctaaaatctaggacacctagcttaccagaagaatcatgattttatagagtaactttgatgattggcatataatatagtgcggctgtggaaaaatatggttcgttgcatgcaatcgaactgcattttagtcataataattgatgatgcgccttcctggctggatgcccgccgtaattcaatttcaggggctcgcaaacgggctccaaatgaaccgcgatgaccgaacaaatttctgacatgcacgatttagcctgaaaatggcattgttgttgtaaaacgaacgctatcgcctcataattgccaatgacccgtttacgatgccgtccagtcgcagcggggttatcaaattgaaattattgtcaagccggggtccaaagccaggcaccaacgtttccttaatggccgtgttttcttcttatcacttttgcctttcttaattgttatattttggaaatacatatgtttactctgtcagaagttatgccaataaagtatccaaaatgcttgaccgccaaacaagtaaccaaattctgtttcgatttcctggagtcctcggaccaatcagctgtcgagcttaaaacggagccgagagccaaaagctccaaagcccaaagtgcccccacaatagccggagagcaattacagttaacgcaaaatgataaaactgtcgagcattgctcgccctctctctctctctctctctctcgcggcagaactttcgatttttcataataaaaaggttacaactaaatctcaggcggtttagtcggcagataaattcggagcgagcgcgccaaatacaaaagtccgccacgcgttcagagccccaatctcaagtcccatagttcaaacagttccgagcccgtgtcctcgcagagtccaccaatcccagccaaacatcaactccaatcaatcgaacatgaagccccagacaagcgagcaaaatggcagtggccaaaatggcgagggtgccgcagatgccgtggccgttgccacgatccccacgggcgaagcctccgccgcctccgccacgtccggcaccgatctaacggtctccaaaaacagccagcagctgaaactggaaatgctcaacttggagctggccagcaatggaagcggtgagttctccggaagaatgccacaaacgggaactcttcctggtttgagaaaagtgcgtatacgcatagtgggattgttttgatgaagtcaaaataaattggttgttaattagttggtgtagaaattcggtttccattccaggctataaattagtatctcccacttaagggactttttgctttgtgatttgaaatccatatcttggatgattaattgtccacaagtgcactagcatctttccatttcgaagttcttggaatatagttagtaacgtttggtgatcttcgtcaagaaggggtttatccagaagcctactaaagtttggtaataccacaaacatgattcatccttatctgtttctgttaccatttcatttcttctgaatgcccgcacaatttggttgaagaattcaaagctaacccttgatagccagtaaacccgatctagtttccgggtaatacaaccccttgaactggctaacatcgcgcgcaatgcaatctggctgccatattgcatcagtcataggttagttgggccgcgattgaaattcaatcaaatgcgcataatgcgaagattccgatttccggcgatgctgggcctcataaatccgagaacataaaccacagagattcgagagccacgatttctgtcccatatgcaaaccacacgcagtgccggatatcgagagtaactcttgttgtgtccataccaaacaaaaaaaaataataataataaaaaaaaaaaaataagagagctactagctgtggcactgactgggcttattgacattgacattgaaagatttgctcggtacatggcacttggctgaacggatcatatcggattggattggatcggcagattcaacgagagctgaatggagttcgggaactctgggccatgagccaaagacaaagacataaacccctttggcttgtgatccggtatttgatttcgtttgatttggccaaaacgtagggtggttagttggaatgggggaggggggaatgggcctgaactacttttgtgaaggttaaaaaagtgtttaattgcgagtacggtgctccaaacggtttcgattcgtgggtcttagccactagccacggtttcagttcagtttgagtttcagtttcttcgattgcccctcagttttgagctggtgtctgtcggctatggtgactaataggcctggccgcagtacttcacatttgagcgattgcggtcaataaaccaaaaaaaaaaaaaaaaaaaaaccaaagactgaacaaagctggctggctgagagccgaggcgatccaagctaattgaggcacttaaaaaattctccgagcgaattctcccaaggcgtggtggcaaccctgtcagcacggaatccccgatcccgatcccgatccacagaccaacgaatgggggggaatgcattccttattcagatcaaatgccgtaatggttaattgtgcagcccagagagccggagacaacacctgccctgtggaaaatgttaatgatgctttaattgcaccgcatgagcatacgggtcgaccaatccggaagaaacccattggagctcaacgatttgcattacatctttacaagcggtttcaattcagacatccctcaagtcatcttctttaagggttgcatgcacatatataagtactagcgaggtatcactgtacctacgtcacataatctgtaacgataatctgcagctgtcttatacttatgtaaactaaaccagcctgtgctattcccaactgatttattcgaccctaagcagcggtggaaggttttaatgtgctttacattccttgtggtttgtacttttttacaaacccaccaaaatctatttctcaggacatatatatgtatatacatatataaagaataaccttcaactccatgccataaacaagaaaagtgctcgcgataaaccacgaatactttgcatgcaaataagattccgaatatatgcagagaataatcaaatttggccagctggagagactagctactttcaattgaagccccacatgtgggatgcagggtttcccgcacaaaatgaggacacttctaagtggggttaatgctttattgatcggcgttatgtgccaaaaagctgcacccatccaaccattccctcacataatggtctcctcctccagcatgtactccgtgagatcggcttcgcccgacagcatggtcaccggcacccggttcatctgggccacccgttgactgggccagaccatcacgtcgcaacagttggtcaacacgaccacattggtgctcggcgtgttggtgcacatcaggttgccggccttctcctggtcgcacttgttgaacttgcgccggaaacggaacttcacgggcaacgagttgcccatcacgctctcttcatcgaagtacggcggcagggatttgttgaaagccggatttgtgatggccggcttggttagctgatagatgagtggagtaacatctaaatcactgaagcacattgaatgtacagatcactcacctcttcgagaaccacggaggtcttgagtcggcgacagggatcacagtagtcggaggccaatgtgttctccggtgtcttggtagcacatggatccggcttgggttcgggcacattggatcccaaaccactaccatgtggcccactgtcactgtcacgtttacccttcggattcatgggatcctggccgcgcaatacgcattcctgcaggaactcttcctcgatgtcgatcagtttcttgatggcacagtcccgcttcaggaagttcttgatcacggacagattgcggggcacggcgccgataacgtcgaagtcatcgctacggagctggaggcggtgcgccatgactttggttctccaagatgaatggaggggcggatggttggaagggggttcgaatttgggggagtagctcgtttcgagtggaatgtttaaatgaactacaacttgacgtctggccccaagttgagtgggtttcaaggatatgcaaacaatagttgagattaagttggcgccaaggataaagtgcacgtttgagggcaaaagcttggtacactctatttaataatatatattaagggtaaacgctacacttatcccaataaggtagctttactttcctaacaagtaaattgacctaccacccaaagctagtttttaacatttgatggcactattttcgtggctagtgctgtagttctatcgcctcctggccgagcaacaagttcgtgcgcggttttacagccactggatgccaaaccgtgggcctgcgctcagctcggtttagttccgctcacttaatctccggcaagcgaaactcggagcagagcttgcccgttggatggtctgttggctattgattggagctttccgccgctcaaagctccgctcgagaggttcttattgccaccgctggccacagcagccaccagaagagcagagccacccgaagcgccaacacgcgaagacaaagtccggcagacagcagcgcaaaaagagacagatagcagtgagaaaatcatcgaggaaaaaagattgtgtgctagccgtcaaattgagttccattcgagtggcaaacaaacctgagtagccgcaccgccatgagctttacccgccaactgtccgagatgagtgccagcgagctgaacgatgccatcgacgacaccaacttcccgcaggcccacatcctttcgcgcggacgcaacaacagcgtctgctcaacaagtagcacctcgggcacctcctcgctggcggacaggcagcagaaccaggcggaggaggccactgccattgcgggcacacccgtcgaggaggtggcgccagctcctgctctcgtcccgttggccggcaaccagagaccccgcctcatcctgaagaccaacggcagcagtccggatagtgatggtacacaaccgaaaacaccactgacaccgcgtacatcgacaacgccaggtagtggtgggtagtggtccaggaccaggtcaggggatccagagctatgtttgctgcgaccgatttagttagtcaatgaactaggaggaggaggagtgcttgacaaactctttttgagcataaaccgtacgcctatcagtgggttagtgtttcggttcagaggtcagaagatgcgcctcggaatggggaatagtacttagacagccacacacagccaacgaaggggggcaatgccttcctatctcgcatgataacgattctcatcatgtttccatccgtatttccatttacaggccacgagaagtgcacgttccaccacgacctggagctggaccacaagccgccgacgcgagaggccctccttccggacatggcacgctcgtatcgtctactcttgggcggcctgggcgagaatcccgatcgccagggactgatcaagacgccggagcgggcagccaaggccatgctgtacttcaccaagggctacgaccagagtctcgagggtaagcacaccacacatttcaagcaattagcaccgggtcagtgatcgaagttgctcatcctggttttcccagcgagtgggaactagtttcatgtcggtgaatcaccatttacgggggttcctcggtccgctatggtgcattagcctaattacctgaccactcgagagataaagcacatgaacatagggagccattaggcaatttcgggcttgtccaatcaagtggacgcatccaaaatccattcaatatcctatgaaatatgagatttgactagtaaagtttttggtctcatgtttggcgtgcatttcgacttgcagtcgcttttgaacttgtcatgtaatcaatgtgagtcgtttgagaaacaaaacagaattgcgaattatatggttgctacaccagcatacctaaccggttgcccgagaaatcaggttctacggtttgtcaaataaaatcgcatgtaaatttaagatcaacagcaacagcagcaggccatttgaaagctaaattcgttgaacgaaagtgaatagccttcggcatcggcaatagaatgggttggattgtgtttaacccgaattcaaagaacccaagaagccgagccaacgtgacttgccaatctggtgttgggggaactccacccccctccccaccacacacacaagatgcttgttggattgtttgttagatggctcactggctacttggctacttcttggcttcttcgctggttggtcaggaaacgcactgaagctttccggtctgtatattaagagcggtaaagtgggtgggtgtgcggtgcggcggcggcttctattcaaggaatgggaatctcaagagcacatcgtttaaaacgagtgtggcgaaagctcacactccacaagaaccataagcccatccagtcaagtcaagtcaagtcaacctccccccaagacccgcaacctcacacacgcacacacacacacaaacactcgctaagcaaccactttagcactcacagtcgcttgaacttaacattcagtattcagttatgcagcaaataaatctaacacgaattacgcgcgccataaatcacgggtagcgaaggaacgccacttgagtagcttcgtggttgtgggacattgggcgaacttttcaataacgactccgtggcgcaacggtagcgcgtccgactccagatcggaaggttgcgtgttcaaatcacgtcggggtcaggcgatgatgaattcctttttcgtactttttttttactacaccatttcaaattttttttaatagatgttctcaatggcgccgttttcgacgaggatcatgacgaaatggtggtggtcaaggatattgaaatgttctccatgtgcgagcatcatctggtgcccttctacggcaaagtttccatcggttatttgccgtgcaacaagattctcggactcagtaaattggcacggtaagataaacttagtaatgcatattagatgatctttcatataatttgcgatcccatagcattgtcgaaatattttcgcgtcgcctgcaagtccaggagcgcttaactaagcagatcgcagtggccgtgactcaggccgtgcaacccgctggagtagcagtggtcgtagagggagtgtaagtattaaatatatatacatatatattttaaagaatattatagtttaacgaatggctttcctcctatacagccacatgtgcatggtgatgcgtggcgtgcagaagatcaacagcaaaactgttacctcaactatgctgggcgtgttccgagacgatcccaagacccgtgaggaattcctgaacttagtcaatagcaaatagagtgggcactagaggacgctactgaaatccgagaccaactaaacccctacaatatttttggaggcgcttatatacaaacaaacaaaaatgaaacgaaacacagggtccattagtttatgtttttaggattgatttcatttagttagtgcaatgattgcgcagccattttccttgttgatttgtgtaaaaattgttgaaaaattttgttagcaaaatacgttttttagatagatgaatgtaatgagaagcgagattcgaagaggacgagatttgaataccggtgttgggtagttttatgttcaattttatatgcagttttatggcacttgaacgataatttttacaacgtatacatacgattaatgcattgtgcaataagggaacaactgataataaatcacggcaaattgtttagggaatttacaatttataaacagttcacatcaaattaatcagatctatagttatgtatgtatgttaacctatataaagagttgcattcataatgttcctcgacagggaccaaagtatattggaagattttaaatgttaaaattatatgctcattatgtaaatgacgttgcttgtagtgagtcaaagctgcttattaattatacaataaattatgtatttaaataacgttaaaatgaaggattttttataaaatgtataaaaaaagaaatatcccaaaaacaacaggagctttctcgaatgaccccgacgtgatttgaacacgcaaccttccgatctggagtcggacgcgctaccgttgcgccacggagtctactgaaatggaggctactaagtgacaggaatcccccaacaccaacaggttgttggttccagtcgtgtagtatccatcatagtgctttgtttgaaatgcagcaagagcatcggtggttcagtggtagaatgctcgcctgccacgcgggcggcccgggttcgattcccggccgatgcataatttttttttaaatttatttcgtatataacgaatcaaaaaaaaaaaaaaaaaacagtgtaaaatatgattcaaagaaataaatataaatattttttattcaacttcttagtttgataaatatataatctattacttgcaaatcctactgtgtacctttcgtttggacccaaaattattggataacaatttcacaataatttaataatgaagtcataagaaaatatatcacggcgacgtacctaaaataatgggttaaatagtaaaaaaacatacaaaaagtttctcgacaattacgtgcaacttacaccaaaccatattttgagcaggccgatgttttgatgcatcgataacaacaaaaatcgtcaataaatatccccgaaactcccaccactagtcgtcgtttcgttgtcttgtggaaaagtttggttggcagtgatactttttgatttaattcttttcgcgctaattaattgcttttcttgatctaacaccacccatacgaatcaccgttagcacgggtggcacttgctaagcaggcccccgagaaatttaaaagactgaaagcccccaaatagaaataaaatcgctgcaccttgacagacgtgtctgtgtgcatcgcgatttctaatcactcgcaagactttcttccacaaaaagtgagcagaaaagagcccacaa

SEQ ID NO: 20060 - DNA, 1622 bp, DROSOPHILA
tttagtcggcagataaattcggagcgagcgcgccaaatacaaaagtccgccacgcgttcagagccccaatctcaagtcccatagttcaaacagttccgagcccgtgtcctcgcagagtccaccaatcccagccaaacatcaactccaatcaatcgaacatgaagccccagacaagcgagcaaaatggcagtggccaaaatggcgagggtgccgcagatgccgtggccgttgccacgatccccacgggcgaagcctccgccgcctccgccacgtccggcaccgatctaacggtctccaaaaacagccagcagctgaaactggaaatgctcaacttggagctggccagcaatggaagcggccacgagaagtgcacgttccaccacgacctggagctggaccacaagccgccgacgcgagaggccctccttccggacatggcacgctcgtatcgtctactcttgggcggcctgggcgagaatcccgatcgccagggactgatcaagacgccggagcgggcagccaaggccatgctgtacttcaccaagggctacgaccagagtctcgaggatgttctcaatggcgccgttttcgacgaggatcatgacgaaatggtggtggtcaaggatattgaaatgttctccatgtgcgagcatcatctggtgcccttctacggcaaagtttccatcggttatttgccgtgcaacaagattctcggactcagtaaattggcacgcattgtcgaaatattttcgcgtcgcctgcaagtccaggagcgcttaactaagcagatcgcagtggccgtgactcaggccgtgcaacccgctggagtagcagtggtcgtagagggagtccacatgtgcatggtgatgcgtggcgtgcagaagatcaacagcaaaactgttacctcaactatgctgggcgtgttccgagacgatcccaagacccgtgaggaattcctgaacttagtcaatagcaaatagagtgggcactagaggacgctactgaaatccgagaccaactaaacccctacaatatttttggaggcgcttatatacaaacaaacaaaaatgaaacgaaacacagggtccattagtttatgtttttaggattgatttcatttagttagtgcaatgattgcgcagccattttccttgttgatttgtgtaaaaattgttgaaaaattttgttagcaaaatacgttttttagatagatgaatgtaatgagaagcgagattcgaagaggacgagatttgaataccggtgttgggtagttttatgttcaattttatatgcagttttatggcacttgaacgataatttttacaacgtatacatacgattaatgcattgtgcaataagggaacaactgataataaatcacggcaaattgtttagggaatttacaatttataaacagttcacatcaaattaatcagatctatagttatgtatgtatgttaacctatataaagagttgcattcataatgttcctcgacagggaccaaagtatattggaagattttaaatgttaaaattatatgctcattatgtaaatgacgttgcttgtagtgagtcaaagctgcttattaattatacaataaattatgtatttaaataacgt

SEQ ID NO: 20061 - protein, 273 aa, DROSOPHILA
MKPQTSEQNGSGQNGEGAADAVAVATIPTGEASAASATSGTDLTVSKNSQQLKLEMLNLELASNGSGHEKCTFHHDLELDHKPPTREALLPDMARSYRLLLGGLGENPDRQGLIKTPERAAKAMLYFTKGYDQSLEDVLNGAVFDEDHDEMVVVKDIEMFSMCEHHLVPFYGKVSIGYLPCNKILGLSKLARIVEIFSRRLQVQERLTKQIAVAVTQAVQPAGVAVVVEGVHMCMVMRGVQKINSKTVTSTMLGVFRDDPKTREEFLNLVNSK

SEQ ID NO: 20062 - DNA, 1046 bp, DROSOPHILA
gacgaaaacgaagggagaactacggttagtagagcctgacattaaattcattcaatcagtactatcgccagattacgtatacgcagtgttgcgctgatgtcatatgcatgtgatgcgataatgccccaaccttgccccgttttaccgagctcagttcgaagctccgttcccaatgtgctagggtatatcggtctggtcttgtctgtttgtggatgtttcggaatggatatatatattaatatatacatcacaacttatcgtatatcgtatgttgcgagattcgttgtatgtgtgtgtgcgttgtttcccccacacttgtgtgcctatgtaagcacttgtattgacagtcacaaccaggccaactcttctacacaccccgacatggccgtaagtcgtttgtagtctgactcacgggtctggcaagccattaatcttatcattgataaggccaagggcagatattttctttatataaagacagcacacacacaaacactgctcgttaatgtacacacaagtgtggaacaggttaaatagatgccagaagcccatgcaaaccaagacgacggtctgggccagcgaccaccagagcacgcgggagttggtgctctcgctggtgtgacggaaccgctcctcgcggtatcgctggtagttctgctccttggtgatctgctccacctggtcaagtagctggcggatgcgcagctgcagctcagtcagtttctccttctgcgccacatgggcgtagtcgatagcgtgctctcccacctggatgtccaggtgaacacgcagctgggcaccactgaaccacgcggtgctgttcgagaacatgcagatgacgtgctcgccaggagtgtgcgaggtgaacgagatgcggccctgtgagctgtacacgcgggacagcacaatcttgtcgtcgctgtcgcgtacttccacatgcatgccgattccgggcgacgagggcatgaatccattagagcgcggatcatacagctctaccttgtagttaacaatcacagttgtctcgtcgggaacctcctcgataa

SEQ ID NO: 20063 - DNA, 1561 bp, DROSOPHILA
ctcatgccaaacactctgactttgatctggcactttttctcatgacgtgtcggcgagcttaactttattaaagaactactcgaaaaagtcactgcaaatagccgaaaatgcgcgaccaattcatcagcctggccctgattctgtgcgtcctgcacagcgcctgcggcttgtacttccacatatcgcagacggagcgcaagtgcttcatcgaggaggttcccgacgagacaactgtgattgttaactacaaggtagagctgtatgatccgcgctctaatggattcatgccctcgtcgcccggaatcggcatgcatgtggaagtacgcgacagcgacgacaagattgtgctgtcccgcgtgtacagctcacagggccgcatctcgttcacctcgcacactcctggcgagcacgtcatctgcatgttctcgaacagcaccgcgtggttcagtggtgcccagctgcgtgttcacctggacatccaggtgggagagcacgctatcgactacgcccatgtggcgcagaaggagaaactgactgagctgcagctgcgcatccgccagctacttgaccaggtggagcagatcaccaaggagcagaactaccagcgataccgcgaggagcggttccgtcacaccagcgagagcaccaactcccgcgtgctctggtggtcgctggcccagaccgtcgtcttggtttgcatgggcttctggcatctatttaacctgttccacacttgtgtgtacattaacgagcagtgtttgtgtgtgtgctgtctttatataaagaaaatatctgcccttggccttatcaatgataagattaatggcttgccagaccctatcgaggaggttcccgacgagacaactgtgattgttaactacaaggtagagctgtatgatccgcgctctaatggattcatgccctcgtcgcccggaatcggcatgcatgtggaagtacgcgacagcgacgacaagattgtgctgtcccgcgtgtacagctcacagggccgcatctcgttcacctcgcacactcctggcgagcacgtcatctgcatgttctcgaacagcaccgcgtggttcagtggtgcccagctgcgtgttcacctggacatccaggtgggagagcacgctatcgactacgcccatgtggcgcagaaggagaaactgactgagctgcagctgcgcatccgccagctacttgaccaggtggagcagatcaccaaggagcagaactaccagcgataccgcgaggagcggttccgtcacaccagcgagagcaccaactcccgcgtgctctggtggtcgctggcccagaccgtcgtcttggtttgcatgggcttctggcagatgcgtcatctcaagagcttctttgaggccaagaaactggtgtgaggtgctccggggctagggcatcatcagcaccactggccaaccactggcctcattgttccgtgtgtttccctcatttggcaggaattgcgaatttcatcgatggatcgtcatccacccaaccagccactggcctcgactccaagcacttctagttgtaatttcttgtgcgt

SEQ ID NO: 20064 - protein, 427 aa, DROSOPHILA
MRDQFISLALILCVLHSACGLYFHISQTERKCFIEEVPDETTVIVNYKVELYDPRSNGFMPSSPGIGMHVEVRDSDDKIVLSRVYSSQGRISFTSHTPGEHVICMFSNSTAWFSGAQLRVHLDIQVGEHAIDYAHVAQKEKLTELQLRIRQLLDQVEQITKEQNYQRYREERFRHTSESTNSRVLWWSLAQTVVLVCMGFWHLFNLFHTCVYINEQCLCVCCLYIKKISALGLINDKINGLPDPIEEVPDETTVIVNYKVELYDPRSNGFMPSSPGIGMHVEVRDSDDKIVLSRVYSSQGRISFTSHTPGEHVICMFSNSTAWFSGAQLRVHLDIQVGEHAIDYAHVAQKEKLTELQLRIRQLLDQVEQITKEQNYQRYREERFRHTSESTNSRVLWWSLAQTVVLVCMGFWQMRHLKSFFEAKKLV

SEQ ID NO: 20065 - DNA, 4462 bp, DROSOPHILA
atatgtggacgaagcacctgggcaagttcctaaagactctgatcgacaacaagattaacataaaccagggcatgatggttcagttctctcccaaaatggtaactcagtttctgtccggcaaggacacgacggatgtctcctcttcgtgagtaaagatggcatgccaaggaacacatcttatcctctaaattccagagtccttatgaacgagctgctggctggtccggccattagtctggagctaatcggcgacaacgtagtggagaccatcaaggcctgcgcccagtacaagagcacagaggcggaaacacccagtgtgaaactgtcgcccagtttggaagagctgtttgaaagtgaggagattcgttatggattttactactctgataacgacaacgacgtggaaatggacctaaagttcatatctgaggcgaggcacagcataattaaagaatgtgtattcaagaatacaacacttgccatcattaagccgcacagcatcaaggatggtctcctgggagacatcatttccgaaatcctgtcgaatggctttcggttgacagccatgcgcatgattctaatggcccgaatcaactgcgaggagttctacgaagtctaccgcggagtggtgcccgagtatatacccatggttgctcagttggccagtggagtatgcatgtgcatggagattgcttgcgccgatcccgaaaagaaaactgatcgcgagttccgcaacttctgtggacccatggatccggagatcgccaaactgttgcggcctcacacgctgcgcgccaagttcggcaagtccaaggtgcagaacgccgtccactgcactgatctgccagatgactccaacctggagctgcagtatatgttcaagataatcgactgatcttagtttagtttttatttgttttcagttaaatgcatgtttgcctgtgtgcgtttatcaataaattacaagtgcaatgaaaatactagaccgtagaaacttctcctatatgctcccgctgcggctggtgctgggcacatcccggtcctccgcttcactgtccatcctcacatacattccggccttgcgctcctgcagagtgtaatcgaaggccaaaagggcatagaggatgatgcaaactagcattaccaccgcatagaagaagtactcggccatctgtgagctaagcatacccagctcggtgaccagaaccacgatcagattgccgaaagcattatttagaaaccaggctgccgtgaccaccgacttcatagaggtcggtgcttgggtgaaggcgaactggagacccggaatggaaagcagtaattcgcccatcatgagcagcaggaactggggcagttgccaagctatattcactgtttggggcggggaattcttcgaatatttcgggttaataaacgatcaggtgaggtatcttattattcctgcttacctttattcgttcctgcaaggctcctgcacagaaaaaggcgccggcggagaagatcccacccacagtcacactatggagcggctggagctcccagttgaagtagcggcgcagcaagggcactgttatatactgccatagagggatgagcatgaacagaaagatgggtcccacggccttggcctgatccggctggatggtcacgcccattaatgtggtattcatctgggtggcctggaatgtccagctggaatcctgttgcgccagcagagcaaagtagaagggcagtgggataaacagcttggatatctaaaagaaacgaaattatgaagttgaaagaatcttcattataacacaagtataactgaccctcaaaactctggacacatcattgacgaaacccatgtcgtaggctacaactgcattgtgtagccagtagttggagcgctttgtcgacttgcgacgtcgccacttctccacgagagcggtctttatgcagccgcagaacttgaagagtatgttgtcatcggacagcttttcggacttgtagaaccattttccaaccagaaagataactaataccacaagcatgcgtaaattaaatagaaataagctatgaaaactgatagttacttacaccaggccatcataaaggctgcgccaagggtgccgaatacggctggatagcattccgccttgtcaaagcactgcgtgttagctctaaccagcggcggaaggatcttgctcaggaatattccaaaatagtagacgaaatagtagaaggagaagtactcggccagatggacgctctgctccggcagcttgaactgcagtgcgcccagcgaggtgatgcaggctcgtatcgatccattgccaacggcgataaacagcagagcgatggacaccagcaagctacgagtcgcaagtggaataagctaaatccttcatcctaatccgttgcgagtacttacaccatcggaagacccatggcaggcagggatgtcagtgtgaggagtaaccatccaaaggcgtagataaaactgaagccggatatcgtgcgcacattgccgatgtagctatccgctaggatcgccccaatgatcggacagaactggccaaaaaagttgaagatgtgcagcaccaccgtggaaaagctctccgtgaagttgagatcgtcgcgcagatagagtgcgagtacggctggaatcgagtatacatcgtaatcgtgggtcaggctgcagtcaatctcgaattattgaccatgaaataaaggttgtagcattgagacttaattggaaattcgttaagccatctctttaatgatggatgttctttttaagattcacatcaatgggaaaattccaggagttttaattaacaataataataatcttgagtcagttatcttatttttgaagattttctttttaagtaactaaatgctaggtcttgttcctgcccattatttgccaattgcaacctaaattttcatcttatctatgcctcttatattatgcaccatcacaggtcttttgactgtcaataagacctccttgtgtttatatttctgtgccgctgataagcctggtttcggaatttttcaaccagactttgccgacgaatgcctttgacctgaccaaaaatcgattatctgcttttggatggaaatctggaaacttactgcgaatgccgttggcagcaaaggcctcaaaaaattttgtggccagaacgaagaagacggctcgtggatacctatacttcatgcggatggtcggtggagcaaatccataattgggcagggagctgcgatgcgccagcttcaattgggcccgttctcctctccaggcgacccactccacgtcccgtgcatcgcgttcataacccacctggctgagctccgccagagctggcagggctacatgtaatagggagagagaggattacctgcgcttcttgtcttatcttatctagctgcagactcactttcttcgctgccgatttccgtagcgcgaaacattttcaacagcctgcacgcctaatccgacgtagaccaactgaaccggagagggagcagagacctaggccagttgttgacttgaaagcgcttcagactggatcgggttacagagctgcggcttttgtgggtcgtaagcgttcgcgtttggtgtgccacaacaagctgtattgttttggacgtcggatttgtgccgcgactgacgaccgctgctcggggcggtccaagagctactaaaaagtctcttctccgacagaacaaacaatgagataaagggcagtcacgacacgatgctgctcgatgcagttacgatggaccgcggtcttaaaactagggagttaacgccaacgacacaggttatctgtcacagcctactgataagaacaagccacgcttggtgaggcaaacatagtcacgggactcggctcagctgactggcagtctgacccagcgaagataggatgtgggggtgcacacagtctcggtctcgttttgtacaatggattttattaaattacgcacaagaaattacaactagaagtgcttggagtcgaggccagtggctggttgggtggatgacgatccatcgatgaaattcgcaattcctgccaaatgagggaaacacacggaacaatgaggccagtggttggccagtggtgctgatgatgccctagccccggagcacctcacaccagtttcttggcctcaaagaagctcttgagatgacgcatctgccagaagcccatgcaaaccaagacgacggtctgggccagcgaccaccagagcacgcgggagttggtgctctcgctggtgtgacggaaccgctcctcgcggtatcgctggtagttctgctccttggtgatctgctccacctggtcaagtagctggcggatgcgcagctgcagctcagtcagtttctccttctgcgccacatgggcgtagtcgatagcgtgctctcccacctggatgtccaggtgaacacgcagctgggcaccactgaacc

SEQ ID NO: 20066 - DNA, 1674 bp, DROSOPHILA
atgtttcgcgctacggaaatcggcagcgaagaaaccctgccagctctggcggagctcagccaggtgggttatgaacgcgatgcacgggacgtggagtgggtcgcctggagaggagaacgggcccaattgaagctggcgcatcgcagctccctgcccaattatggatttgctccaccgaccatccgcatgaagtataggtatccacgagccgtcttcttcgttctggccacaaaattttttgaggcctttgctgccaacggcattcgcaccgtactcgcactctatctgcgcgacgatctcaacttcacggagagcttttccacggtggtgctgcacatcttcaacttttttggccagttctgtccgatcattggggcgatcctagcggatagctacatcggcaatgtgcgcacgatatccggcttcagttttatctacgcctttggatggttactcctcacactgacatccctgcctgccatgggtcttccgatggtcttgctggtgtccatcgctctgctgtttatcgccgttggcaatggatcgatacgagcctgcatcacctcgctgggcgcactgcagttcaagctgccggagcagagcgtccatctggccgagtacttctccttctactatttcgtctactattttggaatattcctgagcaagatccttccgccgctggttagagctaacacgcagtgctttgacaaggcggaatgctatccagccgtattcggcacccttggcgcagcctttatgatggcctggtttatctttctggttggaaaatggttctacaagtccgaaaagctgtccgatgacaacatactcttcaagttctgcggctgcataaagaccgctctcgtggagaagtggcgacgtcgcaagtcgacaaagcgctccaactactggctacacaatgcagttgtagcctacgacatgggtttcgtcaatgatgtgtccagagttttgaggatatccaagctgtttatcccactgcccttctactttgctctgctggcgcaacaggattccagctggacattccaggccacccagatgaataccacattaatgggcgtgaccatccagccggatcaggccaaggccgtgggacccatctttctgttcatgctcatccctctatggcagtatataacagtgcccttgctgcgccgctacttcaactgggagctccagccgctccatagtgtgactgtgggtgggatcttctccgccggcgcctttttctgtgcaggagccttgcaggaacgaataaagaattccccgccccaaacagtgaatatagcttggcaactgccccagttcctgctgctcatgatgggcgaattactgctttccattccgggtctccagttcgccttcacccaagcaccgacctctatgaagtcggtggtcacggcagcctggtttctaaataatgctttcggcaatctgatcgtggttctggtcaccgagctgggtatgcttagctcacagatggccgagtacttcttctatgcggtggtaatgctagtttgcatcatcctctatgcccttttggccttcgattacactctgcaggagcgcaaggccggaatgtatgtgaggatggacagtgaagcggaggaccgggatgtgcccagcaccagccgcagcgggagcatatag

SEQ ID NO: 20067 - protein, 557 aa, DROSOPHILA
MFRATEIGSEETLPALAELSQVGYERDARDVEWVAWRGERAQLKLAHRSSLPNYGFAPPTIRMKYRYPRAVFFVLATKFFEAFAANGIRTVLALYLRDDLNFTESFSTVVLHIFNFFGQFCPIIGAILADSYIGNVRTISGFSFIYAFGWLLLTLTSLPAMGLPMVLLVSIALLFIAVGNGSIRACITSLGALQFKLPEQSVHLAEYFSFYYFVYYFGIFLSKILPPLVRANTQCFDKAECYPAVFGTLGAAFMMAWFIFLVGKWFYKSEKLSDDNILFKFCGCIKTALVEKWRRRKSTKRSNYWLHNAVVAYDMGFVNDVSRVLRISKLFIPLPFYFALLAQQDSSWTFQATQMNTTLMGVTIQPDQAKAVGPIFLFMLIPLWQYITVPLLRRYFNWELQPLHSVTVGGIFSAGAFFCAGALQERIKNSPPQTVNIAWQLPQFLLLMMGELLLSIPGLQFAFTQAPTSMKSVVTAAWFLNNAFGNLIVVLVTELGMLSSQMAEYFFYAVVMLVCIILYALLAFDYTLQERKAGMYVRMDSEAEDRDVPSTSRSGSI

SEQ ID NO: 20068 - DNA, 6447 bp, DROSOPHILA
tcggctgtggaagagcatgtattagtgatgacaccgttcgtgccactgtaccgttccctataaatttgataatctataaaaataacaagtaattccataaatgatgctgcttataatttactttgtactttatagagacagaaataataatgaactacttttttttatctatctactagtaaagttagtttgggcaataaagtaggaaagtccatactttattaaaataaattcaactatagtcattttgtttccgtttaaatctttacttaaaacttttatttaaataagtgattttttttatgcgttttgcgtgtacatttgcacaataagctttcttagaagttaataataataattgtaataacattactaacaaaaataataatgagataaaattccatttataatacaataagaataaaattcattatgttattggccctttgttcaactgtctagaaccataggatttctatatatgttatataattatagatattatatttataggcatgaatgtataatgattcataataattccaaaaagtgttttaaaaactatcaataaacatttcaatgacgctttcattttcacccgctgcataattatgttgtgtgttcgccacccatttaaaatttaatagtacattgagatttgcaatattttaagtccggagcttgggtattcacattaactaccgcgtacataggtgtacaaattccaccgcttaaattcgcatctgcctttcgtacacgtaatcatttaatggattgtttcacatgtgagtgtaattaaatctaccagtgtatagcttcaatttcgtagtaaatgtggtctatattgcctcgacgacccagtgtgaataaatttgactaaaatcaacgaacgttgacttgggaacggatatgatatacatacgtcgatcaatctattttcgtacgttgctacttaacctttagtttgctttcaatttagttacaactacaactttcaactgcttgcatatatgcatatgtattctctatagtttcctttagctagctgcgagtgcaagagtgtaggatctgcacttgttattcctgtctcaaaaatctgctaacgatcgccaaaagtacaaaataaggatattgaattctatgcacagcatcctaatcagaagctgggtgacggatgtgccgcatcatatcctctactcctcatccgagtcgccatcactggagtaatgtgtgatttgagggcgacgaatgaaaggcgccgttatcacttgtctgaaagaaagtttacaggtttaattagcatgtctatgtccggaaggagagcaagtcatatttacgcaatgcggcggtagtgatttagccactcttccagcatctgggcgaccagcaagggacgcttgcttagcttttgttgcgccaccagtaggcctccatcagttacgcacacgtccagccattgacgcatcattgactcctcgttgccaacctgcaggcaaggaacggaaatgtctaagctcacaatgttctacaggatatttgaataagctctcacctccgactgtgtaaggaaatgtatgggcaaaagtttcagctcgcagtccattagcgggagataggttacgtcctccacatcgtcacgccgcccatcgatgcgagtgaatggctccatcggcaccagggcgctgaaatggccacgtgtgtagcccagtgctatcggtgacttggtgcaaaagttttgatcccagaacaaaggcaagtagacacctagaaataaggcaatcaaataaatgcaatacagcgacgtaaaaattaatagctaccttcgaaacgcgcgtatccaatgtcctcgccccgaaaactcttgacgtacttcacgccgtaaacgataatcggccgacgaaggatatgcgccagcgcaaagatgtgcagttgctccagggacgagccgggttggccggccaatgacagtagtgtactccagtcctcctcgaactgagagtcctccagcgtaaagtggagcatcgaagcctgcagcatctcgtactctttccagcgagtaaagaacctacaataagagtatcaagactattaataagctgacggttgttaaaacaaattcgtttaacttacacatgcccgcactggtgcagtgtgtcggcgagtgcccgcctaaggatattgtcacgatcgaagacgccccaggtggcctgcatggccgagtccagcaggcagtcgccagcactgcggttccacagtacaaacatccgtgagctcaggcgagcagtgatctccagcgaccaattcaaggccggcggcggcgtctccagctgtttctgcgcgtcgcggtcgagcagctcatcgtagagctgctcctgtatgggtatcggcagctcctcaatctcggcggggagggcgaaggtggcgtgcttttgcacatagtggcagggtagaccggacttgcgcaagcgcagggtattggcaaagtggcgccggatatcggccgccaagtcgggagccacgtaggacggcacacgcttgatgcccggccccgaaccggagatctggtccagcagcatcggtaacatctcctcgcgatgaaaacgaatggccaggtggatcagggtgtggcccacgtcgaaggccgagttgcggttgagggcggcaatctcggtgctggtcaacgaacgggctggattgccaccgcaggagaggtacgcctccacagcgctgtagttgttctccacgacgcccaggcacgcattcagccactgccagtccacctgtcgtcggatttgacgctggcggcgctcctgacgctcttgcagcgtatcacagttgttgatggtttccgaagaacctggaaagtgaatatcaattagtcatacccagagaaatcacattaaaaactcttacccagttggtaaatgtgcttcttattgaacgagttattgacgctgacggtatccacgtttggctgctgcagttgttgctgattctcctcctgactgtttaggctggatgaggcgtgcaagtcgttctgcgacccactaatctcccgctccctcgtcttgccgcacatggagcacttgatgctcctcggccagttttcgtaagtgcaagactaaggaaaattctaactttaagtacatctgagcgaattggttgggatatgaaaacctacgttacacgcccatttggagacatagcactgcttctgctgctgcggcgggacggcggcggaggatgaggattcccgctgttgctgcggctgcagctggagctgcatctgctgctgtaggacaggctgccggtgctgggactgcgactggttgtgagacgcattggcgagattgttcagatgggtcgcatcgtctatgccacgactaaggctcaaacgatgggaggccgtggcgccgatgagctgaaccggcttattggccaggttctcctccgagccgctgatgcgaagggcttgcagcgcctctcctgcacgatccccgtccgcctcgttatccatgtcctttttgccacgctctatcgcctcgccaccgcgcttcgtgcagcactgaacgcagcgcaggctccgcggccaattgagataggtgcacaccttgcagggccacttttcgctgtccgccacgttgctctgccgtgcctggctctgcggctggagcgagtagcacgtggacgaaggtgtgggcgacattacggctacttcgacggcagccgcctcctccgcaacggtgcagctctcctgggctggactcagactgcaagaattagcaagtattaattagcagaagattaggtatagatcgtcagagttgtcataccggaagatgtcctcgttgagcagcggcttggacgcctggcacatggtgcatttcagcgaggatgggtagttctcgtaggtgcaagtttcacatttccatttctgcgcatcgtctttggtatcgcacattgtttatgcgcggagccggccaatgcagttgatctgccaaggagaaagggatcatacgttgaatatttgatatgggatacacgagtgtcaccaagtaaggggatcccataaaatatgcttttactagtcaaatccacctggctgccttttttacttcaaaatagtttaatttctgaacaattgtaagcttagacaatcattttagtcgaagttggttgaagatacgaagagtttgatcaataatgtatagctatgttgacttttgtcggaagttaatgagatgttgcattcaaaagaaaaagattatctaaaaactaatattggatttataagtacgcagggaaatctacaatttggaggacatttcaatttaccttgacttattttgcaaagtataaagactatatgcatgactcgttttgggggacaactatctaccaatgaatgtatctactaagctactattctttggataagcgaaccgaaagggtatccctaaagtcggtgagcggcgaatccaccacttccgactcgttaataaggtcaaacaacggttagcgaggcagaagcagtgtccttgaccctgagacataattcgcagatacatccacagatatgtacatctgccttggctccatttccatttcccccactggcgtcacagtcagccttcgggttctcgttgcctgggattggattggaatgaattggatagggtctggttttggtagtagtggtggtataggtggtagtggttcaactgctgggtcggttgcatttatttgttgccattataattcgcctatgtatgtatggcatgtgtcgcgtgcgatgtacgtacgtatgtatgtacgctggtatgccagttttcgcgctagtttcttattgggattcgccccgtgccatcccaaccatcccacaaccgcctccaccccccttcccacatcgacgtctttacacagtacctggcgcagaaaatcgcaaggccttttgcagcagtcccagaaaacgcgaatgcgactgcgaccacgacagcgattggattcgattcgaatcgagtcgatttaaatatataacacaatcacaatagggaccgcgagtatagcattagtattatagtagctataaggtgtagttgctatagtcgccgtcggccacccgcgcccgcagcagcgacactatgtcgacgtcgatccaatattgccagtaatgagcgctggcagcaggcaggaaaatcacaattacaaaacaaagacgatgagaaaactttcactcgattttcagtttggggggttttctttcttgctttccttctcaattttcagctgtacttgcttggggcgcgtgaaacgaaactgcccgcacacattcacggcgacgaacacacgcacggtggatcgtagtgcaaggaatttggaatttggattatttggaaacagctaattatttattttttacattattgcgaggccaatcatctggttctctgtccgcctatcgacaactatcggtgctccgtccctggcgctcagtgttgaaaagtgtctcggttagctggttagtcaagcttcacacctactggtgttcagtggttttcatggcaagtcttagagatcgggggatggtcatactagtaaataaaatggcgggagctgtacatgaatttcatttggtaaacaaattatattcttaaaatggtaagaacacggccggtgccgtgtgttccgtcgccagatgtgaacaccgcaacgagacgcaatcccgggcgtcccaagaaacagtccatcggagctgacttaagcacaacgataagcaaacccgggcgtcccaagaagctgtccatcggagctgatttgaccacaatacgtaaacccgggcgtcccaagaaactcggagctgatttgaccacgataatacgaaaacccgggcgtcccacgaaactatcaaacaaacaatctttgacagccctaaacgagccagagtgtcgcataagaaaatgcgtggtaaaaataaggcgcattaaggtaaaaaacggtgtcgtatccgaaatttctcgaaatgatgcgcctgatgtggatgccagcacttttgagccggctcgcaactcgacgatgtacattccttcgaaggtacagaaatcaacgcaaccccaaaatatcaaggaaaatgtggcaggtaagaggctctcaccaggcggatgatggacttttcttgataagcacaactacttgcaggtcccgaaacatcgccatgtcagcaacgcataaggagtaaaagccctagtggaccggcagctgagatttcgcccaaaaaaccacctcgtttcttccacagagatcagcctttaaccaggacacgatcatcggtgacccgcaacgttttcgattttctgtcgcagtcgcagatcgaagatgacagtgacagggaggatccggcggcagacataattcagcgtttggttaaggatggaaaggcctgcgtaatgg

SEQ ID NO: 20069 - DNA, 3084 bp, DROSOPHILA
agaaccagatgattggcctcgcaataatgtaaaaaataaataattagctgtttccaaataatccaaattccaaattccttgcactacgatccaccgtgcgtgtgttcgtcgccgtgaatgtgtgcgggcagtttcgtttcacgcgccccaagcaagtacagctgaaaattgagaaggaaagcaagaaagaaaaccccccaaactgaaaatcgagtgaaagttttctcatcgtctttgttttgtaattgtgattttcctgcctgctgccagcgctcattactggcaatattggatcgacgtcgacatagtgtcgctgctgcgggcgcgggtggccgacggcgactatagcaactacaccttatagctactataatactaatgctatactcgcggtccctattgtgattgtgttatatatttaaatcgactcgattcgaatcgaatccaatcgctgtcgtggtcgcagtcgcattcgcgttttctgggactgctgcaaaaggccttgcgattttctgcgccagatcaactgcattggccggctccgcgcataaacaatgtgcgataccaaagacgatgcgcagaaatggaaatgtgaaacttgcacctacgagaactacccatcctcgctgaaatgcaccatgtgccaggcgtccaagccgctgctcaacgaggacatcttccgtctgagtccagcccaggagagctgcaccgttgcggaggaggcggctgccgtcgaagtagccgtaatgtcgcccacaccttcgtccacgtgctactcgctccagccgcagagccaggcacggcagagcaacgtggcggacagcgaaaagtggccctgcaaggtgtgcacctatctcaattggccgcggagcctgcgctgcgttcagtgctgcacgaagcgcggtggcgaggcgatagagcgtggcaaaaaggacatggataacgaggcggacggggatcgtgcaggagaggcgctgcaagcccttcgcatcagcggctcggaggagaacctggccaataagccggttcagctcatcggcgccacggcctcccatcgtttgagccttagtcgtggcatagacgatgcgacccatctgaacaatctcgccaatgcgtctcacaaccagtcgcagtcccagcaccggcagcctgtcctacagcagcagatgcagctccagctgcagccgcagcaacagcgggaatcctcatcctccgccgccgtcccgccgcagcagcagaagcagtgctatgtctccaaatgggcgtgtaactcttgcacttacgaaaactggccgaggagcatcaagtgctccatgtgcggcaagacgagggagcgggagattagtgggtcgcagaacgacttgcacgcctcatccagcctaaacagtcaggaggagaatcagcaacaactgcagcagccaaacgtggataccgtcagcgtcaataactcgttcaataagaagcacatttaccaactgggttcttcggaaaccatcaacaactgtgatacgctgcaagagcgtcaggagcgccgccagcgtcaaatccgacgacaggtggactggcagtggctgaatgcgtgcctgggcgtcgtggagaacaactacagcgctgtggaggcgtacctctcctgcggtggcaatccagcccgttcgttgaccagcaccgagattgccgccctcaaccgcaactcggccttcgacgtgggccacaccctgatccacctggccattcgttttcatcgcgaggagatgttaccgatgctgctggaccagatctccggttcggggccgggcatcaagcgtgtgccgtcctacgtggctcccgacttggcggccgatatccggcgccactttgccaataccctgcgcttgcgcaagtccggtctaccctgccactatgtgcaaaagcacgccaccttcgccctccccgccgagattgaggagctgccgatacccatacaggagcagctctacgatgagctgctcgaccgcgacgcgcagaaacagctggagacgccgccgccggccttgaattggtcgctggagatcactgctcgcctgagctcacggatgtttgtactgtggaaccgcagtgctggcgactgcctgctggactcggccatgcaggccacctggggcgtcttcgatcgtgacaatatccttaggcgggcactcgccgacacactgcaccagtgcgggcatgtgttctttactcgctggaaagagtacgagatgctgcaggcttcgatgctccactttacgctggaggactctcagttcgaggaggactggagtacactactgtcattggccggccaacccggctcgtccctggagcaactgcacatctttgcgctggcgcatatccttcgtcggccgattatcgtttacggcgtgaagtacgtcaagagttttcggggcgaggacattggatacgcgcgtttcgaaggtgtctacttgcctttgttctgggatcaaaacttttgcaccaagtcaccgatagcactgggctacacacgtggccatttcagcgccctggtgccgatggagccattcactcgcatcgatgggcggcgtgacgatgtggaggacgtaacctatctcccgctaatggactgcgagctgaaacttttgcccatacatttccttacacagtcggaggttggcaacgaggagtcaatgatgcgtcaatggctggacgtgtgcgtaactgatggaggcctactggtggcgcaacaaaagctaagcaagcgtcccttgctggtcgcccagatgctggaagagtggctaaatcactaccgccgcattgcacaagtgataacggcgcctttcattcgtcgccctcaaatcacacattactccagtgatggcgactcggatgaggagtagaggatatgatgcggcacatccgtcacccagcttctgattaggatgctgtgcatagaattcaatatccttattttgtacttttggcgatcgttagcagatttttgagacaggaataacaagtgcagatcctacactcttgcactcgcagctagctaaaggaaactatagagaatacatatgcatatatgcaagc

SEQ ID NO: 20070 - protein, 778 aa, DROSOPHILA
MCDTKDDAQKWKCETCTYENYPSSLKCTMCQASKPLLNEDIFRLSPAQESCTVAEEAAAVEVAVMSPTPSSTCYSLQPQSQARQSNVADSEKWPCKVCTYLNWPRSLRCVQCCTKRGGEAIERGKKDMDNEADGDRAGEALQALRISGSEENLANKPVQLIGATASHRLSLSRGIDDATHLNNLANASHNQSQSQHRQPVLQQQMQLQLQPQQQRESSSSAAVPPQQQKQCYVSKWACNSCTYENWPRSIKCSMCGKTREREISGSQNDLHASSSLNSQEENQQQLQQPNVDTVSVNNSFNKKHIYQLGSSETINNCDTLQERQERRQRQIRRQVDWQWLNACLGVVENNYSAVEAYLSCGGNPARSLTSTEIAALNRNSAFDVGHTLIHLAIRFHREEMLPMLLDQISGSGPGIKRVPSYVAPDLAADIRRHFANTLRLRKSGLPCHYVQKHATFALPAEIEELPIPIQEQLYDELLDRDAQKQLETPPPALNWSLEITARLSSRMFVLWNRSAGDCLLDSAMQATWGVFDRDNILRRALADTLHQCGHVFFTRWKEYEMLQASMLHFTLEDSQFEEDWSTLLSLAGQPGSSLEQLHIFALAHILRRPIIVYGVKYVKSFRGEDIGYARFEGVYLPLFWDQNFCTKSPIALGYTRGHFSALVPMEPFTRIDGRRDDVEDVTYLPLMDCELKLLPIHFLTQSEVGNEESMMRQWLDVCVTDGGLLVAQQKLSKRPLLVAQMLEEWLNHYRRIAQVITAPFIRRPQITHYSSDGDSDEE

SEQ ID NO: 20071 - DNA, 10479 bp, DROSOPHILA
tatcccaaaaacaacaggagctttctcgaatgaccccgacgtgatttgaacacgcaaccttccgatctggagtcggacgcgctaccgttgcgccacggagtctactgaaatggaggctactaagtgacaggaatcccccaacaccaacaggttgttggttccagtcgtgtagtatccatcatagtgctttgtttgaaatgcagcaagagcatcggtggttcagtggtagaatgctcgcctgccacgcgggcggcccgggttcgattcccggccgatgcataatttttttttaaatttatttcgtatataacgaatcaaaaaaaaaaaaaaaaaacagtgtaaaatatgattcaaagaaataaatataaatattttttattcaacttcttagtttgataaatatataatctattacttgcaaatcctactgtgtacctttcgtttggacccaaaattattggataacaatttcacaataatttaataatgaagtcataagaaaatatatcacggcgacgtacctaaaataatgggttaaatagtaaaaaaacatacaaaaagtttctcgacaattacgtgcaacttacaccaaaccatattttgagcaggccgatgttttgatgcatcgataacaacaaaaatcgtcaataaatatccccgaaactcccaccactagtcgtcgtttcgttgtcttgtggaaaagtttggttggcagtgatactttttgatttaattcttttcgcgctaattaattgcttttcttgatctaacaccacccatacgaatcaccgttagcacgggtggcacttgctaagcaggcccccgagaaatttaaaagactgaaagcccccaaatagaaataaaatcgctgcaccttgacagacgtgtctgtgtgcatcgcgatttctaatcactcgcaagactttcttccacaaaaagtgagcagaaaagagcccacaagagcccagccattaagaagtgtgccactatttcgccccaaaaacacgccgtccacttaaattccgtaagccaggcagcaaaatagaattaaataacaggggcaagcgagaaagagacagagcacctggcgaagggtagggcgtttttttcaaagtttcgcttttaatctggacaacgacgacgacaagacgtaagtgtcttcccatattaattactttacgtttaatttctttagatcttaaaaaaaatgaaataatggcaagcattcgcaatgccacacacatacgcactgtgcattccaaccgagtatgtgctagttcagttagtattctgggctgacaccctttcgccggtccaaactaacggggcttctacagctgcacctgtatgtgtggggtcgtgtgcctgcgtttttcaattgggataaaacaattttaagagaatctgcattgcttccagcgaataacaacatacaaatatgaatggacaggcgcgcattgctcttccctccaaagtggacctgtacatcactcatgtggatcacgtgggtccgtatctgaaggtctacggccacgttaaccgagacgccgcctccctgatcagcgaacgaatcaggaatctgttgcccacatgctttgccattgagcccagttggtccgtggagcgccaacaggctctcctcatacccggcacgttttgcatattcaagaatatcaatggcccggctcctggtgatgtggagtacaggcggatacgtgtggtcagtgcagacctggagggtcagtcgatgcgggcggagatcgatttcgtggactttggctataagcgtactgtagatagtcatgatgtgagtgaatgaacctcctttcaatattgaacaatacctttctaaacaatttatcccttttagttaatgttccccaagcagcccaagctgcttcagaacattcccctgcactgcttccagtacattgtgctgggaatctgctccgagtgggatcagaccgatctggctgaggttcggcggctggttgtcaaccagatcgttaaaatcactgtggaacctacacaaatctgtgaccaaaagtttgccagtctgcgctggaaggattttgagctcaacgagttcttagtgcaacaaaaacaaatcggagtttcggtcgacaagcaactcatgatggaccactgcaagaagctgtggaaggataatccgcagtcgccggtcaccgaatacaacaacaatagtatacacaactcaaagacgcccatggagattgcccgtgagcaactagcggtgcgacaatccttagctgctcgcttggatgcacagcgatcggtccaagtgacaccgtcaaggccgctaaacgccgatgcccctgactatacgcctaaacatctgccgctggtcaatgtggtatgaatggtcaaaatttctataaaagtaattattaatatctcaatttacagacaaatgtacaggtacaaatgccaggcctaaacaatactcagaaaccggtatttgtatcgacaaatccttataatcgtgccaactatcagcccgctgtgccggctgctcaaccatatgtgcccaaggcgaacccccgatcgcaatacacctattacaatgttcgcatgaacaaaccgattaacgccatgccgccgccggccggtccacatgtgcccattcagcactttaatcaacaggctaacaacgtgtcactgagctatgttcctgcacggttcactccacctccaacgccatcgattgcgcaacatcaaatccccattcctgccttcagaaccaccagcttaacggtgggcctcacctacgacgtggttataagctatgtggagaacggtccgtacctattttgggtgcacctgaaaagcagcgatcatgatctgagcaccatgatgggtcaaattgaacggacgaagctcaaggcactcgcgcaggctcctgagcttggaactgcctgtgtggcccgtttctcagaagatggtcatctgtatcgcgctatggtgtgcgctgtttacgcccaacgttaccgcgttgtttacgtggactacggaaactctgagttgttgtccgcaagtgatctgtttcaaatacccccagaactgttggaaattaaaccgtttgctttccgatttgctttggccggaaccaaggaaattgagcccattgacgacagcatgaagcggattttcaagaaatcagccatttatcgtaactttgaactgactgtccaggcgccagagagtgtgggctccatgcaaacctgccatctcaaccagaatgtaagtgtaaatataattacgacagaagaatataagtaatttgacataaattatttgtagggcaccaatatgctggagcttcttaggcagctaaagaactcacgtcagtcctacaaaaaggcggagcaacttgaaaacgacgacgccgtggagattcgttttattgattcgcccagcaacttctatgtgcagaaagtggccaacataggaaagttcgagcagctcatggacgagatgttctcctactacaatgcaaaccagagagttcccgatcagttgatcttgggcgcaccctgcattgttaaatgcgatcaggaatggtaccgtgcagagattctgcgcgttgatgactctgtgattgtgcggcatgtagattttggttatgaacagaatgtgaagcggcatttgattggccatattgctgagaagcatctggaaatgcctcgccaggcaattaagtgctgcttgaaaggattcgagaacagtgaacttagcgaggacaagattaccgatcagtttgaaatgttagctgaggaatccaatatccgaaggcgcacatttagtgtgcgtatctttcgcattgaacccgatggtctgaacgtagtaaacctgctggccaagaacctgaatgtgatgaagaagctctacaagctttctatgccttttgaacaatatctgtccctggaaaagggtcagtttaatgcaaacaacacccgtgccgagtctgtgatctcttctgagttgaataagagccatattttgaactctacaagcattggcgagaccgaaaatcgtttgcaagaacaggaaaaagagcagcaacagaaaaaggtcgatgttaggcagcagcaactagcagttgaaattccgcaagcagtaaagtccgttagcggaagcaaaaactcgacagactgggacaaacgtagctccacctcggcaggctcaaaggacagtaagcgtcagcagcagcaacaaatacagcgaatcgatcgccatttagacttcagctgtgagacacagagcaccggtagttacagcagtggcatgagttcgccgcgcaagggtaaccgacaacagaacggtcgcacaccgatccaatcaccacgccataatgaaaagcaggaagcgaaaaaaaatgcgtgagtattttagttattcgagcaatgtatttataatttgtgattactatttcaggcgctttagcaacagcgagtcaccccgcaggagtcgagatggccagcaggggaaccaacgctcccaaaatgcgccacagggctatgctcaaaagccacagcgtcaaaaatccacgttagacggaaatatcagctcaaagcgttccagcggagtggggagtgatattgcctcatccagctccgaatcggtggctgccgccaagccggagaaatacgtttccttggataaaccgtatgcgctgcaggagatgaaaacacctagcaaggaggcagctagtttgtcttggtggctctcgccattccagttctacatcgtgcccaagtctgtctctgcaaagtacgataatataatgcgtgatatgcgagagttctaccgccagaagcaacaccagccacttcaattaaaggttggatccaccgtagttgtgcgccagcgaaaggacaatgccattctgcgggctactgtgaccgcatgcaatcacatgatgcgcaagtatcgcgttttttgcgtggacacaggcagcttaataacggtcacctcggaggatatttggcaattggagcagcgctttgcagatccgccctgtatggcacatcgctgcagctttcacagcgtcgttaccaactatgatccattgtacattgtggatcgcatggaaacattcgttccagttaatgccaaagtcgattgcgagttcgtgtccaaagagaagagcaaccaaggctcaaataccagcagcacttgctcctacacagttaatatttttgtaaacggagcatccctacgagatatgctcgtcaaagcggaattccttaccgaagtggcgcctggtaagagaagcaacttctttcttgaaaattgttttgtgcccaatcaagtgtttttgttgataataatgtaatttgttcttatttttcaatagagattcgcgttaaccttttagctggtcagcagattagaggaaaattcacttctattcgtgacatgacaagctttaaggttcagtttgattatggtaacaatgtgaacttcctttgcacctatgacgatgctaaatttgttaagtccaatccgaatttggccaggcgatttaaggagttttacgagggtaaatcgtttgccttgaatgtcaagaatgtctgcgaaaacaatatgtaagttaatatgcactttactgtgtgtgcgcagttaaacccgatatcgttgtgtcttctgatgcattcgttactattattgaccaaatctgataaaatttatgatttattttcaagcgttcatctgagacctgtaatgccgttgttcatggaggatcgcaggtcattcatctgcccctatcccgtggtgctgagctcattccaagcactcgttgtgtacaccgctaaaccttaccgcgtgtatgttcaaccgcaggccatagtaccatctatgcagaccctattggataatatgtatgaacactacaaggccaagggtaaatactttagttgatatttagaccatcaaattaacctctttttattttaggcgactctttgaaaaaatttgatgtgggacagatctgtgctgtacgaagctccgatggcaattggtacagagccagaatctcaggaaaggattcgaatgcagcgtgcttcgaggtgttttacatcgattacggcaacacggaggaaataaagcgtgacgatatcaaggcattggatgcaaagttttatgagcacgcaagcggctttgcagtggagattaatttgccgattggccgacccagcaacgatacaaagctaaaggcgcgtatatccgagattcttgaggagaaggttgtcactatcaaatcgattgaggtgcggcgcagtcacctaattgccgatgtcattttggaaaacaatcagagtgtgatagacctgctaaaggctgagaagcttgtacccggcaaagatttggattacatgcgcaagcaaatggagaaaggaaagtctcgcacttacgagtacattgaaacagtagacctaactttggacgaagaggaggataagggtcgcaaggaaactgtcagcaagtcgggttcggcaaatgcctccccaaagaaaaaacaacataatgacaaggatcgcgagcccaaaaagagtaagccagcagagcctgctcgtactgttgctccacaacctgttgcattgaaaactccttcaccagttccggcggagccagcaccagtgccaaaaccagccactccagttccagaggttgttgaagtaccagaaattaatccaactgtcagagaagctgctgccgagtcaaagcaagctcctgcacaagaggatccttacaaagatttggactgcgttgtactgagccattgcgacaatcctgcacagttctatgtccacccgatcgatcagctatcgaaactaaatcagctgcatgagaaccttcagattgtgtctccctctttgccccagttgatgaacgtggtaaacggtgcagactgtgtatcgatgtattcggtggacaaatgctggtatcgcgccaaaatcattgatgccgagctaatggtactacttttcatagactatggcaacacagattgcgtttcggatgccactgacatcaaagaaagcatgtggtcgcatatcgaacccttctgcttgccatgcgcactcccgattcgacccaagggtactgcggattgggtggatgcagcgaatggcatctttaacgaatcgtactcgaaggtcccgcgtctggagtaccttacccaaggagatcactacacgaccagctatgttaacatgtatattgatggcgaggatgtggctaagaaattaattgccgatggttttgctaggccgttagagtatttggccagcggatgcagttgctacatttcgcacgtgaatggaatttgtgatttctttattcaacttgaacgtgattcaaaggcgctagaactaattgagttgtatttgcgcaagaaggacacattaaagcccctcgaaggatttgaaaagggtttgattgtggctgctctatttgaggacgatgagctgtggtaccgagcccagttgcagaaggagttgcccgattcccgatacgaagtactctttatcgactacggtaacacctccaccacatcgaagtgtctaatgctgtccgaagagattgctagcctacccagcttatccaagaaatgttcgctgcagttgccagatgcctacatctcatggtcaccagaagcggaggccaaattcgccgaactgacaggcgagggtgagctagtgtttaccacacagcttctgaagccaggacaggatcatgtcaccattgatcttctcctggatggagagaacatcatcgaccgcctgttaccgttgtgccagcgaaaggaacccaaggaagccagtaaggagtccttagctgttaccactaaagccatcattacgcacgtggagaatacatcccgtatatatctacagtttagcgagaaggattcattaatggatattatatgcgagaagctaaatggaagcaagctgcagcctaagacggaaaaggctgcagtagatgatatgtgcgtagttcaattcgccgacgacttggagttctatcgctcacgtattctggaagtgctcgaagatgaccaatacaaagtcattttgattgattacggcaatacgactgtggttgataagctttatgagttacctcaagagttcacgctcattaaacctgtggccgaaatatgcagcatggaacccagcgccatatttgagaaaaataaagctctaaccctgacaacatttgacgcactgctggacagctgcaagggtgttgtggcggtggaatttgtaaacaagtctgccagtcctcctgtggtcagattgactactaaagataagaggagcctgaagatctatgaacaccttcagaagttggttcaagccgagctgaaactaatccaaaagcgaaacgagaactctgaatgcattatctcatatggaaactcacccaagagtttttatgtgcaaatgaagcacaattcagcggatttggacttgattgtgaagacactgcagtccttaaaaaaggagaaactgaagaaattaatcgatcctactacaaattcaaatggtgtttgctactcccaagaggatgcctgttactatcgctgtagtatcaagtcggtattggatcctagccagggatttgaagtctttttgctagattatggaaacaccctggtcgttccagaggtctggcagctaccccaagagatagagccgattccatcgttggctctacactgtcagctgagtaagattccaatggatgtgtctgacgaaaagctagaagaagcctttgctgctttgctagagcagcacttcggagaactatacgaaataactactcagccgaacgaggatgagacaaaacctctgattgctgaactccgaatcaactacaaggatttcgtccaggagctggtcagtacggtgaccggcgtacagaaaccgctcgaagcggagctgcacaactgtgttgtggtgcagttcgatggccccatgtccttctacgtccagatggagagcgatgtgccagcactagagcaaatgactgataaactgctcgatgcagaacaggacctacccgcctttagcgacctcaaagagggagctttgtgtgtggctcagttcccggaggacgaggtcttctatcgcgcccaaattcgcaaggttttggatgacggaaagtgcgaggtgcattttattgactttggcaacaatgccgtgacgcagcagttccgccagctgcctgaggagttggccaagccggcgcgatacagcaggcattgcgagctggatgcgtcgaccatatccaagtgcgacgcggccctgctccagtcgttcatcgacactcgcttctctgaaacattccaggtagagattctggccaccaagggaactggcacccatgtcgtacgactcttctaccagagcaagaacatcagcgagaagcttcaggaatgtcagtgatcaccccgttgtacagtcagatcggactcatatgtgctccatgcaggagattgtgattgggttggctaaaaacatgcgatgtattatccattaagttgaacgagttaaacttattcaaagggaagaggaggacaccacacgattagccaagatgcttcattgacttttcatggaaaaccaaaatgaaagcaatttttaatattaattaaagaatcaatacggaatgcaaaacattatcaccaaaaacacaacaaaacgaaaaaaaatcgaacaaaaaaaaaaacgaaaaatcattgaaaaaaaatgtataaaaacaaacgaaaaatattgaaaaaaactttaaaaaaaaatgtaatctagataaaattggcactaacctatatatgttagtagctattaaggcggatgacgatttatttaattgctcaaccttgtttaaaacaattttacatcatcaacgaaagttggcgaattgaagagaagtggagtgaagtttaaacctcctccagatgaattatttattttttccctttataactgtatttgtactttcttttctcgattaaccaactgaagaatcacatatgtttttcgtactttttttacttttcattacctaaacaaacaagaaacattgcaaatcgaagacttaaggaaactaaaaggaaactaatggaatatgggtttatgtattaaaaccttcaatcacaatgtcatatttttctactatttctttttcatgttgtgaacaatatattaaaacaaaccaataaatacgatgaaaagtaatgccatatagagcgtatattattacctggtagttatacctggagttccagacccggtgccaggtagcaattagcggtcgtcagtcggggatttattggattacgatgtggaaaagtggcgaacggacggacagggctcatgtccgtgcttgaggagatctacgggtgcctgggaattttacctgttgataagaagagaattaagtcgtctg

SEQ ID NO: 20072 - DNA, 7644 bp, DROSOPHILA
aaacacgccgtccacttaaattccgtaagccaggcagcaaaatagaattaaataacaggggcaagcgagaaagagacagagcacctggcgaagggtatgaatggacaggcgcgcattgctcttccctccaaagtggacctgtacatcactcatgtggatcacgtgggtccgtatctgaaggtctacggccacgttaaccgagacgccgcctccctgatcagcgaacgaatcaggaatctgttgcccacatgctttgccattgagcccagttggtccgtggagcgccaacaggctctcctcatacccggcacgttttgcatattcaagaatatcaatggcccggctcctggtgatgtggagtacaggcggatacgtgtggtcagtgcagacctggagggtcagtcgatgcgggcggagatcgatttcgtggactttggctataagcgtactgtagatagtcatgatttaatgttccccaagcagcccaagctgcttcagaacattcccctgcactgcttccagtacattgtgctgggaatctgctccgagtgggatcagaccgatctggctgaggttcggcggctggttgtcaaccagatcgttaaaatcactgtggaacctacacaaatctgtgaccaaaagtttgccagtctgcgctggaaggattttgagctcaacgagttcttagtgcaacaaaaacaaatcggagtttcggtcgacaagcaactcatgatggaccactgcaagaagctgtggaaggataatccgcagtcgccggtcaccgaatacaacaacaatagtatacacaactcaaagacgcccatggagattgcccgtgagcaactagcggtgcgacaatccttagctgctcgcttggatgcacagcgatcggtccaagtgacaccgtcaaggccgctaaacgccgatgcccctgactatacgcctaaacatctgccgctggtcaatgtgacaaatgtacaggtacaaatgccaggcctaaacaatactcagaaaccggtatttgtatcgacaaatccttataatcgtgccaactatcagcccgctgtgccggctgctcaaccatatgtgcccaaggcgaacccccgatcgcaatacacctattacaatgttcgcatgaacaaaccgattaacgccatgccgccgccggccggtccacatgtgcccattcagcactttaatcaacaggctaacaacgtgtcactgagctatgttcctgcacggttcactccacctccaacgccatcgattgcgcaacatcaaatccccattcctgccttcagaaccaccagcttaacggtgggcctcacctacgacgtggttataagctatgtggagaacggtccgtacctattttgggtgcacctgaaaagcagcgatcatgatctgagcaccatgatgggtcaaattgaacggacgaagctcaaggcactcgcgcaggctcctgagcttggaactgcctgtgtggcccgtttctcagaagatggtcatctgtatcgcgctatggtgtgcgctgtttacgcccaacgttaccgcgttgtttacgtggactacggaaactctgagttgttgtccgcaagtgatctgtttcaaatacccccagaactgttggaaattaaaccgtttgctttccgatttgctttggccggaaccaaggaaattgagcccattgacgacagcatgaagcggattttcaagaaatcagccatttatcgtaactttgaactgactgtccaggcgccagagagtgtgggctccatgcaaacctgccatctcaaccagaatggcaccaatatgctggagcttcttaggcagctaaagaactcacgtcagtcctacaaaaaggcggagcaacttgaaaacgacgacgccgtggagattcgttttattgattcgcccagcaacttctatgtgcagaaagtggccaacataggaaagttcgagcagctcatggacgagatgttctcctactacaatgcaaaccagagagttcccgatcagttgatcttgggcgcaccctgcattgttaaatgcgatcaggaatggtaccgtgcagagattctgcgcgttgatgactctgtgattgtgcggcatgtagattttggttatgaacagaatgtgaagcggcatttgattggccatattgctgagaagcatctggaaatgcctcgccaggcaattaagtgctgcttgaaaggattcgagaacagtgaacttagcgaggacaagattaccgatcagtttgaaatgttagctgaggaatccaatatccgaaggcgcacatttagtgtgcgtatctttcgcattgaacccgatggtctgaacgtagtaaacctgctggccaagaacctgaatgtgatgaagaagctctacaagctttctatgccttttgaacaatatctgtccctggaaaagggtcagtttaatgcaaacaacacccgtgccgagtctgtgatctcttctgagttgaataagagccatattttgaactctacaagcattggcgagaccgaaaatcgtttgcaagaacaggaaaaagagcagcaacagaaaaaggtcgatgttaggcagcagcaactagcagttgaaattccgcaagcagtaaagtccgttagcggaagcaaaaactcgacagactgggacaaacgtagctccacctcggcaggctcaaaggacagtaagcgtcagcagcagcaacaaatacagcgaatcgatcgccatttagacttcagctgtgagacacagagcaccggtagttacagcagtggcatgagttcgccgcgcaagggtaaccgacaacagaacggtcgcacaccgatccaatcaccacgccataatgaaaagcaggaagcgaaaaaaaatgcgcgctttagcaacagcgagtcaccccgcaggagtcgagatggccagcaggggaaccaacgctcccaaaatgcgccacagggctatgctcaaaagccacagcgtcaaaaatccacgttagacggaaatatcagctcaaagcgttccagcggagtggggagtgatattgcctcatccagctccgaatcggtggctgccgccaagccggagaaatacgtttccttggataaaccgtatgcgctgcaggagatgaaaacacctagcaaggaggcagctagtttgtcttggtggctctcgccattccagttctacatcgtgcccaagtctgtctctgcaaagtacgataatataatgcgtgatatgcgagagttctaccgccagaagcaacaccagccacttcaattaaaggttggatccaccgtagttgtgcgccagcgaaaggacaatgccattctgcgggctactgtgaccgcatgcaatcacatgatgcgcaagtatcgcgttttttgcgtggacacaggcagcttaataacggtcacctcggaggatatttggcaattggagcagcgctttgcagatccgccctgtatggcacatcgctgcagctttcacagcgtcgttaccaactatgatccattgtacattgtggatcgcatggaaacattcgttccagttaatgccaaagtcgattgcgagttcgtgtccaaagagaagagcaaccaaggctcaaataccagcagcacttgctcctacacagttaatatttttgtaaacggagcatccctacgagatatgctcgtcaaagcggaattccttaccgaagtggcgcctgagattcgcgttaaccttttagctggtcagcagattagaggaaaattcacttctattcgtgacatgacaagctttaaggttcagtttgattatggtaacaatgtgaacttcctttgcacctatgacgatgctaaatttgttaagtccaatccgaatttggccaggcgatttaaggagttttacgagggtaaatcgtttgccttgaatgtcaagaatgtctgcgaaaacaatatcgttcatctgagacctgtaatgccgttgttcatggaggatcgcaggtcattcatctgcccctatcccgtggtgctgagctcattccaagcactcgttgtgtacaccgctaaaccttaccgcgtgtatgttcaaccgcaggccatagtaccatctatgcagaccctattggataatatgtatgaacactacaaggccaagggcgactctttgaaaaaatttgatgtgggacagatctgtgctgtacgaagctccgatggcaattggtacagagccagaatctcaggaaaggattcgaatgcagcgtgcttcgaggtgttttacatcgattacggcaacacggaggaaataaagcgtgacgatatcaaggcattggatgcaaagttttatgagcacgcaagcggctttgcagtggagattaatttgccgattggccgacccagcaacgatacaaagctaaaggcgcgtatatccgagattcttgaggagaaggttgtcactatcaaatcgattgaggtgcggcgcagtcacctaattgccgatgtcattttggaaaacaatcagagtgtgatagacctgctaaaggctgagaagcttgtacccggcaaagatttggattacatgcgcaagcaaatggagaaaggaaagtctcgcacttacgagtacattgaaacagtagacctaactttggacgaagaggaggataagggtcgcaaggaaactgtcagcaagtcgggttcggcaaatgcctccccaaagaaaaaacaacataatgacaaggatcgcgagcccaaaaagagtaagccagcagagcctgctcgtactgttgctccacaacctgttgcattgaaaactccttcaccagttccggcggagccagcaccagtgccaaaaccagccactccagttccagaggttgttgaagtaccagaaattaatccaactgtcagagaagctgctgccgagtcaaagcaagctcctgcacaagaggatccttacaaagatttggactgcgttgtactgagccattgcgacaatcctgcacagttctatgtccacccgatcgatcagctatcgaaactaaatcagctgcatgagaaccttcagattgtgtctccctctttgccccagttgatgaacgtggtaaacggtgcagactgtgtatcgatgtattcggtggacaaatgctggtatcgcgccaaaatcattgatgccgagctaatggtactacttttcatagactatggcaacacagattgcgtttcggatgccactgacatcaaagaaagcatgtggtcgcatatcgaacccttctgcttgccatgcgcactcccgattcgacccaagggtactgcggattgggtggatgcagcgaatggcatctttaacgaatcgtactcgaaggtcccgcgtctggagtaccttacccaaggagatcactacacgaccagctatgttaacatgtatattgatggcgaggatgtggctaagaaattaattgccgatggttttgctaggccgttagagtatttggccagcggatgcagttgctacatttcgcacgtgaatggaatttgtgatttctttattcaacttgaacgtgattcaaaggcgctagaactaattgagttgtatttgcgcaagaaggacacattaaagcccctcgaaggatttgaaaagggtttgattgtggctgctctatttgaggacgatgagctgtggtaccgagcccagttgcagaaggagttgcccgattcccgatacgaagtactctttatcgactacggtaacacctccaccacatcgaagtgtctaatgctgtccgaagagattgctagcctacccagcttatccaagaaatgttcgctgcagttgccagatgcctacatctcatggtcaccagaagcggaggccaaattcgccgaactgacaggcgagggtgagctagtgtttaccacacagcttctgaagccaggacaggatcatgtcaccattgatcttctcctggatggagagaacatcatcgaccgcctgttaccgttgtgccagcgaaaggaacccaaggaagccagtaaggagtccttagctgttaccactaaagccatcattacgcacgtggagaatacatcccgtatatatctacagtttagcgagaaggattcattaatggatattatatgcgagaagctaaatggaagcaagctgcagcctaagacggaaaaggctgcagtagatgatatgtgcgtagttcaattcgccgacgacttggagttctatcgctcacgtattctggaagtgctcgaagatgaccaatacaaagtcattttgattgattacggcaatacgactgtggttgataagctttatgagttacctcaagagttcacgctcattaaacctgtggccgaaatatgcagcatggaacccagcgccatatttgagaaaaataaagctctaaccctgacaacatttgacgcactgctggacagctgcaagggtgttgtggcggtggaatttgtaaacaagtctgccagtcctcctgtggtcagattgactactaaagataagaggagcctgaagatctatgaacaccttcagaagttggttcaagccgagctgaaactaatccaaaagcgaaacgagaactctgaatgcattatctcatatggaaactcacccaagagtttttatgtgcaaatgaagcacaattcagcggatttggacttgattgtgaagacactgcagtccttaaaaaaggagaaactgaagaaattaatcgatcctactacaaattcaaatggtgtttgctactcccaagaggatgcctgttactatcgctgtagtatcaagtcggtattggatcctagccagggatttgaagtctttttgctagattatggaaacaccctggtcgttccagaggtctggcagctaccccaagagatagagccgattccatcgttggctctacactgtcagctgagtaagattccaatggatgtgtctgacgaaaagctagaagaagcctttgctgctttgctagagcagcacttcggagaactatacgaaataactactcagccgaacgaggatgagacaaaacctctgattgctgaactccgaatcaactacaaggatttcgtccaggagctggtcagtacggtgaccggcgtacagaaaccgctcgaagcggagctgcacaactgtgttgtggtgcagttcgatggccccatgtccttctacgtccagatggagagcgatgtgccagcactagagcaaatgactgataaactgctcgatgcagaacaggacctacccgcctttagcgacctcaaagagggagctttgtgtgtggctcagttcccggaggacgaggtcttctatcgcgcccaaattcgcaaggttttggatgacggaaagtgcgaggtgcattttattgactttggcaacaatgccgtgacgcagcagttccgccagctgcctgaggagttggccaagccggcgcgatacagcaggcattgcgagctggatgcgtcgaccatatccaagtgcgacgcggccctgctccagtcgttcatcgacactcgcttctctgaaacattccaggtagagattctggccaccaagggaactggcacccatgtcgtacgactcttctaccagagcaagaacatcagcgagaagcttcaggaatgtcagtga

SEQ ID NO: 20073 - protein, 2515 aa, DROSOPHILA
MNGQARIALPSKVDLYITHVDHVGPYLKVYGHVNRDAASLISERIRNLLPTCFAIEPSWSVERQQALLIPGTFCIFKNINGPAPGDVEYRRIRVVSADLEGQSMRAEIDFVDFGYKRTVDSHDLMFPKQPKLLQNIPLHCFQYIVLGICSEWDQTDLAEVRRLVVNQIVKITVEPTQICDQKFASLRWKDFELNEFLVQQKQIGVSVDKQLMMDHCKKLWKDNPQSPVTEYNNNSIHNSKTPMEIAREQLAVRQSLAARLDAQRSVQVTPSRPLNADAPDYTPKHLPLVNVTNVQVQMPGLNNTQKPVFVSTNPYNRANYQPAVPAAQPYVPKANPRSQYTYYNVRMNKPINAMPPPAGPHVPIQHFNQQANNVSLSYVPARFTPPPTPSIAQHQIPIPAFRTTSLTVGLTYDVVISYVENGPYLFWVHLKSSDHDLSTMMGQIERTKLKALAQAPELGTACVARFSEDGHLYRAMVCAVYAQRYRVVYVDYGNSELLSASDLFQIPPELLEIKPFAFRFALAGTKEIEPIDDSMKRIFKKSAIYRNFELTVQAPESVGSMQTCHLNQNGTNMLELLRQLKNSRQSYKKAEQLENDDAVEIRFIDSPSNFYVQKVANIGKFEQLMDEMFSYYNANQRVPDQLILGAPCIVKCDQEWYRAEILRVDDSVIVRHVDFGYEQNVKRHLIGHIAEKHLEMPRQAIKCCLKGFENSELSEDKITDQFEMLAEESNIRRRTFSVRIFRIEPDGLNVVNLLAKNLNVMKKLYKLSMPFEQYLSLEKGQFNANNTRAESVISSELNKSHILNSTSIGETENRLQEQEKEQQQKKVDVRQQQLAVEIPQAVKSVSGSKNSTDWDKRSSTSAGSKDSKRQQQQQIQRIDRHLDFSCETQSTGSYSSGMSSPRKGNRQQNGRTPIQSPRHNEKQEAKKNARFSNSESPRRSRDGQQGNQRSQNAPQGYAQKPQRQKSTLDGNISSKRSSGVGSDIASSSSESVAAAKPEKYVSLDKPYALQEMKTPSKEAASLSWWLSPFQFYIVPKSVSAKYDNIMRDMREFYRQKQHQPLQLKVGSTVVVRQRKDNAILRATVTACNHMMRKYRVFCVDTGSLITVTSEDIWQLEQRFADPPCMAHRCSFHSVVTNYDPLYIVDRMETFVPVNAKVDCEFVSKEKSNQGSNTSSTCSYTVNIFVNGASLRDMLVKAEFLTEVAPEIRVNLLAGQQIRGKFTSIRDMTSFKVQFDYGNNVNFLCTYDDAKFVKSNPNLARRFKEFYEGKSFALNVKNVCENNIVHLRPVMPLFMEDRRSFICPYPVVLSSFQALVVYTAKPYRVYVQPQAIVPSMQTLLDNMYEHYKAKGDSLKKFDVGQICAVRSSDGNWYRARISGKDSNAACFEVFYIDYGNTEEIKRDDIKALDAKFYEHASGFAVEINLPIGRPSNDTKLKARISEILEEKVVTIKSIEVRRSHLIADVILENNQSVIDLLKAEKLVPGKDLDYMRKQMEKGKSRTYEYIETVDLTLDEEEDKGRKETVSKSGSANASPKKKQHNDKDREPKKSKPAEPARTVAPQPVALKTPSPVPAEPAPVPKPATPVPEVVEVPEINPTVREAAAESKQAPAQEDPYKDLDCVVLSHCDNPAQFYVHPIDQLSKLNQLHENLQIVSPSLPQLMNVVNGADCVSMYSVDKCWYRAKIIDAELMVLLFIDYGNTDCVSDATDIKESMWSHIEPFCLPCALPIRPKGTADWVDAANGIFNESYSKVPRLEYLTQGDHYTTSYVNMYIDGEDVAKKLIADGFARPLEYLASGCSCYISHVNGICDFFIQLERDSKALELIELYLRKKDTLKPLEGFEKGLIVAALFEDDELWYRAQLQKELPDSRYEVLFIDYGNTSTTSKCLMLSEEIASLPSLSKKCSLQLPDAYISWSPEAEAKFAELTGEGELVFTTQLLKPGQDHVTIDLLLDGENIIDRLLPLCQRKEPKEASKESLAVTTKAIITHVENTSRIYLQFSEKDSLMDIICEKLNGSKLQPKTEKAAVDDMCVVQFADDLEFYRSRILEVLEDDQYKVILIDYGNTTVVDKLYELPQEFTLIKPVAEICSMEPSAIFEKNKALTLTTFDALLDSCKGVVAVEFVNKSASPPVVRLTTKDKRSLKIYEHLQKLVQAELKLIQKRNENSECIISYGNSPKSFYVQMKHNSADLDLIVKTLQSLKKEKLKKLIDPTTNSNGVCYSQEDACYYRCSIKSVLDPSQGFEVFLLDYGNTLVVPEVWQLPQEIEPIPSLALHCQLSKIPMDVSDEKLEEAFAALLEQHFGELYEITTQPNEDETKPLIAELRINYKDFVQELVSTVTGVQKPLEAELHNCVVVQFDGPMSFYVQMESDVPALEQMTDKLLDAEQDLPAFSDLKEGALCVAQFPEDEVFYRAQIRKVLDDGKCEVHFIDFGNNAVTQQFRQLPEELAKPARYSRHCELDASTISKCDAALLQSFIDTRFSETFQVEILATKGTGTHVVRLFYQSKNISEKLQECQ

SEQ ID NO: 20074 - DNA, 4021 bp, DROSOPHILA
tttacagccgagttccagcaagaactatcccaggttttaatgctggttagctgaaatggatttgttattgaaatttgattatacgcaacctggctactcacagatgggcatgaaccgaatattcagtggtcaggcagagcttgggggaatgctacaatccgaggaaagcctttttgtctcccagatcgtccacaaagcatttatcgagattaacgaagtgggcactgaagctgcagccgcaacgggtgagcctgcaaaaaaaaaaggttccaaaacttttggcaatttgaaagcctcttatatctagtactccggatattcttacgaatgtcatacgaggtgctaagcaagtccaatattaaaaatttcactcaaatatgtatatattcgcattaactaatttaaacttcttgttcagctgcggttgccacatttagaagcatgcctgcgcgccaaggacctccaaaggtattccacgctaatagacctttcttctatgctataaaggacaacacccatggccttctatttgccggtcattttatcacaaccaaggttgagcagtctgaaaaatgtaacacatgtacctaaaggaaaaataaatatgtatatctttggcgtgggaaatagttgagaaataaattgtacttccacttaagttacttattaaacatttgacacattaaacgtgtaggaattatctattatttattattattattattatttattattataacataaatctgcctttgaaggtatataaagggtgttattcgattctattgactcattctattgacttctccctagaatttttggcaaaatataataaacaaatttaggtagggaatgatttcagtttcagctttcctctgttatcagggaacggaaaaaatcccattattgtcgaagacaataacaagctcaagctgagctttggctgataaggtcgcagtaaatcgtgtggacctgaagtcaggccagtctattacgtacgctttgcagactaggtttactgtaagcaaaattactgagtatggattatcgtttggtgccatgtggtgagttatccggcagtttgactttaaaaagccagtgaaagaaaacgcattatggatgtaaagagtgaaatcaatgagaacaccgaaggcaggcgagagaaaaacccgtttgggagcacgaactgaagagaaatcattgttttgtgggggaatacatatgcatatgcgagtataaaaacaatgtacgctcgctgagagaattcagttgttgctcaaaggccacattataaaagtcgagggcgatagccggtttataaaaagaaattaatttacacactcgaagccgctggtgaaaaacagtaccagcagtcggagcaggcagttaattaccctttccgataatcaagctagtgaatccccggcgaaacggccaaccggagagatatagtgaacaccgtttgtggaggtgactcatcagtacactgcaattacataaatttatgaaaacgagcacacctcatccacggtcgatttggatacttacaggttgctggttgctccccctgctcggcctagccctcttcccgtttccaccggtccacacggctgacgtcaccatggctgacgccgcccaccaggagttcgcccgccggctggcccttttctctatcaacgtgtacggcaagctgtcggggcagaagcccggcgagaacatcgtcttctcgcccttttccatccagacttgtgcggcgatggccaggctgggtgcagaaaacgagacggctacccagctggaccagggactgggcttggcctctagtgacccagagcaaatcgcacacagttttcaccaggtgctggccgcctaccaggacagtcagatcttgcgcatcgccaacaagattttcgtcatggatggctaccagctgcgccaggagtttgatcagctgttatccaagcagttcctctcggcggctcagagcgtggacttttccaaaaatgtacaagcagcggccaccatcaacaattgggttgagcagcgcaccaaccatctgatcaaggaccttgtgccggctgatgtattgaactccgaatcgcgactcgtccttgtgaacgccattcacttcaagggcacctggcagcaccagttcgccaaacacttaacccgcccagacacctttcacctggatggggagcgaacagttcaggttccgatgatgagtttaaaggagcggttccgctacgccgatctgccggcgctagatgccatggctctggaactgccctacaaggactcagacctctctatgctgatcgtactgcccaacaccaagacgggtctgcccgctctggaggagaagttgcgcctcacgaccctctcgcagatcacgcagtcgttgtacgaaacaaaggtagcgctcaaattgcccaggttcaaggcagagttccaagtggaattgtctgaggttttccagaaggtgagctttactttaaacacataagcaatgatatggacttcatgttaatataaacctcctccagctgggcatgtcaaggatgttctccgatcaggctgaatttggaaaaatgctacaaagtccggagccattgaaagtgtcagccatcatacacaaggccttcattgaagtcaacgaggagggaacggaggctgcggccgccacgggtaagtggtcaaagtcattggtattttttggcatccatcatcctgtgcatgtcccatttgttcatccgtgtctgtcttgtcttcttcccatcctgcaggcatggcggtgcgtaggaagcgcgctattatgtcgcctgaggaaccaattgagttctttgccgaccatcctttcacctatgtccttgtgcatcagaaggatctgccattgttttggggctcagttgtgcggctcgaggaaaataccttcgcctccagcgagcatgatgagctgtgatggtacctgattctttggcaaaacaataaagacagctatttatttacaatggaaattaagcatttgtctgaagctttgggataatccatttatcggcatacctgggtggcatacattacgagaaataaattgcatctgctccattaccagtttggccacttactaattcgagttatataacccttgagctacgactttgatgttcatttgcaggaatggtcatgtgctacgcctccatgctcacgttcgaaccgcagcccgtccaattccatgtccagcatccatttaactattacattatcaataaggattctactattttgtttgcgggaagaatcaataagttttgaagttagcactccatcaaaatccaccaatcacaaccattgaactgaaatgcaatgtaatcccaattcacaggtatgtttatgagccttacttcgctgcccatgccgaagccggatccgatacgtttcaatgtcgaccatccatttacattttacatccttaacaaggactcaaccgctctcttcgctggcagcataaagaaactctaaataggcaaacatactaaccaatccacaatgttactcgagggtctcgtattcatttaacgtgcaagcgggtcagtcctatattgctggcttgacgagcatattcagcttttacattgtctataaggattcacaaaattatagtctgtgcgcaattgatgatcttatatatacacttaatatttttatactaaccaagcatgtagccgtagcctcaataaagtctaaaagcaaatgtctaaaagtctgcttcgttttcatggttcctcctcagtatggcgggtgatggccgtagctgccttcagtcgcaaacacttcattgccaaccatccttttgctttctacgtgaagacccattacgatctgccgatattcactgggcgctacttgggttaagcaataggaagcttcctatgaaaaaaaaaattgaagttcaataaaataaaataaacggcagccacttaatagctgtgatttcgtcaagtcgaagtaatttatagaaata

SEQ ID NO: 20075 - DNA, 1859 bp, DROSOPHILA
ctttgcagactaggtttactgtaagcaaaattactgagtatggattatcgtttggtgccatgtggtgagttatccggcagtttgactttaaaaagccagtgaaagaaaacgcattatggatgtaaagagtgaaatcaatgagaacaccgaaggcaggcgagagaaaaacccgtttgggagcacgaactgaagagaaatcattgttttgtgggggaatacatatgcatatgcgagtataaaaacaatgtacgctcgctgagagaattcagttgttgctcaaaggccacattataaaagtcgagggcgatagccggtttataaaaagaaattaatttacacactcgaagccgctggtgaaaaacagtaccagcagtcggagcaggcagttaattaccctttccgataatcaagctagtgaatccccggcgaaacggccaaccggagagatatagtgaacaccgtttgtggaggtgactcatcagtacactgcaattacataaatttatgaaaacgagcacacctcatccacggtcgatttggatacttacaggttgctggttgctccccctgctcggcctagccctcttcccgtttccaccggtccacacggctgacgtcaccatggctgacgccgcccaccaggagttcgcccgccggctggcccttttctctatcaacgtgtacggcaagctgtcggggcagaagcccggcgagaacatcgtcttctcgcccttttccatccagacttgtgcggcgatggccaggctgggtgcagaaaacgagacggctacccagctggaccagggactgggcttggcctctagtgacccagagcaaatcgcacacagttttcaccaggtgctggccgcctaccaggacagtcagatcttgcgcatcgccaacaagattttcgtcatggatggctaccagctgcgccaggagtttgatcagctgttatccaagcagttcctctcggcggctcagagcgtggacttttccaaaaatgtacaagcagcggccaccatcaacaattgggttgagcagcgcaccaaccatctgatcaaggaccttgtgccggctgatgtattgaactccgaatcgcgactcgtccttgtgaacgccattcacttcaagggcacctggcagcaccagttcgccaaacacttaacccgcccagacacctttcacctggatggggagcgaacagttcaggttccgatgatgagtttaaaggagcggttccgctacgccgatctgccggcgctagatgccatggctctggaactgccctacaaggactcagacctctctatgctgatcgtactgcccaacaccaagacgggtctgcccgctctggaggagaagttgcgcctcacgaccctctcgcagatcacgcagtcgttgtacgaaacaaaggtagcgctcaaattgcccaggttcaaggcagagttccaagtggaattgtctgaggttttccagaagctgggcatgtcaaggatgttctccgatcaggctgaatttggaaaaatgctacaaagtccggagccattgaaagtgtcagccatcatacacaaggccttcattgaagtcaacgaggagggaacggaggctgcggccgccacgggcatggcggtgcgtaggaagcgcgctattatgtcgcctgaggaaccaattgagttctttgccgaccatcctttcacctatgtccttgtgcatcagaaggatctgccattgttttggggctcagttgtgcggctcgaggaaaataccttcgcctccagcgagcatgatgagctgtgatggtacctgattctttggcaaaacaataaagacagctatttatttacaatggaaattaa

SEQ ID NO: 20076 - protein, 431 aa, DROSOPHILA
MKTSTPHPRSIWILTGCWLLPLLGLALFPFPPVHTADVTMADAAHQEFARRLALFSINVYGKLSGQKPGENIVFSPFSIQTCAAMARLGAENETATQLDQGLGLASSDPEQIAHSFHQVLAAYQDSQILRIANKIFVMDGYQLRQEFDQLLSKQFLSAAQSVDFSKNVQAAATINNWVEQRTNHLIKDLVPADVLNSESRLVLVNAIHFKGTWQHQFAKHLTRPDTFHLDGERTVQVPMMSLKERFRYADLPALDAMALELPYKDSDLSMLIVLPNTKTGLPALEEKLRLTTLSQITQSLYETKVALKLPRFKAEFQVELSEVFQKLGMSRMFSDQAEFGKMLQSPEPLKVSAIIHKAFIEVNEEGTEAAAATGMAVRRKRAIMSPEEPIEFFADHPFTYVLVHQKDLPLFWGSVVRLEENTFASSEHDEL

SEQ ID NO: 20077 - DNA, 7652 bp, DROSOPHILA
gataaaaaaagaccacagattactcacatggagcacttttgttgtgttctaaaatcgggactcctaaaaaacgatctataaataaacactcataggccatctaccggcagccaagtgcaattcattgacccacatatgcgagggtgtgagtgtgtgcgtgtgtttgttgtgaacttggtgtgcacaatttttttattccctgacctgaattttgaatgtgaattttcaatgttgataacgttcgctaatcgtgaggatccacattctcacgtaggcgccacatgtcaatagcaatgcatctgaaactaaaatgccttataaccctataagaaagcagtaaagcaaccccccgttagccgacgcccctgtgtgcaaattgtgcgagcgattatcgcgattgaaatgtacatattcgtttaatgctccatttgagatagcggcgtctgaaaattcctcgcattctgtagaccgtcgattttgcagcagttgcagtcatgctgagcgagggagtccactggctctggaggagcctgctccacatcctgatgcgttatcagctcttccgatggctttatggactaatagcgactgttgataacgaaccgctaccgttacaaatcaaaagcgaagaggaagcgttcggggaaaacaagaagaagaagcagctggcgagtctggagaatgccatctcccccggaaaattggattcagtcgcgattagaaccgttccaagtgcaaatgcgaatgcaatgggcaatgcaggcagtgccgagatcgtatcaaatcaaatcatccgccgccgtgaggtattatcatcgcccagtgatcggagtcccagtgttgtgtccatatgccataactatgtatatgttctagtgttccagtccacagagtgtgtgcttgtgtgtgtatgtggtgtgagtgtgccggcaatgaatataaaacatgccctccatctggcaatgcagcagtcaattccgatccgggttactaggagctcccaccaagcggacaatcatcgaaaattctagtcggactgtggtggtgttttaacaagatgcctttggctgtgcgtttcccgaccgcgaaatacccaaaatcaatctaaactgtggaacttctgtaggtctaaccactgaaaagcaagatatcaaacaaattatactgcaaaaccaatctaatcccccgatgattttggatcgcgatattggaactgaaatcgagatcaaatttgtagaaaaccaatttggttcgattagttaatgcacaatcgatccttacttaacaatttatttattaattgtcgtgcaatttaaaaatagaacttattgcacatttgtagctgtaattgtaatcctaatctctattggcgctaccagtggttcgaccttaagtgacataaagctatagacattcgactatacattccatgcattaaacccatgttcatgtgtaacgaatagtagtgacgattgtataatgcactcacggatctcctctcggattttcttagatgagcaccatgggcaaggagacggagtcgcatagcatacccatcagcgagggccaggatgcggagcatatcctgtaccgtctgaagcggggttccaagctgagtgttcatccggatgcctcgttgctgggcaggaagatcgtattgtacaccaactatcccgccgagggacagaagtttgtgcgtacggagtatcgcgtgctgggatggcaactcagcaatggcaagcagattacctctgtaatgcatccggaggcccatgtggtagatactgacattcgtagtcaggtggagctcaacatgtccggcacctaccacttttacttccggtatctggaaaggttcgaaactatacttttccgcattgattttgctttagcattaatgtgtgtcaacattttcagacccgacactggctgctccggagcagatggagctctatatgtgcaagtggagcccacgctgcatgttgggccgcctggcgcccagaagaccattcccttggactcggtgcgctgccaaacggtgctggccaagctcctgggaccactggacacttgggagcctaagctgcgcgtggcaaaggaggccggatacaatgtgatccacttcactcccatccaggagttgggtggctcccgatcctgctattcgctgcgtgatcaactcaaggtcaactcccattttgcaccccaaaagggaggtaagatcagttttgaggatgtggagaaggtcatcaagaagtgccgccaggagtggggggtaagacattgaattctagcataaacaagtctaaaactcttccctatcaggtggcctccatctgcgacatcgtgctcaatcacaccgccaacgagtccgattggctactacagcatccggatgccacctactcatgcgccacctgtccctacctccgccccgccttcctgctggacgccacattcgcccagtgcggagcggacatagccgagggcagcctggagcatgtaggcgtacctgcggtcatcgagcaggagtgccatttggaagcgttaaagtaccagttgcacacctcctacatgtccaaggtcaatatacacgagctgtatcagtgcgatgtgatgaagtacgtgaacgagttcatgtcccaggtgcgaactcgcgagccaccgaagaatgtggccaacgagtgtcgcttccaggaaatccaactgatacaggacccgcaatatcgacgcttggccagcaccattaatttcgagctggcgctggagatctttaatgctttccatggcgactgcttcgatgaggagtcacggttccgcaagtgcgccgaaaccctccgccggcatctcgatgccctcaacgatcgtgtgcgctgcgaggttcaaggctacataaactatgcgatagacaatgttttggccggagttcgctacgaaagagtccagggcgatgggcccagagtgaaggagatctccgagaagcactcggtctttatggtctactttacgcataccggcacccagggaaaatcgctcactgagatcgaggcggatatgtataccaaggctggagagttcttcatggcccacaacggttgggtcatgggatacagcgatcctctgagggattttgctgaggagcaacctggacgcgccaatgtctacctcaagcgggagctcatctcgtggggcgatagtgtgaagttgcgcttcggcagacggccggaggacagtccctacctatggcagcacatgaccgagtacgttcagaccacagcgcgcatcttcgacggtgtgcgattggacaactgccactccacgccattgcacgtagctgagtaccttctcgatgcagctcgtaagatcaacccagagctgtatgtggtggctgaactgttcaccaattccgattacaccgacaatgtgtttgtgaaccgattgggtatcacctccttgatccgtgaagctctttccgcttgggactcccacgagcaaggccgcttagtgtatcggtatggaggagtgcctgtaggtggtttccaagcaaactcatcgcgccacgaggccaccagtgtcgctcatgccctcttcctggacctcacccacgataatccgtctccggtggagaagcgttccgtgtacgatcttctaccatcggcggcactggtttccatggcatgctgtgccacaggaagtaaccgtggttacgacgaactggtcccccatcatgtgagcgttcattcgtttaagatttattcctgaaactaactcatacttttttcccagatccatgtcgtagatgaggaacgcacctaccaagaatggggcaaaggtgttgactcgaagtccggaattatgggtgccaaaagagcactgaatttgctgcatggacagctcgcagaggagggatttagccaagtttacgtagaccagatggatcccaacgtagttgcagttactcgtcattcgccaatcacgcatcagtcagttattctcgtggcccacactgcctttggctatccctctcctaatgccggacccaccggaatccgcccgctgcgtttcgagggtgtgctggacgagatcatcctggaggccagcttgaccatgcagagtgacaagccattcgatcgtcctgctccattcaaaaaggatccgaatgtaatcaacggctttactcagttccagttgaatctgcaggagcacatcccgctggctaagtcgacagtgtttcagacccaagcctattcggatggcaacaacacggagctaaactttgccaatctacgacccggcactgtggtggccatcagagtgtctatgcatcctggtcctcgcaccagtttcgataagctccagaaaatctcggctgccctgcgtattggatctggcgaggagtattcccagctgcaggctatcgtctccaagttggatctggtggcacttagtggtgcccttttcagctgcgatgatgaggagagggatcttggcaaaggtggcaccgcctacgacattcccaactttggaaagatcgtttactgcggattgcaaggattcatttccctgttgacggagatttcgcctaaaaatgacttgggacatccgctttgtaacaatctgcgcgacggaaactggatgatgggtaagtttgtaaagatagagatttatgtagttactttacaacataattcttttcagattacatttctgatcgcctaactagttatgaagacctgaaaccactctccgcctggttcaaagctacctttgagccactgaagaatattccacgctacctcataccctgctactttgatgccattgtcagcggggtttacaatgtgctcatcaaccaggtcaacgaactaatgccagagtatgtccattagagccgactgcattcatggagtttttattaagtctttaatttttacagcttcattaagaatggccacagtttcccacaatccctggccctgtccacgttgcagttcctctccgtttgcaagtcggccaatctgccgggattcagtcctgctctaagtccacccaagcctccaaagcaatgtgtgactctatctgctggtctgccgcatttctcaacgggtgagtttatctattatatttaacaatcgaaacggaataatggaatattcaaccatttatgtaggctatatgcggtgctggggccgtgataccttcatcgctctgcgtggctccatgttcctcactggccgttacaacgaggctcgcttcatcatcattggatttggtcagacccttcgacacggactcattccgaatcttttggacagcggcagcaagccgagattcaactgccgcgatgctatctggtggtggatgtactgcatcaagcagtatgtggaggatgcccccaagggtgccgagatcctgaaggacaaggtgtcccgcatatttccgtacgacgatgccgatgcccatgctccaggtgccttcgaccaacttctcttcgacgtgatgcaggaggcactgcaggtgcattttcagggcttgcagtatagggagcgcaatgcaggctatgagatcgatgcgcacatggtggaccagggctttaacaatcagatcggaattcacccggagactggctttgtattcggaggcaataacttcaactgcggcacttggatggacaaaatgggatcctcacagaaggccggaaacaagggacgtccaagtacgccgcgcgacggatcagccgtggagctcgttggcctccagtatgccgtactccggtttatgcaaagcctagccgaaaaggaggttatcccgtacaccggcgtggaacgaaagggtccatcgggcgaagtgaccaagtggagctacaaggagtgggcggatcgcatcaagaacaactttgacaagtatttctttgtatccgaatcggaaacctgctcggtggccaacaagaagcttatctacaaggacagctatggagccacccagagttggacggactaccagctgcgatgcaacttccccatcaccttgaccgtggctcccgacctgtgcaatcctcagaatgcctggcgtgcactggagcgcgccaaaaagtatcttctgggaccgctgggcatgaagacgatggatcccgaggactggaactatagggccaactatgacaactcaaatgactccaccgattgcactgtagcccatggcgcaaactaccaccaggggccggagtgggtatggcccatcggtttttacctgcgggcgcgcctgatcttcgccaaaaagtgtggccatttggacgagaccattgccgagacctgggccatactacgggcccatctccgagagctacagacatcccattggcgcggattgcccgagttgaccaacgataatggctcctactgcggtgactcctgtcgcacgcaggcctggagtgttgctgccattttggaagtcctgtacgatctgcactccttgggagcagacgtggcctaaaccaccgtaaatactcatattcaaacctgttagttgctaccaaaaactgttattagtgttacgtttgataattgtacggatacaagatggaatgagattcgatgcctgaggtcccttgaaattttgctattcctattctattaaagttgcaattgtttttaagcgttctttttcgtctaagagaagtaactatctcggcacacacgcatgcaggagcattgggggggatcgatggagccaaagttctttcgaggcatgtcccgtcccgtatattttggaatggtgttagcctcgggaatcgttggagctttcattggtgaaaccgcttcctgggaaataggcttgaccggaggtagaggcttttcacgctttgctttcgatttaccatcctctattttcagcttaaatagaaattaaccattgcgatataaatattattttaaaaatattacacctactcactttgccacattttctcaaggctaaaatggctgcctcgcatgttagatcgtaagctttctgcaacacaacttgttggataacatcaaggacgatggacattttgatggaattacaaaaaacctgggcttcacatacaattttgctagcaactccacgagaaatttgacacaatattcccaagtcatatgaactgtatataatttgtatatacttctagtctacagtttcttataaactaaataaatacatgtaaaggttatatacataaagctttgcatagttgtaaactatccgcattacgtctgcagcgaagtttgggttccatttggactcgcttggtaggattcgttttcagtaactatctcgacgtcatcatctttgatggatttgagatcgcgtccaatactttccatgttcaagctcaaggcagctgcagccacattattattcacttcatccagcttgggctggcgtaggcagttctcgtcgtttgaggcctcacgtttaacccttgccggtggctgctctgtcgcatccgccgaacttcgcagattgagcagctcccggcgaatggcctctacattgtcttcaaggttgggtttcttgatctccgagtcattcgatgatttcggctgagtagaattcaccattagggctagtggaatgggcaatcgtttgataagcgcttctttatctac

SEQ ID NO: 20078 - DNA, 4858 bp, DROSOPHILA
ccaccaagcggacaatcatcgaaaattctagtcggactgtggtggtgttttaacaagatgcctttggctatgagcaccatgggcaaggagacggagtcgcatagcatacccatcagcgagggccaggatgcggagcatatcctgtaccgtctgaagcggggttccaagctgagtgttcatccggatgcctcgttgctgggcaggaagatcgtattgtacaccaactatcccgccgagggacagaagtttgtgcgtacggagtatcgcgtgctgggatggcaactcagcaatggcaagcagattacctctgtaatgcatccggaggcccatgtggtagatactgacattcgtagtcaggtggagctcaacatgtccggcacctaccacttttacttccggtatctggaaagacccgacactggctgctccggagcagatggagctctatatgtgcaagtggagcccacgctgcatgttgggccgcctggcgcccagaagaccattcccttggactcggtgcgctgccaaacggtgctggccaagctcctgggaccactggacacttgggagcctaagctgcgcgtggcaaaggaggccggatacaatgtgatccacttcactcccatccaggagttgggtggctcccgatcctgctattcgctgcgtgatcaactcaaggtcaactcccattttgcaccccaaaagggaggtaagatcagttttgaggatgtggagaaggtcatcaagaagtgccgccaggagtggggggtggcctccatctgcgacatcgtgctcaatcacaccgccaacgagtccgattggctactacagcatccggatgccacctactcatgcgccacctgtccctacctccgccccgccttcctgctggacgccacattcgcccagtgcggagcggacatagccgagggcagcctggagcatgtaggcgtacctgcggtcatcgagcaggagtgccatttggaagcgttaaagtaccagttgcacacctcctacatgtccaaggtcaatatacacgagctgtatcagtgcgatgtgatgaagtacgtgaacgagttcatgtcccaggtgcgaactcgcgagccaccgaagaatgtggccaacgagtgtcgcttccaggaaatccaactgatacaggacccgcaatatcgacgcttggccagcaccattaatttcgagctggcgctggagatctttaatgctttccatggcgactgcttcgatgaggagtcacggttccgcaagtgcgccgaaaccctccgccggcatctcgatgccctcaacgatcgtgtgcgctgcgaggttcaaggctacataaactatgcgatagacaatgttttggccggagttcgctacgaaagagtccagggcgatgggcccagagtgaaggagatctccgagaagcactcggtctttatggtctactttacgcataccggcacccagggaaaatcgctcactgagatcgaggcggatatgtataccaaggctggagagttcttcatggcccacaacggttgggtcatgggatacagcgatcctctgagggattttgctgaggagcaacctggacgcgccaatgtctacctcaagcgggagctcatctcgtggggcgatagtgtgaagttgcgcttcggcagacggccggaggacagtccctacctatggcagcacatgaccgagtacgttcagaccacagcgcgcatcttcgacggtgtgcgattggacaactgccactccacgccattgcacgtagctgagtaccttctcgatgcagctcgtaagatcaacccagagctgtatgtggtggctgaactgttcaccaattccgattacaccgacaatgtgtttgtgaaccgattgggtatcacctccttgatccgtgaagctctttccgcttgggactcccacgagcaaggccgcttagtgtatcggtatggaggagtgcctgtaggtggtttccaagcaaactcatcgcgccacgaggccaccagtgtcgctcatgccctcttcctggacctcacccacgataatccgtctccggtggagaagcgttccgtgtacgatcttctaccatcggcggcactggtttccatggcatgctgtgccacaggaagtaaccgtggttacgacgaactggtcccccatcatatccatgtcgtagatgaggaacgcacctaccaagaatggggcaaaggtgttgactcgaagtccggaattatgggtgccaaaagagcactgaatttgctgcatggacagctcgcagaggagggatttagccaagtttacgtagaccagatggatcccaacgtagttgcagttactcgtcattcgccaatcacgcatcagtcagttattctcgtggcccacactgcctttggctatccctctcctaatgccggacccaccggaatccgcccgctgcgtttcgagggtgtgctggacgagatcatcctggaggccagcttgaccatgcagagtgacaagccattcgatcgtcctgctccattcaaaaaggatccgaatgtaatcaacggctttactcagttccagttgaatctgcaggagcacatcccgctggctaagtcgacagtgtttcagacccaagcctattcggatggcaacaacacggagctaaactttgccaatctacgacccggcactgtggtggccatcagagtgtctatgcatcctggtcctcgcaccagtttcgataagctccagaaaatctcggctgccctgcgtattggatctggcgaggagtattcccagctgcaggctatcgtctccaagttggatctggtggcacttagtggtgcccttttcagctgcgatgatgaggagagggatcttggcaaaggtggcaccgcctacgacattcccaactttggaaagatcgtttactgcggattgcaaggattcatttccctgttgacggagatttcgcctaaaaatgacttgggacatccgctttgtaacaatctgcgcgacggaaactggatgatggattacatttctgatcgcctaactagttatgaagacctgaaaccactctccgcctggttcaaagctacctttgagccactgaagaatattccacgctacctcataccctgctactttgatgccattgtcagcggggtttacaatgtgctcatcaaccaggtcaacgaactaatgccagacttcattaagaatggccacagtttcccacaatccctggccctgtccacgttgcagttcctctccgtttgcaagtcggccaatctgccgggattcagtcctgctctaagtccacccaagcctccaaagcaatgtgtgactctatctgctggtctgccgcatttctcaacgggctatatgcggtgctggggccgtgataccttcatcgctctgcgtggctccatgttcctcactggccgttacaacgaggctcgcttcatcatcattggatttggtcagacccttcgacacggactcattccgaatcttttggacagcggcagcaagccgagattcaactgccgcgatgctatctggtggtggatgtactgcatcaagcagtatgtggaggatgcccccaagggtgccgagatcctgaaggacaaggtgtcccgcatatttccgtacgacgatgccgatgcccatgctccaggtgccttcgaccaacttctcttcgacgtgatgcaggaggcactgcaggtgcattttcagggcttgcagtatagggagcgcaatgcaggctatgagatcgatgcgcacatggtggaccagggctttaacaatcagatcggaattcacccggagactggctttgtattcggaggcaataacttcaactgcggcacttggatggacaaaatgggatcctcacagaaggccggaaacaagggacgtccaagtacgccgcgcgacggatcagccgtggagctcgttggcctccagtatgccgtactccggtttatgcaaagcctagccgaaaaggaggttatcccgtacaccggcgtggaacgaaagggtccatcgggcgaagtgaccaagtggagctacaaggagtgggcggatcgcatcaagaacaactttgacaagtatttctttgtatccgaatcggaaacctgctcggtggccaacaagaagcttatctacaaggacagctatggagccacccagagttggacggactaccagctgcgatgcaacttccccatcaccttgaccgtggctcccgacctgtgcaatcctcagaatgcctggcgtgcactggagcgcgccaaaaagtatcttctgggaccgctgggcatgaagacgatggatcccgaggactggaactatagggccaactatgacaactcaaatgactccaccgattgcactgtagcccatggcgcaaactaccaccaggggccggagtgggtatggcccatcggtttttacctgcgggcgcgcctgatcttcgccaaaaagtgtggccatttggacgagaccattgccgagacctgggccatactacgggcccatctccgagagctacagacatcccattggcgcggattgcccgagttgaccaacgataatggctcctactgcggtgactcctgtcgcacgcaggcctggagtgttgctgccattttggaagtcctgtacgatctgcactccttgggagcagacgtggcctaaaccaccgtaaatactcatattcaaacctgttagttgctaccaaaaactgttattagtgttacgtttgataattgtacggatacaagatggaatgagattcgatgcctgaggtcccttgaaattttgctattcctattctattaaagttgcaattgttttt

SEQ ID NO: 20079 - protein, 1542 aa, DROSOPHILA
MSTMGKETESHSIPISEGQDAEHILYRLKRGSKLSVHPDASLLGRKIVLYTNYPAEGQKFVRTEYRVLGWQLSNGKQITSVMHPEAHVVDTDIRSQVELNMSGTYHFYFRYLERPDTGCSGADGALYVQVEPTLHVGPPGAQKTIPLDSVRCQTVLAKLLGPLDTWEPKLRVAKEAGYNVIHFTPIQELGGSRSCYSLRDQLKVNSHFAPQKGGKISFEDVEKVIKKCRQEWGVASICDIVLNHTANESDWLLQHPDATYSCATCPYLRPAFLLDATFAQCGADIAEGSLEHVGVPAVIEQECHLEALKYQLHTSYMSKVNIHELYQCDVMKYVNEFMSQVRTREPPKNVANECRFQEIQLIQDPQYRRLASTINFELALEIFNAFHGDCFDEESRFRKCAETLRRHLDALNDRVRCEVQGYINYAIDNVLAGVRYERVQGDGPRVKEISEKHSVFMVYFTHTGTQGKSLTEIEADMYTKAGEFFMAHNGWVMGYSDPLRDFAEEQPGRANVYLKRELISWGDSVKLRFGRRPEDSPYLWQHMTEYVQTTARIFDGVRLDNCHSTPLHVAEYLLDAARKINPELYVVAELFTNSDYTDNVFVNRLGITSLIREALSAWDSHEQGRLVYRYGGVPVGGFQANSSRHEATSVAHALFLDLTHDNPSPVEKRSVYDLLPSAALVSMACCATGSNRGYDELVPHHIHVVDEERTYQEWGKGVDSKSGIMGAKRALNLLHGQLAEEGFSQVYVDQMDPNVVAVTRHSPITHQSVILVAHTAFGYPSPNAGPTGIRPLRFEGVLDEIILEASLTMQSDKPFDRPAPFKKDPNVINGFTQFQLNLQEHIPLAKSTVFQTQAYSDGNNTELNFANLRPGTVVAIRVSMHPGPRTSFDKLQKISAALRIGSGEEYSQLQAIVSKLDLVALSGALFSCDDEERDLGKGGTAYDIPNFGKIVYCGLQGFISLLTEISPKNDLGHPLCNNLRDGNWMMDYISDRLTSYEDLKPLSAWFKATFEPLKNIPRYLIPCYFDAIVSGVYNVLINQVNELMPDFIKNGHSFPQSLALSTLQFLSVCKSANLPGFSPALSPPKPPKQCVTLSAGLPHFSTGYMRCWGRDTFIALRGSMFLTGRYNEARFIIIGFGQTLRHGLIPNLLDSGSKPRFNCRDAIWWWMYCIKQYVEDAPKGAEILKDKVSRIFPYDDADAHAPGAFDQLLFDVMQEALQVHFQGLQYRERNAGYEIDAHMVDQGFNNQIGIHPETGFVFGGNNFNCGTWMDKMGSSQKAGNKGRPSTPRDGSAVELVGLQYAVLRFMQSLAEKEVIPYTGVERKGPSGEVTKWSYKEWADRIKNNFDKYFFVSESETCSVANKKLIYKDSYGATQSWTDYQLRCNFPITLTVAPDLCNPQNAWRALERAKKYLLGPLGMKTMDPEDWNYRANYDNSNDSTDCTVAHGANYHQGPEWVWPIGFYLRARLIFAKKCGHLDETIAETWAILRAHLRELQTSHWRGLPELTNDNGSYCGDSCRTQAWSVAAILEVLYDLHSLGADVA

SEQ ID NO: 20080 - DNA, 2861 bp, DROSOPHILA
cttaaatgtaacataagtatacaaaaataagacattttcgggccaaatctcattatctcatttggcattatcgccagctgttaagcgccaacttgatcaatccagaacaatttcgaattcggattcaatctttaataaaataaaacattttcaaaattgcctatgctaattaaaaataaatccgaaatcccagaatgacgtattagcttacaactgctactaggtgctactatttattttaaaataataataataattccctattatatttttaatagaaccgatgtagaaagtaaagtgaagtcaactagaacttgctttcgtcataacaaattgccttatagcaaacgacgcgatagtaattcaaagataaaataacacacgtcacctgataaggttgttgatgttttcagatatttaaaatttaacaataccctctactgcatagaggggattactgcatatttagattaccgtaacttagcctactaagtaagtttcggaatttctttaatttacaaatcatcgatcaatgtggacatgaaacaataaatttctctacgtgcactgataagctattttggatcggcgaaacaggtgagggcgtcgctgaccctatgggtgcgctgataacttacaccggaaaaaacaatctcacggatacaatcggaaggcagccggagaatgagcgtggtttccgtcaaactgcgcggaattgactaacgccgcgaatcgcagtaagtcagaactgaacgaactgcaactcgattagataaattccaagagagtctgaagtggcaagcgctctcgacggagagaagttcctggcgtacccgaaattggaatggtgttgatagctcatctagcttcttattaaaatatttgctcaaactgctgataagtcaatctgaatctctttcgaaaaatgagtactcactgattcttctatcgtagacgcatatttaacatatttaacctgagatcgtctgctttcttcatcatgaaagatgaggagttcgcacagggcttggaacaattcgctctttgtctgcacgaccatttgtgccgggcaagtgctggcctaaacatcatctactccccattatccatccacatctctgcggccatgctgcggatgggaacatccgagggatcggctacagctaaggagatggacgaggggctccgtttcggtgggctagaagctcagcaagtagctgaaagctttggtgtcgtcctcaagtcctatgaacagtgccaggttcttaaaatggcaaacggcctatatgttatgaagggtctccaagttgacgagcagtttggtcacatactagagcagaagtttcgctccaagccaatggagattgactttggcagcgagcaggctgccagcataatcaacaaatgggtggagtcacagaccaacaacctgatcaaggacataatcggtccaagagttcttaccaaggactcgcggctgtgcctagtaaacggtattcacttcaagggtgagtggtcaatcagtttcaatgaaaaagaaacccgcgaagaggatttcttcggatcggatagacctaccagagtgagaatgatgcatgtgtgcgagaacttcttttttgccgtacttcccatgttcgaagccactgcccttagaatgaattatagtgcctgtaatttggccatgatcattttacttcctgatgagaagtcgaatctcacgagcctcgaaaagaaacttagtgatatttccctagaggtagtgtcatcagcaatgaatctggaaaaagtggatgtgaagattcctagctttacagccgagttccagcaagaactatcccaggttttaatgctggttagctgaaatggatttgttattgaaatttgattatacgcaacctggctactcacagatgggcatgaaccgaatattcagtggtcaggcagagcttgggggaatgctacaatccgaggaaagcctttttgtctcccagatcgtccacaaagcatttatcgagattaacgaagtgggcactgaagctgcagccgcaacgggtgagcctgcaaaaaaaaaaggttccaaaacttttggcaatttgaaagcctcttatatctagtactccggatattcttacgaatgtcatacgaggtgctaagcaagtccaatattaaaaatttcactcaaatatgtatatattcgcattaactaatttaaacttcttgttcagctgcggttgccacatttagaagcatgcctgcgcgccaaggacctccaaaggtattccacgctaatagacctttcttctatgctataaaggacaacacccatggccttctatttgccggtcattttatcacaaccaaggttgagcagtctgaaaaatgtaacacatgtacctaaaggaaaaataaatatgtatatctttggcgtgggaaatagttgagaaataaattgtacttccacttaagttacttattaaacatttgacacattaaacgtgtaggaattatctattatttattattattattattatttattattataacataaatctgcctttgaaggtatataaagggtgttattcgattctattgactcattctattgacttctccctagaatttttggcaaaatataataaacaaatttaggtagggaatgatttcagtttcagctttcctctgttatcagggaacggaaaaaatcccattattgtcgaagacaataacaagctcaagctgagctttggctgataaggtcgcagtaaatcgtgtggacctgaagtcaggccagtctattacgtacgctttgcagactaggtttactgtaagcaaaattactgagtatggattatcgtttg

SEQ ID NO: 20081 - DNA, 861 bp, DROSOPHILA
atgaaagatgaggagttcgcacagggcttggaacaattcgctctttgtctgcacgaccatttgtgccgggcaagtgctggcctaaacatcatctactccccattatccatccacatctctgcggccatgctgcggatgggaacatccgagggatcggctacagctaaggagatggacgaggggctccgtttcggtgggctagaagctcagcaagtagctgaaagctttggtgtcgtcctcaagtcctatgaacagtgccaggttcttaaaatggcaaacggcctatatgttatgaagggtctccaagttgacgagcagtttggtcacatactagagcagaagtttcgctccaagccaatggagattgactttggcagcgagcaggctgccagcataatcaacaaatgggtggagtcacagaccaacaacctgatcaaggacataatcggtccaagagttcttaccaaggactcgcggctgtgcctagtaaacggtattcacttcaagggtgagtggtcaatcagtttcaatgaaaaagaaacccgcgaagaggatttcttcggatcggatagacctaccagagtgagaatgatgcatgtgtgcgagaacttcttttttgccgtacttcccatgttcgaagccactgcccttagaatgaattatagtgcctgtaatttggccatgatcattttacttcctgatgagaagtcgaatctcacgagcctcgaaaagaaacttagtgatatttccctagaggtagtgtcatcagcaatgaatctggaaaaagtggatgtgaagattcctagctttacagccgagttccagcaagaactatcccaggttttaatgctggttagctga

SEQ ID NO: 20082 - protein, 286 aa, DROSOPHILA
MKDEEFAQGLEQFALCLHDHLCRASAGLNIIYSPLSIHISAAMLRMGTSEGSATAKEMDEGLRFGGLEAQQVAESFGVVLKSYEQCQVLKMANGLYVMKGLQVDEQFGHILEQKFRSKPMEIDFGSEQAASIINKWVESQTNNLIKDIIGPRVLTKDSRLCLVNGIHFKGEWSISFNEKETREEDFFGSDRPTRVRMMHVCENFFFAVLPMFEATALRMNYSACNLAMIILLPDEKSNLTSLEKKLSDISLEVVSSAMNLEKVDVKIPSFTAEFQQELSQVLMLVS

SEQ ID NO: 20083 - DNA, 5246 bp, DROSOPHILA
attatttagtatccgtatgctataaagtgcggatcgtgtcttaggcatttttcgtttcattacgtcataaatataaaaagattagaatggaaagccctgacaggactacattacgtcttaaatatatgaaaatttaaatggaacgcctagataacgctagaatttattttttttttctctctttttatttgcaatctgttctaaaaaagtatgacaataagtatattttataattaatcttaaattaacagtagggattaatggttaactatttctatccattaatccctactacctcatactctatgcataacatgttttaatacttaatatctgtccgggagatctagcacgttaaatcttttaagtctccttctttatttagaatttaaatattttggatctctacttttgtagcttagaactaacattagtagaaacttgaaaacaagaatccacgatagtcgcataagtgctttgctgctaaggagaattcaggtcaccatgagtggtttgttggctttggattattctatcgttagccttgatacttcactgtatctcactaccactttgcgtgggtctttccaatttccaaataaaagtaactaatgtgttgctatagagcatgataccttctgataatttctagtacaaacccataaatggtcttttggatgcaatcggcaactacaaattgatattactaatcagcagattagcactgcaactctgtcaaaacagaagcaatcttttatggaggcctattaagatacaagttcaataatgaccagtagtagcaataaggttcatttgtttataagttaaaccattgatcgaagcgcaggcgtcattaaaccattatgattaaaatacacttaactgaattttaagtgcgcttgagcttacgtaatccgataatgcattcaagtaccgattgcttatcaccaatctctgatataaatgggccagttttcaaaacataagaattcagttgtggttctaacctggaaccatcagttacatcgatttgtaagatagaggaataccacaatgaagttcctgggcatcgtcctttgcgttgcctttttggcccttcaagctaagtcagcccaagctgtttgtggctatgaggtgaggaaaaggatccttttacacgaattgtttaaactaataaaatacttattgttttttagtcttgccatgaaaccaagtcaaacatgatcaacatacacttggtgccccactcccacgacgatgtgggctggctgaagaccgttgatcagtactactatggccacaggaataacattcagcacgctggagtgcagtacatcatcgacaccgtgatctccgagctgatcaagaaccccgatcgtcggttcatccaggtggagacatccttcttctccaaatggtggaacgagcagtcggagaccatgagggcagtcgtgaagatgctggtgaatgagggtcgccttcagttcatcaatggagcctggagtatgaacgatgaagctgccgtaaactaccagagtgtgatcgaccagttcacagtcggattgaagtaagttatgccggtataacctctttggaaaaaaaattgtaaaaccattttcataaaaggttcctcgatgacacttttggagtttgtggtcgtcctcgtgttggatggcaaatcgatccctttggtcactcccgtgagcaagcctctatctacgctcagatgggattcgatggcgagttcttttcccgcatggatcacaacgacaaaggcaggcggatgaacgatctggctctagagatgatttgggatgccagtgagtcgttgagccaagtcaagctcttcactggactcctgtacaccttctactgggacactcccggcttttgcttcgacgttcactgcagcgacgatccaattattgacagtgatagttacgataacaacgtcaagtcaagggtggatgatttcatcgcctacgccgctcaagttgcggaaaagttccgcacaaaccacattatgattccaatgggcggtgacttccagtatgaagatgccgaggttaactacaagaacatggacaaactgatcaagtagggagagaatctggttactttaagttctgtgttttctaattcttcttatatctatattaggtacgtcaacgaacgtcaatccagtggctcaaagtacaacattatctactcaacacccacttgctacttgaactccgtgcacaagagtgtgcagtcctacccaaacaaaactctggatttcttcccatacggcagtgatactaacagcttttggactggttattacacctcccgtcccacacagaagagattcgagcgcgatggcaaccacattcttcaggtggccaagcagctgagcgcctttgcggagctctcgagtacacaacagaaggaggatctagagtaccttcgcgagatcatgggtgtgatgcagcaccacgatgccatcactggaaccgagaaacagcatgtgtccgatgactacgatcgcattctgtacgacgctatcgtcggaggagtcaaaactgccggcgatgcccttcggaaactgaccaatcttcccaacggagagttcgagagttgcctgcagttgaacatcagcgagtgcgccttcaccaaggatggcgccgacaacgtagtggtgaccctgtacaatgcattggcccacaccaccaagcaatatgtgcgagtgcctgtgaagaacgagaactaccaggtgaccgatgagaagggccgcgtggtggcctccgaaattgttccagtgccagcggaggtcctggctctggagttccgtgatagcgacacccagcacgaattggtgttcaaggcctccgttgacaaaatcgccaattactacatcaagaaggttgatagcaaggagagttccaatggcgtaagggtcatttctcaacctaaggcgaatgctgagacctatgatgacgaggagacgattgtgcagacatcggtaagtgtcaaactgtttaatagtggaagcaccttttcctaactatttaaaatctattagctgatcaagttggtgctggacaacaaaaccggcctcttgaagagggttgaaatgaacggagtatccgagaacattgagcagagctatggtctttataggacctatgactctggtgcctatgtgttccgtcagtacaatcaaggagacttcgtcatccaggaagatggtgtcgagttcactgtttacgatggagctttagtcaaggaagttcaccagcgtttcagcgaatacatttcgcaggtcatccgtatcagcgaggacaagccttacgtggaattcgagtggcttgtaggccctattccggttgaagaggaatttggcacggaagtagtaactatcttcagcagtgaaattgcctccaatggcgtattctatactgattccaatggacgcgagttgatcagacgcgaaaaggacaagcgagaggacttcacccccgagcttgctgtccagcctacttccggaaactattatcccatcacatcgcgcattgctctgcaggacagcaacaagcgccttgcgatcctaaacgatcgtgctcaaggaggcaccagcatgaaggatggccaaattgaacttatgctgcaccgtcgactcgtccgtgatgatggctatggagtgggagaggccttgaatgaggagaagtacggccagcccttgattgcccgtggtaaggtgttcctaatccttaacgccgccgacgagtccacgtccgccgagcgcgaagccgaaaaggagttccatctgcccctttggaagttcttcagcaagaacactggaagcaccaccgctgctgccaagtcggttcccagctttgacgacttccccaagtcggtgcatctgctcaccctagaacccttcaacgacgatgagattctgctgcgtgtggagaacttcaaggatcacatcgaaggcaaagtggttagctttaacattcgcccgatctttgactacctgaacggagtcgaaatccgcgaaactaccttggatggcaacctgcccttgagtgacatgaagcagttcaagttccacgctgagggttcaggaattaggggatcagaacctgagtactacacctcgtcccacaagccgctgtccgctaaccagacgcaagatgccgccgagttcgctgtcacattgtatccaatgcagattcgaacattcatcattaaacatgaataattgtatttcaatgaaaatcaaagaaataaataaaattatgtctgaataaaaacactgttgttttgctttaacttattaggaaataagtccctcatacatacagggaagtaatacgagtcatatgaaaattttttaaaactttacaaaattcaattaaccgcacgggtttaacccaattaactctgaggttttactttagaagttagtggagtattaccatgtttatatggaattaacagttacggcctcatataattcaagttacttatgactgttgattacttttattttataagcagtgtgcagaaacctttcccactcactacagagagtctcaatcatataatttttatttaaaaaaatgtatattaaattctttttcaatacgctaagttatcaataagggcgcaagtgcatttcaggagcttcaatccttgaagtggttgataaataatgggtccaattcttatcgctacgtggagggtgggcattctaaaaaaaagtattcaccaagtttttaataacccactaattgctaattaggttaccttatcttagtgaccatcatgtattttcttatcaatgccttcttagaaacggtgcgccctataaaggagcagtcttggtttaatgggaattcagtacttggtaatgacaagatgacttatttgggtcgcattttattcctgtccatcttattggtgctcttcgcaaaacaatccgaagcagtttgtggctatgaggtaatataaatttgttgatgcttttcaaaatgatatcactatatcctttgatattatttgcagtcatgtcccgaaacaaaagcgaacatggttaacatccatttggttcctcactcccacaacgatgtgggctggttgaagacagttgatcagtcttattatggttacaagaacaaaattcatcatgccggtgtccaatatatattggatagtgtggtgtcccagctcctccaggatcccaagcgtcgtttcattca

SEQ ID NO: 20084 - DNA, 3002 bp, DROSOPHILA
ttctaacctggaaccatcagttacatcgatttgtaagatagaggaataccacaatgaagttcctgggcatcgtcctttgcgttgcctttttggcccttcaagctaagtcagcccaagctgtttgtggctatgagtcttgccatgaaaccaagtcaaacatgatcaacatacacttggtgccccactcccacgacgatgtgggctggctgaagaccgttgatcagtactactatggccacaggaataacattcagcacgctggagtgcagtacatcatcgacaccgtgatctccgagctgatcaagaaccccgatcgtcggttcatccaggtggagacatccttcttctccaaatggtggaacgagcagtcggagaccatgagggcagtcgtgaagatgctggtgaatgagggtcgccttcagttcatcaatggagcctggagtatgaacgatgaagctgccgtaaactaccagagtgtgatcgaccagttcacagtcggattgaagttcctcgatgacacttttggagtttgtggtcgtcctcgtgttggatggcaaatcgatccctttggtcactcccgtgagcaagcctctatctacgctcagatgggattcgatggcgagttcttttcccgcatggatcacaacgacaaaggcaggcggatgaacgatctggctctagagatgatttgggatgccagtgagtcgttgagccaagtcaagctcttcactggactcctgtacaccttctactgggacactcccggcttttgcttcgacgttcactgcagcgacgatccaattattgacagtgatagttacgataacaacgtcaagtcaagggtggatgatttcatcgcctacgccgctcaagttgcggaaaagttccgcacaaaccacattatgattccaatgggcggtgacttccagtatgaagatgccgaggttaactacaagaacatggacaaactgatcaagtacgtcaacgaacgtcaatccagtggctcaaagtacaacattatctactcaacacccacttgctacttgaactccgtgcacaagagtgtgcagtcctacccaaacaaaactctggatttcttcccatacggcagtgatactaacagcttttggactggttattacacctcccgtcccacacagaagagattcgagcgcgatggcaaccacattcttcaggtggccaagcagctgagcgcctttgcggagctctcgagtacacaacagaaggaggatctagagtaccttcgcgagatcatgggtgtgatgcagcaccacgatgccatcactggaaccgagaaacagcatgtgtccgatgactacgatcgcattctgtacgacgctatcgtcggaggagtcaaaactgccggcgatgcccttcggaaactgaccaatcttcccaacggagagttcgagagttgcctgcagttgaacatcagcgagtgcgccttcaccaaggatggcgccgacaacgtagtggtgaccctgtacaatgcattggcccacaccaccaagcaatatgtgcgagtgcctgtgaagaacgagaactaccaggtgaccgatgagaagggccgcgtggtggcctccgaaattgttccagtgccagcggaggtcctggctctggagttccgtgatagcgacacccagcacgaattggtgttcaaggcctccgttgacaaaatcgccaattactacatcaagaaggttgatagcaaggagagttccaatggcgtaagggtcatttctcaacctaaggcgaatgctgagacctatgatgacgaggagacgattgtgcagacatcgctgatcaagttggtgctggacaacaaaaccggcctcttgaagagggttgaaatgaacggagtatccgagaacattgagcagagctatggtctttataggacctatgactctggtgcctatgtgttccgtcagtacaatcaaggagacttcgtcatccaggaagatggtgtcgagttcactgtttacgatggagctttagtcaaggaagttcaccagcgtttcagcgaatacatttcgcaggtcatccgtatcagcgaggacaagccttacgtggaattcgagtggcttgtaggccctattccggttgaagaggaatttggcacggaagtagtaactatcttcagcagtgaaattgcctccaatggcgtattctatactgattccaatggacgcgagttgatcagacgcgaaaaggacaagcgagaggacttcacccccgagcttgctgtccagcctacttccggaaactattatcccatcacatcgcgcattgctctgcaggacagcaacaagcgccttgcgatcctaaacgatcgtgctcaaggaggcaccagcatgaaggatggccaaattgaacttatgctgcaccgtcgactcgtccgtgatgatggctatggagtgggagaggccttgaatgaggagaagtacggccagcccttgattgcccgtggtaaggtgttcctaatccttaacgccgccgacgagtccacgtccgccgagcgcgaagccgaaaaggagttccatctgcccctttggaagttcttcagcaagaacactggaagcaccaccgctgctgccaagtcggttcccagctttgacgacttccccaagtcggtgcatctgctcaccctagaacccttcaacgacgatgagattctgctgcgtgtggagaacttcaaggatcacatcgaaggcaaagtggttagctttaacattcgcccgatctttgactacctgaacggagtcgaaatccgcgaaactaccttggatggcaacctgcccttgagtgacatgaagcagttcaagttccacgctgagggttcaggaattaggggatcagaacctgagtactacacctcgtcccacaagccgctgtccgctaaccagacgcaagatgccgccgagttcgctgtcacattgtatccaatgcagattcgaacattcatcattaaacatgaataa

SEQ ID NO: 20085 - protein, 982 aa, DROSOPHILA
MKFLGIVLCVAFLALQAKSAQAVCGYESCHETKSNMINIHLVPHSHDDVGWLKTVDQYYYGHRNNIQHAGVQYIIDTVISELIKNPDRRFIQVETSFFSKWWNEQSETMRAVVKMLVNEGRLQFINGAWSMNDEAAVNYQSVIDQFTVGLKFLDDTFGVCGRPRVGWQIDPFGHSREQASIYAQMGFDGEFFSRMDHNDKGRRMNDLALEMIWDASESLSQVKLFTGLLYTFYWDTPGFCFDVHCSDDPIIDSDSYDNNVKSRVDDFIAYAAQVAEKFRTNHIMIPMGGDFQYEDAEVNYKNMDKLIKYVNERQSSGSKYNIIYSTPTCYLNSVHKSVQSYPNKTLDFFPYGSDTNSFWTGYYTSRPTQKRFERDGNHILQVAKQLSAFAELSSTQQKEDLEYLREIMGVMQHHDAITGTEKQHVSDDYDRILYDAIVGGVKTAGDALRKLTNLPNGEFESCLQLNISECAFTKDGADNVVVTLYNALAHTTKQYVRVPVKNENYQVTDEKGRVVASEIVPVPAEVLALEFRDSDTQHELVFKASVDKIANYYIKKVDSKESSNGVRVISQPKANAETYDDEETIVQTSLIKLVLDNKTGLLKRVEMNGVSENIEQSYGLYRTYDSGAYVFRQYNQGDFVIQEDGVEFTVYDGALVKEVHQRFSEYISQVIRISEDKPYVEFEWLVGPIPVEEEFGTEVVTIFSSEIASNGVFYTDSNGRELIRREKDKREDFTPELAVQPTSGNYYPITSRIALQDSNKRLAILNDRAQGGTSMKDGQIELMLHRRLVRDDGYGVGEALNEEKYGQPLIARGKVFLILNAADESTSAEREAEKEFHLPLWKFFSKNTGSTTAAAKSVPSFDDFPKSVHLLTLEPFNDDEILLRVENFKDHIEGKVVSFNIRPIFDYLNGVEIRETTLDGNLPLSDMKQFKFHAEGSGIRGSEPEYYTSSHKPLSANQTQDAAEFAVTLYPMQIRTFIIKHE

SEQ ID NO: 20086 - DNA, 3549 bp, DROSOPHILA
acttggcaatcattctcttccgaaaaggctctcttaattttgcagatgttgacaagcaattatgtcattttgtttacaaatagaaatactcctctctccggaaatcacatcgaaagtgaaaaaattaatttctaagtatgtatactagatcagcaagtacatacatatatgtgtgtatgtacagttaccttaattatctgtagaggatttgattgtagttaagttcgtggagcgctgatttcaatggctacaaaaaccgtccacgtattaaaagttctgcctcgaactgaagactgattttctttctggccctacaacggcacactgtggggaaattaatttctgtttcccaagagattttaagtccatcgctagcatgtgaatgtctttttactttttttttacgttagtatcggcttaaaaatatcaattttgtttattaaaaactggagagaccgccgtagtcgagtagctcgaatatcacatacataccacttccaatttgcaggtacgcgagggactcgagaaaggcttttcacttgttttttatctgtggtatttagacataatacgtttaggaaccgagaatagtgttttaaattgcctttttaacgacttttatcgaatgcttctaggttcattggtggtggatgtttaactttttagtgttttttctccgctaaactagtcgtttttttttaatatataataataataaaatcgctcggttcaccaggacacttaaaatacatggcgtatttaaatgagttaaaattaacatatttgaaacttttccgaacgaagaatcagaaatcattacactttttatttttggcaaaataccacttctactccctattaccaacctactggacaacctaccttcgctgcgttacccttccgtcacaacgtggactgctgtccacattgatccttaacttaaaatgtaatcactccgcttggaattttaatttaaaatttaaatattgtttttatttattcaagggcttacaacacgcccctggaaatatatggtgttcgcatcgcgaatgacgaaggcaaagggatgatcggccatgaggaacgtagaaaatcccgctcgatttgtgacggccacagctgggaatcattgggaacagtgagtatataggagtcaacattcgacgctgataaccaaatcggtacttacatgtggcacctgcggcctccgctccctcctcgttcacctccagaaacgccttgtgcgagacctgactgactttgccgcctgacttatcggcgaacaagccgcttaagtctgacttgtcggtgaatagctctcggatgcccagcttaaatagaatcgagcgtcaaagtggcacaaccgtgtttttcttgacggagtcttaccttctctaaggtctctttgagttcatcacgaaattcgattttaaacttgggcagcttaagatagacctccttggcaaccagcggcctggcgaagccaacgatcttctcttccagggcgctcaagccctccacttctcggggcagaaagatagtcatggacaggttggagttaaggtacggcagctcgatgacttgggcatctagatcgcggaagtagttagccctgaatgttcccatttgcgccatcatctggacgggcacactcttgttcgcagttacttggaaggtggaggctctggtcttagctgggtcaaacttcgactcccactggcccttaaagtagatggcgttcaccagcaaggccttcacgtcggacgtcatgctgccgggatcgatcatgcccttgattttaccactggtctgatccagcacccactggttgattctctcggccgccacagggccattggtcagactaatggactccgcctcggacttgaagggttccctcacagcgaggttgtagttctgattcaggctgtactggtcgttgacgtagatgcgattcgcgagctttagtatgggtccctcctcctgtccctgaagatcgttgaggagagcaccgtacctggctgccaccgcctctttgtcctccgatggtaaacctaaggcgctctgcagctccttggccgtcgagccttctgcgcccatgaagaccatgctaaggatggtctctatggagacgggcgagacgacgaggttctggtttgtatggctcttggaaagtagttggtagatctctttggaggtctgacatgccactgaagtgacccacaggaaaatgcctagtttggggatgttaattatcaattcgttttcagcgttcggaaattctgttcatgcatattaaacttgatattttttacttttacagactaaagcaaatcgaattcaacgaaagcggatagtctttgtaagttaaaagttaatgccatagcaaacgtcttcaccatattgttttattattttctatgaatttaatttaaatcataagttattataggtaatttattgctttgtattttaattcactggctataagcgatcgccacttacacaagtaatacatttgaccgtctacaacgaactcttccccgagataagtatctctgtaaactgagcgccgagtgccaagacgagctcatatatgcactggacatatatgtacctactggcgatacttcattacgttactgagaactgcgcacacagctctctcggattgaaatccaatgacgtctagtgggatttcatagctgagttctattcggtctcactgctgttcttagacattgtacatgttggcatcgaaaccttcccgtgacaagccctcctctcctgatccagatccagacttggggttcgagaatcggccggcgaagaagacggcctgcgggtttcgtatgtaaaagacgaacgggtgatccgccttgaagagcttcttgttcatgttgagcatcatgggtactatcttcatgactgagtgtgggaatcagagttgagattagtacgagcaagtttgagttgcaagcagctgatttcacttacaactgactgctgctgcctccgatcctgcctcatttacgtcgatgtagccgcggtgccttgctgccgagattttttggccactttgcgaggtaaagagcccgtctagcttggccttatcgctgaagacttccgtaatacccagctgagaataaatatcagatattacattgttattaaaacaaagccactattatcggttaaatgtatcttacctgattaagtacctgcttgaggtccacgtcgtactctatgcacatcctgggcagaaagatctcgacatcctgcaaggtcagcgctgcgtcaatatcggctagatccacggtgttgagttgctgctctaactcctgcagaccgtttacttcgttgggcagcagaattagcatgtgaatgtttgagtaatcatagggcagttgcacagctcgagccttcagctgtggcagttctgcgaaccggaacttgtcctcttggtacatcatattcacctgcacgtgagtgtcccggtccacgtggaaatggtcaatcgatgtggtctctggcataaatggtttctgc

SEQ ID NO: 20087 - DNA, 1150 bp, DROSOPHILA
tctcggggaagagttcgttgtagacggtcaaatgtattacttgtgcattttcctgtgggtcacttcagtggcatgtcagacctccaaagagatctaccaactactttccaagagccatacaaaccagaacctcgtcgtctcgcccgtctccatagagaccatccttagcatggtcttcatgggcgcagaaggctcgacggccaaggagctgcagagcgccttaggtttaccatcggaggacaaagaggcggtggcagccaggtacggtgctctcctcaacgatcttcagggacaggaggagggacccatactaaagctcgcgaatcgcatctacgtcaacgaccagtacagcctgaatcagaactacaacctcgctgtgagggaacccttcaagtccgaggcggagtccattagtctgaccaatggccctgtggcggccgagagaatcaaccagtgggtgctggatcagaccagtggtaaaatcaagggcatgatcgatcccggcagcatgacgtccgacgtgaaggccttgctggtgaacgccatctactttaagggccagtgggagtcgaagtttgacccagctaagaccagagcctccaccttccaagtaactgcgaacaagagtgtgcccgtccagatgatggcgcaaatgggaacattcagggctaactacttccgcgatctagatgcccaagtcatcgagctgccgtaccttaactccaacctgtccatgactatctttctgccccgagaagtggagggcttgagcgccctggaagagaagatcgttggcttcgccaggccgctggttgccaaggaggtctatcttaagctgcccaagtttaaaatcgaatttcgtgatgaactcaaagagaccttagagaagctgggcatccgagagctattcaccgacaagtcagacttaagcggcttgttcgccgataagtcaggcggcaaagtcagtcaggtctcgcacaaggcgtttctggaggtgaacgaggagggagcggaggccgcaggtgccacatctgtggccgtcacaaatcgagcgggattttctacgttcctcatggccgatcatccctttgccttcgtcattcgcgatgcgaacaccatatatttccaggggcgtgttgtaagcccttga

SEQ ID NO: 20088 - protein, 326 aa, DROSOPHILA
MVFMGAEGSTAKELQSALGLPSEDKEAVAARYGALLNDLQGQEEGPILKLANRIYVNDQYSLNQNYNLAVREPFKSEAESISLTNGPVAAERINQWVLDQTSGKIKGMIDPGSMTSDVKALLVNAIYFKGQWESKFDPAKTRASTFQVTANKSVPVQMMAQMGTFRANYFRDLDAQVIELPYLNSNLSMTIFLPREVEGLSALEEKIVGFARPLVAKEVYLKLPKFKIEFRDELKETLEKLGIRELFTDKSDLSGLFADKSGGKVSQVSHKAFLEVNEEGAEAAGATSVAVTNRAGFSTFLMADHPFAFVIRDANTIYFQGRVVSP

SEQ ID NO: 20089 - DNA, 9412 bp, DROSOPHILA
tacattaagaagttttaataaactgcggaataagctttagaatttagaagaatttacaagaaattgtgctgatcagagtgttcgaaagaggggttttttgcttagctgcactcagttacttacaatatatatgagtacatataacataaaaaaggaaatgaccattaggtacacagtgttagaaatcgtttcatttggcgaatccctgcagttacattcacattcttaatttattccaaataataacttttgtgagttttatttgttgttatttgaaaaattaatcaattgtctgaattcggatataccaatttcttaaatactcctgaataaaattcgcgatttggaagggcgcgtgccgtttcaaagaggaatccattattttcatttcgcttcgtcccttacccctaatatgaaaacttgatgtttgattaacaatgaatgcgcgcaacatataactgaagaaatgaagatatagctattattcagagaaagagcatgttgctcttattatcaatccccaacccacataaacgggttgtgctcggtaagtaaataaaaacgtagaatcaatttgataggaaacatctagtgtgacaaaaagtaaaatatgtaataccactttcgcagagcaaaacaaatttttcttaaattttgtttattaataggaccctatgaaaaatataataccaacggtattttacattcgggacattcttttttctcgttcccgttctatactcttgtgcggcttcagctgtagttttggttctgcaaaagagacaacatgattttaagccagtcgtttcttttatgccgaagcggctgtagtcgtaatgttaatagcaagcggcttcttactgtttcagtttctttcatacggtttgggagttccacccttggtcagaattggtaaaacgtttagaaattagtacaatcaatattctaatattttctttaaggagctatattttcaaaccagcctggaatgtataactcggagttagcgtttagatacgctattcatagacttaatatggacaaaagccttttgcctgagactaccgttgattactatgttgaatacgtaaaccgatttgactctttcgagacagttcaaaaaggtaggattatgattgggaaataattagttaaaacgtaatctgtcttctagtgtgcaaacttatacgagttggtgttcaagctgtttttagtccaactgactctgttttggcgacccatataaattcaatttgcgacgcactggacatcccaaacataggccggtctgcccatgacttttctattaacgtctatccatcgaagcaacttgtaaattatgcctttaacgatgtaatacagtatttaaattggacacgctttgggatattgcatgaaaaagaaaatggttagtccccagttgttaaatccaaatgtttaattcagtttttgtggccgagccgttaagattatgccaagaaaaatttacaaaagtggggccaagaaagtttttggtagcctgtgagcgttataatgggcttggaaatcttcggtggcacacttgcttaacgtagttgtagcgagaatcctcatcatttaatcgtttttgtctttaaagtactagaaaacccaacaccttttatatttaacattaagaataagtgttctactttcgatcaattaaacgatcttgaatttaatatggaaaacatttaaattcccttcaagaattcattgattataaaatttatattaatttacataagatataacaatatttatacacgtcagtcatagtagtaacgtaagcaacgggcagaagtaagcgctttcgaccacataaagtgtatacatgcattcttgatcgggatcaatatccgagtcgaactggccatatatatccgtctgtctgtccgtctatgaacgttgatatcttaggatctatacaagctagaaggttgagataaagcatacagtttctaaagacataaacaggtttgttcacccaagttgctacgcacacacccaaaaacggccaatttttttaatattttcccaatttctacggatactcctgaaaaatgttaaaaactatcggtttgggctaggtgagtaacggtttctgatagacggggaactcgactgtggcgttctctcttgtttttatttaacaaattaacaaattaaagttattaaaaaatccctgagaaaaccaagaaagtgagcttagtcgaatactatatatacaagaagaaattacatttttctgtggttctctgatgttaacgagtgtttcaaaaacaaaacaaaaacttagggttttgcatacaaattaaaaaaattaaaaacattaagaaatataaggcttaggagaaagctgtgaaactgtgcaagacagaactttaaaaattggtgttgtttggggatccctccctcataaaaagcatttacaaaaagctacgcatacgattgtcgagttgtaatgagccgttaaaaaaatattctacgaacaaaaccaaaattatcggcaatttttaaaaatgaaaaggcttaattttggccaccaataaagttcaggtattcagacacctgtggatatagaattgtgctttcagtcattgaaaaggctttttcatttgaatgtttaaattttttttcaaacgtattttatttattatttataatataacatattaaaagctataattaagcttttacactttttggaacattgaaaacacttgaaactcctatgaaactaactatatatatatagctagatagatatataatgtataacactagaattattctatttggtataatcgaaggctattaacttcccagttaaaaatattctagggatccacgcacactttaacccccatacaccgcccaccacacccacacttttagaaaatgcctcaatttttacattttaatatatgtatttaaattttttgttatcgatgtgtcaaatatatatggccgacgcctactttatatattgtttttgttttggtgttcataaattgttttactaatttttataaacatcggcccactctaacgctcgccaattttattaatttaattattgatttcccactagcggagtagcaggtatctaggaacaggactatagctttctctcttagtatcagtcaatataaagagtaatatataaaaaactcgttacaggaatcataaacttgcatcagctatcccggtcatttcacggagaagttcatatgcgacaagtttctcgggattcatatgtatccgcattgaacgaatttaaaggaaaggaaatacataatattattattgatacaaactcgaacggtatttccatattgttgaaaaatgtaagtaacattttaatattgagggtatctattaaaaacgacttgtttttacattacattttttttcttatggtaacgagacattattaagatagagtaacgagactctaattgagatagtcacgttctgaaagttaatgcactatcgccatcttatacgaacaaaattgaagatcatcatgaaaaattattctccagttctttgtcgcacttgcagtttgcctgaatgtagtcccatgtaacaattgattgaattgaaacggggctaaattaaagcgattccggcttgaaaagtaggcctgaacggcaaaggcacgctcctcactattccaacacatgatggcgattgaaccgtgtcggaacataacttttcaatagaccctcttgaacgggaccactagcgctccgctatgacatcaaccaactgattggctcgcattttaaaaaaggaagttatgctgcctcaccttgtatgtataccgcaatcacaagcgatacataatgctttatgcctctaagcaaccacacaaaggtactctgcatatgatctgactttcaacaatcagcaatctgcaaatttatagactttaaaaaaatatattatattcgttgaaaaaatgtaacaaaaacacttcgtttccgaacctgtaaacttcttgttccgtacgagtcaatctgcgaaaagctagcactggcagattctagaaacacgattttgttttactttatcgccacaagccgcacaaaacttcgcagccacactcattaggatttttttgattagagtagagtaaaagggtatccgttgaaaagtatgtaacagtcagaaggaggcgtttccgaccacataaagtatatatattcctgatataacgcccacaaactctaacgcccacaaacggcacaaaactcccacgcccacacttttgaaaaatgttttcatatttttattagtcttgcaaatttcataaatttgtaaatgtggctgagtaacgggtgtctgatagtcggggagctggaattctctcttgtttttcattttatttgttttctggttttggttgccaatgcctatcgatgtgccgcaagctacgtcacgggtatctgatagtcaaagaaattgccttaggattcgcataccataccatttgtatatatttattttatgccgtctatattaatgtagtaattgttgttatttgaattttacacatattaatacttttcaaatccatttgctttttttaaacgaaactatagatattgcagcaacaaatgaatgaatacaagtaccattacttgtttacaagcttcgatttggaaacttatgatctggaagactttaaatataatttcgtgaacattacatcgtttcgattggtcgacactgcggatgttggggtaaagcaaatcttgaaggatatcggattgtatagtcaccatatatttaaaaaaccttatttgaatctacatattaaaaaatcaaccattcttgaggtaagcttaatagaaatgacgtggtaagtacactataataaaagcgtttctacaaatctttagtcagagccagccctaatgttcgattcggtgtacgttttcgcgattggattgcagacactggaacaatcacactctttaacccttttaaatataagctgcgaggaggaaaactcgtgggacgggggccttagtcttattaactacttaaatgcggtgagtttgactgcaaataaggggctaaacaagaaacaacattttattaaaaatagcgatattacatttttcagtttgtttagaagacccagtaaatggtttataaccacagattttgttagctagggatgtttacctaaatatcgaaatgaaaattatcattatcttttctaaaataaaataagtgtgggacccagagacgtggcctgacgcgagttcaggagttaccagagactaaatgtctaatctgaacttaccatgttactatctactatatatgtttaaagtgtaaaagaaaatagaatgctatagtggagttcccccgactaatagatactcagctaattaaaatgccaaagcggaattttatactttttatcaatagatatcggaaaataaaataagataaaatttatttgtgggggttagagtgggcgtggcatataaatgttgggatacctatagaaattggcaagtcaaatacatttttaaaaggtgtgggcgtggcagctagggcggtttgtaacctgtaaatacttttcaaagaatctagtataccctttttactgtctgattaaagggtgtacaaatcttgaataaagtaagcgactggaaattacgaaaaatttctaatcaacttatctgtatacagcaatgtcgcgtgccatttaaataagaaaatggtttgtccaaaggttttagccaatgagcattaattttgggtgtataagttgaaaattttgaaaatctagaaggacacgttttggcccaataaagtacatatattgttgatctgccgtgtcgatctgcccatatccatctgtctgtcagtttaaacgttgtattcactggaattataaaagctaaacagatataacgtagacgcttattttactagtcgtcatggaaattttgcccacgaaaagataaaatatctacgaaccttttttctggctaagtagagtcgaaatcgaccatagcgggactctagttagaaacccattttgttgaaaacaagcagtgacttggcttgggaatttcttgtttggattgtagagtgcaaaaaagtaagtacgatgtacataaattgttatacccgttactagtagagtaaaattgtgtactaggctcgttgaaaattatgtagcaggcaaagggcagcgtttgcgactatataaggtatatatattcttgatctggatcaataaccgagtcgatctggccatgtccgtctgtccttatgaacgtcgagatctcaggaactataaaagctagaagtttaagatttaccatacagattctagagataaagacgcagcgcaagtttgttgacccacgttgccacgttgccacgttgccacgttgccacgcccacgcactaaagtcgccgaaccgttcacgtccactttttggaattcaattctttaattttttctcatttgatttcccaatatctattgatatcccagaaaaattatgaaatttcgcggtttttatttatatttctaattatgtttattactttttatactctttaaggttgaatggaaaggtctgacaggtccgattcagtttaaagatggccagcgggtccagttcaagttggacttaattaaattaaagcaacattccattgtaaaagtcggggaatggactcctcatgggcatctgaatataactgaaccatcaatgtttttcgatgctgggtccatgaatgtgacacttgtagtgataacaattctggtttgtgaggacgacgaataaaaatttataaaagtaattgtaaagttaatttccaggaaacaccatatgtaatgatgcattatgggaagaattttacgggaaacgaacgattttatggtttttgcgtagatatattggaaaccatttctcgggaagttgggtttgattacatactggatctggtaccggatagaaagtatggggccaaggaccccgaaactggggaatggaacggaatggtcgctcagctgatgaaatatgtaagtttgtttatatttttttttttttgaagtgacaaatagcacttataaatatacttagaaggcggacctggcagttggatctatgactataacgtatgcaagagaaagcgtcattgattttaccaaaccatttatgaacttggggataagtattttatttaaggtaaatatccttttactttatatggtaatgttaatagaaaagactcttcttgttcaaggtcccaacatcagagccaacgagacttttttcatttatgaatccattagcgatagagatttggatatatgtgctaattgcatattttcttgtgtctctctgcatatatattgttggaaaactttcgcctatcgagtggaagtgcattaacgcctgcgatctagaaaatatttctattggcaaccagttctccctaactgacagtttttggtttaccatagggacttttatgcaacagtcacctgatatttatccacgagcaatgtcgactcgaataataagcagtacttggggttttttttcacttattattgtcgcatcctacaccgcaaatctagcagcttttttgacaacggagcgcatgattaatcctatcgagaacgcagaggatttggcttctcaaactgagatttcttatggcactctagatagcggatctacaatgacattttttcgggtatgcaactagtaaagtggcaaatcttctttgataagtaaatacattcattaagtaggactcagtgatagaaacttacaaaaaaatttggagaagcatggataacaaaaaaccatctgcatttaccactacttatgaggatggtattaagcgagtaaatcagggtaattatgcgtttttgatggaatccacaatgcttgattacatcgttcagagggattgcaatttgacgcaaatcggaggacttttagatacaaaaggtatgacaatttgccttcgttgttcctctaacgtaaaaaaaataacgttaaaatattcaaataatatgtttttaattcaaaaagaattttgtttcctcttgtgtacatttctctttaacacttctgtaggttatggtatcgctacaccaaaaggttcgccttggcgagataaaatttcattggctatacttgagcttcaagaaaggggtgacattcaaatgttgtatgataagtggtggaaaaacactgatgaaacatgtactcgcaaaaacacaagcaagcaatctaaagcaaattcacttggtctggagagcataggtacgttttcacaatgcaattggctaatatgtactacagttatattaaggtaaatatgctgtttgattattagttattgcttattattgtccacatgatattgatttgttttctaaggatttgcttttatacttatgatcaattactcacctaataaattaaaaaaataaaaaatatacaaataacgaatggtaaaactctacaatgacgctattgttgccattcgaaacgtaatccttaaataataattccattctaattggatttggagataggtaaatcaccatggttataattttccttagaattgactatgaattacccgatgacaacccttttagtttgattatcaaccattttccactttttccccattgacttacgacagacggaattaaatattcttcgttctaaggtaataaccttgtcaatttaaattcacagaaactctctaccaagcattaacatagattaaaaccgccatctcgaaaatttaatatatttaaatttaaaattttgactttacatgaaaataatatttatatcaaattccttgaaattccttgtgaaatcgattcctgcgatatatgcatatgtaagtatgtatcttgatcaggatcctagtcatgtccgtatgaacgcatcgatctcaggaactatgaaagataaaatgttgcgattaagcaagcaacttctagaggggacatagacgcagcgcatctttgtttccaaaagtttatatatattaacaatatatcgattataccaaacaataatttaaatttttgataaacttcatttcgatatttaagaaagcatctagctaaaacaaatgttggaattatttttattatctttgaaggaaatggagacaaacgaaatattagatgttcgactgctttttaaagttttgttttaattttacacttattgcattctttctttttaaccagttgattttcacaaaatctgtggttataacccatttactgggtcttatatatattccgaagttgttttgatattgttatttggtctactaatcgtcacataatgtaatgtaaggcatt

SEQ ID NO: 20090 - DNA, 2034 bp, DROSOPHILA
gagttagcgtttagatacgctattcatagacttaatatggacaaaagccttttgcctgagactaccgttgattactatgttgaatacgtaaaccgatttgactctttcgagacagttcaaaaagtgtgcaaacttatacgagttggtgttcaagctgtttttagtccaactgactctgttttggcgacccatataaattcaatttgcgacgcactggacatcccaaacataggccgcttcgatttggaaacttatgatctggaagactttaaatataatttcgtgaacattacatcgtttcgattggtcgacactgcggatgttggggtaaagcaaatcttgaaggatatcggattgtatagtcaccatatatttaaaaaaccttatttgaatctacatattaaaaaatcaaccattcttgagccagccctaatgttcgattcggtgtacgttttcgcgattggattgcagacactggaacaatcacactctttaacccttttaaatataagctgcgaggaggaaaactcgtgggacgggggccttagtcttattaactacttaaatgcggttgaatggaaaggtctgacaggtccgattcagtttaaagatggccagcgggtccagttcaagttggacttaattaaattaaagcaacattccattgtaaaagtcggggaatggactcctcatgggcatctgaatataactgaaccatcaatgtttttcgatgctgggtccatgaatgtgacacttgtagtgataacaattctggaaacaccatatgtaatgatgcattatgggaagaattttacgggaaacgaacgattttatggtttttgcgtagatatattggaaaccatttctcgggaagttgggtttgattacatactggatctggtaccggatagaaagtatggggccaaggaccccgaaactggggaatggaacggaatggtcgctcagctgatgaaatataaggcggacctggcagttggatctatgactataacgtatgcaagagaaagcgtcattgattttaccaaaccatttatgaacttggggataagtattttatttaaggtaaatatccttttactttatatggtaatgttaatagaaaagactcttcttgttcaaggtcccaacatcagagccaacgagacttttttcatttatgaatccattagcgatagagatttggatatatgtgctaattgcatattttcttgtgtctctctgcatatatattgttggaaaactttcgcctatcgagtggaagtgcattaacgcctgcgatctagaaaatatttctattggcaaccagttctccctaactgacagtttttggtttaccatagggacttttatgcaacagtcacctgatatttatccacgagcaatgtcgactcgaataataagcagtacttggggttttttttcacttattattgtcgcatcctacaccgcaaatctagcagcttttttgacaacggagcgcatgattaatcctatcgagaacgcagaggatttggcttctcaaactgagatttcttatggcactctagatagcggatctacaatgacattttttcgggactcagtgatagaaacttacaaaaaaatttggagaagcatggataacaaaaaaccatctgcatttaccactacttatgaggatggtattaagcgagtaaatcagggtaattatgcgtttttgatggaatccacaatgcttgattacatcgttcagagggattgcaatttgacgcaaatcggaggacttttagatacaaaaggttcgccttggcgagataaaatttcattggctatacttgagcttcaagaaaggggtgacattcaaatgttgtatgataagtggtggaaaaacactgatgaaacatgtactcgcaaaaacacaagcaagcaatctaaagcaaattcacttggtctggagagcataggtacgttttcacaatgcaattggctaatatgtactacagttatattaaggtaaatatgctgtttgattat

SEQ ID NO: 20091 - protein, 417 aa, DROSOPHILA
MDKSLLPETTVDYYVEYVNRFDSFETVQKVCKLIRVGVQAVFSPTDSVLATHINSICDALDIPNIGRFDLETYDLEDFKYNFVNITSFRLVDTADVGVKQILKDIGLYSHHIFKKPYLNLHIKKSTILEPALMFDSVYVFAIGLQTLEQSHSLTLLNISCEEENSWDGGLSLINYLNAVEWKGLTGPIQFKDGQRVQFKLDLIKLKQHSIVKVGEWTPHGHLNITEPSMFFDAGSMNVTLVVITILETPYVMMHYGKNFTGNERFYGFCVDILETISREVGFDYILDLVPDRKYGAKDPETGEWNGMVAQLMKYKADLAVGSMTITYARESVIDFTKPFMNLGISILFKVNILLLYMVMLIEKTLLVQGPNIRANETFFIYESISDRDLDICANCIFSCVSLHIYCWKTFAYRVEVH

SEQ ID NO: 20092 - DNA, 3631 bp, DROSOPHILA
ggcacgtcagcacggatttaattaaaatgttttacacgcccgtaggtcccgctctaattgtctcacatcccagccaactgcatcatttcgcccacaataaacgtgaataatggaccggcatcatgaccaggcctcgaaaggtatgtaaatgtcacaaaacgttattaaaagtgctgcccggggcggcaggaaatgacaaggacgcgctaaatttgtcaaatttaatttacacctgtttagaaatatgcaaatatccgccacaagaggtggccctatggtgggctatgtgtgaagcacttatgtgagtgccgtcagcggtcaaggatttcgaaaatcctcgcggcagagcagaaaaagctgcaggaaaagcgagcgaaacacggagaacaacaatttagctgcactcataaacatcggctcctgggaaatggtagtgcgatggcaggaaggacgagacaggttgcggaaggaccggaaggaggggatgtgttgctggatgattgcagcaaattgccaacacagttgttgacttttggccatgtgcgtgtccgtgagtccgacagtccacaggtccttgtgtgtttggacttcggccacttttaccactggcattcaaattgccagttcttcgcagcgcagttcgccatcgttcttgactctttttgtctgagcggctgtgtcagggattgatagctataccaactttgatttattacccctgcgcacacacacaggaggccgatacaggactgccaaagagcctggcactcggccaggatcggaggctgaaccgagccaagtcctcttaataaactatcaacgtcagctcggatggctctaattacagaagcagcaaacaggaaggccaaaagtattatgcaacccaaaactaatcaagtagccaggttgatatacctgtcggtacttgtgcacttgacatcgtgaactggcatttattggatgcggacaaaacatcatattggggaattccagcgccgactcacaactgactgacgtggcccaggaataaggtgttttgggcatccttgatggcaaagaagaagggatgatccgcgatgaactcgaatacttcctctccaatcgtaagcgactccaccgagaccttgataactgaaatgaaaggaataaagactgtcaaaaatgttcgtatatttatgtttacggacagacttacaggttgctccactggccgtagtgcccttttcgttaacctcgatgatcgccttgtgcttcacctccgagatgcgtaggggttccgatccctggtacaggctgctcagatttgccccaggagagaacagtttcttaatgcccaactgaaagagtccaaattaatgctgttcaagaatgtaagtacttcatgggagtagcaaaaatgtttttggtatatcagtagttattttctattctaaataaacatattcagaaatattatatatacacatattatcaaaaagtctaccggacgtggttatgttttgaaattgagtctgtatgctccatcaaaactttttcgcgagcttttacttctgaaggggttcataagaacagacaaacggacagccatggcgaatctatttatggtatatcaaacattcaaaaatagttcaacacaacatatcgcacacatcgaattttaaagctgcagagcatttaggttattggccactagtattcgggtcaccaatctagtatttagatatcttaggcttaaggactcacctcctcgagggctgcctgtagagggacatcaaattcgaatttgaatttgggcagctgcacgcgtacctttcgccttctcaattgggagcttatttcattgaggtctatgcccatcagtttttcctcgacgatggccagtccctgctcctcctgaggcaggatgatcaggaaaacgatatctgtgcctgtgtagggcagttccacgaccttggccttcaactcggtcagttcgccgaacctaaagtaatcctcttgggacatagtatccacgctgaccttccgacctccgtggttgacgaagtcgctggcgtaagtggcgtaatcaggaaagctgctctgccagtcggccttgaagtagatggcattgaccaggatggccgaagtatctgcgtccagagattccggagcaatgaggtccttgatttgctgatgagtctgctcctccacccaggaattaatgtgcttggctgtgtccgctttttgggtaaagttcacattctctgcagctgctgcgaagttcttgctcaccaaatcctgataggtctgggtcagtttgaatctctgagtcacgaaaatccgattggcatacttcaatttgggcacgtcctcgtccccactagccttctcccactgtcccttggccaacaactggtccaatttctcggccacctcggtctttccagctccttccagacccaatcccagtttcaactcgtcggcagtgctcccctcggcgcccaggtaggctagggccaagcccgtccggatggaagatggggagaaaacgatgttccggccggactgggacttggccaactggccaaaaagctgcgaggcaaattgagcctcgcctgcgggacttttggagtagttaagggtgttggccatggccagattcaagccctggagcagcagaagtgaacacgtggccttgactgcaggacaaggacatgaaaataccggaagagcagtaaagtaggtcaataattcgttaacagacagcttgtgcaagtatcttccctacctgacatgattgggaaaactgaacggaattcgaagtttttactttgaaatcaaactgtgtttagactggttctctccatatgttttttcgttctcctgtaataccaccataacacaactggtttttggataagatgaatcttcacaccagtttactatttacgatactaacgaagaatcaagagagagtacaagcttttgaatcaaagaaagggaaaagcttaaagtgtgtgcaaacaaataaattgtcagttggtacagaaacaaataatccttttggaaaattacattatttataataatgtttgaaagttcaggaaagtaatgaatatacattataatataagatataaatttccaacccttttaatttttacactcattaaggtcactaaactaaaatagatatatgttattatatgtctatataataagaatgtttgcatagttaaaagccactaataagtcttcatttattagtggctcatttgtagatccgttttattagttggtggtgactcaaataatcaaaattgggaattatgttaagagagagcactgtgtttctggttctctttacttggcaatcattctcttccgaaaaggctctcttaattttgcagatgttgacaagcaattatgtcattttgtttacaaatagaaatactcctctctccggaaatcacatcgaaagtgaaaaaattaatttctaagtatgtatactagatcagcaagtacatacatatatgtgtgtatgtacagttaccttaattatctgtagaggatttgattgtagttaagttcgtggagcgctgatttcaatggctacaaaaaccgtccacgtattaaaagttctgcctcgaac

SEQ ID NO: 20093 - DNA, 1161 bp, DROSOPHILA
atggccaacacccttaactactccaaaagtcccgcaggcgaggctcaatttgcctcgcagctttttggccagttggccaagtcccagtccggccggaacatcgttttctccccatcttccatccggacgggcttggccctagcctacctgggcgccgaggggagcactgccgacgagttgaaactgggattgggtctggaaggagctggaaagaccgaggtggccgagaaattggaccagttgttggccaagggacagtgggagaaggctagtggggacgaggacgtgcccaaattgaagtatgccaatcggattttcgtgactcagagattcaaactgacccagacctatcaggatttggtgagcaagaacttcgcagcagctgcagagaatgtgaactttacccaaaaagcggacacagccaagcacattaattcctgggtggaggagcagactcatcagcaaatcaaggacctcattgctccggaatctctggacgcagatacttcggccatcctggtcaatgccatctacttcaaggccgactggcagagcagctttcctgattacgccacttacgccagcgacttcgtcaaccacggaggtcggaaggtcagcgtggatactatgtcccaagaggattactttaggttcggcgaactgaccgagttgaaggccaaggtcgtggaactgccctacacaggcacagatatcgttttcctgatcatcctgcctcaggaggagcagggactggccatcgtcgaggaaaaactgatgggcatagacctcaatgaaataagctcccaattgagaaggcgaaaggtacgcgtgcagctgcccaaattcaaattcgaatttgatgtccctctacaggcagccctcgaggagttgggcattaagaaactgttctctcctggggcaaatctgagcagcctgtaccagggatcggaacccctacgcatctcggaggtgaagcacaaggcgatcatcgaggttaacgaaaagggcactacggccagtggagcaacctttatcaaggtctcggtggagtcgcttacgattggagaggaagtattcgagttcatcgcggatcatcccttcttctttgccatcaaggatgcccaaaacaccttattcctgggccacgtcagtcagttgtga

SEQ ID NO: 20094 - protein, 386 aa, DROSOPHILA
MANTLNYSKSPAGEAQFASQLFGQLAKSQSGRNIVFSPSSIRTGLALAYLGAEGSTADELKLGLGLEGAGKTEVAEKLDQLLAKGQWEKASGDEDVPKLKYANRIFVTQRFKLTQTYQDLVSKNFAAAAENVNFTQKADTAKHINSWVEEQTHQQIKDLIAPESLDADTSAILVNAIYFKADWQSSFPDYATYASDFVNHGGRKVSVDTMSQEDYFRFGELTELKAKVVELPYTGTDIVFLIILPQEEQGLAIVEEKLMGIDLNEISSQLRRRKVRVQLPKFKFEFDVPLQAALEELGIKKLFSPGANLSSLYQGSEPLRISEVKHKAIIEVNEKGTTASGATFIKVSVESLTIGEEVFEFIADHPFFFAIKDAQNTLFLGHVSQL

SEQ ID NO: 20095 - DNA, 2859 bp, DROSOPHILA
caacggcagattggatatgcaactgaagttatagttgccaggaccaagcatgaagtgcacactctttaaatttggagatacatataatgaatattaatatatttttgttaaaaaaaagagcattacttacaaatattaacaaaatgacattgtatgcgatttgcacgatgttgtagatcttgatagctctatccagattgtagggcttttgattctgcataaaccaaggacccactatttttatgaagactagatagattccaaggatggtcaacaccggccagtggctgctggtcaacggaagacgcacaggatccggtggcgatcgattcaggaagtccagcatatgggcaaacatgtcggatatctaagtgttatcgacgtcggtggaatagcgactgatgtggactccggccgagaaccgagaaatggtaatctgctcgttttcgaggctgatttaagtgtgtgtttctattatacaaatacctacatacgtaagtaaaacctattacgccgaccatataagagggtattgcggtcacaaagtaaggaaaataggtttccatcgcttggaatgccggatatgttgaacatccactgtcccctggttacgaaaggtaaaataatggcattcgtatttagtttttaatgtagtccagttttaaatgcagtccagtttttaatgccttttgacgtaataactttaacgtattctaagatcaatcgattttatataattctaaccgtgtcacttctaatgaagtttacttacactttgtttgatattgatattttcgtagtaatagcatacaatttcgggcaaagtcttgtgttattccaccttttccatcataatattcatccgaatatcagtcattactagtaaacagatatacaattcaaatacatctttatgttttttattagctctaaaattaaaataggtttctctatagagatctaaatgctgcacagaacaaatctgatgactggctctagcttagatgtttttctgtttccttttcttgggtcgaatataggcatgaaaatagaagttgctaaataagatgatgaacacaacggagatgctgccggcacaggtcgccgagaaccgggctgatggacagtccggttgctttagggtgtagatactatgccccagaacgattccaaactggatgagctgaacgatagtgatgtacttcttccaccacagatcgcccttcgaatcgcgattgagcgacgactgatagtagtagctgtacatcatgatgtgcacgacgacgttgaagaagcacataaagaacccatgaccaccgtatccgtagtagtacagatacataaagctgaagtacagcatgtacatgtgatggaagacgtgcagaaaggatatctggcgatccttctttcgcagcacaaagaagaccgtctccagcagatcgagcagcttattgaagaagtacgagtacgtaagccagcgctcccaggtcttgtactcatgatccggcggcaggttcttgatgcacttaaagttatagtctccgggtcccagcatgaagtggacagcctgtaaagtggaatttctatattaaacaatccgtgatggttgatatttttggggggaaactcacaaaaaagcacatgatgacattgtacacgatctgcatgatgttgtacgcctttatcagaccgcgaaggtcaaagggctttcgattccgcatgatctttggacccgctatctttacgaagaacaggtaggtggccaataccatcaggacgggcttgtggctggccaggagtggcaggcgcacaggatcgggtggggatttgcccaaaaagtccactagatcacccaacattgcgattgtgtgtgcttaccgtggatcgatggaaatgcgactaattttattgtggtttataagcttcgataaacacgcttaattggtatggtaatttaggcgtgagtacggcaagtagggtttaccaatactcgaagcatgcgacaaatgcatgatttgtatttaatttgaagagcctgaggaggcagacagtgaaagtaaccatgaaaattgattccccttggctttaaatcaataccaataatgcaaaactttccacgtaccttcgcaactttaaacatgattatgaaaattccattaaaagtttaatgggctcccgggaaatgttcgaaaatcacgcacatgcgaaacgaaagcggtacaaaaagatgggcggccattttcgtatcgcatcgggttacgcagtgggcgtggccaaactgcaactgcagcaacttccatgcaaagcggatgcgaaaatggtacataaacaaataccgccacatcacgcacatccagtgcaacaaaagtggcaacagccataacaaatttagaactaaatacgggtcgcggcatctagtgcacttatttaaatgcaatagtgggttttaatacaatgtacatacatatatgtgtcgaaatcaactttaaaagagtctaccaatttcgttttgtgctttttattaagcgcttcaatagatggcaatgagcatatgtcgaaactagtttaattagataccagtcgctgccttataaaactgaaaaatcaggccaagtacatatcactcgttgtcggctgtctcactaatggccacatacttccgattcttaattatcacagtttgcatgagtaaaggtgtgatagtcggcatacgatgcaccttaggtggatcaattgcacgtggattgtagcttttgagagggcgcattttcttttccttcttctcagtttccacacattgatcaactgctttctttgctatcctttcgcttttatcctggcacgtgatccttttcattt

SEQ ID NO: 20096 - DNA, 795 bp, DROSOPHILA
atgttgggtgatctagtggactttttgggcaaatccccacccgatcctgtgcgcctgccactcctggccagccacaagcccgtcctgatggtattggccacctacctgttcttcgtaaagatagcgggtccaaagatcatgcggaatcgaaagccctttgaccttcgcggtctgataaaggcgtacaacatcatgcagatcgtgtacaatgtcatcatgtgcttttttgctgtccacttcatgctgggacccggagactataactttaagtgcatcaagaacctgccgccggatcatgagtacaagacctgggagcgctggcttacgtactcgtacttcttcaataagctgctcgatctgctggagacggtcttctttgtgctgcgaaagaaggatcgccagatatcctttctgcacgtcttccatcacatgtacatgctgtacttcagctttatgtatctgtactactacggatacggtggtcatgggttctttatgtgcttcttcaacgtcgtcgtgcacatcatgatgtacagctactactatcagtcgtcgctcaatcgcgattcgaagggcgatctgtggtggaagaagtacatcactatcgttcagctcatccagtttggaatcgttctggggcatagtatctacaccctaaagcaaccggactgtccatcagcccggttctcggcgacctgtgccggcagcatctccgttgtgttcatcatcttatttagcaacttctattttcatgcctatattcgacccaagaaaaggaaacagaaaaacatctaa

SEQ ID NO: 20097 - protein, 264 aa, DROSOPHILA
MLGDLVDFLGKSPPDPVRLPLLASHKPVLMVLATYLFFVKIAGPKIMRNRKPFDLRGLIKAYNIMQIVYNVIMCFFAVHFMLGPGDYNFKCIKNLPPDHEYKTWERWLTYSYFFNKLLDLLETVFFVLRKKDRQISFLHVFHHMYMLYFSFMYLYYYGYGGHGFFMCFFNVVVHIMMYSYYYQSSLNRDSKGDLWWKKYITIVQLIQFGIVLGHSIYTLKQPDCPSARFSATCAGSISVVFIILFSNFYFHAYIRPKKRKQKNI

SEQ ID NO: 20098 - DNA, 2853 bp, DROSOPHILA
ctgcttcttgcgcagcacaaagaatatggtgtccatcaggtcgagcaccttgttcagatggtacatgtacgacagtgtcctttccgtggactttagctcatgatcctgcggcaggacttgcatgcagctcaggttgtacggcttctgcacgaataacagatggatgccctgggtaatatggagcaatccattgaaaacgattaaaaaactgtgtatatcgatatccttcgacttacgtacccacacaaaaatcaccgaattgaacaggacttgtccgatgttgtagaacttgagcacacctcgcagctggagtgcctcatgcttgtccatcagcttcctgcccagcttgagcacaaacaatagatacaccgtgatgatgatcaccgaggtgcggatactgcccgccagcggcagctggacaggatcggcgaagggcttatcgaacacctcgaacattttcgcgcacgacttaacgagtgacttgacttttaccttctgtgatttctttctttcacgatagccactatactattacctatttgctaattacattagtgcaaatttccggtatgtttaacccactatcaaccttcaacttgaatacttaaagctttgcaaatcgaactaaatacaatataagtaacagttcaactacgtttttattttcaacattttattaatcagcagtgccattatttacaaaattactccttttgacattattgtcaatacaacaaaaaaagtgttctacatttataaaatactggcgagacccaattaaaggggtattttgcatatttaatagcattaagcagtcgagtggatagagagttctagaaaccaacaaatatctcccattgctttatgtaaaatatatatctatgtataatatacgatatatacaatgatataaaacaaatgaatttgttgtatcaaaagcatttattaatgacattgattaatgtaaggaacagtgatattaaatcttaattagttttgctcatcggcccaccgccgatttcgttttcttgggaagaatgtaggtgcgaacgtagaagttactaaatagaattataaatactacagatatcagtgagccccaagttgccgataatcgtgatgtttgacaatcagtttgccggaggatatagacgctgtgcgagaatataataacaaattggacaagctgaacgactgtgatgtatttcttccaccagagatcgccacccgagttccgattgagggacgactggtagtagtaggtgtacatcatggtgtgcaccaccacgttgaaggtgatcaagaagaatccatggccgccgtatccataataatacatgtacaagaagcctatgtacaccatgtatacgtggtggaaaacgtgcaggaacgatatctggcgatacttctttctgaatataaagaacacagtctccagcagatccatgagcttgttgaagaagtaggagtaactgagccaacgctcccagttcttgtactcatgatccaacggcagattggatatgcaactgaagttatagttgccaggaccaagcatgaagtgcacactctttaaatttggagatacatataatgaatattaatatatttttgttaaaaaaaagagcattacttacaaatattaacaaaatgacattgtatgcgatttgcacgatgttgtagatcttgatagctctatccagattgtagggcttttgattctgcataaaccaaggacccactatttttatgaagactagatagattccaaggatggtcaacaccggccagtggctgctggtcaacggaagacgcacaggatccggtggcgatcgattcaggaagtccagcatatgggcaaacatgtcggatatctaagtgttatcgacgtcggtggaatagcgactgatgtggactccggccgagaaccgagaaatggtaatctgctcgttttcgaggctgatttaagtgtgtgtttctattatacaaatacctacatacgtaagtaaaacctattacgccgaccatataagagggtattgcggtcacaaagtaaggaaaataggtttccatcgcttggaatgccggatatgttgaacatccactgtcccctggttacgaaaggtaaaataatggcattcgtatttagtttttaatgtagtccagttttaaatgcagtccagtttttaatgccttttgacgtaataactttaacgtattctaagatcaatcgattttatataattctaaccgtgtcacttctaatgaagtttacttacactttgtttgatattgatattttcgtagtaatagcatacaatttcgggcaaagtcttgtgttattccaccttttccatcataatattcatccgaatatcagtcattactagtaaacagatatacaattcaaatacatctttatgttttttattagctctaaaattaaaataggtttctctatagagatctaaatgctgcacagaacaaatctgatgactggctctagcttagatgtttttctgtttccttttcttgggtcgaatataggcatgaaaatagaagttgctaaataagatgatgaacacaacggagatgctgccggcacaggtcgccgagaaccgggctgatggacagtccggttgctttagggtgtagatactatgccccagaacgattccaaactggatgagctgaacgatagtgatgtacttcttccaccacagatcgcccttcgaatcgcgattgagcgacgactgatagtagtagctgtacatcatgatgtgcacgacgacgttgaagaagcacataaagaacccatgaccaccgtatccgtagtagtacagatacataaag

SEQ ID NO: 20099 - DNA, 786 bp, DROSOPHILA
atgctggacttcctgaatcgatcgccaccggatcctgtgcgtcttccgttgaccagcagccactggccggtgttgaccatccttggaatctatctagtcttcataaaaatagtgggtccttggtttatgcagaatcaaaagccctacaatctggatagagctatcaagatctacaacatcgtgcaaatcgcatacaatgtcattttgttaatatttagtgtgcacttcatgcttggtcctggcaactataacttcagttgcatatccaatctgccgttggatcatgagtacaagaactgggagcgttggctcagttactcctacttcttcaacaagctcatggatctgctggagactgtgttctttatattcagaaagaagtatcgccagatatcgttcctgcacgttttccaccacgtatacatggtgtacataggcttcttgtacatgtattattatggatacggcggccatggattcttcttgatcaccttcaacgtggtggtgcacaccatgatgtacacctactactaccagtcgtccctcaatcggaactcgggtggcgatctctggtggaagaaatacatcacagtcgttcagcttgtccaatttgttattatattctcgcacagcgtctatatcctccggcaaactgattgtcaaacatcacgattatcggcaacttggggctcactgatatctgtagtatttataattctatttagtaacttctacgttcgcacctacattcttcccaagaaaacgaaatcggcggtgggccgatga

SEQ ID NO: 20100 - protein, 261 aa, DROSOPHILA
MLDFLNRSPPDPVRLPLTSSHWPVLTILGIYLVFIKIVGPWFMQNQKPYNLDRAIKIYNIVQIAYNVILLIFSVHFMLGPGNYNFSCISNLPLDHEYKNWERWLSYSYFFNKLMDLLETVFFIFRKKYRQISFLHVFHHVYMVYIGFLYMYYYGYGGHGFFLITFNVVVHTMMYTYYYQSSLNRNSGGDLWWKKYITVVQLVQFVIIFSHSVYILRQTDCQTSRLSATWGSLISVVFIILFSNFYVRTYILPKKTKSAVGR

SEQ ID NO: 20101 - DNA, 5456 bp, DROSOPHILA
gcattgacctatctggtgctggcgatggacaccacgtcattccccggatcggtgataacgaaatgccgactgtgattatctttctgcccagaataatgccattaccctggtccagtttaaagcgtctgaagccggtgatcattgcggcctcaaatattctcttcagaaagatactgtcccattttggaatcgatttaaatcaagtctttgccctcggcttgtcatacaatacccatttaacaatatttcactgctttatggaataccttacatcctggataactgggtaacataatttttcagtacccaaattagcttataatgtttcgaattatactgttgtaaagtgtgcattcaaataaaaatgacataatttttatttttaatcaaaaacaaaactcttaattgattgcgattactgattgggtgtttatgataacaaattcaaatcatttgaatgtggtcctaatattcaaaacactcctcaaggtaatcaggtactcatgggtccctgaagggctattaaaaaagaccgaaaatagacctttagccccccaagtatcgtttggggtctgaatttcttggtctgtatgaaataataatcggcactacaccttggtacaaattcataaacattgtataagaagtaccatcgagtaatcgtcaatgggaactcattttactaatcgcaaggcagcgattagaaccaattaagataccaattaagatatgcattgactggcgatcgcgaatacactgaacttgaacttcgtagttagagtatcaggttttacctaagcttttggttatcgttaaaccgttttattggccttaagccttagcacaagcctctcgagggtctaaagtgattgcttatcaggctaaaaccgtgtggggccctcctataaaagcagttccaatttctaaagaaagtcagttctgttctcgaatcgaaactgtattcgcggtcagttcgaaaacaaattgtaaagtcgtcgccatgaagtatttgtgcggcattgtgctttttgtggcccttttggccatcagtgtgaggccatctgaggaggcttgtggatacgaggtgagaagtgaatgccagaatgcgacaggaatagaatatatgtgaaatttgaaaaggatgtaaataccgtgaaagtgattaaataaatttacattcctttatgctcaaaaaacggcaacaaaaatgcttaatgaacatgacatttaatgttcaggttgctaatcatcaaaccgattttgttttcaaccattaaatactatggactaacaaacaactaaaccattcaacgtttataatgcttttcaggcatgccccaaaaccaagacgaacatgatcaacattcacatggtgccccattctcacgacgatgtcggatggctgaagaccgtcgatcagtacttctatggtcacaggagtaacattcagcacgctggtgtccagtacatcatcgataccgtaatcgctgagctgatcaaggatcccgcccgtcgcttcattcaggtggagacctccttcttcgcaaaatggtgggcggagcagtcggagactgcgaagcaggtcgtgaggaaactggtcaacgagggtcgtttggaattcaccggtggagcatggagcatgaacgatgaggccgctgtaaactaccagagtgtcatcgatcagttcaccttgggattgaagtaagtgttgcaaaagaggggttataatgtcaggaatctaatggttatatgtttataccagattcctggacgacaccttcggttcctgcgcccgtccccgcattggttggcagatcgatcccttcggtcactcccgtgagcaggcctcgatcttcgctcagatgggatatgatggagagttcttcgcccgtatggatcaccgcgacaagaacgaccgtatcgacaacttgggcatggaaatgatctgggatgccagtgattcgttgagcaacgatgaaatcttcactggcctcttgtaccgtcattactcggctcctcccggctactgcttcgatgtccactgcggtgacgatccgattattgacaccaagagctacgacaacaacgtcaagtcccgcgtggatgacttccttagctacgtaacttcggtggcccagcactaccggtctaaccacatcatgatccccatgggtgatgacttccagtacgaagatgcccaggtcaacttcaagaacatggacaagctcatcaagtaagtgctgaggatctggatgattgcttacccatactcatccttttgactccacccctaggtacgttaatgagcgtcaggccgagggctccaccttcaaccttttctactccacccccgcttgctacctcaactcgctccatgaaggtctccaaacctggcccaacaagacccaggacttcttcccctatggcagtgacgacaacagctactggaccggatacttcacctcgcgtcccacccagaagcgcttcgaacgcgatggcaaccacatcctgcaggtggccaagcagctcagtgtcttcgccgagctgaacaccaagcaacagaaggaggacctggagtaccttcgcgagatcatgggtgtgatgcagcaccacgatgccatcactggaaccgagaagcagcatgtatccgatgactatgatcgcattttgtatgatgccatcctcggaggagttaacactgctcgcgatggtctgcgcaagctgaccaatcttcccaacggagagttcgagagttgcctgcagttgaacatcagcgagtgcgccttcaccaaggacgatgccgacaacgtggtggtgaccctgtacaacccattggcccacacttctacccagtatgtgcgcgtgcctgtaaagaacgagaactacgaggtgaccgatgagaagggccgtgtggtggcctccgaagtggttccagttgcctggcaggtcctggccctggagttccgcaacaatgatacccagcatgagctggtctttaaggcttccgttgataagatcgctaactactacattaagaaggtcgccagccaggagacaaagaacgtcgctgcacacactaaatcgaagaggtccatcaaggctgaagaagctaacttggaggtgcctaagcgtttcaagaaggttcactcactgaagaatgccactgagacctttgacgacgatgaaggagagactgtggtgcagacttcggtatgttaatgattttcagttaattttgtatctaaagtaacattttgattcctacctttattagcaagtcaaactggtgatcgacaacaaaactggtcttctgaagactgtcgaaatgaacggagtatccgagaacatcgaccagagctacggtgtctacaggacctatgactccggtgcatacgtcttccgtcaatatcaccaggctgacttcatcgtccagtacgaaggtgttgagttcaccgtttatgatggagcattggtcaaggaagtccaccagcagttcagcgagtacatttcccaggttatccgcatctacgagggcaagaaccttgtggagatcgagtggcaggttggacccattgagcgggaagaagagtttggcagggaagtggttatcatcttcaatagtaccattgcctccgacggcgtttcctacaccgactccaatggccgtgagatgatcaagcgtgtgaaggaccagcgtgagaccttcactcccggtctggacaggcagccaactgcagccaactactacccggtcacatcccgcattgctctgcaggacagcaagaagcgtattgccgtcctgaacgatcgtgctcagggaggagccagtatgcttaacggtcaattggagctcatgctgcaccgtcgtctcgtccgtgatgatggctatggagtgggagaggccttgaacgaggagaagtacggccagcccatgattgcccgtggaaaggtgtacctgattctcagccccagcgatgagtccaccgccgcggaacgcgaagccgagaaggagatccacctgcccttctggaagttcttcagcaagaacactggaagcaccacggctgctgccaagtccgttcccagctttaacgacttccccaagtcggtgcatctgctcactctggagcccttcaacgacgatgaggttctgctacgtgtggagaacttcttggatcacaccgagggccaagtggttagcttcaacattcgcccgatctttgactacttgaacggtgtcgaaattcgcgagactaccttggacggcaacttgccattgagtgacatgaagcgcttcaagttccaccacgacagctcgggacagaagccagatgctgttgagtacttcacctccgcccacaagccactggctgctgagcagtcccaggaggcctccgagttcagcgtcaccttgcacccaatgcagatccgtacattcattatcaagacggagtaaaccaacgttctcaatgcagtatttcatgaaatgtaaataatttaataaataaattcaatgtcgaaaatctaaagccttcgttggttaattatttacagaattaagggtctaattatggacaatatattttattgatattaggaaactgattagctaaactttatcatggctaaagaaaggaaatgtttgatgttcgggcaatcgctgctaatatagactcctcaatttgacgtttattaaaacgtaaatatataaaacttcagttttaatgccaaataaaactcactatgcagcatatattcctttggtctattattcgactgaaatttatttttattaatttttttgcataaataaaatcagattagaattaagtgttgatttcgtattattcgaaatataaattccgtttcaagtaaactaaggttaactcaaaaaatatttttatcgttaaactatttgtaaacttgattccccacagattatttagtatccgtatgctataaagtgcggatcgtgtcttaggcatttttcgtttcattacgtcataaatataaaaagattagaatggaaagccctgacaggactacattacgtcttaaatatatgaaaatttaaatggaacgcctagataacgctagaatttattttttttttctctctttttatttgcaatctgttctaaaaaagtatgacaataagtatattttataattaatcttaaattaacagtagggattaatggttaactatttctatccattaatccctactacctcatactctatgcataacatgttttaatacttaatatctgtccgggagatctagcacgttaaatcttttaagtctccttctttatttagaatttaaatattttggatctctacttttgtagcttagaactaacattagtagaaacttgaaaacaagaatccacgatagtcgcataagtgctttgctgctaaggagaattcaggtcaccatgagtggtttgttg

SEQ ID NO: 20102 - DNA, 2970 bp, DROSOPHILA
atgaagtatttgtgcggcattgtgctttttgtggcccttttggccatcagtgtgaggccatctgaggaggcttgtggatacgaggcatgccccaaaaccaagacgaacatgatcaacattcacatggtgccccattctcacgacgatgtcggatggctgaagaccgtcgatcagtacttctatggtcacaggagtaacattcagcacgctggtgtccagtacatcatcgataccgtaatcgctgagctgatcaaggatcccgcccgtcgcttcattcaggtggagacctccttcttcgcaaaatggtgggcggagcagtcggagactgcgaagcaggtcgtgaggaaactggtcaacgagggtcgtttggaattcaccggtggagcatggagcatgaacgatgaggccgctgtaaactaccagagtgtcatcgatcagttcaccttgggattgaaattcctggacgacaccttcggttcctgcgcccgtccccgcattggttggcagatcgatcccttcggtcactcccgtgagcaggcctcgatcttcgctcagatgggatatgatggagagttcttcgcccgtatggatcaccgcgacaagaacgaccgtatcgacaacttgggcatggaaatgatctgggatgccagtgattcgttgagcaacgatgaaatcttcactggcctcttgtaccgtcattactcggctcctcccggctactgcttcgatgtccactgcggtgacgatccgattattgacaccaagagctacgacaacaacgtcaagtcccgcgtggatgacttccttagctacgtaacttcggtggcccagcactaccggtctaaccacatcatgatccccatgggtgatgacttccagtacgaagatgcccaggtcaacttcaagaacatggacaagctcatcaagtacgttaatgagcgtcaggccgagggctccaccttcaaccttttctactccacccccgcttgctacctcaactcgctccatgaaggtctccaaacctggcccaacaagacccaggacttcttcccctatggcagtgacgacaacagctactggaccggatacttcacctcgcgtcccacccagaagcgcttcgaacgcgatggcaaccacatcctgcaggtggccaagcagctcagtgtcttcgccgagctgaacaccaagcaacagaaggaggacctggagtaccttcgcgagatcatgggtgtgatgcagcaccacgatgccatcactggaaccgagaagcagcatgtatccgatgactatgatcgcattttgtatgatgccatcctcggaggagttaacactgctcgcgatggtctgcgcaagctgaccaatcttcccaacggagagttcgagagttgcctgcagttgaacatcagcgagtgcgccttcaccaaggacgatgccgacaacgtggtggtgaccctgtacaacccattggcccacacttctacccagtatgtgcgcgtgcctgtaaagaacgagaactacgaggtgaccgatgagaagggccgtgtggtggcctccgaagtggttccagttgcctggcaggtcctggccctggagttccgcaacaatgatacccagcatgagctggtctttaaggcttccgttgataagatcgctaactactacattaagaaggtcgccagccaggagacaaagaacgtcgctgcacacactaaatcgaagaggtccatcaaggctgaagaagctaacttggaggtgcctaagcgtttcaagaaggttcactcactgaagaatgccactgagacctttgacgacgatgaaggagagactgtggtgcagacttcgcaagtcaaactggtgatcgacaacaaaactggtcttctgaagactgtcgaaatgaacggagtatccgagaacatcgaccagagctacggtgtctacaggacctatgactccggtgcatacgtcttccgtcaatatcaccaggctgacttcatcgtccagtacgaaggtgttgagttcaccgtttatgatggagcattggtcaaggaagtccaccagcagttcagcgagtacatttcccaggttatccgcatctacgagggcaagaaccttgtggagatcgagtggcaggttggacccattgagcgggaagaagagtttggcagggaagtggttatcatcttcaatagtaccattgcctccgacggcgtttcctacaccgactccaatggccgtgagatgatcaagcgtgtgaaggaccagcgtgagaccttcactcccggtctggacaggcagccaactgcagccaactactacccggtcacatcccgcattgctctgcaggacagcaagaagcgtattgccgtcctgaacgatcgtgctcagggaggagccagtatgcttaacggtcaattggagctcatgctgcaccgtcgtctcgtccgtgatgatggctatggagtgggagaggccttgaacgaggagaacgatgagtccaccgccgcggaacgcgaagccgagaaggagatccacctgcccttctggaagttcttcagcaagaacactggaagcaccacggctgctgccaagtccgttcccagctttaacgacttccccaagtcggtgcatctgctcactctggagcccttcaacgacgatgaggttctgctacgtgtggagaacttcttggatcacaccgagggccaagtggttagcttcaacattcgcccgatctttgactacttgaacggtgtcgaaattcgcgagactaccttggacggcaacttgccattgagtgacatgaagcgcttcaagttccaccacgacagctcgggacagaagccagatgctgttgagtacttcacctccgcccacaagccactggctgctgagcagtcccaggaggcctccgagttcagcgtcaccttgcacccaatgcagatccgtacattcattatcaagacggagtaa

SEQ ID NO: 20103 - protein, 989 aa, DROSOPHILA
MKYLCGIVLFVALLAISVRPSEEACGYEACPKTKTNMINIHMVPHSHDDVGWLKTVDQYFYGHRSNIQHAGVQYIIDTVIAELIKDPARRFIQVETSFFAKWWAEQSETAKQVVRKLVNEGRLEFTGGAWSMNDEAAVNYQSVIDQFTLGLKFLDDTFGSCARPRIGWQIDPFGHSREQASIFAQMGYDGEFFARMDHRDKNDRIDNLGMEMIWDASDSLSNDEIFTGLLYRHYSAPPGYCFDVHCGDDPIIDTKSYDNNVKSRVDDFLSYVTSVAQHYRSNHIMIPMGDDFQYEDAQVNFKNMDKLIKYVNERQAEGSTFNLFYSTPACYLNSLHEGLQTWPNKTQDFFPYGSDDNSYWTGYFTSRPTQKRFERDGNHILQVAKQLSVFAELNTKQQKEDLEYLREIMGVMQHHDAITGTEKQHVSDDYDRILYDAILGGVNTARDGLRKLTNLPNGEFESCLQLNISECAFTKDDADNVVVTLYNPLAHTSTQYVRVPVKNENYEVTDEKGRVVASEVVPVAWQVLALEFRNNDTQHELVFKASVDKIANYYIKKVASQETKNVAAHTKSKRSIKAEEANLEVPKRFKKVHSLKNATETFDDDEGETVVQTSQVKLVIDNKTGLLKTVEMNGVSENIDQSYGVYRTYDSGAYVFRQYHQADFIVQYEGVEFTVYDGALVKEVHQQFSEYISQVIRIYEGKNLVEIEWQVGPIEREEEFGREVVIIFNSTIASDGVSYTDSNGREMIKRVKDQRETFTPGLDRQPTAANYYPVTSRIALQDSKKRIAVLNDRAQGGASMLNGQLELMLHRRLVRDDGYGVGEALNEENDESTAAEREAEKEIHLPFWKFFSKNTGSTTAAAKSVPSFNDFPKSVHLLTLEPFNDDEVLLRVENFLDHTEGQVVSFNIRPIFDYLNGVEIRETTLDGNLPLSDMKRFKFHHDSSGQKPDAVEYFTSAHKPLAAEQSQEASEFSVTLHPMQIRTFIIKTE

SEQ ID NO: 20104 - DNA, 5512 bp, DROSOPHILA
tatataaagtgtgctgtatatgctgtataattatgttatgtgtttactatactcgtatattcataggttagtttgctgaagcattggctgccgctaatctagtttgttgttaatacttagaattgctttcttcgaattgttgttagtcaggaggggggacatcttactcggttcgcctgtgtatgtgtaaatcgcttatgaatatatcttatgcctacacgtagtttatgttaattgatgtacttttaaaatctctactaatctacattacaaaattgtttttcactgggttttcgagagggctctatcgcgcctccttcgtttacattttgacgtacaaacaaatgcattgtgtatttaaggtgttgctcctctttttagtttttcattcgttgtgacataaatgggaaaagtttcagtggtttttgcattgatttatccgtaacatactcagttaaaaagtgaaaactttgcgtgtgagttcgtgttaaactaaattgcacattgagtaaaattttgaacgcaagaataattagttattatttacatacaattaattgtattgtgtatagtttttttttttgtttgttgggtttgggtttcttttgaatatttacagcaacgcgtgagatgtgcgagagatttgagagattggccttaacgacttaagatatatctatagtggattagctgccgttgggggttctctagttgaccatcagtgtgtgtgattccatgggggctgccgagtcgtagagtgtgtccgtgtcctgagtgggttcgccctgcagttgacactgattggacagggtgccagcaccgcagtcgcaaaagaagctgcaagatatataaaaaaaatatattatttatttataaaatataaaaatacaatgtattagttcttctctgctcacttaccgatcgtgtcgtataaactcgacgtcatgaccagcatgacaattcttaatgcaattgacgcatatggcattgcggtcggttgtgttgcaggtctggcagcggtagaagtcgtgcatgggaaaggaggtgtagctgctaatcttgtacaggcactgcccgctggatacggccttttccacctcgtcctcgttgttgaagatgttgttgccccgcgttatgggctgaacgccgctggctaggcacagcccaccaaacttgttcttgaatatctgattatgctcaagcgtggcggtggcattgttggttatctccacgcccgccgcttggccatcgtaaatgcgattccgtcgcaggattgggtgggattgtgtcgagatgagtacaccggcctgtgtgttgcggaatatatcgttttcctcaaggatgcccttgccgccgttgaagatgcagatgccgccatcacgaccgtcatagatcttgttgcgctttagcgtcggattggagtccgttttaatccaaacaccggccatggcattgtcgaatatctcattctgctccaacaagcccagaccaccattatacaccagtactccaccattctgtccgccccagatcttgttgccgcgtattactggattgctgcccgtgcggatttgcactcccgagtacaggtggttgaatatgtcattgtcctctagctttccatgcccgttgtcataaaagtagactcccacttgctttcccgaatgtattcgattgcgtcgcaatactggagtgctcccagtggttatccacacgccagccagtgtattggagtacacctcgttctcctctatcagcccttgacccttctcgtgtacatatatgccgccgtgttggccatgatggatcttgttgtgacgcactatgggatcactattggtgcgaatttgaatccctgccagagcatttccgtaaatgttattgtgttcgataagaccccgaccctcgccaaagatgtacactcctccttggtgtccgttgtagatctcgttcttgcggatcgttggattgctgttggaggttatccagacaccttgacgacaaaaagcgtgtgttagataccattaatgatctagttctggcattgttagcttacctgcaaaattatttgaatgaattcggttctctatgaactgaccaagtccgttctcgtgcacataaatgccgcccgtctggccatgatggatttcacacttaaccacggtaggattggctccggccttaacctcgaaaccagctatacgattgttgtggatatcattcttctcaaagtagccctaaaaaaggatatcaaacattaaaatagttaatatgatgttaatgttatattccaaatgaattacaatgagttgtggtaatacaattagcttcagcttaccattccattttcgaaggtaaaaatgcccacatcccgaccgtggtgtatgtggttctctcgcataatcggactggcgaagttcttaacccaaatgcccgccagtgcgttccggctgatctcgttgtgctcgtatgttccctgggcgtagtcggtgacgtatagacctacattttcgcagtcgctgatatcgcagtttcgaatgacgggattggcgttgaccccgcccacacagacggcagcacccaccaccgaggtagagcgaatgatgcaattgtccacagttggagaacagttctcgccgatgtccaggcagtagtgcttgtgatgcgatactgttgatgtaacttcaggcgaaaacttgagtgtgaggtaacccacgtaggcgtacttggccccctctacaaacatcacagtggatccggcctcccgttccaagatcactgattcggcaacgttgccaggcgctgcaccaacaagtgccacgtccgaatcgatgaacaaatattcccccttgtaatgaccagcatgtaggaatatcaatggtccaggatgctcggtcggagccacttgttcctcatagatgttgaccagtgcgttaacgctggcaccaccgactcccgctgacgcacttgtgttggacagtccggcggataccacattgccggctcctgcaccggctggcacaaaaactcctgcagccgctcgctcttctgggtaatccagagccgcctgaatggtgttgaagaacacaatactacggccagagctgcgacgctcctggtaaccgggacgcacgtgcacaccgcggtacagctggcggaagctctctttccacggattagcgtactccgactcttcgggcttctcaaacacgaacttgcacagttccgggttgaagagcggcaggtcgtactcaaagacagactgatagagacgcttccacagctccgtgtcgttggcaatggtgttaaagcgcttacatacaagcgccagccggcataggtcctgttccataagatacgagaagatggccagcagtacctcgtcgggcagttcatactgaaggtactgggccgctgtgggcgcacaacctgctccgccggacgcagctgttccagctccggctgcttcacctgtggcacctgcagacggtcccatctctccgccttgtgtgtagaggcgtcgagatcttttcctagccggcagcatgtagttattatcctcgatggcagcgccaaccggcagtgctccacaatgctgttgcggcaccgaactgtggacattgggtggctgcgccagagtggctccagtggtgggtgcattgttcaccggaaaggtggcgctggtcgagggcgcctgaacattggacgaggagctcgaggacgaggcggacgaagacgacgagctagaggaggaggacgatgaggagctggagggcgaggcacccggattaaccagtggcggggagctgctcgatggtcccacgagtattgcggcagctgctgccacggcggaagatgaactagtgggccactgttcgtggctgctagcggagatctttcggcgcaagtcgtacgggctctggtgactacttccggcagaagcggaggctgcagctgctgcggcggccgacgtgcttgccgtactagatccgactgtggcgcaggtggacttcgaagcggtggtggaggaggctcctaatgccggtggcgttgactggctggtgccggcgcccgaactctcagtggtgtccatcatttgcagggcattgtaaaagctgccagagaagcccgatgaagctgctccgctggatccactagctccttggccgctgtcaaagtactctgcagaactagaggctcctgctgcagtaggtccggcggctgatgctgccgccgctgcagatccggatgtggaggtggcgccactgcttccgctactgctggcgttgttgttgccaacgccaccagccccggaactactggcggcattgctgttggaaccggatgcactggctcccgcaccggcggcggtcacgttctgctgaagcatggggtccataatgttgcccgtcggccggttgggcattgctatccggttggctcctttccgtcgggagcggcgcacgtaggtgcgcgatgaggtgaatgaggcgctcggcatcttcgcttcacctgcccagcgatgatcagttttccacgagttaatcagacccaaagacttttgcgtttgagttttcacagttttccaaccccatatgcacacgcactcacactggcatacacacactgccacatgcacatgcacaatttggcgacgacttttcgctctttctctcgttcccctcacttcgctttcgatgtggagtgccaccgatcggttcggattggctggctatatccttggacccttcgattgattgttaatttagctacatttgctaaagtttatccgtctgctgactgctcttcttattgctagcgagtgcatgtgtatgtgtgtgcgagtgtgcctttttcggggtttctatcctttgtctctcctttgttttgttttatttggttagaagagcaccgctagcgtacacgctggtctgctccgtctcgctcactcattgttactccgtctcccctttaattcgtcttcgcagcagacactctgatttcttttcgcttgtttcgcggtccaaataaacacttttcacaatgcaaatacgcaagttctatccaatagcttgtgcacttgacacaattgaacacttttattccaaaatttcagaagcgaaaccacctatactcggagttttaattttagcgttgagagtgaccgctgctcgactgatggaaaataccagctagcaacggaaaaaaaccgacagcgccttaaagacgtttggtattttttggcatcgtttttgtgaaatcgattttaatatcgatgaaattgatatctttttggcgcgtattcaaatgcttcgtgtctattttaaattataatgcacaattaaatgtatgcttttaccgcgttcataaatcttaaacattttaaattttataagttttaaatgtttgcattaagttgtactgattttgggagcgcgtggtaaacagccaacatgcaaccaaacacatcagctgcagcatatcgacaattaaggccgcgtcacgcctcctt

SEQ ID NO: 20105 - DNA, 3677 bp, DROSOPHILA
gtgaagcgaagatgccgagcgcctcattcacctcatcgcgcacctacgtgcgccgctcccgacggaaaggagccaaccggatagcaatgcccaaccggccgacgggcaacattatggaccccatgcttcagcagaacgtgaccgccgccggtgcgggagccagtgcatccggttccaacagcaatgccgccagtagttccggggctggtggcgttggcaacaacaacgccagcagtagcggaagcagtggcgccacctccacatccggatctgcagcggcggcagcatcagccgccggacctactgcagcaggagcctctagttctgcagagtactttgacagcggccaaggagctagtggatccagcggagcagcttcatcgggcttctctggcagcttttacaatgccctgcaaatgatggacaccactgagagttcgggcgccggcaccagccagtcaacgccaccggcattaggagcctcctccaccaccgcttcgaagtccacctgcgccacagtcggatctagtacggcaagcacgtcggccgccgcagcagctgcagcctccgcttctgccggaagtagtcaccagagcccgtacgacttgcgccgaaagatctccgctagcagccacgaacagtggcccactagttcatcttccgccgtggcagcagctgccgcaatactcgtgggaccatcgagcagctccccgccactggttaatccgggtgcctcgccctccagctcctcatcgtcctcctcctctagctcgtcgtcttcgtccgcctcgtcctcgagctcctcgtccaatgttcaggcgccctcgaccagcgccacctttccggtgaacaatgcacccaccactggagccactctggcgcagccacccaatgtccacagttcggtgccgcaacagcattgtggagcactgccggttggcgctgccatcgaggataataactacatgctgccggctaggaaaagatctcgacgcctctacacacaaggcggagagatgggaccgtctgcaggtgccacaggtgaagcagccggagctggaacagctgcgtccggcggagcaggttgtgcgcccacagcggcccagtaccttcagtatgaactgcccgacgaggtactgctggccatcttctcgtatcttatggaacaggacctatgccggctggcgcttgtatgtaagcgctttaacaccattgccaacgacacggagctgtggaagcgtctctatcagtctgtctttgagtacgacctgccgctcttcaacccggaactgtgcaagttcgtgtttgagaagcccgaagagtcggagtacgctaatccgtggaaagagagcttccgccagctgtaccgcggtgtgcacgtgcgtcccggttaccaggagcgtcgcagctctggccgtagtattgtgttcttcaacaccattcaggcggctctggattacccagaagagcgagcggctgcaggagtttttgtgccagccggtgcaggagccggcaatgtggtatccgccggactgtccaacacaagtgcgtcagcgggagtcggtggtgccagcgttaacgcactggtcaacatctatgaggaacaagtggctccgaccgagcatcctggaccattgatattcctacatgctggtcattacaagggggaatatttgttcatcgattcggacgtggcacttgttggtgcagcgcctggcaacgttgccgaatcagtgatcttggaacgggaggccggatccactgtgatgtttgtagagggggccaagtacgcctacgtgggttacctcacactcaagttttcgcctgaagttacatcaacagtatcgcatcacaagcactactgcctggacatcggcgagaactgttctccaactgtggacaattgcatcattcgctctacctcggtggtgggtgctgccgtctgtgtgggcggggtcaacgccaatcccgtcattcgaaactgcgatatcagcgactgcgaaaatgtaggtctatacgtcaccgactacgcccagggaacatacgagcacaacgagatcagccggaacgcactggcgggcatttgggttaagaacttcgccagtccgattatgcgagagaaccacatacaccacggtcgggatgtgggcatttttaccttcgaaaatggaatgggctactttgagaagaatgatatccacaacaatcgtatagctggtttcgaggttaaggccggagccaatcctaccgtggttaagtgtgaaatccatcatggccagacgggcggcatttatgtgcacgagaacggacttggtcagttcatagagaaccgaattcattcaaataattttgcaggtgtctggataacctccaacagcaatccaacgatccgcaagaacgagatctacaacggacaccaaggaggagtgtacatctttggcgagggtcggggtcttatcgaacacaataacatttacggaaatgctctggcagggattcaaattcgcaccaatagtgatcccatagtgcgtcacaacaagatccatcatggccaacacggcggcatatatgtacacgagaagggtcaagggctgatagaggagaacgaggtgtactccaatacactggctggcgtgtggataaccactgggagcactccagtattgcgacgcaatcgaatacattcgggaaagcaagtgggagtctacttttatgacaacgggcatggaaagctagaggacaatgacatattcaaccacctgtactcgggagtgcaaatccgcacgggcagcaatccagtaatacgcggcaacaagatctggggcggacagaatggtggagtactggtgtataatggtggtctgggcttgttggagcagaatgagatattcgacaatgccatggccggtgtttggattaaaacggactccaatccgacgctaaagcgcaacaagatctatgacggtcgtgatggcggcatctgcatcttcaacggcggcaagggcatccttgaggaaaacgatatattccgcaacacacaggccggtgtactcatctcgacacaatcccacccaatcctgcgacggaatcgcatttacgatggccaagcggcgggcgtggagataaccaacaatgccaccgccacgcttgagcataatcagatattcaagaacaagtttggtgggctgtgcctagccagcggcgttcagcccataacgcggggcaacaacatcttcaacaacgaggacgaggtggaaaaggccgtatccagcgggcagtgcctgtacaagattagcagctacacctcctttcccatgcacgacttctaccgctgccagacctgcaacacaaccgaccgcaatgccatatgcgtcaattgcattaagaattgtcatgctggtcatgacgtcgagtttatacgacacgatcgcttcttttgcgactgcggtgctggcaccctgtccaatcagtgtcaactgcagggcgaacccactcaggacacggacacactctacgactcggcagcccccatggaatcacacacactgatggtcaactagagaacccccaacggcagctaatccactatagatatatcttaagtcgttaaggccaatctctcaaatctctcgcacatctcacgcgttgctgtaaatattcaaaagaaacccaaaccc

SEQ ID NO: 20106 - protein, 1182 aa, DROSOPHILA
MPSASFTSSRTYVRRSRRKGANRIAMPNRPTGNIMDPMLQQNVTAAGAGASASGSNSNAASSSGAGGVGNNNASSSGSSGATSTSGSAAAAASAAGPTAAGASSSAEYFDSGQGASGSSGAASSGFSGSFYNALQMMDTTESSGAGTSQSTPPALGASSTTASKSTCATVGSSTASTSAAAAAAASASAGSSHQSPYDLRRKISASSHEQWPTSSSSAVAAAAAILVGPSSSSPPLVNPGASPSSSSSSSSSSSSSSSASSSSSSSNVQAPSTSATFPVNNAPTTGATLAQPPNVHSSVPQQHCGALPVGAAIEDNNYMLPARKRSRRLYTQGGEMGPSAGATGEAAGAGTAASGGAGCAPTAAQYLQYELPDEVLLAIFSYLMEQDLCRLALVCKRFNTIANDTELWKRLYQSVFEYDLPLFNPELCKFVFEKPEESEYANPWKESFRQLYRGVHVRPGYQERRSSGRSIVFFNTIQAALDYPEERAAAGVFVPAGAGAGNVVSAGLSNTSASAGVGGASVNALVNIYEEQVAPTEHPGPLIFLHAGHYKGEYLFIDSDVALVGAAPGNVAESVILEREAGSTVMFVEGAKYAYVGYLTLKFSPEVTSTVSHHKHYCLDIGENCSPTVDNCIIRSTSVVGAAVCVGGVNANPVIRNCDISDCENVGLYVTDYAQGTYEHNEISRNALAGIWVKNFASPIMRENHIHHGRDVGIFTFENGMGYFEKNDIHNNRIAGFEVKAGANPTVVKCEIHHGQTGGIYVHENGLGQFIENRIHSNNFAGVWITSNSNPTIRKNEIYNGHQGGVYIFGEGRGLIEHNNIYGNALAGIQIRTNSDPIVRHNKIHHGQHGGIYVHEKGQGLIEENEVYSNTLAGVWITTGSTPVLRRNRIHSGKQVGVYFYDNGHGKLEDNDIFNHLYSGVQIRTGSNPVIRGNKIWGGQNGGVLVYNGGLGLLEQNEIFDNAMAGVWIKTDSNPTLKRNKIYDGRDGGICIFNGGKGILEENDIFRNTQAGVLISTQSHPILRRNRIYDGQAAGVEITNNATATLEHNQIFKNKFGGLCLASGVQPITRGNNIFNNEDEVEKAVSSGQCLYKISSYTSFPMHDFYRCQTCNTTDRNAICVNCIKNCHAGHDVEFIRHDRFFCDCGAGTLSNQCQLQGEPTQDTDTLYDSAAPMESHTLMVN

SEQ ID NO: 20107 - DNA, 2906 bp, DROSOPHILA
tctgacgagctctaaagttttcacccattgtgtttcagaggaaacacaaatcaccactactaatcatactcctcacagccccacaccggttccccagagcaacaatcgaacagttctagagcagccaagttgaaggaccccatgcatcccatgcatatgcgcatatggaatgccccactgcttagtattcaaagaccactccaatgtatcactcatacgacgagttgtccccgtcgacggttgcatgtagatggccaacatgacagcatcaccgtttgcggcacaagatggccaattaggagctattatggggaaacatcctttgtgcaaatagcgaaatgctatattcctcctcctgatgcgatttccacctagctgcactcacaaaaatactgtttgaagtttcagggtgttcaagtattaatgaaaagatagaaagttcaacttgaacttttcttttcacttatcaattttatatttactgcctgaaatgcttacgtattaacgtattcacactactttactttatacctgtggccgctgtgattatcgtgattccccccattcctagtaatttttttcagtgctcgactcttgctccaacactttcccagctaacaaatggcatttaatgagcgcagcagccgttccgtggacaatgcaactgatttcgatggcccaactcccttccatggccgccgtcacgctctcagtcgcttaatttcatttctagcaatttaattgcgctgttgccatttgctgccggcagcctcttgcaattgcagctcttctggggcggcacgaatttatggctccattttaattccactgtgtttcgttacttatgaaaattgcagctgtttggcggttttgcggctttgtggctcgggccttgttgcacaacttttggcagttgtcccctaattgctgtcgcgtgcagcagctgttgcgcattttacggcgaccgtatcctgtgcgattcatgtgggcaagtgccaacttaccgtaagcgcggcagttcgcagaagacccagtcggtcacctcctccagcttgacctctctgtgggtggtggccaggtcggccttgttcccggcgatcacaatggggatgtcctgcgaagcgaaaaggattagcagtggcactcgtagcggcacaagcatccttgtccgcccaaaatcgggatgcggacaaagcgtattgcgccgtaattgatactcgttcgaacaatggcggcggaaagcggaaaccgtgaaagccctcggaaacaatagcgctaactatcgcacatgggcacgaaattggtaaccctatgttgcacagtaatacctacctgaaaagaaaacccactcgaagtatctgacattaaagaggagataatgacattacctcgatcataacgaatattaactgatcactctttaatagtcttaacagatgtcttattcgaaattggaagcttcttaaaccatttgtcttgttgtccacattttgctcacgcctttggttgataccgctaccatgcggttgataccgtgatcctgacccactgtgcaactttagagccgagtccgagcaaaaagcctaaacctctgccgctcggcttgactcctccgccacaaaggggaacatttataattgcttttcggattgtggcgcaggacgagggtcctttcaggcttccgcatttcaggcgccgctgattacatgcaaaatgcaggagtgctgagtgcgaagtgcggactgcagctgcacctgtaactcacctgaaagtcgccacgctgctcgcggatctcctcgaagcactgcttcacacactggaagctgggcgcggatgtggccgcgtagacgagcatgaaggcgtgtgccgttgcgatggacaggcgccgcatggccgggaactgcatgtcacccgacgtgtccaggatgtccacctgaaagggatgagggcggaaaaattacgcataatttaatttggatggccgccagccgtggatggcagtaaactgccatcaatgagatcccgcgtccgcatggagcgttcgtggtttttaatttaacccgccgcgtttcagatcattgacgttcaatttaaacaaaaaaaggtttccatgaaactacattcattcacgataaaccaccgtcccaattttattttgcaggtcctttgattaaaggcagcactgtgatgttgggagatgttggagctgaacaaaattaatatttaaacgaatctatttgattacttgctgtgctctcctttagaccatgtatcttatagaaagtaggcagtacaaattttgtttttttttaataatttagaattatttttattgatgctaaaattcttgtcacttctttactatgatgaccaaacctaaatcaaatttaagagactaaaagttcccattttccaacgcttgattttaacaatgtgaaagtcttttggtccaaaggtgtcagttacaaaaggttgctgcagctaaaaaagaccgacgaaaagttattatcggaaatttgccaagtatggttatatactcttgaagagggaattatattgtagttttattcattttaaagtagtcgctcagtataaaagctatctgctggatttctgcttactacatcatatagctgccttagtaaagatttaaatattaatggaatactgatagaaaaccttttgaaaaaaaaaggagtactcctatattataatggtgataggaaaaagttgaagcggtaagggtgtataaacttcgacttgccctaaagtattccgtcctagtttcttttaggtgtataaatatattgccgcgcaacgtttattaactttgttagtggcgacaaagtgctcaaatggtatagttttttcaactgttttaatggcatggaaatagggcttaaaag

SEQ ID NO: 20108 - DNA, 255 bp, DROSOPHILA
atgcagttcccggccatgcggcgcctgtccatcgcaacggcacacgccttcatgctcgtctacgcggccacatccgcgcccagcttccagtgtgtgaagcagtgcttcgaggagatccgcgagcagcgtggcgactttcaggacatccccattgtgatcgccgggaacaaggccgacctggccaccacccacagagaggtcaagctggaggaggtgaccgactgggtcttctgcgaactgccgcgcttacggtaa

SEQ ID NO: 20109 - protein, 84 aa, DROSOPHILA
MQFPAMRRLSIATAHAFMLVYAATSAPSFQCVKQCFEEIREQRGDFQDIPIVIAGNKADLATTHREVKLEEVTDWVFCELPRLR

SEQ ID NO: 20110 - DNA, 5239 bp, DROSOPHILA
gcacggggagcgaaacggatcctaactatgagtcggtgtgctatctcaccacggcgtccaatacagcgacaacgacaacagcgacgaccaacactagcagtgggatagagcccggctacgagccgctgcagacggatcaggagtcagacacgcagacgagcagtccgcggagtggggcagcatttacaccaagtgaacagttgctagtggacgactactttcacgtgtagcccgtgtccagtgagctggatctcccctcatcagtttttgctaagcaattctttacgcacacatatcatccattcaatgcacagatcccccatacacattaacgcttcatcgtagttaggaacggcgaccgctaagcgacagtcttagattgcacggcaacgggtcactgacccacgggcaaatccgggacaacagatatcccagaatggcacagcttcatatcggtttgccctttagaatatagcatagctttaggttgaatttgtgtacaaactatttgtatgaacggctcgacaattgcttccgggcgagggtgggtaatcgctccaagtatctactccattattattattctatctcagtaccagtgcgtcctattttaggtaaattaaaggcaggggtcccacttgacgagccacttgtttaaattgtttattaagcacaccggcggtcgttagtgggttgtgtttaggccaatgatatttaaatggcggtcggggttgggttggggtaacttacctacaatacacaaatgtatattatatatatttttatatgttttggcgtttttgctgcttttttactttactgaggtccggtataggcgtaggatatcgtatatacacgtatttacacacacaacacccacgagaatgcaagccaagtatttgtatttgataaatgttaatggaacacttcaaccatcaagaaactaagataaaatgttcaataaattattgatgacacaactcgctcgctattttgatatctctttgtgtataattatctttatttatattgaatatgtatagctgtttactggttgcaacaaggcgtatcattatattcatgtgtggcattgcatgcaacaggacagattcgaatttgaagcagtcgctctatcgattttaatcacaagtaatcatcttcaaggttgacaatcaactgattggctgtttaatgaactttctttgcttaaggcaaccaatcttatccaagccgaacgatttcgtatctgtcctgatggagcaccctttaggagagttgtgctaattatagatgatcggttgcagaagtcttatactctggtttacatggttttaactaattttcataactttaactagaacaaagacagacgttttttttttaaattactaactgtacgatccaagtttggaggagcacaaaaaatgggtttacgggatacacattgcatttgcaaacacatcgagcacatataatggagattaattgattgggtaaatgcctgctggcagttcatcacggcccagtggctggaccgcgggtgagtcgcgtcacccagacgtagatgagggcgcacaccacgaactgcaggaatataaactggtagtcgaagattaagctatacctgtgaaatgtaaacgatgaaacgcgcccgacaagcgccaatcaagcagccgcttccacgtctcattcgttgttgtcgtcagccatcgggatagcagctgccggcgccacagcctctggaagagcaggttggacctgagcgggcggctggacggcttggacggccattgccattgctggttcccgatttagcagggctatgttgctggctttcatgcgggctatggaggaggccattccagagccgttgcccatagctgatagacacggtgacatacaaggtgttgtgcatgatgaattgctgatttcacactggtcaagtaggcggagaagctcattggtgtcgggtccgccattgattttctgctgcggctcatccttggagagcagcgccagtgcagtggttaggtcccacatttgaatagcgccgttgcagtgaccggtgagtatgaaccgggacgatacctcgcactcgagcacacagaaggccgaaattgtggagctatctacggatctaatgacgcacacccgatcaccgttggaggccaagcgtacgtacagctgatccgtctcgggcaccaccttttgcacaaatatcatgtcgtcgtagtcaccgtaaggtccaaaatcatttccagccgcatagctgtagctcgtatcggtagcttccagcgacacgattttgaacgatgcttccggcgtggatcccggctgggtggagagcatgccccggaagcgggtcagacgccatgttcgcacgtggtggtattcgctgcacacggagacgaggtatttctccgacagcatcaccttcgttacggggctttggtgcacaaagaaggtctcgaacaggtgtggtccatggccagctgtctccggatgctggacaatgattcgaaccgctcccgactttgtgccataggcaatttcaatccaattgccacttatgctcgaggtttttggggtaaggtagaccgagatggccgtgatagggtctagtgtgacatctttgtagagctcggtaaccagtaaatcattgtcctttatccggagcgggaacttctgcatgtctatgtagtaaatggagccgttgttgcagcccagcagcaaaaaagagcctgcggaatcgaatgagagcacgggcactaggtcctgaatctgccagtgctgcgtcatcgcatgccagacgccgatcttgccggaagatgacagggccaccagctgactgccgataaagaacaggtactccactcgcacatttaaattaaacgtgcccacatccgttttctggccgccctcctgaatgctccacaatcttatctgactgccgtaagaaatggccaccatcttgctgggcagtggctctgctgcggaagtattcacctttgagttgatggcgattctttcgatagtggcgtcgatgtggggcgatgtgaacacctgctgccatccgttggagtctttcacccggtagcaagtcacaaagtgtgcgtaagccactgctatccaattttggtgcgccttaatgatttgcactcgcaacgggtccacccagtttgagttctgcgtgggactgaataccaggccaacttcgtttcgaaagactttgttcagatcggccgaggagttccgagagtggcgcataaagtcaatcgagggattacgtgagtgcaacatgggagctgggggattggcaccattgccagtgctacctgtgcgaccaaggcgcagatcccatgatgaattgcgcgagtgtgaggagcgtgagggttcgggaacgcgcaccatggacccaggacgactgccaatcgcactggccgaagtggagggcaatgactcgtcaacgctagtagcagccacagcttcgtttgacggcatgggcggcgccgccagaaatccgtagaacagcaaatcaccgcaggacgagtggttaaggtcttcgcagagggccaggcgcttggtcagcggcgtgatgccatagtactcggcctcatggcgcagagcgcgtatttcgcagttcttgatgtcgatgtccttggtccttaagtagttaagtatgatcgagaagagcgtcggatcgcgatcaataaagatggcattgtgctcgtctctgagactcgagatgcgtccgctgagaagagccgtgaagaaggtgtccgggatccacgtaagcgtttgccgcgacgtggaaaagctatggatagtgagatggagtttgcatgcgtcatcaatgccgttagtgggccgtaatgtgttggttctttgttcttaccgctgaccacccacattgaggttgaccaggtcgctgctggaggcatgcgtgaagtgggacatggcaatccgatgacccgcgggctgccgcagcagcggacggtggggattgctctaaatgcgcctctatttgtgtggcttccgtgctcccagcgctccaatcagcaactgatatggcggagcagtggcagcggcgtcagcggagcagataactcgcgatttcggtacccaacccacttgacgtgcgctgcggggtgcaatttattcgattaactctttgtgccaggctatttatttatttattatttgttgcactgcactgtagaaactagggatgggcaaattggtcgtgactgttcccagccatgacgagtcactgtttacggggggtccctgttgcatttagttgttttgctgaactttccacttttgattttgtatgtgttaactcaccaaggtttttgatggtttccaaacaacaattcatcattaaaaaataattaatatagaaataaaattaatttgggcatcagaaagtatatgcatttccacaattataagcaacgatatttcttgtgaagcagtgtacatctctaactctcggttaaattcccatgcaatacggtcataccaccttttcgtcaagcaacggtttatttcgcttggtggtaaatttgaaaatattgtaaagttatgacttgtattaagcatcaaaacaaaaagctcatggatcttgctgtcacactctgagcctttggaactacgctttagtttagtttcggacaccactcaaaatttcgaaaaagcccaaaatgccggcggcgaagtgcggttgtttgaagaaggaggctcgcgtccatgtcatctacgtgggtggaaccatcggaatgatccgcaacgagtccggaggtgggtatatcaatggctcttgtccgtgtactaatcaattgtttctcatcagtactgcacaccgcgcccaaggtgctggctcggcagcttcaagagtttcccagctgccacgacaggaattacaccagcaaggataatgatggtcccatgatggtgctacccgcagtgtctggagctccgtatagagtcctttacgatttgattgagttctgcccactgatggactccagctgcatgggcttctgcgactggaagcgcattgccaacgaagtgggagtaagttgagagtcgaggatcatcaggttaatacaaaatatgcaactaacttttttcgcagaagacatacaagtcctacgacggctttgtgatcctccatggaacggataccctagcctactccgcctcggcactagcgttcatgcttgagagcctgaac

SEQ ID NO: 20111 - DNA, 3161 bp, DROSOPHILA
aatttgcccatccctagtttctacagtgcagtgcaacaaataataaataaataaatagcctggcacaaagagttaatcgaataaattgcaccccgcagcgcacgtcaagtgggttgggtaccgaaatcgcgagttatctgctccgctgacgccgctgccactgctccgccatatcagttgctgattggagcgctgggagcacggaagccacacaaatagaggcgcatttagagcaatccccaccgtccgctgctgcggcagcccgcgggtcatcggattgccatgtcccacttcacgcatgcctccagcagcgacctggtcaacctcaatgtgggtggtcagcgcttttccacgtcgcggcaaacgcttacgtggatcccggacaccttcttcacggctcttctcagcggacgcatctcgagtctcagagacgagcacaatgccatctttattgatcgcgatccgacgctcttctcgatcatacttaactacttaaggaccaaggacatcgacatcaagaactgcgaaatacgcgctctgcgccatgaggccgagtactatggcatcacgccgctgaccaagcgcctggccctctgcgaagaccttaaccactcgtcctgcggtgatttgctgttctacggatttctggcggcgccgcccatgccgtcaaacgaagctgtggctgctactagcgttgacgagtcattgccctccacttcggccagtgcgattggcagtcgtcctgggtccatggtgcgcgttcccgaaccctcacgctcctcacactcgcgcaattcatcatgggatctgcgccttggtcgcacaggtagcactggcaatggtgccaatcccccagctcccatgttgcactcacgtaatccctcgattgactttatgcgccactctcggaactcctcggccgatctgaacaaagtctttcgaaacgaagttggcctggtattcagtcccacgcagaactcaaactgggtggacccgttgcgagtgcaaatcattaaggcgcaccaaaattggatagcagtggcttacgcacactttgtgacttgctaccgggtgaaagactccaacggatggcagcaggtgttcacatcgccccacatcgacgccactatcgaaagaatcgccatcaactcaaaggtgaatacttccgcagcagagccactgcccagcaagatggtggccatttcttacggcagtcagataagattgtggagcattcaggagggcggccagaaaacggatgtgggcacgtttaatttaaatgtgcgagtggagtacctgttctttatcggcagtcagctggtggccctgtcatcttccggcaagatcggcgtctggcatgcgatgacgcagcactggcagattcaggacctagtgcccgtgctctcattcgattccgcaggctcttttttgctgctgggctgcaacaacggctccatttactacatagacatgcagaagttcccgctccggataaaggacaatgatttactggttaccgagctctacaaagatgtcacactagaccctatcacggccatctcggtctaccttaccccaaaaacctcgagcataagtggcaattggattgaaattgcctatggcacaaagtcgggagcggttcgaatcattgtccagcatccggagacagctggccatggaccacacctgttcgagaccttctttgtgcaccaaagccccgtaacgaaggtgatgctgtcggagaaatacctcgtctccgtgtgcagcgaataccaccacgtgcgaacatggcgtctgacccgcttccggggcatgctctccacccagccgggatccacgccggaagcatcgttcaaaatcgtgtcgctggaagctaccgatacgagctacagctatgcggctggaaatgattttggaccttacggtgactacgacgacatgatatttgtgcaaaaggtggtgcccgagacggatcagctgtacgtacgcttggcctccaacggtgatcgggtgtgcgtcattagatccgtagatagctccacaatttcggccttctgtgtgctcgagtgcgaggtatcgtcccggttcatactcaccggtcactgcaacggcgctattcaaatgtgggacctaaccactgcactggcgctgctctccaaggatgagccgcagcagaaaatcaatggcggacccgacaccaatgagcttctccgcctacttgaccagtgtgaaatcagcaattcatcatgcacaacaccttgtatgtcaccgtgtctatcagctatgggcaacggctctggaatggcctcctccatagcccgcatgaaagccagcaacatagccctgctaaatcgggaaccagcaatggcaatggccgtccaagccgtccagccgcccgctcaggtccaacctgctcttccagaggctgtggcgccggcagctgctatcccgatggctgacgacaacaacgaatgagacgtggaagcggctgcttgattggcgcttgtcgggcgcgtttcatcgtttacatttcacaggtatagcttaatcttcgactaccagtttatattcctgcagttcgtggtgtgcgccctcatctacgtctgggtgacgcgactcacccgcggtccagccactgggccgtgatgaactgccagcaggcatttacccaatcaattaatctccattatatgtgctcgatgtgtttgcaaatgcaatgtgtatcccgtaaacccattttttgtgctcctccaaacttggatcgtacagttagtaatttaaaaaaaaaacgtctgtctttgttctagttaaagttatgaaaattagttaaaaccatgtaaaccagagtataagacttctgcaaccgatcatctataattagcacaactctcctaaagggtgctccatcaggacagatacgaaatcgttcggcttggataagattggttgccttaagcaaagaaagttcattaaacagccaatcagttgattgtcaaccttgaagatgattacttgtgattaaaatcgatagagcgactgcttcaaattcgaatctgtcctgttgcatgcaatgccacacatgaatataatgatacgccttgttgcaaccagtaaacagctatacatattcaatataaataaagataattatacacaaagag

SEQ ID NO: 20112 - protein, 730 aa, DROSOPHILA
MSHFTHASSSDLVNLNVGGQRFSTSRQTLTWIPDTFFTALLSGRISSLRDEHNAIFIDRDPTLFSIILNYLRTKDIDIKNCEIRALRHEAEYYGITPLTKRLALCEDLNHSSCGDLLFYGFLAAPPMPSNEAVAATSVDESLPSTSASAIGSRPGSMVRVPEPSRSSHSRNSSWDLRLGRTGSTGNGANPPAPMLHSRNPSIDFMRHSRNSSADLNKVFRNEVGLVFSPTQNSNWVDPLRVQIIKAHQNWIAVAYAHFVTCYRVKDSNGWQQVFTSPHIDATIERIAINSKVNTSAAEPLPSKMVAISYGSQIRLWSIQEGGQKTDVGTFNLNVRVEYLFFIGSQLVALSSSGKIGVWHAMTQHWQIQDLVPVLSFDSAGSFLLLGCNNGSIYYIDMQKFPLRIKDNDLLVTELYKDVTLDPITAISVYLTPKTSSISGNWIEIAYGTKSGAVRIIVQHPETAGHGPHLFETFFVHQSPVTKVMLSEKYLVSVCSEYHHVRTWRLTRFRGMLSTQPGSTPEASFKIVSLEATDTSYSYAAGNDFGPYGDYDDMIFVQKVVPETDQLYVRLASNGDRVCVIRSVDSSTISAFCVLECEVSSRFILTGHCNGAIQMWDLTTALALLSKDEPQQKINGGPDTNELLRLLDQCEISNSSCTTPCMSPCLSAMGNGSGMASSIARMKASNIALLNREPAMAMAVQAVQPPAQVQPALPEAVAPAAAIPMADDNNE

SEQ ID NO: 20113 - DNA, 11743 bp, DROSOPHILA
tagccaccccttttggacaccagaagcctgctggcctggtcgtttgcacttgctaaatggtttcattagttttagtggttacttgacttagttcggtcaagcatcggcacaagtgtcagttcgcctatagtgacgccccaaacgagggtggaacgcaactcgagcctcggttgtagattctcgattcgcacttggcacacggtcattttgatgggtcgtcaaggtggtggtgtttctgggcactcagctcatatccattcaattatttgggatttggagcaagtgcctcagagaaccggcatgtcaaaggagaatgcataagctgctgcctatttggtagataattacacattaaacgagaatggcaaaagtcagtctttgagtcggaggcagtccgagataatcggaccgcctgtcatttgctcgtgatatgcagacgcagaagcagaggcaagagcagtagctgttggcctgaccagttgtcccggatccgcctttgattctatctgtggcatggcattaacacacgggacttgggacttgggacttgggagtcgggaccacagactggaggaatggagtcccgattcgtgtcgcatgcaatgctgtctgctgcgccaccaaattgaaacgacagcccatggcgtgcgatggttgctgcatgctctaaacatttccgctgccagtttaattcctcgtggcccgtggatggttcccctccagtaatttaatttggcaactgtttaatattgcatgcttacttgcctgatcgtactgttttttagtcgcaactaaatttgggttacgaaacatacaagttctaggcattcgatggcgaaacaattggaaagtggaacctagtgcctcacataagctacgtctaatacacacatgacaactttttgaataaaacattggattttaacatttcgcgaagtttggctgtgggaaatcatccacagtcaaagaatatagtttccaatggaatctttgatctaaaatgataattcgtattccttcgattgcaggcgcctcgaaggagatcggcaccgccctaacccgcgtttgcctccgccacaaggcggtggagacgcgtctgaagaccttcaccagcaccattatggattgcctggtgcagccgctgcaggagaggatcgaggactggaagcgcacggtggccaccatcgacaaagaccatgccaaagagtataagcgctgtcgcagtgaactgaagaagcgttccagcgacacactgcgcctgcagaagaaggcgcgcaagggtcagacggacggattgcagtccctgatggactcgcacatgcaggatgttaccctgcgccgggcagaattggaggaagtcgagaagaaatccttgagggcggccatggtggaggagcgtctgcgctactgcagcttcgtccacatgcttcagccagtggtgcacgaggagtgcgaggtcatgtcagagttgggtcacctacaggtgcgtagagcggtgtatgcattgtcagctcagttactattaatagtataaattttacaggaagccatgcagtcaattgccctagtaaccaaggagcctagtgttctgccccaggcctccgaggagcttatccatgacgctaaggccagcattaatctgtacccggagtccccgggtggcggttccggctcgcagggcggcggctgctccaactcgctgggttcccgaaagagctccgtctgctccatcagcagtatgaacagcagcggctcgagcaactcgcccggtcaccatcactatccgcgctccctttcgcaggtgcgtcatgccagagggtttcctagttgcctggtcaccatcaaacccgcattcggcattgtggcgtccgctcatttcttggttttcatcaatgttcttttgtgtttcgtttttgttttttttttagtttgtaacgcccgcaattcgcttgaaacctggtgaatccagtgatagtggcttttgctcatcgccagctttaacaacacaggttttcatttaattttcttctgttaaatttgaccaaattacaaatacttctccgcgaaatctttgactgccctgattttactaactactctgctgattcctcgcagacttcgaatgcaacgaaccagacggcaaatgtctccacctggcccccacattcccaggatggcgtcgacaccctgccaccgaccgctgaccgtccgcacacgatttcgacggcatacgaaaagggtcaccagcgtccgccgctgaccgtctacacgttccaaaacccggagaccattcacgagtcgggcagctgcctgaacaacggaacagcagccccgaatggacagccgttatccggacaagccactccggccacccagaaatcaccggctgcctcacttagccggcctcctttgccagttgtaagtatggattagttataaaataactaattagttataaaaataaaataaaatatttaaactacttttaattggttattacgacaatatgtatagtacattacaaaatgagacaaattcttgtctgtttaagcttttctctggtcataaagcagagaaaacgcacttggacaatcaaagaccaactaaaattaataacttaaattaaattaaagatagagttgcattaaaaaaaatccaacagatccaacaaatccaagatttcaaaaacattatttatggttttttgcgtttggcaaatatatttgagttagtctttagatattaactgtaggcgatgttatagatggaggctattcgaataggcggtaaaccgtctattgattttgtacattctattaagttgtctctctcgttctgttggccatgacactcgccatagaagccagcccatgtggtgagtattccagagtcagagccccaccaatcgtagatccgacagcgcgctcatctgcatgcgccccgctagaccactgacaactaggacctttaagtcgcctcatcattaaacccaaaacatttcgatttgcaccgtgactaaccaatggacttacccacttttcagcgctgctcgtcgttggagcgacccctttcggcccagagtaaccaccgccagggtagcgggaataacctgctgcagcgccagtgcccctcgccgattccggctcatatcacgaaaggtaggtggtgcgccatgaccagcaattgcccagcttgtctccgtgtatttgtgtgcacgcttgcctttggctaatcccatcagtcttactaataaccgtgtccacccgcatgtccttgctaacatcatccgcacacagagctgtccgcagcgcatcatgcacagcagcagcagcagcagcaaaatcagcagccccagacgccgcccacctatgtgaacatgtcggagctggccaccatggccgctttgaagcagaccaatcagcagcagaagccctctacgccgcctctgcagcagcagagctccattgactcgaccagctcccagcattccaacgactccaccggctctcatcagctcctccagcagcagcagcagcatcatcaatcgcagcagaatcaccactcagccactgccacacgctcccattccatatcctcgacggcctcgtcacttcactcgcatccgtcgatcgactccaccgtcgcttgcggctcgctggtgggccagcacaaccacagcaccagcaccaacacgaacaccacctcgccgtccagtggcagctccacgccacagaaccattactcgcccctgctaaccaactcccccacgtccactgccgcaggtactcccagtggcagcagcttaggtcctgggtccggtttgggatttgtctaccaggtcagctccccgacgcctccctccagcgaggtgctgaaaatcaccgagcaagccgctgcaggacaggatcagggtccagccaacagcgtagcggacgagacggatgagcgatcaagggcctcagtcctgcagaaggcttcaatgttcgaaaaggcggcagcagcggcagcggtatcgcccccagctcccatgcagattgcatccggttccccagcttcgggaggcggaactcgacgatccgaggcggagcagcaggaaatgggtaagttgcatcagcaatcagctggatcgttgaaggcgaagtgtgtcaattgatcatagtaccctgcccacccagcacaaaagagcactttaaacatgagattccccagtctccaactttcatgtccagcgcccatttttatttataattgataaacatatcgtgaatattttttaacccccaaatttcttttttgtttttccctcccctgttttttggtttgttgtgtaaacgcaacggcaacaactgcacaaaaatcaacttgaaaccattgaatatttttcggtttcgactttatgttcaccctacccaaaatctctgtcatctgtaaactattattcacaatgaaccaactgcaccacaacaacaacaacaacaccatctccaaaatcaataccaacaaatttgaaaatatgaacttaacagacaagtctttcgaagattcaatacaagcactaaataatttaattggcgaactagactcgttccaacgcgagatcgatgagggcaaggtcaaaccgccgagcaacatcataagcggcagcaccaccagtagcaacaacaacaatacgacgaccagcagcatcagcagcagcgacaacaacaacctgcccgccaccagcaacatcgagccatgcgccatcagcaatcagacgaactcgagcggctgcggcacggacatatccgacaccacgtccgacgaactggccggcgacgatatggacgtcaggcggcgggatcgggatcgggaccgggatctgctgggcgccagcgattcggagctgagtcgctgctatgtgagcgagacgagttcgctgaccggtggcctaacggccggcggctacgagaatcccactttcgcgcactttgcggccaatgccaatcgggaggacgctgtttcgctggcctccgacagcgtttgtctcggccagccacgccacgcctatgtggatacctgcagcgacagcggcagtgccgtggtggtgatctacgaccaccagattcccaacacacccgacattgagttcgtgaagcagaactctgagattgtagtgctgcggactaaggatccgcagccccacgcgctgcagctgcacgagatgcgcgagctgcagcagttgcccgccaatttggccggttcgccggactcctcgccggactctgccggtggccaggcaccgccaacagcaactgtggcgcccgccaagcagcgactctcctcgtttcgcgccaccagtgagcagcagttgcagctcctcggacgcggtagcccgcaaagaggtaaaacacccagtgagcaggcggtacaaagcaggccacaggaccagcattttccacagacacaacagcaggatattgatggcagtagtccaccagtagaacttgcaaggcgccagctgccccccaagcccaccagtttgagtatttttaacggccccgtgcccactgcgggcgataggcctgtcgtgccgcgaaagtcggactttaaggctgatctagatgctaaaatacgcaggcaaaagcagaaggttaaacagcagttgcagcagcagcagcagcaacagcagcaagagcagcaagaaacgcagcagcagcagcaagcaccacaagaacagcaacactcaccacagtcgccccaaaccagaaactgtaatgtcactaatcaacaagccgccaatattactgcatcagcatctgcatttgcaaccgcaacagcatccacagacccgtacccgaatccaaatcatagaatgccaaaccaaaatcagacagccacatccaatcacacgcagtgcaagacgcccacaatggcattgtcaccgtcatcacctcgcggccatttgccattatcatcgtcatcgctatcgtcattaccattaccagccaccacttcatcaccatcaaatgcccggccatcgatgttgcccgccagtgaccgaccacccgcccatccatatgtgtgctccaatgccccagccaatccccaccacgccaatagcatttccaatgccaatgcccatctcaagccgtgcattacgccccggccggcttctttgtcgggttcgtttcgtttcaatttgattttgatttgtttgggtttatttggttttggtttttgattccttattttgaaaactttcctactttgttgtacctttgcaagtatccttatcattttgtgcttgccgaagtaactttacgcggttttgggtttctcatttttgctataagttcgatgtggtaacctttttgaaattggagttggtttctctcgctaagcactacgctcataccatcaagtcacaatcattaagttcagatcatcaatagacaactcaaaacccgcatgatactgccactaactgctaaatgcttaatcactaatcagattcgatcgtttgtaactacaaaattttttttacaaaattgcattttgcaaaatcgcttaaattaggggaaatgtcttttcgacatgaagtggtatcgaaagtgccatcacagccattaacgcttttccactcgcttcagggtcatcattatgattcacagcagaccaagaacgttcataactttctcgatcagcagatcctaactctgcgtctatcgctaactactggtattagatggtgtcctgtgttttgtgtgccaagtgtataaactgataactgtacattactgtgaataacagcagaaattaatgactaaatcatcaaaatgcccgcctcactaacaaggatttttacttttcccaggaggagcagccggcggtggctccacgcgcatcgggcgtcgatcgtccattaatcagtccaagccaccgccgccagtcagacgcagttcgtcggtgacccccagtcccaatgcctcggtcggggtgagttaagccttcaattacctacacccaattaagttagccacttaatctaagctagtcgctaagcctgggttcacactctgggtcacacactctttggtttcctctatgcttttattctttaacttatgatttaattacgcaacgcagctgcagcagcaaccacagcacgcgactctgtcgcagcagaatcaccaactaagcagctccagcgagcacttaccgccgccaccgccattcatgctggacgccatgccccagattcccagctcagcgctgaaggtatcggagacggtaagagccctggcagccatgcggcaccagccagcatcacctgtgtccctcagacgcatgcagcagcaacagcagcagcagcttcagcagcaacagcagcaacaggtgcagcagcagcaacccctattgcaggtgtgtgctcggttcgcatccggtttccatttgtaccaaaatgtttgatttcctactctcacctgactatttgagtttacaacccaaattgggtactattaatgtgtagtttatgcttctgaccaaaaatttatgcaaccagatgaagatgtatttggctttagttagaaaattcatatatctggctaaaaagtttaaagctacaataagctaatcactaatcgtaaactgtagggattctagttgcctagccccggtaaacaagcataagctttgttccatacattttctacctacaaatgtaggtatactttgagctcattgagcatagaaatacgacttggaagactcgacatttattccccaacaaaagccagtatagttcggcgtgagagttaggtaatattcattgggtctaactagtgcacgagtctagagccaccttgaaatttagccatcttcttctacaacttatgatttcattttatttcaacttacgtttgcttcaccactaccacacacaaaccgaaaccccaatcccccacgtagtctgcgcacaactcccccctcaaagaggacctgaccgtgtactacgactcctacttggatctgcacgcctatgcccaggccttggccagcggccaacagcccggcggtcagcagatggccaaccagcaacgctttaccctccagcagcaacatcagcatctgcatcagccacagcaaccgcctgtctaccaagtcgatgccgtaagtgaccagcgggtatctcgcgggctactaaccaagactaacaggcgtctttgggagcgcctctctggcctaacacgactgccctccttccagcttagttgtaatgccatagtcatagattactctagtgcttagctttggtcgtgctttggctaacttttaatttgtgcccgtcttcttctcgtttctctcatgccacaaacacaccatcactgacacacattcacgaccagacgttccgcacctcatcaccagccgcgggcggagggggtggcggcggcatatacgcccagcccaaactggtcaacagcatgtccagcttccgcaccagcagccccagtcccaacggacatgctcacccactgccaccgacacagccaaaggcgaatccgaacctaattgcacagctcaatgcacgactcagcggcaaacagcagcagcaccaacagcagcagcatatcgaggggatctacggcaaccagcaggcgcccggaggagagtcgatctacatgcggagtggcctgtccatgtcgcagccgcaacagcagcaacactttgacggtaaatctgaacaaatccagctgcagcaccagcaacagcatagaatttacgctagtttcggcacctcatcatcagcaatgtcatccgctcatgcggccaacagcagcactaaaccgtccattctaacaccgaccacctctttcaatgcattgcctcacttccccctgtcttcatccacatcatcgttgctctccaaagtcagctcattctcgaactcttcatccgcatccccaccgacaacggcagcgacctctggctcggccagttcgcattatcagccacctcagccgccgaatgcagcagttgctaacagcaaagacatggccatctactcaagttcgtttaccaaaaatccagcagctgcgcaatcgccgaacatgagacaggctcattcccatcagcaccaccagccgccgcagcagcagcactacacctgtccgcctcctctggaggatcccccaccgccgcccatttacgccgccggtgcatcggccacgatgcccaagaagatggcccgtccgcccactggccagaacgcgactcactcgagcgcctatgcagcagcctcgtctacggccacgctgcccaagaatatgatgcagcagcagcagcggttgcagcaccagcagcagtatcaacagccggcaggcatgggcattggcaacggcaatgggcacctaggtcagcgtccgcagttgccgctgccccagcagaagcttagagctgcacagcagcagcacttggcggagcagcagcatcagcaacagcaagaacagcagcagcaccaccagcagcaccaacaacaccagcaacgccagccgcccattccttcacgccactcaagtgtgcagcaaaagatattcgtatcaacgaatccattcatacagacaacggccgtcaagtttcactcgccctcggcctcgcccacgtgcggctcgcccgttactgggtccttggctagcatttatgccacaacctcgcgtggcggccaccatcaccagcagcagcaggctcagcagcagcagcactactatcgcgatgctgccgggggcaacagcaacggcggcgctgcctactataaccacaatgcccatgcccattcccaggcacatcatccaagtaagagcgcgagctggatttgaattgattccattcgattcgatttgagttggtttgatttcattacgtatgattttattgcaaggaatgagcgcgctgcttgttgtatattattgttttgctgactttctatttcgctcgattgcgagcattcaattttgatttgacgttagctctaagttttcctttggcgcatgctgcatatgttcttttgcttttgtttcgtttgcgtttgagttttcgtttggaaagtgttgccaattaacatgattgagattgtgtcaagtgcgtctggaaactatcgggtcaacaagaagggattgcagtttccgccgcagctcgatccgcagtcaactttcattccaatctttccaatcatcagtcatctccgagtctaactcttaccaacaattgttgagttttattttgcatatccatttggatttaccaccatattaaccacttctgcgcaagccaacatccacaccaccattgatcgatcatgtttgcttaccattttcttttatgcacccgaatcggtacccgtatcgacaacgcatatcaatagactatgccacaagcacaaatatcgaaaagactggcagtattcgtgccaagaccaaggccgaattcctcgagaatctcaacgcgaagctggcgaagcagggaatgtctggacgagcatttgccgtgcgaaatctcatcaacagcaaggccctggtaagtagtgcacttcgacagcaactcatccgattgccaacactctctatgctctgtccatgtcaccatggctattagatgtatcaaaatccgcaaaaactatcgcgacccagtgcgcaataccgtagaccacccacctatcccaacaccagcacaaccaccaatgccacttgcgaagatcagtgctaagtgctaaggtattttgttcgttcctagtcgttctcgttcgtttgaagcccactaagccagctggcagctaatacactcagtgctacgttctgccaactaactgctctccgatctaacgatagataacctaaggttttgccagcaaagtgcccatctaatccgatctttgtggactctttcagccggaccctcgcatctgtcacgaatcgctgatggatcaaatcaagcgcggagccaccttaaagcgtaaccagaagatcaacgatcgcagcgctcccaagatacattgaattaacctataggctaagcgaagcagcatatttattaccataataattaatctatgaataatcatgaggcccgacgcctgctcgactgcagggctctgcagagtttggtttgaaactgaaaactcgaaacacagcatacaacttaaatacatatgattacgatatataatatatattcgatatacgatatttaacaggagcattaagcataaatcgaactaatcaatacctttcttgatttcctgtatcccaaaaatgtgtcgaaaggctttctctgttaagtgaatacaatatggaagacagttatgtttatgtttatttatatctgcaactcgaatttatctttagagaacctttgtttgaagatattttatgtttatgtatttcctgtatttataatttcccttgcttatttatgtacatacatatgaatatgagtttaacaaacactcgaaactaatctgacgcctaataaatggaatttatcgtacatgttttgagtattttttacttttgaaatttaattttttttgcaaactgtcaacttcatgtcaattgggctatgtctgagcgtattttcaaatataacccataaaacattgtattgaataaatagagttaacacgttaacaaaatactcggtatcccactgtaactttaaaaaaaatctagaaagaagtaacgcaatttgaaatgcttttaagaactat

SEQ ID NO: 20114 - DNA, 5824 bp, DROSOPHILA
atgataattcgtattccttcgattgcaggcgcctcgaaggagatcggcaccgccctaacccgcgtttgcctccgccacaaggcggtggagacgcgtctgaagaccttcaccagcaccattatggattgcctggtgcagccgctgcaggagaggatcgaggactggaagcgcacggtggccaccatcgacaaagaccatgccaaagagtataagcgctgtcgcagtgaactgaagaagcgttccagcgacacactgcgcctgcagaagaaggcgcgcaagggtcagacggacggattgcagtccctgatggactcgcacatgcaggatgttaccctgcgccgggcagaattggaggaagtcgagaagaaatccttgagggcggccatggtggaggagcgtctgcgctactgcagcttcgtccacatgcttcagccagtggtgcacgaggagtgcgaggtcatgtcagagttgggtcacctacaggaagccatgcagtcaattgccctagtaaccaaggagcctagtgttctgccccaggcctccgaggagcttatccatgacgctaaggccagcattaatctgtacccggagtccccgggtggcggttccggctcgcagggcggcggctgctccaactcgctgggttcccgaaagagctccgtctgctccatcagcagtatgaacagcagcggctcgagcaactcgcccggtcaccatcactatccgcgctccctttcgcagacttcgaatgcaacgaaccagacggcaaatgtctccacctggcccccacattcccaggatggcgtcgacaccctgccaccgaccgctgaccgtccgcacacgatttcgacggcatacgaaaagggtcaccagcgtccgccgctgaccgtctacacgttccaaaacccggagaccattcacgagtcgggcagctgcctgaacaacggaacagcagccccgaatggacagccgttatccggacaagccactccggccacccagaaatcaccggctgcctcacttagccggcctcctttgccagttcgctgctcgtcgttggagcgacccctttcggcccagagtaaccaccgccagggtagcgggaataacctgctgcagcgccagtgcccctcgccgattccggctcatatcacgaaagagctgtccgcagcgcatcatgcacagcagcagcagcagcagcaaaatcagcagccccagacgccgcccacctatgtgaacatgtcggagctggccaccatggccgctttgaagcagaccaatcagcagcagaagccctctacgccgcctctgcagcagcagagctccattgactcgaccagctcccagcattccaacgactccaccggctctcatcagctcctccagcagcagcagcagcatcatcaatcgcagcagaatcaccactcagccactgccacacgctcccattccatatcctcgacggcctcgtcacttcactcgcatccgtcgatcgactccaccgtcgcttgcggctcgctggtgggccagcacaaccacagcaccagcaccaacacgaacaccacctcgccgtccagtggcagctccacgccacagaaccattactcgcccctgctaaccaactcccccacgtccactgccgcaggtactcccagtggcagcagcttaggtcctgggtccggtttgggatttgtctaccaggtcagctccccgacgcctccctccagcgaggtgctgaaaatcaccgagcaagccgctgcaggacaggatcagggtccagccaacagcgtagcggacgagacggatgagcgatcaagggcctcagtcctgcagaaggcttcaatgttcgaaaaggcggcagcagcggcagcggtatcgcccccagctcccatgcagattgcatccggttccccagcttcgggaggcggaactcgacgatccgaggcggagcagcaggaaatggactcgttccaacgcgagatcgatgagggcaaggtcaaaccgccgagcaacatcataagcggcagcaccaccagtagcaacaacaacaatacgacgaccagcagcatcagcagcagcgacaacaacaacctgcccgccaccagcaacatcgagccatgcgccatcagcaatcagacgaactcgagcggctgcggcacggacatatccgacaccacgtccgacgaactggccggcgacgatatggacgtcaggcggcgggatcgggatcgggaccgggatctgctgggcgccagcgattcggagctgagtcgctgctatgtgagcgagacgagttcgctgaccggtggcctaacggccggcggctacgagaatcccactttcgcgcactttgcggccaatgccaatcgggaggacgctgtttcgctggcctccgacagcgtttgtctcggccagccacgccacgcctatgtggatacctgcagcgacagcggcagtgccgtggtggtgatctacgaccaccagattcccaacacacccgacattgagttcgtgaagcagaactctgagattgtagtgctgcggactaaggatccgcagccccacgcgctgcagctgcacgagatgcgcgagctgcagcagttgcccgccaatttggccggttcgccggactcctcgccggactctgccggtggccaggcaccgccaacagcaactgtggcgcccgccaagcagcgactctcctcgtttcgcgccaccagtgagcagcagttgcagctcctcggacgcggtagcccgcaaagaggtaaaacacccagtgagcaggcggtacaaagcaggccacaggaccagcattttccacagacacaacagcaggatattgatggcagtagtccaccagtagaacttgcaaggcgccagctgccccccaagcccaccagtttgagtatttttaacggccccgtgcccactgcgggcgataggcctgtcgtgccgcgaaagtcggactttaaggctgatctagatgctaaaatacgcaggcaaaagcagaaggttaaacagcagttgcagcagcagcagcagcaacagcagcaagagcagcaagaaacgcagcagcagcagcaagcaccacaagaacagcaacactcaccacagtcgccccaaaccagaaactgtaatgtcactaatcaacaagccgccaatattactgcatcagcatctgcatttgcaaccgcaacagcatccacagacccgtacccgaatccaaatcatagaatgccaaaccaaaatcagacagccacatccaatcacacgcagtgcaagacgcccacaatggcattgtcaccgtcatcacctcgcggccatttgccattatcatcgtcatcgctatcgtcattaccattaccagccaccacttcatcaccatcaaatgcccggccatcgatgttgcccgccagtgaccgaccacccgcccatccatatgtgtgctccaatgccccagccaatccccaccacgccaatagcatttccaatgccaatgcccatctcaagccgtgcattacgccccggccggcttctttgtcgggaggagcagccggcggtggctccacgcgcatcgggcgtcgatcgtccattaatcagtccaagccaccgccgccagtcagacgcagttcgtcggtgacccccagtcccaatgcctcggtcgggctgcagcagcaaccacagcacgcgactctgtcgcagcagaatcaccaactaagcagctccagcgagcacttaccgccgccaccgccattcatgctggacgccatgccccagattcccagctcagcgctgaaggtatcggagacggtaagagccctggcagccatgcggcaccagccagcatcacctgtgtccctcagacgcatgcagcagcaacagcagcagcagcttcagcagcaacagcagcaacaggtgcagcagcagcaacccctattgcagtctgcgcacaactcccccctcaaagaggacctgaccgtgtactacgactcctacttggatctgcacgcctatgcccaggccttggccagcggccaacagcccggcggtcagcagatggccaaccagcaacgctttaccctccagcagcaacatcagcatctgcatcagccacagcaaccgcctgtctaccaagtcgatgccacgttccgcacctcatcaccagccgcgggcggagggggtggcggcggcatatacgcccagcccaaactggtcaacagcatgtccagcttccgcaccagcagccccagtcccaacggacatgctcacccactgccaccgacacagccaaaggcgaatccgaacctaattgcacagctcaatgcacgactcagcggcaaacagcagcagcaccaacagcagcagcatatcgaggggatctacggcaaccagcaggcgcccggaggagagtcgatctacatgcggagtggcctgtccatgtcgcagccgcaacagcagcaacactttgacggtaaatctgaacaaatccagctgcagcaccagcaacagcatagaatttacgctagtttcggcacctcatcatcagcaatgtcatccgctcatgcggccaacagcagcactaaaccgtccattctaacaccgaccacctctttcaatgcattgcctcacttccccctgtcttcatccacatcatcgttgctctccaaagtcagctcattctcgaactcttcatccgcatccccaccgacaacggcagcgacctctggctcggccagttcgcattatcagccacctcagccgccgaatgcagcagttgctaacagcaaagacatggccatctactcaagttcgtttaccaaaaatccagcagctgcgcaatcgccgaacatgagacaggctcattcccatcagcaccaccagccgccgcagcagcagcactacacctgtccgcctcctctggaggatcccccaccgccgcccatttacgccgccggtgcatcggccacgatgcccaagaagatggcccgtccgcccactggccagaacgcgactcactcgagcgcctatgcagcagcctcgtctacggccacgctgcccaagaatatgatgcagcagcagcagcggttgcagcaccagcagcagtatcaacagccggcaggcatgggcattggcaacggcaatgggcacctaggtcagcgtccgcagttgccgctgccccagcagaagcttagagctgcacagcagcagcacttggcggagcagcagcatcagcaacagcaagaacagcagcagcaccaccagcagcaccaacaacaccagcaacgccagccgcccattccttcacgccactcaagtgtgcagcaaaagatattcgtatcaacgaatccattcatacagacaacggccgtcaagtttcactcgccctcggcctcgcccacgtgcggctcgcccgttactgggtccttggctagcatttatgccacaacctcgcgtggcggccaccatcaccagcagcagcaggctcagcagcagcagcactactatcgcgatgctgccgggggcaacagcaacggcggcgctgcctactataaccacaatgcccatgcccattcccaggcacatcatccaaactggcagtattcgtgccaagaccaaggccgaattcctcgagaatctcaacgcgaagctggcgaagcagggaatgtctggacgagcatttgccgtgcgaaatctcatcaacagcaaggccctgatgtatcaaaatccgcaaaaactatcgcgacccagtgcgcaataccgtagaccacccacctatcccaacaccagcacaaccaccaatgccacttgcgaagatcagtgctaa

SEQ ID NO: 20115 - protein, 1920 aa, DROSOPHILA
MIIRIPSIAGASKEIGTALTRVCLRHKAVETRLKTFTSTIMDCLVQPLQERIEDWKRTVATIDKDHAKEYKRCRSELKKRSSDTLRLQKKARKGQTDGLQSLMDSHMQDVTLRRAELEEVEKKSLRAAMVEERLRYCSFVHMLQPVVHEECEVMSELGHLQEAMQSIALVTKEPSVLPQASEELIHDAKASINLYPESPGGGSGSQGGGCSNSLGSRKSSVCSISSMNSSGSSNSPGHHHYPRSLSQTSNATNQTANVSTWPPHSQDGVDTLPPTADRPHTISTAYEKGHQRPPLTVYTFQNPETIHESGSCLNNGTAAPNGQPLSGQATPATQKSPAASLSRPPLPVRCSSLERPLSAQSNHRQGSGNNLLQRQCPSPIPAHITKELSAAHHAQQQQQQQNQQPQTPPTYVNMSELATMAALKQTNQQQKPSTPPLQQQSSIDSTSSQHSNDSTGSHQLLQQQQQHHQSQQNHHSATATRSHSISSTASSLHSHPSIDSTVACGSLVGQHNHSTSTNTNTTSPSSGSSTPQNHYSPLLTNSPTSTAAGTPSGSSLGPGSGLGFVYQVSSPTPPSSEVLKITEQAAAGQDQGPANSVADETDERSRASVLQKASMFEKAAAAAAVSPPAPMQIASGSPASGGGTRRSEAEQQEMDSFQREIDEGKVKPPSNIISGSTTSSNNNNTTTSSISSSDNNNLPATSNIEPCAISNQTNSSGCGTDISDTTSDELAGDDMDVRRRDRDRDRDLLGASDSELSRCYVSETSSLTGGLTAGGYENPTFAHFAANANREDAVSLASDSVCLGQPRHAYVDTCSDSGSAVVVIYDHQIPNTPDIEFVKQNSEIVVLRTKDPQPHALQLHEMRELQQLPANLAGSPDSSPDSAGGQAPPTATVAPAKQRLSSFRATSEQQLQLLGRGSPQRGKTPSEQAVQSRPQDQHFPQTQQQDIDGSSPPVELARRQLPPKPTSLSIFNGPVPTAGDRPVVPRKSDFKADLDAKIRRQKQKVKQQLQQQQQQQQQEQQETQQQQQAPQEQQHSPQSPQTRNCNVTNQQAANITASASAFATATASTDPYPNPNHRMPNQNQTATSNHTQCKTPTMALSPSSPRGHLPLSSSSLSSLPLPATTSSPSNARPSMLPASDRPPAHPYVCSNAPANPHHANSISNANAHLKPCITPRPASLSGGAAGGGSTRIGRRSSINQSKPPPPVRRSSSVTPSPNASVGLQQQPQHATLSQQNHQLSSSSEHLPPPPPFMLDAMPQIPSSALKVSETVRALAAMRHQPASPVSLRRMQQQQQQQLQQQQQQQVQQQQPLLQSAHNSPLKEDLTVYYDSYLDLHAYAQALASGQQPGGQQMANQQRFTLQQQHQHLHQPQQPPVYQVDATFRTSSPAAGGGGGGGIYAQPKLVNSMSSFRTSSPSPNGHAHPLPPTQPKANPNLIAQLNARLSGKQQQHQQQQHIEGIYGNQQAPGGESIYMRSGLSMSQPQQQQHFDGKSEQIQLQHQQQHRIYASFGTSSSAMSSAHAANSSTKPSILTPTTSFNALPHFPLSSSTSSLLSKVSSFSNSSSASPPTTAATSGSASSHYQPPQPPNAAVANSKDMAIYSSSFTKNPAAAQSPNMRQAHSHQHHQPPQQQHYTCPPPLEDPPPPPIYAAGASATMPKKMARPPTGQNATHSSAYAAASSTATLPKNMMQQQQRLQHQQQYQQPAGMGIGNGNGHLGQRPQLPLPQQKLRAAQQQHLAEQQHQQQQEQQQHHQQHQQHQQRQPPIPSRHSSVQQKIFVSTNPFIQTTAVKFHSPSASPTCGSPVTGSLASIYATTSRGGHHHQQQQAQQQQHYYRDAAGGNSNGGAAYYNHNAHAHSQAHHPNWQYSCQDQGRIPRESQREAGEAGNVWTSICRAKSHQQQGPDVSKSAKTIATQCAIP

SEQ ID NO: 20116 - DNA, 2607 bp, DROSOPHILA
cgtgaatttcccactatttttcaacgtgcgtcgagcaccttcgacagaaccatttcgaaaccgccgtgaaatctcgcccgggtttgtttggccacgctgataaccaaaaagaagatatgcccacacccataccattcatagacatacatatgtatgcacctttgtatactgcgcaccccatccattcgtaattctccattaagtattgttcacctagcctagtattagacctaagctgcattcgtaggctagcaaagtaaataaagtatatatgtatgtatacgaaccataaactccatctgcggcttttccactggaggtctgaggtggaggtctcccgtaaccctacgcctcctaggtcacttcacccgactgccgtggggttcttgttcttgacttatttcgttggtatatcgtttatatgccgggttcttacactttcatgttaattgcgcgatcatattacatctaaaactatatggcacttttgcgctataaacgaggcatttcacaaaacagactgagcaataataagtctacaatcatatatttctatgaatcacctataaaataatggaagccgatttaaatatgaactttcattacccatttcgttgttatgcctaaaatcgttttaaatttgatagggtaatatatttttattatttctaaagctagtattctttaatattatccattcgatagcggctatattctaacgcccgcaactgtatttttatctacaagtcatgagttcaagccgctgtgctttgaaactcaatccctcagtcgcttcagaagtgaggcatctcagattaccatattgctcaactgactttagtgttatgtacatatgtatatgcacattgtggaaaacacttgaccatcccatttccacgacgcatattgccgaccacgtagctagaagctacctccaataaaagcgaatctaacctagaatgccgcagaccaattgattatgcaacccgaaaagacgcagttaggcatcaattactttaattggacatttattgcagggtgtgtagagagacaagatgcagcgcctctactccagatcttttttgggggaaagctcactcggagcagccgcaggcggatttcttgtcgccgccgcacttgcagtcagatccgcagttgcaggatcccttggtggcctggctggcgcatttgcatcctggaaagaagtagaatttaaaaattagtacatgctggtacatcctgtaatccataagccatataacattagtgttccattttataaaacgcagttgaagaacttcttttcttagagagacgaactcagagatttcactttgcagatagtttcagcttgaatttttatactattgaatcaccattgaatttttatactagtataataccatttctctgaaagatctgtgatatcctaaaggatcacaccagactgcgaacttaccgcttccgcatgggcaaggcatcttgattgagttgtatttcctcgaacttgttcacttgtttacaaaaaaggtaggtatgggctatttaggcctttagttgcactgagatgattcacttgattttgctgctgaccacaactgatgcacattggccagatgctctcggttttatacattttggaaacgcggctttacacacgggtctttcgttcgattcacctcttttgcacacgccggccggctccaaattcgagtggagacgtgtgcagaagcttttgttctgcccgcgaagaattggttcggttctccactttggggacttgtatgggatgcaaagctcttggtggggcacatggggcatgcgcaggcactcttacttgcgtaccacatatgtatgggggtggcggtgggcggtggggggccggagttctgggtctcttatcggaaccagaggataggacggcctgcagcaaagagctagtcacatcgggcaccacatcctgtcctgcaacgaattccagtgcaacgaaatgcaagtaaatactgctacgcaatagttgggactcccacagatcctttggggccatcccaattaacgggtatatggatgcggtggccattactggcttttccctcgattctcgcgtgtgggtggcaagtgcagtgcagataaaatcgataaatccaagccaaaataaagcgaggaaaatccaagagcaaagcgcgtgaggtgtacgaggtggaaaaaaaaacacatacaaaacaacgagtgtgcgggaaaacaaaacgtcggaaaatcgcaaggcgagtcggttgaagggggcgggccaaaggtgtcacacgggtccaccaggacaatcaagcggaagtgagcagttacggctagtgtgtattgtgtgtgtgtgtgtgtgtttgggggcggatgggatagaaaaccgttccgaatgggacacttgtcttcaaagcaggcctatttataccgcacccggtcatgggcaatcataatcgtggcgataatgatgaggagaggctggtgccgatcagtgccagtggagcgaaaaatcaatacccttccttgccacatgtctaaaattagcgggatactctcacacacattgtttgccgttattaaatatactattaaaaa

SEQ ID NO: 20117 - DNA, 343 bp, DROSOPHILA
gtgcatcagttgtggtcagcagcaaaatcaagtgaatcatctcagtgcaactaaaggcctaaatagcccatacctaccttttttgtaaacaagtgaacaagttcgaggaaatacaactcaatcaagatgccttgcccatgcggaagcggatgcaaatgcgccagccaggccaccaagggatcctgcaactgcggatctgactgcaagtgcggcggcgacaagaaatccgcctgcggctgctccgagtgagctttcccccaaaaaagatctggagtagaggcgctgcatcttgtctctctacacaccctgcaataaatgtccaattaaagtaattgatgcctaa

SEQ ID NO: 20118 - protein, 40 aa, DROSOPHILA
MPCPCGSGCKCASQATKGSCNCGSDCKCGGDKKSACGCSE

SEQ ID NO: 20119 - DNA, 14112 bp, DROSOPHILA
aaggaaaaatattagagatatacattatttgaatatatcgttatttatttattttagtttaacttaaaaattgtcctaaatcaatttaaagtgcatcagcctgaaagtaggcaagctattttgcaaccgacttggtggtgaagccttttcatcacggccaacaagtatgcaatggttttacaggcttagagcattcagttccatgttcaatcgacaattcattttaattgaattaccaaattgctaatgaaaaaatcgtattaattcgattttaatttatatattaatttcgattttattaggctttttctttacaatttgttcggcctgcgttctcttaaaatgcttttgtatagtctcgtcgctcttcgtctctttcacaactactactcaatgctcgcttttgatgactttctttcgcaccttttttatcgcgctctctctgcgcctctctcttttacgcttatagccggcaagtaaagaagaagcataaatagaaatgaaatataagtaagcggaatgcaaaatactttttctttggcgccttcctcctcacacacacacattcgcattcgtatgtgaaaccagaaagaacaatatagtattcatactgcacctgtatatcgactataaagtacgctgtacgttgtatgttgtattttaccatatgtatagcttatgtgtttccttttttaatgcggtagcctaggatgttgaaaattattttaattacatttttaaatccttttaaaaagacccttggctcgggactttaaattcactatttatttatttttattttttctcacttatacatttacccaacttgccttcgtgactatataccctgtgtagttcacatatagagggtataataaatctcccaccggcttttcttgtggtggccaacgacgtcgactgcgctgccggtggctctgcattggcatttaggcatttatgcccacggcagtcgaacagccgcttcagattctcgtcatcgctcgtggaaggcacatcgcaaacgccgctctcgttctcgaatttattgtgaaagctcagccgcccaccgcccgccggaaaagtctcgcgagtgtcccgaaaaaatcgagttaaccccccaaaaaaatctatcatataaaatcctaacaaaatgagcagtaagttgggtcacagccaaatccagagcaagcaaaaaagcaagaaaataaaagaaaaaaagagtgtgtgtgtgtatgcatggctaaagctggaaactgagaactgaaaagtcgatagaaaacagcctgccctaagttaaagctcctttggcgtttcctgctaatcaatcaatcaagcaacaaatcgcctatccttccatttcgtaacactcgcttcaggttggagttatgcaaaatccgaattcgatttgaatgcaaaatcagaagctgaatcgaaatcatagcgataatcccactactataatatatataattataaatcgagcatagagcgcgcgcgatgttggtgtggctacgacctttactgaccttcactagcgtacgactctgcccacggccccccgcctcatcaccatcaccgtcaccaccccctgtttcgtcgctctctcccttcgctcttagtttctctctattttgaaacactaacgtgcaggaaaacatttcaaaaatgcgaacattgcactggaaaccgaaccgctgccagtcagtcgtctggcatatttgtttgtttatgaaaagtttgtgcacaaaatcgctgataacgtgaagctcacataaccttcaagaagagagagagagagagagatagatggggagagagagcgagcttacagttatgttaattccgttttgttgtgattccattacatcgatttctgcgctttgtacctgtcgcaatgctgggtggtgacccagtaatcccacgtagcgccattagcagccgccttatcatccatccgccttatcagcaatgcgattatttccgcatctgcagcccattgagattagcggcccattaagggatgcacttcgccttggcatttttcacacgcattcgctgacgtccggcgatcttgtttgaagcaatacaatattcacaatctatatgtggtacaccccatggatgtgtgattctatttttaagttcgatatgtatgggtcggaattatggctggcgacaggcgctaacaagttttgtctgtttcgaaaataatattatatttgcctttcaaaaagttttccacgcccgagaacattcttttgtgtcgcatcgccatcgcccactagtaaagtgtgtgatctctcacatttttctctttccttggaaatgccattaaatctgcacggatttatgcccgcattaatcatcaacctacggccggccacagcagctgccttcaattttctagcccgcagggatctccagcatctcgcgtttcggtcatctacagacacatccacatccacagccacatccatgaatccatggtgattcaattttctaaaattgctgcgtcgcctgtaccgaagcgatccaatgcatcgcctaccaaccagcagatacaatctcatttcatttcacttcgcatcgccggcgctatttttagtggcctgctctttcggatacagcatcggcatccacaagatacacacgccgcctgctgaggtttcccgcagaactcgttccgcgccttgcactcgccaatttgtgcgttggtgtcgccggcgatcctcgacacgacttcctcccaagaccactcccttcattgcataccattatgcacttccagcgtacaggccaacatggataactcaaactctatgctagacataaccatatatgtagaaggtgatgtttggtatattataagctacttaaacacacaggataacctactaactatacagaatttgcaatagagttattgtgccgagctagccaggcttgactgtacttcatttcttgtgcgccggctgcaaattatgcgatgctttaatggggaccctgacaaacgggtttcagcgagggaagggatgtccccttcaaggtcttggctgcccattcatctaattggtgaccccattcatggtggtatctggcgttaatctgatctgggcctcatcacgcctgaacgggaatttgttcagtcacttgacccagacccaaaagctcaacccgcagcccacgacccccgaccttttttcccaattgctttggcagggcgctttatcggctttattgtgctacggccatacgcaattgataaaagcgggtagtagaaaacagagcgcaaactctgctcagcgaagagagcgcttaagagagagttaaagggagagcatatctccgaagagagctctctctctccctacactgtcaaaaagttaaggaattttcccacagttagctgtcacataaattgctaatttacctatttttaagtttacgtgctaagcatatgtttaagtaaaatgtcgcgacgcattcattttgacaatttcaacagttgttgaaatttttgtatatttagaccgagtgttgtttatttaattttgtttaaatcgccaaatttatgacgattgccgaaaattccttttcaccgttctgccacataagttttattgttttgtgaaattttttgtcatttttcgcacacacatccggtaagtcagaagttattaagattcattctagttttgccgaaagtaaatgatttcatttttattttaggcccaacgaatcatttcacaagcacacacaaacgcaaatagaaaagaaagcatctgtgtatctctcactcgcacacacaccaatgcaaatacaagacccagtcacactcacccacacacacacacacacacacattaaagaatccggcggaggatatagatcgtcctgatctcagtccaaatcaagatcaagatcaagattaggatcaagttcagcctagtgaatgcatttgaatgccgctgattagctcgctgtgcagcagttaccatcagaatgcgcatccgcatccgcaaatgtgtccacatccgtatccgcatccgtatctgactgcgagaaggtagttgttgttatccacctacttgttgtatcctacgcttcacagttccttttcagttcgcttctctaaaaccaaacaaccaacaaaaccaagcccatgtaaacagaactctaatctgacacttaacccgactaaagttagcacaacgaaatgtatcaagaatataacatatatatacacacttgtatatatatatattcatctatctatcgatttgtagtattaatacccgaataataatgttctaaattccatttacttgtcaataatcaaaattggaaataaaaaataattcgtacatcttctctctctctttaactctaatgaatttttaattatctaaacagcaaatctgcatggtttaataatttatagaaacgagaatttcttcgaaattcacttgtaaattgtgtaccatacggattctagaactaattccccatcgagtgagaaatctgcaccgaaacaaaaaaaaatcaaactcataatcgcctcataaacgtgtatatagatacattcatatgtatatcctagccagcgccatgaataattatctacagcttttttgcccaactaaatgccaactacgcaaaattctaattgcccgttcggacgcgcctgaaatatgctcagctcgattttgccaattcattaatggatctttattattttttttgtttttttttgttttttgcaattttatcctcgctaacaaagcaaatgaattttggttgcatgtgggcgatgctgacgcagttggagatctgcacacaccacttgaacatatatatctatatatctgttctatttcgaatggggaacccgaacaatcgcttgtttatttataatccgtaacgttttttgctgaatccgaaactaataaatacagccaactgctgcagtgaaacgtgcagtgcgcaacagtatctttttgtgttgtaacccaatttgtatctctgactttagctatatatctcatctctcttggctactccatcgatagcgtttaatttgcaattgtatctccatctctcgtttcgaatagaattcgcttgggtgacgctgacgacaaatgacacgtactcactgggtgccttggtcttggcccactcactgaaaagggccaagaccgcccaccagctggccgttctggtcacgcccaatgtctcgcaggcgatgcgcgaccgactgaaggaggtctacaatgtggtgcaggaggtcaatgtgctcgactcacaggatgccgccaatctggcgctcctctcgcgacccgaactaggcgtgaccttcacaaaactccactgctggcgcctcgttcagtttgagaagtgcgtcttcctggatgcggacacactggtaagatatgaagtattccaagggcacaacatgtaacttgtgagctaacaaagacttaaataactactttcaatttgatttcgtaggtcttgcaaaactgcgatgagctcttcgagcgcgaggaactgtcggctgctccggatgtcagctggccggattgcttcaattccggcgtgtttgtgttcaaacctagcgtggacacctttgcccagatcacagagtttgccgtgaagaatggcagcttcgatggcggtgaccagggtctgctgaatcagttctttgccgactggtcgacggcggacattaagaagcatttgccatttgtgtacaatgtgacggcttatgcctcgtactgttatctgcccgccttcaaacagtaagttcgctatctctgtggaatggaaaagcagtttgtaatggcatttgtttgcttgcaggttcagagataagattaagattttgcattttgccggcaagctgaagccctggctgattcagttcaactcggaaacaaaggtggccagcgtttcgtcggagtatgctcatgcccaggatttgattcagctgtggtggaacatcttttgcgaaaatgtcatccagtccctgtccaccgaaatggtaagtgctatttatacaatggataacgcacattttggaaatttccagcgttacttggtgcccccaaatgatcttatgtcttcccttgtttttgaacgccagactgaagctaaccctttgatttttactgtctaacccaatgtatttgctccaaatctcaaaaacaaaaaaccctgcttcgttttctaacacgctaatcgcaagcaaacgccaggaaatgttgctagtgatcgacccgcgggagaaatggcccaagggtccactactttagaggtaagcagatcttcaattgccgaatcgcacatatcgcaccagatctgtagataccttgagcacagccctgtgtaaatatcttaattataacttaaatatttatttatttatttagctaacgattcagtcatctttctgtgcgccaagtaaataacccaagcaaacaaactcaatttcgatctatttgccatttgttttttgccgatagctggcctcgatatcgtttcatttcccgcctcttttctatcaactcggtttgaatatactttgttttcgttttatttatttttatttttttgtattggtttgcaattttctgttgattttttctcgattagcagccacgccccagagtaacccattttccttttttttgtatattttctttcacttttttggcaccataggcagaccaattctcaatttatttcttctgtattttttctgtaatatttgtgcaactgtgtgtgtctctcgtgtgtgtgtgtgtgtgtgagtgctcgtcttagtgttcactttctttctgttttcttttcctttctaatttgcatcgatttggcaaagagccaggaaaatgtttcggtttacgccatcgatagatggaaatgattcaaatcaagatggtcggttgcgggtgatgccaaaaaaaaaactcaactgaatcattagatatatcccataacacaaacaaacacacacacacacacactagcacgcattcgtggggatctcctctctcttgatacacacaaagaaattttgatatagaatggaaaaataaattttatcttattccaaattcatttaatttaagagaaataaataattttttttatattattaatttatcaaattttgctgtgtgtacttttctttttctccctttgttatgttcgtgccgttgggttctttattttttgcaaattgatttacttttcatttactctctattttttgaactctgctctcctgtgttgcgcattctgtaaatttatactttgccataaataatacgtggactgccgtatcgcatataactctgtatatctaacattgtctcagtgcctttgcctaaatataatacgcacgcaaagcgaattcgcggcggatgagctgcatcagcggcagcagcatgagttctaccagcagcagaagctgcaccaccacctgttgcatgtgcgccagttccgcgatccttgggcagattactatgagaatctggagaaggagccgcaggagcaggagcaggagcaacagcgccaccagcaccagcagcagcaccacaatcccagccagaatcacagccaggacaatgggaatgcggatgcagctgcgcatgagaatgatagcacgattgcaaatgcaaatgccactgactggcatcatgacgatgcatgccacccacctgcgccgacgaggcctctgccccaaattcaaaaccaagcccacaatgccaatgccactgccaatgccgaagacttttcattcgtagatgtgaatagcaatgagctaaacatttcacagccacctgaacacgcctcctactcctccgacacagccacgcccactgccacagccacgcccactgccacgcccacgctaacgcccacgcctcatcattccgtgcatagtcagacagtagaaaaagcgacaagccaccaacaagaacatgaagttgcagccacaacgccgcctgaggtaaaggcaatcaatccaaacccggcctgagaactacacagaaaaaaaaaattccctaatggttgtatgggtttttcaaatccaacatagccctaagcaaatgctagaacttattatttatgattttcctggcacctcatgcaaaatggacttcatgcttatatatggaaatatcagaatatttagttacaaattggaattttttctgtgtaggaatcccgattcccaaccaaacaaaccaaatgcattggataacggtgtgcaagtgtaaaagtgctagtccaagtgatagtgataatgtaatgtcctggttttcgtctagtcactgttttgcatacgaattgtcattgtcgtcttcattgtccttcggtcatcgttcattgttcatggtccttggtccatggttcttggttcatggttcagcgttgtgtttgtggcctggataaggggcatttgttgatttattattagttggcctggcacctggtcaagcattaatgtagatggaatatggggggcctcgctaccctacaacataatcaacatcatcatcattttgaaacccaaacgcagcaaaagccggcactccatcctcgtgttgcatgcgcattttatagccacctgcatctcctgcattcggcccactttcacatagtaatctgcccgagagttgctgggacacgcattgcaaacgcaagcagccggagctcaacgcgtcgtatacttgatttatgcctcgagtagcacttctgttgtcacattaatcatacgccctgtgcaccgtaactaacatctcaatgttgtcaaccgctcgtctgcgtactagtgctagtaaatgtttaacccgtagtgcatgaaatgtcgtaatataccacccgactgcatatgtatattctcctcccttgctccatcataatgcaatcaagctcttaatcaatttaattaacatactttcaggcgggtctggctggtgctctgtcacagctacgcatcggtcagcagcgcactcccgaacaggaggcctacgagaaccagatgcgccgccagtgctgggagtctggacagattgactacaccggcgccgattcgttcgagaatatctggaagaaaatatcgcagacgctggagaggaagaccgataaggagtcggaagaaactggtagctcatagatacaaaaccgaaactaaacagaacaaacaaatgcaaatcgttcgttattcgtcgttttgttgccatttttttcttgtacacgcgcacacacgtacacacttaacacccaccccttctccaccctaaaatgaaaaccccaaacacgcacacaatcgtattttatcccccctccctccccacctttgggaggcaggcgaactgttgccaatgtcaaggagccgccggtctaattgaaatttaaggtttggccaaaaaatgttgtcgaaacgaattcttcagagtgtcataaatgcaatttttatttgccttccctgttacagccacccacccccccgtccacacacgcacacacacacacacacacgcgcgcatcttgttaaaaagaatgagcgagaaagcagagaaattttaattaagttttcaaattaaactttttgcactgctgctactgctactgctgctgctctcgacatacgtgatgtgatgcgatgtgtatgtgggcgacacacttggcacagttgccccaatgccctgcccctccccctgcccctgccaagcccttggacaaaatcgagaaaaaatgaggcccggccacaaagttttacacttcattgtgttttaattgaaatttttgtactttcacccagtcgtgtgcttaccgatttatggcgatgactttccagctcatctgcatcaaaactcattgtggcataaaggccatttcctgtccttgccccacctatcccacccctgactaccctttttccctctgccgcccccaaacacatatgtacatatgtttttcctatgaataaaacgcaaacaatgagtgtatacaataactctggaaaagataaacgaaaaccatttaaaataaagtaaaaatcaaaaatgaaattgtagcccacatgttgtggctattgtgtatatgtatctatgtgtgtgtgtgtttatgtgtgagttagagtgtgtgtgcgaagtgccccgcccccttttcgaccacttttcggatcgaattcgagctgagcgttaaatgtttgtttcaagtgttttggcagcctaaaatttctatctatatacgtatatataccatttatgttataatttacattttgcaaatattgtcgtaatatttattcgagaacaacaacaacaagaacaacaaagaaatcccaaacaacacaaacaaaaaattttcaatttatgaaactatgttttcgaatttgcatttttattttagcaattaagttaagttacgttcttctttcccatgttgtcaccttttcagttgtgtacttttaagccatcttagccatggcaagcattgtgtctaagtcttgggtcttagaaccatcacatagccataagagccagcaccattcacccatcgcatcttagccatcagccatcttcagccatcaccagcaatacagcaacgcagacgatgtagctgaatcgaattaaaactactgtctcgttacccctaaccacatttacagataatgataacgatagtgatcccgctaacccactaagctcagctcgattgctaaacgaagccgccagcatactgctgcatccgcccgagaaatcaccaacttcaaaggcgatgaaagcgaatggggcgactgggaatggctcccatctcgaccagtcgcatcccaccaactccccagcaactaacaaacagcctgcgaatgcttcagcttcccccaatgcctccttgaaacaaaatccacagaagcgacaggagaaaccgcagccccaagcggaaccggaactggaaccgagaccacaaccacaaccgcagccaacagagcagcacatcaggatgcagccaggcggcggaaatggcagcgtctccaagagcggcaaacagaggtccgcacgcaagttcaaatagcaattactgaagctgctgatgcactacagctgcctgccacacctggcgtgccgctgcaagtcgcagtatcggcggctggaacccaatctggataccgaaccccaacccgtccacgtctaaacccgacgattgatagacagatccgaggaagtacaaagcgtatgccacgataaatgctgtacaaattgcttgctaagtggctcttagacgaaagtaaagtaatcaaatcgaaacgaactaaatttatatatttatattaaattattaatgcaacaattatcagagcacacaggatttcaaaagtatataaataggttttcattaactttatatcgcttgagtctttgaaagtaaatgtttaaaagagaaaactcttttaaaatgcatagtaggttatatttcttgaggccatatagctccacgacttttttgatatcgtctaagggtcccttggtttacccaaataccacgctgccttacaaaggaaacacatgcaatatcttaaacttagcatatagtgtaagacaagagctaatactagatgtaagccgcaagtgctttggataaccctagatgcaaacacacactcaggagcttgggatgatatcgccttatatgccatatatactatacacacatgcatccacacaccacagagctactgacctccgcggacatcgaagacggtaaggtggagttcgacaaggccacgggtgccaccaccacgtacaaggtgatcgagggtggctacgaggtgatcaccacctctccgcagcccaatggaaccatcaagacccaggtgcgaaccttctgggatcccaagcccgttagcgaggaggatctgaagaaggagcaggagaacaagaagctggtccagaagcgtctgggcaaggagattcgcatcgatgagcgcaccaccatgctgacccgcgccatcgagggtggctacgaggaggtgtacaccaccatcaacgaggatggaactcgcagctctcgcaccaaaaccttctacgactccgttccaaccgaggtggatgagaagacggccgccaagttgaacaagaacaagaagaacgtgaccaggaagtcgtcggtggactctaccgattccacggaatcctcccgtcgcatcgtccagaagcagcagaagaatctggtgcagaactatgatgagcagaccaactccaccacgacatcagagcgcagggtgtcggtgactcagaacatcgagatcaccgagaacaatcgcaccgtgcgcaagaactcgctgcaggagcagaacgtcaaggctatcactaccacctcgaacacctcgtccagcgacaagaagcagaagaagaagcccaagtcatcggctccaccaccacccgctgatttcttccagaacgataccacctctgtggcctcgaagcgtgtgcccggcggtgtggagtacacctattccacgcagctggattctggcaagaccatcaccacctcgaagactgtctacgaggaggaggaggtggaactcaccgaggaggagatccgccagtacaagaagaccctgaaggacgccgagaagcacaagaacgtctccaccaccaagaagctcaagtccgagtcgggtaccaagaagatcgttccttccgaaaatcccggagatgtgaccaccgtggagaccattaagatcgaaggtggcaccgagtaccactacaccaccgtgacatccgaaggcatcgtgaagaaggccgtgaagaccgtttacgatccagtgcccagccagaagtccaatcccgatgacaccgacgaggaggagattatcgaggagtacgaggaggagatcatcgagcccggcgagaagaacgtcaagactatcgagaccgtcaagcagctgcccagcaagttcgagggtgaggataagccagtccacttcatccgcagctaggttatattaacccattttcttttttttcgcagaggaagtgaccatcactcatgagaggaaggagaagaaggtaaagaagtccatggtcattagccagtagagatcgccgcttgcccacaccgaaacacactcaaacacacacgacactcacacaacacacaaggcacaagaatacacacgaaaaaaaaaacaagcttatgaaatggccggaaaatagagaagaaaggccctgcgaagatcccgatcccaagctaattctcctgacctatttcagcatccagttcagttagttgctggcggtctttgcacgctactcgttagctttgttatcaattaccagctgtctagtgccctagaaatgtattacgaaattatccaaaatttattacaagaaactatctaacataattgtagcctcttttgttaacaacaaaataaaactcaagttttggttctaattcttcttggtcttcttcttcgtcggagtgctcttcggcttggagctcctgcggcagatcaggattagaactacgattggcaacaggatcacagcgagacctagacccacaatgtccagtaggtagaactggtaccagggtagatgtacaccagcggccaccagatgaggagcacctcggtgctcgatcacatagttgatccaatatatggccgtatccatggcaccgagtggtcgatcgcggaatatccgggaggccttcttaatgttattcctatactttggattctcaatcagttccatcagcagacctcgcaactcctccaccgtgactttccggtaatccagtcccagtgcatattctgcactcttaccctggttaatgttctgatgctgatcacagtagactggcattcccaatatgggaacaccattgtacaccgcctcctgggtgccgaagagtcctccatgggcaatgaaaaccttgacattcgggtgcgccagaatgtcgccctgaggtaaccaactttgcaccttaacgttagccggcaaattgggcagagattcatcttcgaatttccagagaacgcgttgcttcagactgccaaagacttccaggaatactttgagcttctcaggcggc

SEQ ID NO: 20120 - DNA, 1471 bp, DROSOPHILA
ctcgtggaaggcacatcgcaaacgccgctctcgttctcgaatttattgtgaaagctcagccgcccaccgcccgccggaaaagtctcgcgagtgtcccgaaaaaatcgagttaaccccccaaaaaaatctatcatataaaatcctaacaaaatgagcaagctactgacctccgcggacatcgaagacggtaaggtggagttcgacaaggccacgggtgccaccaccacgtacaaggtgatcgagggtggctacgaggtgatcaccacctctccgcagcccaatggaaccatcaagacccaggtgcgaaccttctgggatcccaagcccgttagcgaggaggatctgaagaaggagcaggagaacaagaagctggtccagaagcgtctgggcaaggagattcgcatcgatgagcgcaccaccatgctgacccgcgccatcgagggtggctacgaggaggtgtacaccaccatcaacgaggatggaactcgcagctctcgcaccaaaaccttctacgactccgttccaaccgaggtggatgagaagacggccgccaagttgaacaagaacaagaagaacgtgaccaggaagtcgtcggtggactctaccgattccacggaatcctcccgtcgcatcgtccagaagcagcagaagaatctggtgcagaactatgatgagcagaccaactccaccacgacatcagagcgcagggtgtcggtgactcagaacatcgagatcaccgagaacaatcgcaccgtgcgcaagaactcgctgcaggagcagaacgtcaaggctatcactaccacctcgaacacctcgtccagcgacaagaagcagaagaagaagcccaagtcatcggctccaccaccacccgctgatttcttccagaacgataccacctctgtggcctcgaagcgtgtgcccggcggtgtggagtacacctattccacgcagctggattctggcaagaccatcaccacctcgaagactgtctacgaggaggaggaggtggaactcaccgaggaggagatccgccagtacaagaagaccctgaaggacgccgagaagcacaagaacgtctccaccaccaagaagctcaagtccgagtcgggtaccaagaagatcgttccttccgaaaatcccggagatgtgaccaccgtggagaccattaagatcgaaggtggcaccgagtaccactacaccaccgtgacatccgaaggcatcgtgaagaaggccgtgaagaccgtttacgatccagtgcccagccagaagtccaatcccgatgacaccgacgaggaggagattatcgaggagtacgaggaggagatcatcgagcccggcgagaagaacgtcaagactatcgagaccgtcaagcagctgcccagcaagttcgagggtgaggataaaggaagtgaccatcactcatgagaggaaggagaagaaggtaaagaagtccatggtcattagccagtag

SEQ ID NO: 20121 - protein, 424 aa, DROSOPHILA
MSKLLTSADIEDGKVEFDKATGATTTYKVIEGGYEVITTSPQPNGTIKTQVRTFWDPKPVSEEDLKKEQENKKLVQKRLGKEIRIDERTTMLTRAIEGGYEEVYTTINEDGTRSSRTKTFYDSVPTEVDEKTAAKLNKNKKNVTRKSSVDSTDSTESSRRIVQKQQKNLVQNYDEQTNSTTTSERRVSVTQNIEITENNRTVRKNSLQEQNVKAITTTSNTSSSDKKQKKKPKSSAPPPPADFFQNDTTSVASKRVPGGVEYTYSTQLDSGKTITTSKTVYEEEEVELTEEEIRQYKKTLKDAEKHKNVSTTKKLKSESGTKKIVPSENPGDVTTVETIKIEGGTEYHYTTVTSEGIVKKAVKTVYDPVPSQKSNPDDTDEEEIIEEYEEEIIEPGEKNVKTIETVKQLPSKFEGEDKGSDHHS

SEQ ID NO: 20122 - DNA, 2801 bp, DROSOPHILA
gatttttaaatattactttccgcatgtattttttaaactttttggttctttttgtatgacaaaagtgatccgggctgttcggtacatctataaggctaatgttaacctaatcctaactgtttagcaattatgatttgttatagttttgctcaagtgtgtgcataattgctcctagacaaaaatctacctgcaatctacctgcaatggtgatgattatgataataagaagctcaagtatcttccaacgaaacatagcaaatagacatatcgagccttagcattaagcactcaacgaagggcaataacttcaaataaaacgtgtagaaactaaagattccatcgcttgttcctgggcggaagtggcgacgacggaaacgcctgtcttgcagcatgagcgatgcagtgcatccatgtggccgcacatgacaagttcaagttcacggcggacgacgtctataaattgatgttattttttttgcgcagccaaatttgacgggggctcggtgcccaaatggttggttaatgcccgcccagcaaacgtaatgctttgttacagaaataacccgcagtgatgtaaggcacacagagatctctctcggctgccaaaaatcgctctctcaatgggaatgggactatgacttgggtgtgacgatcgcctctccgacagcggaagctgttgatcgctgttggtttgcccgggggcacggtgatctcttatggttacacattttttaaatacctgcccggcgtttggtgcgacaggtgctaatgtggcgacattccgattggtcgcgccaatgcgattccgcacgtaatggctattaaattcggatcttctaaaatggaaagtttattgtgcgctcacagtacgtagatacggatgcgggtgtgcaaacatttggcgaactatagaggactacaataggaatatcaaattaaatttgtacgtcttcaatgatcagctgcaattggtcacaatcccattgggtgatagatagttctaggcacttttggggcttttgccaatgccgcaaaccttgcggtagtgctccggttgctccaggctgtcgataatgaactttcccaagtcgtatttggataccagacgaccgggggcctcgtcgtgcaagacggtataggcggtggccggctcatcggctatgtgcggcggcagaatggcgatccagtctagatcgcaggccttggtcaggtccagcatgcgctggtgctcctcgtttaggcggtggaacacagtgggcacttcgttgagcgggcgcaggagaaacgaggacatgacaatagagaatttggtcagtttggcctctttcatggccttgatgaggttctcggtgccgcgggatagctccgtggtagcctccagcttgttgcgggtgcccaggatgacggctaccgcatccacgccctcgataacgcgctggacatcctcgtagttggtcacgtctcccttgaccaattcaaccttggacttgaagcgttctggaactgtcttttcgctgcggtatagcaatttcaccgacagacctgaaaggaagaatacggtttaactggcgtttccgggtcttaaggtgtcacctacccttctgcagggcgtgatccacggcacactcgccggtcatgccggttcctccaataatagcaatgcgttgcataattcggatgattctttaattcccgtcgattgaaatgcgtttagtccagttgttggtttgcaaaagtgcagtctcacctgtgctccaggcgcaacttatctatcaaatttccaattcacaagtgaatccagcgcgattgcctcgcattctcacctcacccgtagcaatgaatgtacagtgctctttctaaatagtgaacgctcactgatctgaagcttctgtagaaggtaacaagatatttaacattcatttgtatttttattaagctacgaattattgctttaaaaatatcgtgttatttttgtctctatgcaaataatcttattttgtttattggttcattgcttctagttagcactgtactggcaaaacaatatgaatttttatatagattactgtcaggcataatgataaggtatatcatatctggcgataacaattttatttacaaacgctaatggtcatttgtcatggtgattaatattaaaattataaatacatttgcgaaaattaaaattaaggcggttgttctcagtctggcagccctgccacttggttcagtgtggtaaaatgcggcgcagttgaaagtttaaccgccaaatcgttacgcctgcgactccgattcctcggaatacggattatccgccggattcttgacccgtctcagtgttattcccagcttcagttcacttagaaagtcggtggtcaccggcttacgttctggacgcggcttaatgccacttatggtggctgccttctgatccactttctgcaagaatcgaagaaggattagatttccaatttaaatgggtgtctacttttaataccttcagctttacgccttgtcgaatgctctccaagaacgcatccctcgggtctccgccggtggaggcagctgaaacagccttgggctgtgatttctgcatcggaggcggtggtggaacgccggccatgccacttgatggaggcggtggtggaggaggagcgcctcccgcgccaaaaactggcattggtggcggtgctggtggaacacctgctggtggcgctggaggcggcggtggaacaccaacggatgccgctgtaggcggcggtggtgaaactggcaccggagtactactaatctgggttttc

SEQ ID NO: 20123 - DNA, 746 bp, DROSOPHILA
ctggattcacttgtgaattggaaatttgatagataagttgcgcctggagcacaggtgagactgcacttttgcaaaccaacaactggactaaacgcatttcaatcgacgggaattaaagaatcatccgaattatgcaacgcattgctattattggaggaaccggcatgaccggcgagtgtgccgtggatcacgccctgcagaagggtctgtcggtgaaattgctataccgcagcgaaaagacagttccagaacgcttcaagtccaaggttgaattggtcaagggagacgtgaccaactacgaggatgtccagcgcgttatcgagggcgtggatgcggtagccgtcatcctgggcacccgcaacaagctggaggctaccacggagctatcccgcggcaccgagaacctcatcaaggccatgaaagaggccaaactgaccaaattctctattgtcatgtcctcgtttctcctgcgcccgctcaacgaagtgcccactgtgttccaccgcctaaacgaggagcaccagcgcatgctggacctgaccaaggcctgcgatctagactggatcgccattctgccgccgcacatagccgatgagccggccaccgcctataccgtcttgcacgacgaggcccccggtcgtctggtatccaaatacgacttgggaaagttcattatcgacagcctggagcaaccggagcactaccgcaaggtttgcggcattggcaaaagccccaaaagtgcctag

SEQ ID NO: 20124 - protein, 204 aa, DROSOPHILA
MQRIAIIGGTGMTGECAVDHALQKGLSVKLLYRSEKTVPERFKSKVELVKGDVTNYEDVQRVIEGVDAVAVILGTRNKLEATTELSRGTENLIKAMKEAKLTKFSIVMSSFLLRPLNEVPTVFHRLNEEHQRMLDLTKACDLDWIAILPPHIADEPATAYTVLHDEAPGRLVSKYDLGKFIIDSLEQPEHYRKVCGIGKSPKSA

SEQ ID NO: 20125 - DNA, 4311 bp, DROSOPHILA
gaaagtttttagctgcaagaattgcagcacaacctttcgggtgaagtcacttcttgacgtgcatatgcgaatgcacgatccggttgacaacggagccaatacccttaagcgtctgaacagcaatccggttgcagcgggagtctcgaagaatcgctgcaagttttgcgataagaatttcgcactggaacgtgccttgcacatccatttaatgcagaactgcgacaagataccgccgtccgagaagcgcaagctggagttcaccgagctgaaccacgagaagaaagcccagctgccaaagatcggtggcaccagtggcattaaccatcccatgacgatgccccagaagccacagcaacgcattagtactattcccaaattaggtaactattgattgaacagcacgcgttcttagagagaaattattacaaacccaattcacagctccctcacaaggaacccagtccatggctccaccgagcgtgaaaaaaattcccaagaatgtggcgcatgccggcgtctaccgcactcccacaaagactgtgccctgccacatctgcaagcagtcgtttaggagcatactcgagttcacaaaccacagcctgacggtgcatggaaacaaccagcttaagaagatgaccggcagagaggatgcacagagtgcccacgattaaattaagcgattcgtgtgtagcctagtctatgtctaagttaagtgctgtggcgtagctgtggtccggtaacggcgcgttgtgaacagatcgccgggcagctgtgagttagcaatgcctggcatttcgagcgcttctaactcaatgtttcggttactcgaatgcttattaattgtacacttcagctgcacgactggactgctttgtgaattttttaggttttcgtatgacattcacacaaaaataactatcgtagtctaaatgacagtaattacattatattctaggttactaaaaactattttagttttgaattttgtgttttctttttttttttgttaaggttattgattgttgttcttaattgttttctcacggaacaaaaattgcgttttaaaatttgaatatttaaatggtcactagttagagccactttaaaaaaaaatagttggcagtactagcaaaagtagatttcgctgcttttcgctgagcgttggtttggccagtggaaatgcaggcagcattcagcgccttttatgcagctgccaaaggactcggactaatatgtatgtacgttttttgagggtgcacctgcattcacataatcacttgctcttcttttcgggcggtggcttcatgtccacaccctcggttttgatatctagcggtcctgtggcattgttcatttcggaggcatttctcgctgtgttcagatcatcgcccgctggtggcggctgctggagattctgcagcatgggcggtattggtgggggaaatttacgcaaaagctctgccagcagcatgtccacacgctgcttctggaacagtgtgccgctgttctcatccttcgctgagttggcgtccttcttatctgacttggatctatctgaaactaaagtaattcggtttattggcgaacgattataatattaaggaagtagcgtgtacttacaaactttattggaagagaagtcccacgtgtagcccttgttgggatggtagcgggcatagctactagcctcctcgaaggcggattgcaggttcaccacggtgttgagctgaaaacatagcgattaagcacacgcatcggttttccaccaggtgctacttacaatgcgggaattgatgacgttggcaagatctggcgccttgtagacggtgccaccaatgatgtagtaatcggcaatcggcgtggcttccgagggattatgacggtgctgcttgcggattacatacaggatgggctccgccacgtgcagcagtatgtattccagaccgatcatgttgctaaatgatggaggcgattaaactgaatcagaataaaaggcagaggacacctactgcagatgctcgggaccaaggcgctgcatccgaacagtctcgttgttgcacatgtgatcatagaagggattcgacttgcggcagaagtagtccatgacggtctgcgggctgagggtggccatcatctgggtgtcgtgccaggaaaggcgcaggtggtcattggtcatctgtcggctggccattgtggatgtggatgcacgtgcgccttgttgggatgtggcggtgggaagcggctgcaatgttttctcgcttggcaatgaccacgactaatttgtgggtcaatggcgttgagagagcttctttttccttttcctattcctagcgatcgctttgtttacaagctattttcggccgcacgctgtcgattggaaactgtcgctggcagttttttgatttatttgttgtgtaataattaatttagcaggccgtggtgcacgctgctctcgctgctccaccttcacgttaatactgtaagtgttttgctgattaactgtcctttgtagcgagcttttattgtgttttctactcgtgatttgccttgcgctcgctaaaaaaccgatttgtttgttattttcgcttggtcgactgaccgcagttcgcaacactgcacccagtcggctggcccgtgttggacagtgtacgttcttcgcgaggtggcagcgctttgtttggtgcagagaagaagaagcagcaggggagcgtctgcgaaaaagtttaaaaataaacaaattccgttttaaatcaaactgatattcaattttccgggcgcgcagtaaaatcgtagcagtccacacacatacaccaaagagagtccgtttctgaggcgaaatttgtgctctcacacggaacttggcccatttcttcgggacgcaatatcataattgggaatcatatcagttcgttctgttcacttcgtcgtggcgcacgggaatcagacgcccagcagcgcagagctctcgtaatggtaaccacccagtagttatctcaccgcaacaactagcaaatcaatagcaactccagaatgtacattgattcacccgcacagcgccaccacccactcatccgtgtacatatatactcttgagcattgcatatacatatgtaagcgccagtcaaggtcgtacgattcttggccaggcgcaaatacatgtatgtgtgtacgaaaatgttctttttttacgcctcaccttgattttcaactatgcgatcgtgcgtgtgtctgtgctgtttccatggctgccaactttgtttattccacctgagatgtgtatattgcaaagtcccgtgtaaataaccggctaagtgttttgtgtgccaggatcagtgttgggaaggctacgagcgttgtgtacctagcttaggtacaacgtagtttcgaaaatatagtacaaaattccagtaagacaatattttaaattaaaccgactttttgtgtgcatcatgtaaatataaaaagtacttattgtttagttaaatggataggccaatagaagttaggttgaagtattgccccaacactggtcagaatgaactgcgttccgaaacgactcaattctgttctcttctagattgtcgcacactttataggcggatcccttccagatctgaggcacagtctgtttcagcaatatgcgatacataaagtcggagccgtactatgaagtaatcgagcagcaaaatcaatctcttacagcatctaacacaaaaacaccaaaatcaaacaaactaaccgtctataatttacaggggcttcctccattcaatgtcagcggcagcccgttcaatgtggttcccattcacaactacccggagcttatgaaagacacttgcgccctaatcaacgcagagtggccacgatcggaaacggcgcgcatgcgctccctggaggcctcctgtgacagcctaccctgcagcctggtgctgaccaccgagggaatgtgccgcgtgatcgctcacctcaagctcagcccgatcaattccaagaagaaggcctgcttcgtcgagtccgtggtggtggacaagcggcaccgtggccagggattcggcaagctgatcatgaagttcgccgaggactattgccgcgtcgtgctggacctcaagaccatatatctgtccaccatcgaccaggatggattctacgaacgcattggctacgagtactgcgctcccattacaatgtatgggccgcgccactgtgagctgcccagcttgcaaaatgccaaaaagaaatacatgaagaaggtcttatagacgtcaacgccagtagtagtgggcttggctaaattgggccatacccagcccg

SEQ ID NO: 20126 - DNA, 1652 bp, DROSOPHILA
ttagccggttatttacacgggactttgcaatatacacatctcaggtggaataaacaaagttggcagccatggaaacagcacagacacacgcacgatcgcatagttgaaaatcaagacgctcccctgctgcttcttcttctctgcaccaaacaaagcgctgccacctcgcgaagaacgtacactgtccaacacgggccagccgactgggtgcagtgttgcgaactgcggtcagtcgaccaagcgaaaataacaaacaaatcggttttttagcgagcgcaaggcaaatcacgagtagaaaacacaataaaagctcgctacaaaggacagttaatcagcaaaacacttacagtattaacgtgaaggtggagcagcgagagcagcgtgcaccacggcctgctaaattaattattacacaacaaataaatcaaaaaactgccagcgacagtttccaatcgacagcgtgcggccgaaaatagcttgtaaacaaagcgatcgctaggaataggaaaaggaaaaagaagctctctcaacgccattgacccacaaattagtcgtggtcattgccaagcgagaaaacattgcagccgcttcccaccgccacatcccaacaaggcgcacgtgcatccacatccacaatggccagccgacagatgaccaatgaccacctgcgcctttcctggcacgacacccagatgatggccaccctcagcccgcagaccgtcatggactacttctgccgcaagtcgaatcccttctatgatcacatgtgcaacaacgagactgttcggatgcagcgccttggtcccgagcatctgcacaacatgatcggtctggaatacatactgctgcacgtggcggagcccatcctgtatgtaatccgcaagcagcaccgtcataatccctcggaagccacgccgattgccgattactacatcattggtggcaccgtctacaaggcgccagatcttgccaacgtcatcaattcccgcattctcaacaccgtggtgaacctgcaatccgccttcgaggaggctagtagctatgcccgctaccatcccaacaagggctacacgtgggacttctcttccaataaagtttatagatccaagtcagataagaaggacgccaactcagcgaaggatgagaacagcggcacactgttccagaagcagcgtgtggacatgctgctggcagagcttttgcgtaaatttcccccaccaataccgcccatgctgcagaatctccagcagccgccaccagcgggcgatgatctgaacacagcgagaaatgcctccgaaatgaacaatgccacaggaccgctagatatcaaaaccgagggtgtggacatgaagccaccgcccgaaaagaagagcaagtgattatgtgaatgcaggtgcaccctcaaaaaacgtacatacatattagtccgagtcctttggcagctgcataaaaggcgctgaatgctgcctgcatttccactggccaaaccaacgctcagcgaaaagcagcgaaatctacttttgctagtactgccaactatttttttttaaagtggctctaactagtgaccatttaaatattcaaattttaaaacgcaatttttgttccgtgagaaaacaattaagaacaacaatcaataaccttaacaaaaa

SEQ ID NO: 20127 - protein, 247 aa, DROSOPHILA
MASRQMTNDHLRLSWHDTQMMATLSPQTVMDYFCRKSNPFYDHMCNNETVRMQRLGPEHLHNMIGLEYILLHVAEPILYVIRKQHRHNPSEATPIADYYIIGGTVYKAPDLANVINSRILNTVVNLQSAFEEASSYARYHPNKGYTWDFSSNKVYRSKSDKKDANSAKDENSGTLFQKQRVDMLLAELLRKFPPPIPPMLQNLQQPPPAGDDLNTARNASEMNNATGPLDIKTEGVDMKPPPEKKSK

SEQ ID NO: 20128 - DNA, 7171 bp, DROSOPHILA
aaaaatattagagatatacattatttgaatatatcgttatttatttattttagtttaacttaaaaattgtcctaaatcaatttaaagtgcatcagcctgaaagtaggcaagctattttgcaaccgacttggtggtgaagccttttcatcacggccaacaagtatgcaatggttttacaggcttagagcattcagttccatgttcaatcgacaattcattttaattgaattaccaaattgctaatgaaaaaatcgtattaattcgattttaatttatatattaatttcgattttattaggctttttctttacaatttgttcggcctgcgttctcttaaaatgcttttgtatagtctcgtcgctcttcgtctctttcacaactactactcaatgctcgcttttgatgactttctttcgcaccttttttatcgcgctctctctgcgcctctctcttttacgcttatagccggcaagtaaagaagaagcataaatagaaatgaaatataagtaagcggaatgcaaaatactttttctttggcgccttcctcctcacacacacacattcgcattcgtatgtgaaaccagaaagaacaatatagtattcatactgcacctgtatatcgactataaagtacgctgtacgttgtatgttgtattttaccatatgtatagcttatgtgtttccttttttaatgcggtagcctaggatgttgaaaattattttaattacatttttaaatccttttaaaaagacccttggctcgggactttaaattcactatttatttatttttattttttctcacttatacatttacccaacttgccttcgtgactatataccctgtgtagttcacatatagagggtataataaatctcccaccggcttttcttgtggtggccaacgacgtcgactgcgctgccggtggctctgcattggcatttaggcatttatgcccacggcagtcgaacagccgcttcagattctcgtcatcgctcgtggaaggcacatcgcaaacgccgctctcgttctcgaatttattgtgaaagctcagccgcccaccgcccgccggaaaagtctcgcgagtgtcccgaaaaaatcgagttaaccccccaaaaaaatctatcatataaaatcctaacaaaatgagcagtaagttgggtcacagccaaatccagagcaagcaaaaaagcaagaaaataaaagaaaaaaagagtgtgtgtgtgtatgcatggctaaagctggaaactgagaactgaaaagtcgatagaaaacagcctgccctaagttaaagctcctttggcgtttcctgctaatcaatcaatcaagcaacaaatcgcctatccttccatttcgtaacactcgcttcaggttggagttatgcaaaatccgaattcgatttgaatgcaaaatcagaagctgaatcgaaatcatagcgataatcccactactataatatatataattataaatcgagcatagagcgcgcgcgatgttggtgtggctacgacctttactgaccttcactagcgtacgactctgcccacggccccccgcctcatcaccatcaccgtcaccaccccctgtttcgtcgctctctcccttcgctcttagtttctctctattttgaaacactaacgtgcaggaaaacatttcaaaaatgcgaacattgcactggaaaccgaaccgctgccagtcagtcgtctggcatatttgtttgtttatgaaaagtttgtgcacaaaatcgctgataacgtgaagctcacataaccttcaagaagagagagagagagagagatagatggggagagagagcgagcttacagttatgttaattccgttttgttgtgattccattacatcgatttctgcgctttgtacctgtcgcaatgctgggtggtgacccagtaatcccacgtagcgccattagcagccgccttatcatccatccgccttatcagcaatgcgattatttccgcatctgcagcccattgagattagcggcccattaagggatgcacttcgccttggcatttttcacacgcattcgctgacgtccggcgatcttgtttgaagcaatacaatattcacaatctatatgtggtacaccccatggatgtgtgattctatttttaagttcgatatgtatgggtcggaattatggctggcgacaggcgctaacaagttttgtctgtttcgaaaataatattatatttgcctttcaaaaagttttccacgcccgagaacattcttttgtgtcgcatcgccatcgcccactagtaaagtgtgtgatctctcacatttttctctttccttggaaatgccattaaatctgcacggatttatgcccgcattaatcatcaacctacggccggccacagcagctgccttcaattttctagcccgcagggatctccagcatctcgcgtttcggtcatctacagacacatccacatccacagccacatccatgaatccatggtgattcaattttctaaaattgctgcgtcgcctgtaccgaagcgatccaatgcatcgcctaccaaccagcagatacaatctcatttcatttcacttcgcatcgccggcgctatttttagtggcctgctctttcggatacagcatcggcatccacaagatacacacgccgcctgctgaggtttcccgcagaactcgttccgcgccttgcactcgccaatttgtgcgttggtgtcgccggcgatcctcgacacgacttcctcccaagaccactcccttcattgcataccattatgcacttccagcgtacaggccaacatggataactcaaactctatgctagacataaccatatatgtagaaggtgatgtttggtatattataagctacttaaacacacaggataacctactaactatacagaatttgcaatagagttattgtgccgagctagccaggcttgactgtacttcatttcttgtgcgccggctgcaaattatgcgatgctttaatggggaccctgacaaacgggtttcagcgagggaagggatgtccccttcaaggtcttggctgcccattcatctaattggtgaccccattcatggtggtatctggcgttaatctgatctgggcctcatcacgcctgaacgggaatttgttcagtcacttgacccagacccaaaagctcaacccgcagcccacgacccccgaccttttttcccaattgctttggcagggcgctttatcggctttattgtgctacggccatacgcaattgataaaagcgggtagtagaaaacagagcgcaaactctgctcagcgaagagagcgcttaagagagagttaaagggagagcatatctccgaagagagctctctctctccctacactgtcaaaaagttaaggaattttcccacagttagctgtcacataaattgctaatttacctatttttaagtttacgtgctaagcatatgtttaagtaaaatgtcgcgacgcattcattttgacaatttcaacagttgttgaaatttttgtatatttagaccgagtgttgtttatttaattttgtttaaatcgccaaatttatgacgattgccgaaaattccttttcaccgttctgccacataagttttattgttttgtgaaattttttgtcatttttcgcacacacatccggtaagtcagaagttattaagattcattctagttttgccgaaagtaaatgatttcatttttattttaggcccaacgaatcatttcacaagcacacacaaacgcaaatagaaaagaaagcatctgtgtatctctcactcgcacacacaccaatgcaaatacaagacccagtcacactcacccacacacacacacacacacacattaaagaatccggcggaggatatagatcgtcctgatctcagtccaaatcaagatcaagatcaagattaggatcaagttcagcctagtgaatgcatttgaatgccgctgattagctcgctgtgcagcagttaccatcagaatgcgcatccgcatccgcaaatgtgtccacatccgtatccgcatccgtatctgactgcgagaaggtagttgttgttatccacctacttgttgtatcctacgcttcacagttccttttcagttcgcttctctaaaaccaaacaaccaacaaaaccaagcccatgtaaacagaactctaatctgacacttaacccgactaaagttagcacaacgaaatgtatcaagaatataacatatatatacacacttgtatatatatatattcatctatctatcgatttgtagtattaatacccgaataataatgttctaaattccatttacttgtcaataatcaaaattggaaataaaaaataattcgtacatcttctctctctctttaactctaatgaatttttaattatctaaacagcaaatctgcatggtttaataatttatagaaacgagaatttcttcgaaattcacttgtaaattgtgtaccatacggattctagaactaattccccatcgagtgagaaatctgcaccgaaacaaaaaaaaatcaaactcataatcgcctcataaacgtgtatatagatacattcatatgtatatcctagccagcgccatgaataattatctacagcttttttgcccaactaaatgccaactacgcaaaattctaattgcccgttcggacgcgcctgaaatatgctcagctcgattttgccaattcattaatggatctttattattttttttgtttttttttgttttttgcaattttatcctcgctaacaaagcaaatgaattttggttgcatgtgggcgatgctgacgcagttggagatctgcacacaccacttgaacatatatatctatatatctgttctatttcgaatggggaacccgaacaatcgcttgtttatttataatccgtaacgttttttgctgaatccgaaactaataaatacagccaactgctgcagtgaaacgtgcagtgcgcaacagtatctttttgtgttgtaacccaatttgtatctctgactttagctatatatctcatctctcttggctactccatcgatagcgtttaatttgcaattgtatctccatctctcgtttcgaatagaattcgcttgggtgacgctgacgacaaatgacacgtactcactgggtgccttggtcttggcccactcactgaaaagggccaagaccgcccaccagctggccgttctggtcacgcccaatgtctcgcaggcgatgcgcgaccgactgaaggaggtctacaatgtggtgcaggaggtcaatgtgctcgactcacaggatgccgccaatctggcgctcctctcgcgacccgaactaggcgtgaccttcacaaaactccactgctggcgcctcgttcagtttgagaagtgcgtcttcctggatgcggacacactggtaagatatgaagtattccaagggcacaacatgtaacttgtgagctaacaaagacttaaataactactttcaatttgatttcgtaggtcttgcaaaactgcgatgagctcttcgagcgcgaggaactgtcggctgctccggatgtcagctggccggattgcttcaattccggcgtgtttgtgttcaaacctagcgtggacacctttgcccagatcacagagtttgccgtgaagaatggcagcttcgatggcggtgaccagggtctgctgaatcagttctttgccgactggtcgacggcggacattaagaagcatttgccatttgtgtacaatgtgacggcttatgcctcgtactgttatctgcccgccttcaaacagtaagttcgctatctctgtggaatggaaaagcagtttgtaatggcatttgtttgcttgcaggttcagagataagattaagattttgcattttgccggcaagctgaagccctggctgattcagttcaactcggaaacaaaggtggccagcgtttcgtcggagtatgctcatgcccaggatttgattcagctgtggtggaacatcttttgcgaaaatgtcatccagtccctgtccaccgaaatggtaagtgctatttatacaatggataacgcacattttggaaatttccagcgttacttggtgcccccaaatgatcttatgtcttcccttgtttttgaacgccagactgaagctaaccctttgatttttactgtctaacccaatgtatttgctccaaatctcaaaaacaaaaaaccctgcttcgttttctaacacgctaatcgcaagcaaacgccaggaaatgttgctagtgatcgacccgcgggagaaatggcccaagggtccactactttagaggtaagcagatcttcaattgccgaatcgcacatatcgcaccagatctgtagataccttgagcacagccctgtgtaaatatcttaattataacttaaatatttatttatttatttagctaacgattcagtcatctttctgtgcgccaagtaaataacccaagcaaacaaactcaatttcgatctatttgccatttgttttttgccgatagctggcctcgatatcgtttcatttcccgcctcttttctatcaactcggtttgaatatactttgttttcgttttatttatttttatttttttgtattggtttgcaattttctgttgattttttctcgattagcagccacgccccagagtaacccattttccttttttttgtatattttctttcacttttttggcaccataggcagaccaattctcaatttatttcttctgtattttttctgtaatatttgtgcaactgtgtgtgtctctcgtgtgtgtgtgtgtgtgtgagtgctcgtcttagtgttcactttctttctgttttcttttcctttctaatttgcatcgatttggcaaagagccaggaaaatgtttcggtttacgccatcgatagatggaaatgattcaaatcaagatggtcggttgcgggtgatgccaaaaaaaaaactcaactgaatcattagatatatcccataacacaaacaaacacacacacacacacactagcacgcattcgtggggatctcctctctcttgatacacacaaagaaattttgatatagaatggaaaaataaattttatcttattccaaattcatttaatttaagagaaataaataattttttttatattattaatttatcaaattttgctgt

SEQ ID NO: 20129 - DNA, 1070 bp, DROSOPHILA
tggaaggcacatcgcaaacgccgctctcgttctcgaatttattgtgaaagctcagccgcccaccgcccgccggaaaagtctcgcgagtgtcccgaaaaaatcgagttaaccccccaaaaaaatctatcatataaaatcctaacaaaatgagcaaattcgcttgggtgacgctgacgacaaatgacacgtactcactgggtgccttggtcttggcccactcactgaaaagggccaagaccgcccaccagctggccgttctggtcacgcccaatgtctcgcaggcgatgcgcgaccgactgaaggaggtctacaatgtggtgcaggaggtcaatgtgctcgactcacaggatgccgccaatctggcgctcctctcgcgacccgaactaggcgtgaccttcacaaaactccactgctggcgcctcgttcagtttgagaagtgcgtcttcctggatgcggacacactggtcttgcaaaactgcgatgagctcttcgagcgcgaggaactgtcggctgctccggatgtcagctggccggattgcttcaattccggcgtgtttgtgttcaaacctagcgtggacacctttgcccagatcacagagtttgccgtgaagaatggcagcttcgatggcggtgaccagggtctgctgaatcagttctttgccgactggtcgacggcggacattaagaagcatttgccatttgtgtacaatgtgacggcttatgcctcgtactgttatctgcccgccttcaaacagttcagagataagattaagattttgcattttgccggcaagctgaagccctggctgattcagttcaactcggaaacaaaggtggccagcgtttcgtcggagtatgctcatgcccaggatttgattcagctgtggtggaacatcttttgcgaaaatgtcatccagtccctgtccaccgaaatggtaagtgctatttatacaatggataacgcacattttggaaatttccagcgttacttggtgcccccaaatgatcttatgtcttcccttgtttttgaacgccagactgaagctaaccctttgatttttactgtctaa

SEQ ID NO: 20130 - protein, 307 aa, DROSOPHILA
MSKFAWVTLTTNDTYSLGALVLAHSLKRAKTAHQLAVLVTPNVSQAMRDRLKEVYNVVQEVNVLDSQDAANLALLSRPELGVTFTKLHCWRLVQFEKCVFLDADTLVLQNCDELFEREELSAAPDVSWPDCFNSGVFVFKPSVDTFAQITEFAVKNGSFDGGDQGLLNQFFADWSTADIKKHLPFVYNVTAYASYCYLPAFKQFRDKIKILHFAGKLKPWLIQFNSETKVASVSSEYAHAQDLIQLWWNIFCENVIQSLSTEMVSAIYTMDNAHFGNFQRYLVPPNDLMSSLVFERQTEANPLIFTV

SEQ ID NO: 20131 - DNA, 2883 bp, DROSOPHILA
gatcccgcattcttaaattgaaaacccagcagggagataaggagatcttggtaacccgcggcagcattgtgtacattcccgtcgaggcggcgccggaaatcgaattcgcccagtccgacgattgcgacgaggacttcagcggctacatagcaaccagcaactactttcgagtgccctaaaattctcagttaatcgaaatattttgtacagtgcaataaatccattaacacgttttggtggtgaattattttgtttatatttacttgcaattaagagctaagaatgtaagctaaagtggcaatagtagcgataaataagttatctaatcaattggctatactcgttccatagtacatttaataattaacgagaaatatcttgcgcacaaacaggtagtttcttaaatatttgcgataattgcaaccaacaatttcaagtacttaagctagagctacgtaactcgatcggggttacattcactggggataaattattcatatgtacgaagcaagaggttcgagtgcaaatctagtgtaattcaatagaattggtgcttggactgctgtgctgggcttgcgaaatgcccaaatacatggcctacttaaaaagggttaacaatggagaacataaaattggctacgttatacataatttccgcccgtctttgtttggtttttcggtgcccgtgcgggatgcggtggttctacgaattgtaaatacattaattcacatttatccatctcagcagttgcttggtttgatttcacaaagatcggtaaaatgctcaaaaagtttgtaccaaaaacagagtacatcatatacgggaaatctcataataaaattgtttccggcgccatctggttgccatttgtacacgagtgtagtaatagtaagtagttagtatgttggttcgcatatatgtatatatatatatatatatatatatatatatatatatatatatatatatatatatatatatatatagttttagaaagtagtagttagttcatccggctcggcggcttaaagttcttgtaagtagatgggtttgttacgcttgcgtttgccaggagtagttgccactacttgtatatgtgtataatatatggtatcaataacgcaataccaccagctacggtttgtgcccacaacattggtttctttccctaacaacattgaaatggaggtggtgtctgactaacatgttcgctatggtttcgggacgtggccgttgtgcatatttaactcttgagcagattgttggcgcgcttgttcacgccgtccatgcgaatgttgttggcatcgcccttggcattgatgcgatcaacctgtttgttttggttctccagctcggagcccatgtccagggccatgttgcgcaggttgcccagcatcgagttcacctgcccgagattctcgtccatctcatcctcacgcgcatcgttcgtgatcctggccacatagccggactgcggtggtgcacccatgccgccgcgttcccgctcatcaatgaccctttgcggctggctggccacgattttgccatcgtcattggccttccaggcgctctcaccgtcgtccttgatgttcaccttcttccacggcagcacacagatgccacagcacttttccatgccactcaagttcttctccgcctccctcatgtccgcgttgatccggtccatgccctcctcaatgcggtccaactgctcgccctggtcatccagggccaccagcgtgcggattccagcctccttgctttcgtccatgagggcgagcatccgacgcgtgctctccagggattcatcggccacctgtccggacttgaactgcagctcctggagctcagtgcgcggctcggcattctccacggcggccatttcggaactatctatctggtgagatcacttgaacttgagcttggcaagtggttgagaggcaagacggctgtcttgttttttttttgggtggggaaatctggccagtgactcactcgcgcgagatgaaaaactacccttggtgctggttcggtgtgtgaactcggtggatatgtaattggggcggggatgagctcgtttgtgctccgtacgtaggaacttattgccaaggtttaataatttatttgcgaaagtatgaattttcacaccacacaacaattcgccaatttgtatactagagctgcaaaaaaatcgatgttagtatcgatgtcgttttcgataggcgatttttacgtgtgttcacactgtttaatattgcatttaggcttagttcgcaacaagtacaattaaagaaattatgcaaaacaagctgcaaactatttacgaaacagggcttgcttacgttttactattaaatctgagtttaaaagtttaatattgcatttaggcttagttcgcaacaagtacaattaaagaaattaagcaaaacaagctgcaaactatttacgaaagagggctttcttacattttactattaaatctgagtttaaaagtcgatttaccatgcataaactaataatccagtctgatattacacttttatctaagacatgaaccctgttcgagtctgataaaacacaattattttatgttttcaaaaatatttcccatctagtcactgtaacctttcaattcgtcgtgtgccgaaaaaattagatttatttctacaaagtctcctacgcgttaacatcaatttgaaagtagtgaagaatttatagttttttcaatacttttcataatttaaagccgcgcattcccatcggcgccgttgctatcttcattgcgcgcgcagtgttgaaaagtgtgtttgaaatattaacgctttgttttttcggtacagcgtcggtcttcagctgctcgaatttttgcttaattgcttgta

SEQ ID NO: 20132 - DNA, 883 bp, DROSOPHILA
atggccgccgtggagaatgccgagccgcgcactgagctccaggagctgcagttcaagtccggacaggtggccgatgaatccctggagagcacgcgtcggatgctcgccctcatggacgaaagcaaggaggctggaatccgcacgctggtggccctggatgaccagggcgagcagttggaccgcattgaggagggcatggaccggatcaacgcggacatgagggaggcggagaagaacttgagtggcatggaaaagtgctgtggcatctgtgtgctgccgtggaagaaggtgaacatcaaggacgacggtgagagcgcctggaaggccaatgacgatggcaaaatcgtggccagccagccgcaaagggtcattgatgagcgggaacgcggcggcatgggtgcaccaccgcagtccggctatgtggccaggatcacgaacgatgcgcgtgaggatgagatggacgagaatctcgggcaggtgaactcgatgctgggcaacctgcgcaacatggccctggacatgggctccgagctggagaaccaaaacaaacaggttgatcgcatcaatgccaagggcgatgccaacaacattcgcatggacggcgtgaacaagcgcgccaacaatctgctcaagagttaaatatgcacaacggccacgtcccgaaaccatagcgaacatgttagtcagacaccacctccatttcaatgttgttagggaaagaaaccaatgttgtgggcacaaaccgtagctggtggtattgcgttattgataccatatattatacacatatacaagtagtggcaactactcctggcaaacgcaagcgtaacaaacccatctacttacaagaactttaagccgccgagccggatgaactaactac

SEQ ID NO: 20133 - protein, 212 aa, DROSOPHILA
MAAVENAEPRTELQELQFKSGQVADESLESTRRMLALMDESKEAGIRTLVALDDQGEQLDRIEEGMDRINADMREAEKNLSGMEKCCGICVLPWKKVNIKDDGESAWKANDDGKIVASQPQRVIDERERGGMGAPPQSGYVARITNDAREDEMDENLGQVNSMLGNLRNMALDMGSELENQNKQVDRINAKGDANNIRMDGVNKRANNLLKS

SEQ ID NO: 20134 - DNA, 3266 bp, DROSOPHILA
agtaccttgggaaggaatataaatatggtattggctacctgactacgcaggacaacatccacttgatcggattcgtcatggacatagaaaaccatcatcagacactgaatggctgtctgtacgagttttcgatacttttcctgttcgatgatttccaagagcatgatcagtatctggccaataaccatcgcagtctccttaacgtagaaagattccaccacatcagtggtggagcgacgaagtgcctcgaatatacactgaacggctgccagtttgatttcctcggaaaggtttggtcgcatggacgctgtcttggagtcgcgtacctgttgcagcaccaccaccaggatggaacgcagacccttctcatcggccaggtatgttttggagacaatgttgcttaagcagttcatcaggctggtgcgaagttcctggttttctctgcggaagagacagtcttctctgaagtcgaaaacccaagcggagcggagccacttacccggttagctcatccagtttgaccaccagtggcaccaccgtttgcacctggtaaatgcgcatttctccaaagttgaatccctcgattgcgcgctccaccaccgacaacgtgtccttgctgggctccttgatgaagccttccaccgctggctttatcttcgtcacataccactctagatgcatcatcgtggcagcagtattcactaaccaaataaacccaaagcgaaacccggcaaaatccgggaagaagttttgaaccaacagctgttccgacagtcacatgcaaacgcgcgcgttttcacccccgccacccacaatcgctatcgaagtctatcggttattttgaattgcgcgccaagccgcccttaattttgattttcttttatttaaagcaccagtattgactaatatatttcgaagtttcaggattttggtaaactcgggattggctttgttaaatactacaagtttacatattcagattgtatttgaaattaatcatctagctatagaactcatgctgagcttcgtccttgcgcacgctggtcttataacccttttcgaagtccttggcattgaccacatagcgattctcgcgcactgcatgcataccagcctcttggcaaatggcattgatatccgcattggagatcttgtccggacgtgcaatgatgtcctccagatccacatcctcacccacattcattttcgaggtgattgtggtgaaaactaagcgcttctggcgacgatccggcaatggtaactcaattttccgatccaaacggccgggtcgtaacagagccggatctaaggtatctgcacgattggtggccatgataaccttaatgttggtggtctcatcaaagccatccatttggttgagtagctccagcaggatgcgctgcacctcgcgatcagcacctgtctgtgcatcaaagcgcttggtggcaatcgcatcgatctcatcaatgaagataattgaaggagaattctgcttggccaggcggaaaagatctcgcaccatgcgtggcccctcgcctaggtatttctggacgaactcggagcccacgacacgaataaatgatgcagttgtatgatgggccaccgccttggccagcatggttttgccacatccaggtggtccaaaaaggaggacgccgcgtgggggatcgatgcctggaagagaattagtggaaatagtcttttgatattgcgaatacccaccaatttgcttgtaaagctgggcgtgggtcaagggcagctcgacagcctcgcgtatctcctgtttctggatgtccaagcctccaatgtcggagtagctgatatccggtttctcatccggcgatagcatcgatatggtgctgtccgcctccggtggcaccagatcgaccagacaattgctttgcttgtgcagcccaaccgaagaggacggcttcagttgctccctgtcaatggtggatagcactcgaacatagtaattggatccggtggtggaggccactatgccgttgttttcatccaccgcctccagaaactggccaatgaccagaggcacggcttttatgcgcttaacttcctcctgagcgtgtatgaactccttcttcagattgcgttgctcctccttgatataatcctcctgcacctggatgagctccagctccatctgaagcttcttatatagtacatacagatcatgcggatccagtccatcatacttctccagcgactgctcgtgaaactgggcaatttcctcctttaacaaacgcattttcgtcttatccctgtggagattcgattcgaagtgaaaggcaatgacacgaattttcaaaggctaaagcaggttatcgtaaaaaaaatatcgataactgttaacaggataagaatggcaatactaaaaaagcttcaatacatgagcgtaaccagaaacaattatttaatacttattgaatgcgaagttatgatatattgtattttcaaactatgttgattaagcccgatcgatatataaaaattatacaatttctaaaatgatttttaacgctccttcgaaacttttcgcgtcgccacgtgaatggcaatcagctgttgaaccgacctgttgtttttcttggatttgtttttgttgtgcttgcttttctgcctccgacgtggagcgatctatttatatatctattttggtttattttggaaccacaaattctcttcggcataggaaaaatatatatgcctaggcattgacactttttgtgagacattcaaacacttagtcaaagaaaggtggctagatatcgacattgtgcaacgccggcttcgattgggaaatcttcgtcagataccatcgcgcagaaatttatagattttccaacggactagaatatatagatatcggtgtcaaaacaaatatggccattatgtaacgccccgattcctgtccagcacactttgcacaccagcgacacccgacagccaaaaccgcccgcaacatggacatcctaatctttgtgacggcggcggcccatttggtctacacgccctttacgaaagtggaggagagcttcaatctccaggccatgcacgacattctttatctgcgaaacaactttacgcaggtggaggacaaaggttccccaaacctcctgccagatcactaatatctttctgaatttcagtacgatcaccatgactatccgggcgtggttccacgcaccttcatcggcccattggtggtgtccattatctcagccccgtttgtcctgctcttcgagacc

SEQ ID NO: 20135 - DNA, 1266 bp, DROSOPHILA
atgcgtttgttaaaggaggaaattgcccagtttcacgagcagtcgctggagaagtatgatggactggatccgcatgatctgtatgtactatataagaagcttcagatggagctggagctcatccaggtgcaggaggattatatcaaggaggagcaacgcaatctgaagaaggagttcatacacgctcaggaggaagttaagcgcataaaagccgtgcctctggtcattggccagtttctggaggcggtggatgaaaacaacggcatagtggcctccaccaccggatccaattactatgttcgagtgctatccaccattgacagggagcaactgaagccgtcctcttcggttgggctgcacaagcaaagcaattgtctggtcgatctggtgccaccggaggcggacagcaccatatcgatgctatcgccggatgagaaaccggatatcagctactccgacattggaggcttggacatccagaaacaggagatacgcgaggctgtcgagctgcccttgacccacgcccagctttacaagcaaattggtgggtattcgcaatatcaaaagactatttccactaattctcttccaggcatcgatcccccacgcggcgtcctcctttttggaccacctggatgtggcaaaaccatgctggccaaggcggtggcccatcatacaactgcatcatttattcgtgtcgtgggctccgagttcgtccagaaatacctaggcgaggggccacgcatggtgcgagatcttttccgcctggccaagcagaattctccttcaattatcttcattgatgagatcgatgcgattgccaccaagcgctttgatgcacagacaggtgctgatcgcgaggtgcagcgcatcctgctggagctactcaaccaaatggatggctttgatgagaccaccaacattaaggttatcatggccaccaatcgtgcagataccttagatccggctctgttacgacccggccgtttggatcggaaaattgagttaccattgccggatcgtcgccagaagcgcttagttttcaccacaatcacctcgaaaatgaatgtgggtgaggatgtggatctggaggacatcattgcacgtccggacaagatctccaatgcggatatcaatgccatttgccaagaggctggtatgcatgcagtgcgcgagaatcgctatgtggtcaatgccaaggacttcgaaaagggttataagaccagcgtgcgcaaggacgaagctcagcatgagttctatagctag

SEQ ID NO: 20136 - protein, 421 aa, DROSOPHILA
MRLLKEEIAQFHEQSLEKYDGLDPHDLYVLYKKLQMELELIQVQEDYIKEEQRNLKKEFIHAQEEVKRIKAVPLVIGQFLEAVDENNGIVASTTGSNYYVRVLSTIDREQLKPSSSVGLHKQSNCLVDLVPPEADSTISMLSPDEKPDISYSDIGGLDIQKQEIREAVELPLTHAQLYKQIGGYSQYQKTISTNSLPGIDPPRGVLLFGPPGCGKTMLAKAVAHHTTASFIRVVGSEFVQKYLGEGPRMVRDLFRLAKQNSPSIIFIDEIDAIATKRFDAQTGADREVQRILLELLNQMDGFDETTNIKVIMATNRADTLDPALLRPGRLDRKIELPLPDRRQKRLVFTTITSKMNVGEDVDLEDIIARPDKISNADINAICQEAGMHAVRENRYVVNAKDFEKGYKTSVRKDEAQHEFYS

SEQ ID NO: 20137 - DNA, 3894 bp, DROSOPHILA
tgttttataggaaaagaagaaagatataaaagagaagagagaggtatggttttcatcacattcgaagatcctgaaaaaatagtattatattcgatatacataagctttttgtgtaaaggcgaataaagataaatatattgttggtattgtgtagatttgcattgtctgtattcgttgggggcattgattattccaaggggtatatatgggtaaataaaatattcatatttcatatgtatacatatcatacaatttctgtataagaactgtttaaactgggacttttaagataaagttgtctgcctagactactcaacaatatcttaattaacttaacagactagacttaaattttgcgaatacatacatgcacatacaattttgcagacaaaagaggatacaattttgcatgtacatttacaattaaataacattcacagaggtttccaaagaacaatattatatttaataacgggcgaattttttaatacaacttttcacatatatgtaaaattaatttaaacttaaaaactatcttaagaatatttttcgctgctactcctgaaaaggtacgtctacgactactgaatttgctagaaatatgtgtacacatttttgcgcatgcgtttcaaaatgcatcctaaggctccattacacgtaacgatttcaaaaattaaaaacttttaaaagtcaacattaatttgcccaattaatattaatatttaaagcaataagaaagtgataagtagggttttttacggaggggtaatttccaataaatatatgatttaccaatttccttatatgagaaagttttattcttattaacacaaaagttaaattccatctaaagacgaatatttcccatttaaataagccattttaagcaattgtgttaaactgttttattgcgaaactgttttatgcattggtatttggtagaaagaaagtgatgtttataaagttgtaatggctgtatcatttgttgacaacgttttctctagtattcctcatcttcccccagttcggtggtggagtcgatgcctacctcctcgtagtccttctcgagggcagcgagatcctcgcgagcctcggcgaactcgccctcctccatgccctcacccacgtaccagtggacgaaggccctcttggcgtacatcagatcgaacttgtgatccagacgggcccaggcctcggcaatggcagtggtattggacagcatgcagacggcgcgctgcaccttggccagatctccgccaggaacaacggtgggtggctgatagttgatgcccaccttgaagcccgtgggacaccagtcgacgaactggatagagcgcttggtcttgatggtggcaatggctgcgttcacatccttgggcaccacatcaccgcggtagagcatgcagcaggccatgtacttgccacgacgcggatcacacttgaccatctggttggccggctcgaagcaggcattggtgatctcggccacggtcagttgctcatggtaggccttctccacggaaatgacgggagcgtatgtcgccagtgggaaatgaatgcgtgggtagggcaccaaattggtctggaactcggtcagatccacattcagggcgccatcgaagcgcaacgaggccgtaatggaggaaacgatctggccaattaggcgattgagattcatgtaggtgggtcgctcgatatccaagttgcgccggcagatgtcgtagattgcctcgttgtcaaccataaacgcacagtccgagtgctccagcgttgtgtgggtggttaagatcgagttgtatggctcgaccacagctgtggacacctaacaggaagttcgattattagattgcctttcgaagactaatttcccatgtcttttactaattatgttaattggtcttctataaatgctcaagcaatagatataatatccatatgcaaatgacatacttgtggtgctgggtaaatggagaactccagctttgacttctttccatagtccacggacaggcgctccatcagcagcgacgtaaatccagagccagtgccgccgccgaaggagtggaagaccaggaatccctgcagacccgtgcactgatccgccaacttgcgaatcctgtccaggaccacgtcgacgatctccttaccgatggtatagtggccgcgggcatagttgttggccgcatcctccttaccggtgatcagttgctccggatggaacagctggcggtaggttcctgtccgcacctcatccaccacagtgggctccagatccacgaacacggcacgcggcacatgcttaccagctccagtctcgctgaagaaggtgctgaaggagtcatcgcctccgcccacggttttatcggagggcatatggccatcgggctggatgccgtgctccaggcagtaaagttcccagcaggcattgccgatctggacaccagcttggccaatgtgaaccgaaatgcattccctctggaacagagtttataataatgtgactcatgtcgctgtaaatttgggtaattctaaaatttaactttggacttccggttgcaaatctgtgatttggaccatatgctacaaacaattttgatcgctgtaagttcttgggtattcatttaagataatagtttacaagcagttatattttttaaaaccattaattaatcacttgcaaaaatgaataaatattgcaccatatggtctagttttgcatgaaatcgcatataaggacttttaaggatccatagttctgtgcagccgacgaaatttcaaaagtccagctaaatcattgaaagtgcctattatccttaccatgatgatcaaaagtttaagctgaagtttaaaaaagcagattcaatcacgaaaatcctagcactggtctgtgatgcgacacacagctgggagtcaactaaccgaatcttgacgatacgcgttcttttataagcccccaagacagacatatgtagcatatgctatatgctacatgctatatgtggaagttatgtgaaatgtggacgcgttcatcgacttaagtgacgataggcacccaacccatccagacacacatgaccaagaagtcgcctcttgatcgaattttgttttcctcctcgtgtgtttatggatggattgaattctcacattgatccattcacattcgcagctgtaggttgttgacaacattttagattatttacttactgggtactagtctccacttggaaagcaagtcttatttctgttgaaaaatataagcatatgaaaatccaaatataccccatatttatttttaaaattgcactaggaaatcagcataaacagatgaaattgtcgaggtggggccaaacctggcatttcttttggtggaaacttggccaattattcgctgacgtattaggaatatgaacgccacttacgatttcaatcggacacacccagaaaaacaaagaaaaaattacaaaacaagatacttttcaaataattgttccaaacattaaataaaatctaaaagccaaaggtcttatttgttgtttatgtgtcagattgcaatgagtatgtagctgtgtgataagaagaaataaacaaaacattcacttaaaaatttaagatgaataatcttcatagcgaaatgaaagcgtagcgcatgtttcgaattaaacagccatttttacttttaatttattttttatttataacttagatattataatactgctcacagtaattttacgctaaattcctaatatatatggtatttttaaatataagttttatgtaagttcgaccagtacaaaattaagtatttcaaaataaatgccggccagcgttgtaagaaaaaaatgggcattatttcctccaactttacactgagttagtacatatatatttgag

SEQ ID NO: 20138 - DNA, 1424 bp, DROSOPHILA
gcatcacagaccagtgctaggattttcgtgattgaatctgcttttttaaacttcagcttaaacttttgatcatcatgagggaatgcatttcggttcacattggccaagctggtgtccagatcggcaatgcctgctgggaactttactgcctggagcacggcatccagcccgatggccatatgccctccgataaaaccgtgggcggaggcgatgactccttcagcaccttcttcagcgagactggagctggtaagcatgtgccgcgtgccgtgttcgtggatctggagcccactgtggtggatgaggtgcggacaggaacctaccgccagctgttccatccggagcaactgatcaccggtaaggaggatgcggccaacaactatgcccgcggccactataccatcggtaaggagatcgtcgacgtggtcctggacaggattcgcaagttggcggatcagtgcacgggtctgcagggattcctggtcttccactccttcggcggcggcactggctctggatttacgtcgctgctgatggagcgcctgtccgtggactatggaaagaagtcaaagctggagttctccatttacccagcaccacaagtgtccacagctgtggtcgagccatacaactcgatcttaaccacccacacaacgctggagcactcggactgtgcgtttatggttgacaacgaggcaatctacgacatctgccggcgcaacttggatatcgagcgacccacctacatgaatctcaatcgcctaattggccagatcgtttcctccattacggcctcgttgcgcttcgatggcgccctgaatgtggatctgaccgagttccagaccaatttggtgccctacccacgcattcatttcccactggcgacatacgctcccgtcatttccgtggagaaggcctaccatgagcaactgaccgtggccgagatcaccaatgcctgcttcgagccggccaaccagatggtcaagtgtgatccgcgtcgtggcaagtacatggcctgctgcatgctctaccgcggtgatgtggtgcccaaggatgtgaacgcagccattgccaccatcaagaccaagcgctctatccagttcgtcgactggtgtcccacgggcttcaaggtgggcatcaactatcagccacccaccgttgttcctggcggagatctggccaaggtgcagcgcgccgtctgcatgctgtccaataccactgccattgccgaggcctgggcccgtctggatcacaagttcgatctgatgtacgccaagagggccttcgtccactggtacgtgggtgagggcatggaggagggcgagttcgccgaggctcgcgaggatctcgctgccctcgagaaggactacgaggaggtaggcatcgactccaccaccgaactgggggaagatgaggaatactag

SEQ ID NO: 20139 - protein, 449 aa, DROSOPHILA
MRECISVHIGQAGVQIGNACWELYCLEHGIQPDGHMPSDKTVGGGDDSFSTFFSETGAGKHVPRAVFVDLEPTVVDEVRTGTYRQLFHPEQLITGKEDAANNYARGHYTIGKEIVDVVLDRIRKLADQCTGLQGFLVFHSFGGGTGSGFTSLLMERLSVDYGKKSKLEFSIYPAPQVSTAVVEPYNSILTTHTTLEHSDCAFMVDNEAIYDICRRNLDIERPTYMNLNRLIGQIVSSITASLRFDGALNVDLTEFQTNLVPYPRIHFPLATYAPVISVEKAYHEQLTVAEITNACFEPANQMVKCDPRRGKYMACCMLYRGDVVPKDVNAAIATIKTKRSIQFVDWCPTGFKVGINYQPPTVVPGGDLAKVQRAVCMLSNTTAIAEAWARLDHKFDLMYAKRAFVHWYVGEGMEEGEFAEAREDLAALEKDYEEVGIDSTTELGEDEEY

SEQ ID NO: 20140 - DNA, 12957 bp, DROSOPHILA
cgtcgacactgtaaacagtgagtgtagacactgacctcataacgctagattaacttaaaactgagacgttaacgttttagttgagcaaacagggccgcaaagatttaagtctttctttgatcggtagtaagccgctcacacaaataaaaattttagtcgtaagtctgtagttttgtatacaacatttgaaatcttttattttggcaaacggcgcctaattgttttaaaaattcaacctgttctagcaacccagacgaacctatgtgaaggagcgtccgcaacgtaagcgaaagaagcgagtgcagatattgtacatcgaaagtgaaagtgaggacgaggacgagcaggactcgcacgacaagagcttggattctccggagaagaagcggcatcacgttaaacggccacgcagagacatcgagcatgaggctaaattggagcagttcgtcaccagtttcaacaagcaatgcgaggaagtggagaagttcccagtgatcattgaataatcgcattgcctgtttattatttatatttttttgtgtcgctgataaggggaagtagtcgtttttaatttaatgtgcttcgtttttatgagttatttgtggtaccttattgttttgtgtataaatgtatttaggaagattgcgtttcctcgaatatttataaggacaacagtctaatgtaactaaccaagtgcttgcagtgcactttatgcaattctaggttaagctaagcatgtatttttattatcaaaagcttggattatgtacagctttgatgtttcggtattatagcctatcattatgactaaactaaataaatgaaaaatcttaatctttgtgaattgaactatttgttagtccaagggaaaatttttccaaatgaaatagaagtcaattttatatcatacataatttccataaggtggacttatttttattggttttttcttcaaatttctattgaatcgatatcgataaatatacatgtgcataagtcatactttagaaaacatattttatttaaaagtttaataattaaaacataggcttcctattacctaattggccgttttattggttacaatggatgttggggagtttcatatttttactacacgttgggtcaagcaagaccgtcatgacccgagccaatcttgttcaataatgttacgtacaaattgttcaaattcgaataaattttaaacaatatataatccgaaatgggaatggtatggttaaatatgacgaaagtcgaaactcaaaaaaaaactaaagttaattaagaaatgaatttgaagcttatacagatgggaaagacttccaatcgcttatacaaatccaaaatttttggatttaatggccatcagcattttactgcgtaaaatagatttgctggagtaaagagggatatacagccgagagatacaagtattcgcagtcggtagatgggagtcatccgcaggtcttatggtgacagatggcaatggttggaatccctcctccgaagctggaagcgcaggagagccggtccagaagtaaacctgcaagaattgtgtttgttatgaatgtttgaagctcattggaccatctttcttcttaccaaatcctggcgttccataatgttcattttctccacaatactccaaaaccatttcttaaattttaaaagtttatcaggaccctcgctagattcgtcgttaaaggtagtgtatgaaattagtgtcgaaacatttatatcaccaacaccgtttagcagcagacgcaagtcctcagcggttaagttaatcatgctgttatcgggcaaaacgtcaaaaactccgtccttcagtgcctgtgaatggtagacaatattttgttgtaataaggctatacatttttacgcaatatttgcccatacctccagtgccttttcttgggatttgattagtctatattctgtatagcgtctgacgtactcgaatatattactcgatgtgacagcgacatcgcgccctcctgggataagctctctgttaccacagccctcctccttcatcaaatcgatactgaaatggcaggttatttagagcctaaactatcaagtaaggtgggattacttacacaaagcatagctccatacgatttatagtttcctcgccttcctttgtttgggcattttgaataatttgtctaaaagattcgtacaatgctggatcgaaaaatgccaagtcgtggaacttaattttacgcccaagaatgtattttagtacatgtctttgtaggaacagtggaagcaattcgttttgcagtagacaaagtccaataagtctgagaaaagagataggcggcgttaaagcagtgaatcgaataagggagcacttagcttaccttccaatatttctaaatgcattaatgcgctcgaatgatgcaaagccttggcgtggtgtgtaaaagccccgctttcccggtgagtaaaataatggttcattatcatcatcaacgggatccactaccacgacagatggtgatttttttggttgactactttgtgcactggtctcagatttttgtttaaacgtgattatttctatcgcttcattcactttctgacggagcgtctcatctgaggaaattacggacaggagctgcggagtgggtatctccagcagcattcctgttatcttcggtgcatgcgtttggtttatcgaatggatctgttgatcaagtcggactgttaatattatgaacttcaattggattaattcgcttaccttcgggtaaagacgttccccaatttgttgtaggtgaacggacaagtgatcattcaggctttccggcgtagcattatctaaatttgcagttccaataagtgggtcaatataatacatagaacaagattgattttatagattacctgagctatttggtggagtatacggtctggcatccaaattcaatgccttcctctcacgggccgaacgccacaatattttgctgttggaaccacgcctctgcagagtggactgatcgcgactagaccccgatactgttctgctgcgcaggatgctcgagaacggcactacgtacttgctatgattggtgcccacctgtacggactccaagttggggatcttagcactggccagcaatgcttctgcgatcgatgtgtaaaaactgcgcgctacacccgatccctcgcccggctcgtctttgaatgtcacctttactctgttgaatgtgatgggcggctggatgcgccgactttggttgccaaactgggtattcagttccttgaacgtttgaacaattaagctttcacgattgcgctccaacttgcaaagcaccaaatcacgttgttgtccgttgcgcaatttttccatgtggcgacggaaacgcatctccttcacgggaaagcctcgcagttccggcagcacagagccgtgttccattccgacgtcgtccataaaaacgcgaccgaataagtccagagttagcttccagcggctaagtaaaaagttccacgacggcaattccgaaaaattactttggtaaaactgagaaccacgagcaggaaataataacaggtggtctgatgttgacttttgatattgtgtatcacatttggcttgttctgcggtcgatagatttgaagccgagtagttgtttatgtcggaatcaattgtctttaaacaggaaccacctgcgagaactatgacgctgcgagcggcagtcgctggcgacactgaggctttatttggcgctatgataacctctggtcgtgtggccattaatgcttcagtcgatttacttgtacttggaagactgtcatcagtttccattaatacgactttttcgtacttgctttgattgcctgtggattgaaaatttaatgtttgtaaattgtttaccgcatacactcttactcaccgtcagcctctttgtgggatttgaaatcatccgagccctgtttcttctttaattgtacgtaaatattagagtctgttgagccctcagccttattagttacatttccatcacccgtcttactagaatcgatcgggactgtttcgtaaacacgctcgttccttttcaaggaattcgagaatcccagtctagttggagtataatcaaaaatgctgccaccatcaccatcattagtggcaccgctgttgttggcattcgtggtcacgagaagcggtaggtttgcgaagagttcctgacgcttagaatttggttgtagcaagtgcggcttatcggcgagaggcatggccatatccagtggcaattcaaagccttctggcgctgagcagcccaagcttaatgtcgattcagatcgagcaaagaatgcatggcggcgtgtgccctggcttcctgaaggcatgctgctagcggacatctgaacatcggcgttaaactcctctagattagccaactcgtcgtccgtatcatagctctcagtcataggtgacaaattgtttatacggccagaaatggtatcttgcttatcatagaagcctgaatcattgcgcatatagtagacaaaggcatcgagtacataggcaatgtgccgcaaggctgttatatccaacactggcaaggcgtctcggtgctcagaggtgtgtgagcgcatcagggataaacagtaggtgaagaagtcgcggcgtgaattggatcctttggatacgaaacttagtaataatcgtaaagcaagtacatggtcttacttacccataatatttacaccattaactgacgacgatgtggcaggagccggagtctggctactcgaagcctgggcacttaggttgagcggatgcagcggatggttgggatccgtgtagttggtcaaataagctccgaactttagctgtgcttcggtaccgtccattaccgtaaacatccaatcccacgtagcctttaaacgcttttccacaaatgcctgtaaaatttaaatttaaattgcaattatattcagtagtacgcagagcgaaattaattcatttcggaattattttattcggtacttacttggactgcgattgcttcatcattttgaatttttaatgatgtttcgatgtcatttagtacgttataggataaaatgcttataagctcggatatttgccttattgtgattccgaaagcccgtgccaagttgctggccgttgtcgccatggtgtgtggttcaatcgatggggtagtgactgtagtgctggcgggtacagtggagcggcgcagagccatggggtcaataaaaaccatattagacccggtgggcaccctcacggaggagcgcgcagtgtcacgactgcgtatggcccattgcatcgtttgaggagccagatcgctgcgagcgttcgagttggtagagcggcgttcaagttgctgctcattgaaattgaactcgtcggactgatcgtcggactcgccatcctccgatccatcttcttcttgggcagaggagtctcccgattcatcctctaggaagagaacaccaatgtctaaaagaaaacatattcaatgaagtaaatagaaaattaagtcaaattcaagaaactaaccattttctgagccaacggttgctcctgcttgcacgctcctctgcacctcttgattgctttggttgtcatcggagtcggactcagtctcggcgtcattgaaagtaaagtcattatcgctctcgtcatcttgcatgccgtcctcatttcgttgattttcaattagctcatcgtcttgattgtgggaattagcctcccggtttataacttcttccgattcggaggcgtcgcgtatagctggatttcaatgtacatttcataagggtttgtacaatttcatatagctattttctaaaactataagaaaactactcactttccatagcaactacatcgtagttttgttgaatattaaaattggcgctctgatcgtttccagcatcgtggacaagtatttgctcagaaggagactccacgttagagggggctaaaggatcaacgctgaacaaatcgtcagagttctaaaagaatatgataattgtcattaaactagttaaattagtatggattggtcgcaaatctataatcttatagaaaggctggtcatatttacacgtacatccagattcgacgatgacatcgtaaacggagctgttggacgcacaacgcccagtcggactggagcgatcagagcctcggatacctcacataactcctcgatggatatcttgtgcagcgtttggaatactttaacacagctctgcacgtatttgttgcaggatgagtgcgactttcgcttctccggattaggctgcttttccaggttgaaaatgacaaaaacgcgtgctacggaacgcacgaagcgacgcactacttcctcagcttccttgctacgattggacacgcttgcgttctgcaattcgcgcaccagggtgagtagcaaagtgtccaaatgatcgctagtgcactttacgatcaaactgtgggtaaacttgtcgagaagcgtagagccatgctgcgtctggataaacatattaaagccttccgaattagagttctccgatgcactgcctgctggattcggtacatcgcctctctccgcaccgctcatgatcattgagcgcacggcgttccagtcgatcagtagtctctccaaagcctttctggcgaacttcggtggctccagatcatggtccggcatatcattatcaatttcggctgcggaggtcttccgatttgatatcactgaattgtttccggtcgctccggtggcagcggtgctaacattgcgaacccttacactaaagcggtactgtcgctgctctacaatctggcgtccaaccgtttgaataaggaaaagaagaatcgattcacccttggagttaaatttggtgaccaaatctgtgcaggatactagtttgcacagcagtgcgaagcgctttgtgagatttccagcgatcagagccttacacttgcatttctcccaacaatcacagtaagcagtcggcgccgtacgcttcaacttgcagtcgtgtcctttgtggcagactctcgcgcattccgtgcagcagcacagggatccagtgaggccgcatgtcttgcactcgaaaatgttctggttgatgtgatcggctcctgtccatgtgaacgagcaggtatcattgtagcagatgacatgcagaggtgactgatccgcaggtgaaccattcgggaaaatcatggcctcctttagctgcggatcctgctcggacagcatgagaatcgtgtttagtagtatgattcctgcctcgtaggcgcgacacgaaacggatagcataaacggcgtttggccctgcgcatccttagtgctcagcatatggcagaggtacggacgaagggctggacttacgcacatctgctgaaggattgtcaaagcatgctcccgccgctgagccaggtcgaaggtgtaggtaggggaccccaacttgatgttggagagcatggaactctgggaggaggacggaattatctttgagatatcatcttcaatgctgtctgagacattctgcgaagagctggcgctcagattactagccgccggtgtttcagctggccaggggatgtaggcatggtcttcgttgtttgtagccattggctggctgccagactgttcagcctgatcgctatttattagacgattcatcatgtcgcgcagattggtacgattatccctgctcgtcgatgaggcggagccggcagcggatgaactcatagttgcaaagctggagttttcattgctcgaagacgcacttgctccaaatgcgatgctgctaacgtaagcgcttgtcgagacagttggaatggaacgcgccacggagagtcccactagtgatttcttctcgacaccaccgctgggagagtctggtggggaatccttgtttgaggatggggcgcacataattacgcaagcgtggaatatgtttcgggctccatcgcaacgttcttctacgacaagagccgtatccgcttgatcctccctctccaggcgaccgagggcggcaaagctattcttgacatcgcaccgcaagatgtgcggcataagcttttgagtatcaaagagcaaagcagtcatgcatacctttgacttcaaattcacgccggagagcatggccggcagggagattgtggacatagtgattgacttcaccggaggaagatcaaaccattgcggatccttgatcgagccaaggcaatccttggccaagggatatagggctccattgccatcacgaagcacaatggtactgctgtttccgctgcagtcgtcgttgcaagccattaatatgttgccaggcgtggagccaataaaagagttgcagtccgtgggaaataggcaattttgctcctgcttgcagttatacaggttgtaaaggctgtagtggattttgccgagaaccttcttgatcacatgaatgccgcgcgagtccacggccagggtgagtatttgtgcgccagctgcatcaccaccaacgttaatctttttcggctgtttttgcaaccagtctgggccacgggtggacatagcagtgcgaaatatctggacatcttcgcgtctcagcagccgacactgctgccagtcgtcctccttgccctcttccttggatgtggaggctgtgttagatgtggaacttgttgcggcagcagcagcagcaacggctgctgcatttattgccggaaaacgaacggcaacaaagtcgccgtcgaccttaagcacctttcccactgggcccaccttgtcctcgacaaacaccacgtccttcacttcccacagctcctcatccttccttccctcctgcggggcattggagtcctctttcgtagtagctcgcttagtacgcttgtgggatgtgacgctgccggtgtcgctgcatgtgctggatgccggtgaaggcggaggtggcatgtcgatgcgatctgttgactccttgctgtttgagaaggattgtccattcttactacttccagtgctgggcattgccgtggactttggcagatctttatccggagtaattccatgggcattaagattattgccggctgcttgggatttgtctacgccagagttcgtgttaatatttatgattttcatgcggcacacatcggtgaaggtccagactgaattcaaaagctgccccacctttgggacgccattggagcatgtgaatccgattgatccagattgatacatgggacacttcttcattatcacttgagcacccacattaatatcggtggcaaccaccttaaagggtttcttggtcttggtccggaatttgtcccacaagaagcggcgttgatcaaacggcaggactccccaccaatatatgttgttgctttcggtcttaacaaccgtgtatagcgagcagacgtagatctttgttatggagtccgatataaactcgttaaacgcgcagcaactgtgctccagcttggcgccgatgtaacctagttgctcgtccatccaagttgctactcgattggtttctgtaacaacggagcatctgatgaagttggccgaaataagctccactctttcaactatgttgagggaaacagttttgggatgataaacgttttcagtctgcaaaataggataaattatgagttaaagtatgagtaaagatttcaataaaactttggtttatattattttatattatttccttacctccgacttataaggctctgcatctgaccagcgccactggtacaaatctccgctctctgacaaggcaatgaactccgaatacaaagctcctatggtcttgaaccttacggaacttttctctggccatggctgcaattcttcagatatccaaatgggggacaacatgggggatggctcttttttcttggaatctaaattaaagtaggtgtcagtgtagcaagaggatcatcgtctttgcattttatcaacttaccagcatccttctcccaggtatagtcgtctttgcttatccagcgtcgtggtccgtagtactgacgatcccgccaacgactaaaagcctcgcggtcagcattaactgatatttgagctgaaagtccactgttaccagttaaggcagtgcctgaacttgttgagcgggtcgtcgattggttactgtctgcggcatttgcgttggcattactgcgttcactacgaatgcgatcgaacagcaagctggccaaatgtaaaacaataagtttaattcggtttttgtgtttatttaaaattacttactttcgaatgctggagtagttgctaaatatctcctccgagaaaagcccatctgagggatctatgatgacgctgttgttatctccactgaacccattatccagcagggagataaggtcttcgggcacgtaattatcggcaccttcttcggtatcttcagcttcttcatcatcgcgcgaaagcaaattgttcacagctaagttaacatcgaggttggtgcgctattgagggaattgtatgatattacacgaataagatgttcttgtatcgatgaatttacctgtaattctctaattatgagatttctgctcttgccctgtagaaccacctctgcttgggatatgagctcctccggcacatatgtagccggaactgttactaagggtcggctcgatgtactgcctccaatgatgacccctgtgctacgagatccggacccctgtccggtggaattggagcgacctgttgcgcgcagcaggcgtgctcttgagcgggccatcggtcgggatgaggatggggctttcgaagcactggccgttccgctgccaccactggtggaactataaataaacatcaatcaacaaacattcgaatctatgtaactggtacaccattaagcttaccattttgcgtctgatttggtcaagtcaagtttctcagaatttatagaaaaggacacgcggaatgccttgccatcctccagtaaaactccaatgtgcgcgggaccaatgacgacttccttcactggaattttcaactgttcgaatatgcgatggctgccataaccaaatcggttcaccttatccgacacttcacgaatcctaaaatgggagaaaatgtattaagaatacgagcaagtcgatgcatgttctaaatctcctaagcgtagggtgcattttatggatgatttctggccttgccagactttttatgattgacgactggaaaatttaaagcttctaagaaaagtgcacatcaccaaggaagaaaaagagccggtgttacgattatttggcgtttaaaggttttgggttatggaaaacgctgaacgatttcatgccatgtgctgaaagagcgacattcggcgaaatataatgtacaaatcaagcatgtgaaaacatgtttgtaacattgtacattttagtcggaagcatggacttctgcaagcttctttcgagaagcttataatataaacatttcaatagtttgctcagcacaaatagttaaatatgaacaaattaatcagcatgtatgcacatgcactcacacatgctaccgttcacatgtcgcacacattcgcacacacacacatatgcgaatggttagagaattaattgtggatgaaaagtgggaaacgcaagtgcatttcgcaaattctgcggctaatgtttacagaaccgcgtggacggcactagatgaggtaagtccgccagtgtctgtggctcgcgttttacgttaatgatcatatgtacatatcttcctgcgtatacatatagctgcgtacctacatattttcacataacaaatacatgcagccgtacgtacacaattacacggaattccgcgttcacatgtgcgtaattgcggtacgcgaggattatatttacctttcaataaactgatcgtccgagcccggtagcggttgcaaaacaaattgcatggaaaccattttaatttttcaactattcatgtacacagtgtcctcgttgaattttcatgtcacaaaacgttgagagactttcagagtgaccgtactggctagagctgggacgaaaaccgatgccgcccgactgtatcgatggttgccggaaaattcgacggtatcgatacattctccaaacaaatttattggtaaacaaaaactttactttcaaattaaattgacattgactacaatatgtgtacttaggctgtatatattttattaaatttaagatacagaagttcacgaatgcgtccattcttatcggttgtttttccttaaatagtggcagtccaaaaaatctccaatagaatatactaaaatatactaaagaccgctttaaaataatgaattggtagaaaactttgattgacaaacttttgagaagccgatttaaccgcttttacgtcgcgtaaaccgtttgcttaggaactagaaataaaattcagtttgttcactttgttgtatatttgaggaatttatttaggtcactgagtatcgttaatgatcttaaattagaaggaaattagataagtcagcagaaaagcatatacgtttactaaggagtttccaaatctaaagctctcaagggtccagatttttaacagaaggtatacctgaaaatagtttccttaaaaaaaaatcatattgtgacttttaaaacagttttgttaaaattttatcaagctatagcttttaaatgttttctcccttgctgaaaagtgaaaatattcatatatgttgtactcgtatattaaaatcgtgttataagtggagttattaaagcaagtttaaacacattaattttgctttaataatttaacgtagttctttcgtttattttatagcattagtgaaatttattttaaaagtattttttcatttctatttgggaaattatacatagaaccatgtgtatgtacagatataatttccgaatccgaaccttcttaccaaacgcagattactcgacaatgcatctaaatatatgtatagttaatgatatattatttatcgatt

SEQ ID NO: 20141 - DNA, 9097 bp, DROSOPHILA
tgacatgaaaattcaacgaggacactgtgtacatgaatagttgaaaaattaaaatggtttccatgcaatttgttttgcaaccgctaccgggctcggacgatcagtttattgaaaggattcgtgaagtgtcggataaggtgaaccgatttggttatggcagccatcgcatattcgaacagttgaaaattccagtgaaggaagtcgtcattggtcccgcgcacattggagttttactggaggatggcaaggcattccgcgtgtccttttctataaattctgagaaacttgacttgaccaaatcagacgcaaaatgttccaccagtggtggcagcggaacggccagtgcttcgaaagccccatcctcatcccgaccgatggcccgctcaagagcacgcctgctgcgcgcaacaggtcgctccaattccaccggacaggggtccggatctcgtagcacaggggtcatcattggaggcagtacatcgagccgacccttagtaacagttccggctacatatgtgccggaggagctcatatcccaagcagaggtggttctacagggcaagagcagaaatctcataattagagaattacagcgcaccaacctcgatgttaacttagctgtgaacaatttgctttcgcgcgatgatgaagaagctgaagataccgaagaaggtgccgataattacgtgcccgaagaccttatctccctgctggataatgggttcagtggagataacaacagcgtcatcatagatccctcagatgggcttttctcggaggagatatttagcaactactccagcattcgaaacttgctgttcgatcgcattcgtagtgaacgcagtaatgccaacgcaaatgccgcagacagtaaccaatcgacgacccgctcaacaagttcaggcactgccttaactggtaacagtggactttcagctcaaatatcagttaatgctgaccgcgaggcttttagtcgttggcgggatcgtcagtactacggaccacgacgctggataagcaaagacgactatacctgggagaaggatgctgattccaagaaaaaagagccatcccccatgttgtcccccatttggatatctgaagaattgcagccatggccagagaaaagttccgtaaggttcaagaccataggagctttgtattcggagttcattgccttgtcagagagcggagatttgtaccagtggcgctggtcagatgcagagccttataagtcggagactgaaaacgtttatcatcccaaaactgtttccctcaacatagttgaaagagtggagcttatttcggccaacttcatcagatgctccgttgttacagaaaccaatcgagtagcaacttggatggacgagcaactaggttacatcggcgccaagctggagcacagttgctgcgcgtttaacgagtttatatcggactccataacaaagatctacgtctgctcgctatacacggttgttaagaccgaaagcaacaacatatattggtggggagtcctgccgtttgatcaacgccgcttcttgtgggacaaattccggaccaagaccaagaaaccctttaaggtggttgccaccgatattaatgtgggtgctcaagtgataatgaagaagtgtcccatgtatcaatctggatcaatcggattcacatgctccaatggcgtcccaaaggtggggcagcttttgaattcagtctggaccttcaccgatgtgtgccgcatgaaaatcataaatattaacacgaactctggcgtagacaaatcccaagcagccggcaataatcttaatgcccatggaattactccggataaagatctgccaaagtccacggcaatgcccagcactggaagtagtaagaatggacaatccttctcaaacagcaaggagtcaacagatcgcatcgacatgccacctccgccttcaccggcatccagcacatgcagcgacaccggcagcgtcacatcccacaagcgtactaagcgagctactacgaaagaggactccaatgccccgcaggagggaaggaaggatgaggagctgtgggaagtgaaggacgtggtgtttgtcgaggacaaggtgggcccagtgggaaaggtgcttaaggtcgacggcgactttgttgccgttcgttttccggcaataaatgcagcagccgttgctgctgctgctgccgcaacaagttccacatctaacacagcctccacatccaaggaagagggcaaggaggacgactggcagcagtgtcggctgctgagacgcgaagatgtccagatatttcgcactgctatgtccacccgtggcccagactggttgcaaaaacagccgaaaaagattaacgttggtggtgatgcagctggcgcacaaatactcaccctggccgtggactcgcgcggcattcatgtgatcaagaaggttctcggcaaaatccactacagcctttacaacctgtataactgcaagcaggagcaaaattgcctatttcccacggactgcaactcttttattggctccacgcctggcaacatattaatggcttgcaacgacgactgcagcggaaacagcagtaccattgtgcttcgtgatggcaatggagccctatatcccttggccaaggattgccttggctcgatcaaggatccgcaatggtttgatcttcctccggtgaagtcaatcactatgtccacaatctccctgccggccatgctctccggcgtgaatttgaagtcaaaggtatgcatgactgctttgctctttgatactcaaaagcttatgccgcacatcttgcggtgcgatgtcaagaatagctttgccgccctcggtcgcctggagagggaggatcaagcggatacggctcttgtcgtagaagaacgttgcgatggagcccgaaacatattccacgcttgcgtaattatgtgcgccccatcctcaaacaaggattccccaccagactctcccagcggtggtgtcgagaagaaatcactagtgggactctccgtggcgcgttccattccaactgtctcgacaagcgcttacgttagcagcatcgcatttggagcaagtgcgtcttcgagcaatgaaaactccagctttgcaactatgagttcatccgctgccggctccgcctcatcgacgagcagggataatcgtaccaatctgcgcgacatgatgaatcgtctaataaatagcgatcaggctgaacagtctggcagccagccaatggctacaaacaacgaagaccatgcctacatcccctggccagctgaaacaccggcggctagtaatctgagcgccagctcttcgcagaatgtctcagacagcattgaagatgatatctcaaagataattccgtcctcctcccagagttccatgctctccaacatcaagttggggtcccctacctacaccttcgacctggctcagcggcgggagcatgctttgacaatccttcagcagatgtgcgtaagtccagcccttcgtccgtacctctgccatatgctgagcactaaggatgcgcagggccaaacgccgtttatgctatccgtttcgtgtcgcgcctacgaggcaggaatcatactactaaacacgattctcatgctgtccgagcaggatccgcagctaaaggaggccatgattttcccgaatggttcacctgcggatcagtcacctctgcatgtcatctgctacaatgatacctgctcgttcacatggacaggagccgatcacatcaaccagaacattttcgagtgcaagacatgcggcctcactggatccctgtgctgctgcacggaatgcgcgagagtctgccacaaaggacacgactgcaagttgaagcgtacggcgccgactgcttactgtgattgttgggagaaatgcaagtgtaaggctctgatcgctggaaatctcacaaagcgcttcgcactgctgtgcaaactagtatcctgcacagatttggtcaccaaatttaactccaagggtgaatcgattcttcttttccttattcaaacggttggacgccagattgtagagcagcgacagtaccgctttagtgtaagggttcgcaatgttagcaccgctgccaccggagcgaccggaaacaattcagtgatatcaaatcggaagacctccgcagccgaaattgataatgatatgccggaccatgatctggagccaccgaagttcgccagaaaggctttggagagactactgatcgactggaacgccgtgcgctcaatgatcatgagcggtgcggagagaggcgatgtaccgaatccagcaggcagtgcatcggagaactctaattcggaaggctttaatatgtttatccagacgcagcatggctctacgcttctcgacaagtttacccacagtttgatcgtaaagtgcactagcgatcatttggacactttgctactcaccctggtgcgcgaattgcagaacgcaagcgtgtccaatcgtagcaaggaagctgaggaagtagtgcgtcgcttcgtgcgttccgtagcacgcgtttttgtcattttcaacctggaaaagcagcctaatccggagaagcgaaagtcgcactcatcctgcaacaaatacgtgcagagctgtgttaaagtattccaaacgctgcacaagatatccatcgaggagttatgtgaggtatccgaggctctgatcgctccagtccgactgggcgttgtgcgtccaacagctccgtttacgatgtcatcgtcgaatctggataactctgacgatttgttcagcgttgatcctttagccccctctaacgtggagtctccttctgagcaaatacttgtccacgatgctggaaacgatcagagcgccaattttaatattcaacaaaactacgatgtagttgctatggaaactatacgcgacgcctccgaatcggaagaagttataaaccgggaggctaattcccacaatcaagacgatgagctaattgaaaatcaacgaaatgaggacggcatgcaagatgacgagagcgataatgactttactttcaatgacgccgagactgagtccgactccgatgacaaccaaagcaatcaagaggtgcagaggagcgtgcaagcaggagcaaccgttggctcagaaaatgacattggtgttctcttcctagaggatgaatcgggagactcctctgcccaagaagaagatggatcggaggatggcgagtccgacgatcagtccgacgagttcaatttcaatgagcagcaacttgaacgccgctctaccaactcgaacgctcgcagcgatctggctcctcaaacgatgcaatgggccatacgcagtcgtgacactgcgcgctcctccgtgagggtgcccaccgggtctaatatggtttttattgaccccatggctctgcgccgctccactgtacccgccagcactacagtcactaccccatcgattgaaccacacaccatggcgacaacggccagcaacttggcacgggctttcggaatcacaataaggcaaatatccgagcttataagcattttatcctataacgtactaaatgacatcgaaacatcattaaaaattcaaaatgatgaagcaatcgcagtccaagcatttgtggaaaagcgtttaaaggctacgtgggattggatgtttacggtaatggacggtaccgaagcacagctaaagttcggagcttatttgaccaactacacggatcccaaccatccgctgcatccgctcaacctaagtgcccaggcttcgagtagccagactccggctcctgccacatcgtcgtcagttaatggtgtaaatattatgggatccaattcacgccgcgacttcttcacctactgtttatccctgatgcgctcacacacctctgagcaccgagacgccttgccagtgttggatataacagccttgcggcacattgcctatgtactcgatgcctttgtctactatatgcgcaatgattcaggcttctatgataagcaagataccatttctggccgtataaacaatttgtcacctatgactgagagctatgatacggacgacgagttggctaatctagaggagtttaacgccgatgttcagatgtccgctagcagcatgccttcaggaagccagggcacacgccgccatgcattctttgctcgatctgaatcgacattaagcttgggctgctcagcgccagaaggctttgaattgccactggatatggccatgcctctcgccgataagccgcacttgctacaaccaaattctaagcgtcaggaactcttcgcaaacctaccgcttctcgtgaccacgaatgccaacaacagcggtgccactaatgatggtgatggtggcagcatttttgattatactccaactagactgggattctcgaattccttgaaaaggaacgagcgtgtttacgaaacagtcccgatcgattctagtaagacgggtgatggaaatgtaactaataaggctgagggctcaacagactctaatatttacgtacaattaaagaagaaacagggctcggatgatttcaaatcccacaaagaggctgacggtgagtaagagtgtatgcggtaaacaatttacaaacattaaattttcaatccacaggcaatcaaagcaagtacgaaaaagtcgtattaatggaaactgatgacagtcttccaagtacaagtaaatcgactgaagcattaatggccacacgaccagaggttatcatagcgccaaataaagcctcagtgtcgccagcgactgccgctcgcagcgtcatagttctcgcaggtggttcctgtttaaagacaattgattccgacataaacaactactcggcttcaaatctatcgaccgcagaacaagccaaatgtgatacacaatatcaaaagtcaacatcagaccacctgttattatttcctgctcgtggttctcagttttaccaaagtaatttttcggaattgccgtcgtggaactttttacttagccgctggaagctaactctggacttattcggtcgcgtttttatggacgacgtcggaatggaacacggctctgtgctgccggaactgcgaggctttcccgtgaaggagatgcgtttccgtcgccacatggaaaaattgcgcaacggacaacaacgtgatttggtgctttgcaagttggagcgcaatcgtgaaagcttaattgttcaaacgttcaaggaactgaatacccagtttggcaaccaaagtcggcgcatccagccgcccatcacattcaacagagtaaaggtgacattcaaagacgagccgggcgagggatcgggtgtagcgcgcagtttttacacatcgatcgcagaagcattgctggccagtgctaagatccccaacttggagtccgtacaggtgggcaccaatcatagcaagtacgtagtgccgttctcgagcatcctgcgcagcagaacagtatcggggtctagtcgcgatcagtccactctgcagaggcgtggttccaacagcaaaatattgtggcgttcggcccgtgagaggaaggcattgaatttggatgccagaccgtatactccaccaaatagctcagataatgctacgccggaaagcctgaatgatcacttgtccgttcacctacaacaaattggggaacgtctttacccgaagatccattcgataaaccaaacgcatgcaccgaagataacaggaatgctgctggagatacccactccgcagctcctgtccgtaatttcctcagatgagacgctccgtcagaaagtgaatgaagcgatagaaataatcacgtttaaacaaaaatctgagaccagtgcacaaagtagtcaaccaaaaaaatcaccatctgtcgtggtagtggatcccgttgatgatgataatgaaccattattttactcaccgggaaagcggggcttttacacaccacgccaaggctttgcatcattcgagcgcattaatgcatttagaaatattggaagacttattggactttgtctactgcaaaacgaattgcttccactgttcctacaaagacatgtactaaaatacattcttgggcgtaaaattaagttccacgacttggcatttttcgatccagcattgtacgaatcttttagacaaattattcaaaatgcccaaacaaaggaaggcgaggaaactataaatcgtatggagctatgctttgttatcgatttgatgaaggaggagggctgtggtaacagagagcttatcccaggagggcgcgatgtcgctgtcacatcgagtaatatattcgagtacgtcagacgctatacagaatatagactaatcaaatcccaagaaaaggcactggaggcactgaaggacggagtttttgacgttttgcccgataacagcatgattaacttaaccgctgaggacttgcgtctgctgctaaacggtgttggtgatataaatgtttcgacactaatttcatacactacctttaacgacgaatctagcgagggtcctgataaacttttaaaatttaagaaatggttttggagtattgtggagaaaatgaacattatggaacgccaggatttggtttacttctggaccggctctcctgcgcttccagcttcggaggagggattccaaccattgccatctgtcaccataagacctgcggatgactcccatctaccgactgcgaatacttgtatctctcggctgtatatccctctttactccagcaaatctattttacgcagtaaaatgctgatggccattaaatccaaaaattttggatttgtataagcgattggaagtctttcccatctgtataagcttcaaattcatttcttaattaactttagtttttttttgagtttcgactttcgtcatatttaaccataccattcccatttcggattatatattgtttaaaatttattcgaatttgaacaatttgtacgtaacattattgaacaagattggctcgggtcatgacggtcttgcttgacccaacgtgtagtaaaaatatgaaactccccaacatccattgtaaccaataaaacggccaattaggtaataggaagcctatgttttaattattaaacttttaaataaaatatgttttctaaagta

SEQ ID NO: 20142 - protein, 2165 aa, DROSOPHILA
MQFVLQPLPGSDDQFIERIREVSDKVNRFGYGSHRIFEQLKIPVKEVVIGPAHIGVLLEDGKAFRVSFSINSEKLDLTKSDAKCSTSGGSGTASASKAPSSSRPMARSRARLLRATGRSNSTGQGSGSRSTGVIIGGSTSSRPLVTVPATYVPEELISQAEVVLQGKSRNLIIRELQRTNLDVNLAVNNLLSRDDEEAEDTEEGADNYVPEDLISLLDNGFSGDNNSVIIDPSDGLFSEEIFSNYSSIRNLLFDRIRSERSNANANAADSNQSTTRSTSSGTALTGNSGLSAQISVNADREAFSRWRDRQYYGPRRWISKDDYTWEKDADSKKKEPSPMLSPIWISEELQPWPEKSSVRFKTIGALYSEFIALSESGDLYQWRWSDAEPYKSETENVYHPKTVSLNIVERVELISANFIRCSVVTETNRVATWMDEQLGYIGAKLEHSCCAFNEFISDSITKIYVCSLYTVVKTESNNIYWWGVLPFDQRRFLWDKFRTKTKKPFKVVATDINVGAQVIMKKCPMYQSGSIGFTCSNGVPKVGQLLNSVWTFTDVCRMKIININTNSGVDKSQAAGNNLNAHGITPDKDLPKSTAMPSTGSSKNGQSFSNSKESTDRIDMPPPPSPASSTCSDTGSVTSHKRTKRATTKEDSNAPQEGRKDEELWEVKDVVFVEDKVGPVGKVLKVDGDFVAVRFPAINAAAVAAAAAATSSTSNTASTSKEEGKEDDWQQCRLLRREDVQIFRTAMSTRGPDWLQKQPKKINVGGDAAGAQILTLAVDSRGIHVIKKVLGKIHYSLYNLYNCKQEQNCLFPTDCNSFIGSTPGNILMACNDDCSGNSSTIVLRDGNGALYPLAKDCLGSIKDPQWFDLPPVKSITMSTISLPAMLSGVNLKSKVCMTALLFDTQKLMPHILRCDVKNSFAALGRLEREDQADTALVVEERCDGARNIFHACVIMCAPSSNKDSPPDSPSGGVEKKSLVGLSVARSIPTVSTSAYVSSIAFGASASSSNENSSFATMSSSAAGSASSTSRDNRTNLRDMMNRLINSDQAEQSGSQPMATNNEDHAYIPWPAETPAASNLSASSSQNVSDSIEDDISKIIPSSSQSSMLSNIKLGSPTYTFDLAQRREHALTILQQMCVSPALRPYLCHMLSTKDAQGQTPFMLSVSCRAYEAGIILLNTILMLSEQDPQLKEAMIFPNGSPADQSPLHVICYNDTCSFTWTGADHINQNIFECKTCGLTGSLCCCTECARVCHKGHDCKLKRTAPTAYCDCWEKCKCKALIAGNLTKRFALLCKLVSCTDLVTKFNSKGESILLFLIQTVGRQIVEQRQYRFSVRVRNVSTAATGATGNNSVISNRKTSAAEIDNDMPDHDLEPPKFARKALERLLIDWNAVRSMIMSGAERGDVPNPAGSASENSNSEGFNMFIQTQHGSTLLDKFTHSLIVKCTSDHLDTLLLTLVRELQNASVSNRSKEAEEVVRRFVRSVARVFVIFNLEKQPNPEKRKSHSSCNKYVQSCVKVFQTLHKISIEELCEVSEALIAPVRLGVVRPTAPFTMSSSNLDNSDDLFSVDPLAPSNVESPSEQILVHDAGNDQSANFNIQQNYDVVAMETIRDASESEEVINREANSHNQDDELIENQRNEDGMQDDESDNDFTFNDAETESDSDDNQSNQEVQRSVQAGATVGSENDIGVLFLEDESGDSSAQEEDGSEDGESDDQSDEFNFNEQQLERRSTNSNARSDLAPQTMQWAIRSRDTARSSVRVPTGSNMVFIDPMALRRSTVPASTTVTTPSIEPHTMATTASNLARAFGITIRQISELISILSYNVLNDIETSLKIQNDEAIAVQAFVEKRLKATWDWMFTVMDGTEAQLKFGAYLTNYTDPNHPLHPLNLSAQASSSQTPAPATSSSVNGVNIMGSNSRRDFFTYCLSLMRSHTSEHRDALPVLDITALRHIAYVLDAFVYYMRNDSGFYDKQDTISGRINNLSPMTESYDTDDELANLEEFNADVQMSASSMPSGSQGTRRHAFFARSESTLSLGCSAPEGFELPLDMAMPLADKPHLLQPNSKRQELFANLPLLVTTNANNSGATNDGDGGSIFDYTPTRLGFSNSLKRNERVYETVPIDSSKTGDGNVTNKAEGSTDSNIYVQLKKKQGSDDFKSHKEADGE

SEQ ID NO: 20143 - DNA, 3576 bp, DROSOPHILA
catggcaaccattagttttgttatttaagcggaagataatcgaatagattaatggtatgcgtaaaactaaatacatattgattcgcattgataaatcagttcgctacactcagtctctgacgcagatagcaatctctgagtaaaaatagtagaatataagcttgtagttaaagtgaaggagagccaagtttgtgtcacattaggtttaaatagatgggacgataatactaaggttactaaccgaaataaaagtattgataacgtagccaaaaaaaaaacgctaacaaaccattacacacattttcagtgtgataaggaactcgttcacactaactacttataaagttgcgtaacttaattgttaaacgggttatctaagcctagcacaacaaaccaaacgatgtgagtggtttatctgcggcagactgatgtgacatctgaagttggcctctgtacattatcgtgcataaaacactactgttcatggaggctcaaacgaggggcttaagcccctgacggttgtcacggcttaaaagtgatgatgatggtggaaaaaaggagaagccatatccttggctttaccagcggttaggttttgtgcggatgataacagatgttttgtaatctttctgactcagaccgaacaaaagtacagtcgttttacgtaagaatacactataacactatacacgatatcttcttaaaagctatgctatagctattcccactttgaattcccatttagtcgtactattgaacttggttttaccaccttaagcagttgcagctccttgattacccctaaatggtgtatattctggtaatacagtccaaataacaatcacttaataggtattcaaatatgaaaacaaacaagtcatcccctgattgcatagcactcgaagtggtttgataaggcttatctgagcttttgatgccgtttaaggcgagacctaattaactaatgaaccagtttacttgcaattgccgttgtggttaaatgggtggaatttcgaggtgtctcgcccttcagatagtggttctgattgccggagcccatggagccaacattctgggtctgttcaccagcctgagtccgtcgcacttggtcatccagatgtcgatggcccggattctggccgagagggggcacaacgtgactgtagttacgatcctaaaacctccgtctctacacaaggatatcaaccacattctggtgccaatggaagaggatatcctacaggcattcaattctgtggtcggtggaatgacaaagacggacaatagcaatgcatacgtgtccatgtttagatcggtcagacagttgagcgagacgttctccaagatgggtgatgtgatgaagcaaccgttggttaaagatctctacgagcacccggacaacaagttcgatttggtcatggtgggctactttatgaactgttatcaactggccctggcccacaaactgaaggttccgctggtggtggccctttcgaacccgccatcatttttgggataccttttgggcaacccctgggaagtctcatatgtgccgggcatgagtgtgtccattaaaggtggcaagccactgggctttggacaccgtgtgctcaacctgctgggaagcatggcacagcggctgttcatgttcataattgagcttaggaatgccaggatctacaggttggtatcaacaatatgtttaatcaacaggagctactacatcttaatttttcagggagatctatggcgacgatcccactctgcccagctatgaggacttgcacaaaaatatatcgctaatcttctttgcctcgcatgggattagcgaaggacccatccgtcccaatgtgccagctgtaattgagatcggaggaatacaagtcaaggagcaacccgaaaggctgccacaaaacatggaacagttcctgagcgaagcgccaaacggagctattctactcagcctgggatccaacctaaaggaggaccatttgaagtccagcacggtgcagaaaatgtttaatgtgctctctaagctgcagcagaaggtgatttggaagtgggacgacctggataatataccgggagagtccgaaaacatactctactccaaatgggtgccccaggtcgacgtcctggcacatccgaacataacgctgttcatcacccatgcgggaaagggcggcttgacggaggcccagtatcatggcaaacccatgctggccctaccagttttcggtgaccagccctccaatgccgatgtcatggtgatgcatggctttggaatcaagcaaagcatccttaccctggaggaggacagcttcctgcagggaattcgagaggtactcgataatccgaagtatgccactgccgtcaagtcgttctcaactctctatcgggatcgtcctctaagtcctcgtgagaccctgatctactgggtggagtatgtgattcgataccacggagctccgcacatccagagtcctgtggtgcacatgagctacatagcagccaataacctggacgtatatgctgtgatcctcggaaccgattgttgctctctgctttattactaaattactgtttggtttagttgttggaaaacttaggaaaaattctagaaaggcaaaagttaatcagaagcataagctcaagaagaaacagagctagttaaaagttaaaaagccacctcctgccaaatagttttttaatagagcaatattataaatatttatattaaattcaaaccattttttatttcgtcttaaaaacggaaccgaacaggaactatttttaatagcatgaattcaatgtttgcatttaagtacccagtactttcacgaaacggaatataatgcttaaaagtgttaaaaaaatatgtttaaatgaaaagcattttatattctttttttttggattttcatattttaacaatttctttttcattttatatgtcctctttatttggccacactgaacttcagggccacaagttgtcaccatttggtgttcgcaaaagtcataaaatcatttaaataaacaaaccgctttcggtgggtggggaagttgggaatctgggggtcctgctgaatatccgaacctacggtccgcagttaagcgccagtttttcgcgaccctattccgacttttcctgtggcggtcacttttgtttttatttacggctttcatgctgctcctgggctcagttggtggccaacgaggtcctatctgcgctgcaactacgtgcggcaacatataaaatttgcattaaaattactttgattgcaaattggtcgccggctacaaaaaatgcattctgcaaatccccggctcgtttttatgatcctttttttttgtttttttgtttttttttttgcatttgcaaaatgtattctctgttgtttttggtcgcgtgcagcctattaaaaaatatgtttttgcgtaaaatattgtatttttaaggattattgattttatttgaccaccagggagtgccatttggctggctcgttttgtttttacacaaccttttaagcccattagttgcgcagcaaaggggtatattgtgggcgacca

SEQ ID NO: 20144 - DNA, 1521 bp, DROSOPHILA
atgggtggaatttcgaggtgtctcgcccttcagatagtggttctgattgccggagcccatggagccaacattctgggtctgttcaccagcctgagtccgtcgcacttggtcatccagatgtcgatggcccggattctggccgagagggggcacaacgtgactgtagttacgatcctaaaacctccgtctctacacaaggatatcaaccacattctggtgccaatggaagaggatatcctacaggcattcaattctgtggtcggtggaatgacaaagacggacaatagcaatgcatacgtgtccatgtttagatcggtcagacagttgagcgagacgttctccaagatgggtgatgtgatgaagcaaccgttggttaaagatctctacgagcacccggacaacaagttcgatttggtcatggtgggctactttatgaactgttatcaactggccctggcccacaaactgaaggttccgctggtggtggccctttcgaacccgccatcatttttgggataccttttgggcaacccctgggaagtctcatatgtgccgggcatgagtgtgtccattaaaggtggcaagccactgggctttggacaccgtgtgctcaacctgctgggaagcatggcacagcggctgttcatgttcataattgagcttaggaatgccaggatctacagggagatctatggcgacgatcccactctgcccagctatgaggacttgcacaaaaatatatcgctaatcttctttgcctcgcatgggattagcgaaggacccatccgtcccaatgtgccagctgtaattgagatcggaggaatacaagtcaaggagcaacccgaaaggctgccacaaaacatggaacagttcctgagcgaagcgccaaacggagctattctactcagcctgggatccaacctaaaggaggaccatttgaagtccagcacggtgcagaaaatgtttaatgtgctctctaagctgcagcagaaggtgatttggaagtgggacgacctggataatataccgggagagtccgaaaacatactctactccaaatgggtgccccaggtcgacgtcctggcacatccgaacataacgctgttcatcacccatgcgggaaagggcggcttgacggaggcccagtatcatggcaaacccatgctggccctaccagttttcggtgaccagccctccaatgccgatgtcatggtgatgcatggctttggaatcaagcaaagcatccttaccctggaggaggacagcttcctgcagggaattcgagaggtactcgataatccgaagtatgccactgccgtcaagtcgttctcaactctctatcgggatcgtcctctaagtcctcgtgagaccctgatctactgggtggagtatgtgattcgataccacggagctccgcacatccagagtcctgtggtgcacatgagctacatagcagccaataacctggacgtatatgctgtgatcctcggaaccgattgttgctctctgctttattactaa

SEQ ID NO: 20145 - protein, 506 aa, DROSOPHILA
MGGISRCLALQIVVLIAGAHGANILGLFTSLSPSHLVIQMSMARILAERGHNVTVVTILKPPSLHKDINHILVPMEEDILQAFNSVVGGMTKTDNSNAYVSMFRSVRQLSETFSKMGDVMKQPLVKDLYEHPDNKFDLVMVGYFMNCYQLALAHKLKVPLVVALSNPPSFLGYLLGNPWEVSYVPGMSVSIKGGKPLGFGHRVLNLLGSMAQRLFMFIIELRNARIYREIYGDDPTLPSYEDLHKNISLIFFASHGISEGPIRPNVPAVIEIGGIQVKEQPERLPQNMEQFLSEAPNGAILLSLGSNLKEDHLKSSTVQKMFNVLSKLQQKVIWKWDDLDNIPGESENILYSKWVPQVDVLAHPNITLFITHAGKGGLTEAQYHGKPMLALPVFGDQPSNADVMVMHGFGIKQSILTLEEDSFLQGIREVLDNPKYATAVKSFSTLYRDRPLSPRETLIYWVEYVIRYHGAPHIQSPVVHMSYIAANNLDVYAVILGTDCCSLLYY

SEQ ID NO: 20146 - DNA, 2809 bp, DROSOPHILA
tcaacatttatgaacgctgattgttttcgcgactgaccgcgacgccttcgaataaaagggttgctactcccaaaagatacggcatatacttaggtggatctggatctgtatcggagaccctcaccgcgaagcttgagatttgtgtgactcataacgagtttcctctcgcctcgcttggaccttaagtggatattgcattgtcgagggactcgcgatcctttgtcttgcccagctgccgctttgtttggtcttggacagtccagtaccctgctcgattaatcctgtttccagtggcacttcttgtgttacgccagcttatcaaatagacggagtgaagtaaaggattctttatgtaaatttcgtatgagacttacgtttttccccggattaatccagttcaaatcaatgcgcgagtttcttattaaagctgcacggggatggttatgatctcggacaaacgaaactatagtttgatattcttcacgcctaaatgattaaattttataacaaaggaagctgcttcggatggacctttatttgcacaaatctttaaagaatataaatctatttgaactgagttataacgaaatttattgcaaatgtgaatctggttttgaaattcctgtttgctgtttacctactcaataaaggctgctgaatcacatgtgcagtgaataaaagccatcaccatacacgccccaccaaaattaagacacgttgcactgccaatttagcggtttatttatttatttcacttccagacaatcccccattgtttgaatctggcgcatgccaaggaactctgtccgtagtcccaaaacaatgagccgaaaatttcgatcacaacaatacaataaccatatgcacagtaatgcaaaaataccaaaatcaccttccgcattgataagtctagttttcatacagtttattttagtaaccacttgcaaacaaaattttaagatttaccgaattgcatacgactgccaaaagagaattgcatttaacaacttgttttgagcgcacttgtaaaggatatggccaggatgcgttcgtgcaggatcatgtaggagaaaaactgcaggacactgaggaacaagtactcgttcttgggcacatcgaactggcgatcatggattatggtagccgtgtacatcaccatgcagacggccaccagggcgaatgtgttccgaaccgcaaaatatattccctggtagttgataaataggacattgataaagaatatgatcatcataatgttggctattgccaccaaacagctgagcagcagatcaccgggaacaatgaacatgggaaagtaggcgccccaaaatatcgaggccaacatcaaggcaaccactacaatgccggcgtagaagttgacgagtctattctcattgtgcttctgttccatggctatataaatagttgagctttccacgatcgctgcgataatgatgtagttaaagggcaccttgcgtcctagcttggtccacgataaagtggcgactgcgaaaaaggtacacagaagccaccagccgtagcgctcctccgatctgctgtggctcagcatatgggtgtaacctataatgatccactgtgtcaatgcgatggcggccaggatcacactaagtccgtatatcttggccgcatgactgatgctctcatccggtggctcgccatagacctcctgatcgatgttccgaaaagtgtttttttgaatacttggcattggactaggaaataccagagttgataaaattccaattatcgatttcttgactttattgctcgaaacaaattcaaatctttaaccgaaaggtttctactgggttatctagatcggatttacaatacttgccttgagcggtctgcattctgtacatattgtagcaggtggaaatgtataacaattagtaaacatttttattaatcacgttcacattggaatagtagataggccgtgtaaatcaactgccaaacttccaagaatctccccttcaatcgtattagagaacacgcatatgcaaaagaacagggtaaatgagttaaggtagatcagcatggagcagatcggttcaagtccaagcggggagtattgcaatcgtccgtgcataaactgcgcttccagggggatgactattaataccagggcgctcagcacagcacagaaggtcggaaaaaagtatcgcgtggatactacagacaaaacgctgagcggaaggagagctaccaggaaaatggtcacaatcactccggtgacgaggccattgggaagaaacgattttcggcatttagctccagagaacatcagtccgcccaaaaccagtgccattacggtaaagtagagcaccaagtcgggaatgtcatacatgtttacatagtatgcggcggacagcgttaagagtcccacaaccccgccgaccattgtccagacgatcagtggccgaacgcgactgatgggcaggcagatcaggactgccaggatggcgagggcgaaaagcagccacacgtacggcggaaccggcaggattctaacaatgcttatcttgagcgacgcaataaacattaagggaaatgccgatgcggaacacagtagtacggcttctatgtaaacagtacgggcaaacactagctgcacctcgtctgcttcctcttccaattccacttgctcatgctgacaacaactcatcgatccgaattttttgagacagaaatttcaaaaattgatgtaattcgacattttgctaagattgttcactagtattactgaggtataccaatcaaaaaccaaatggcctgttcattgatt

SEQ ID NO: 20147 - DNA, 809 bp, DROSOPHILA
aaagatttgaatttgtttcgagcaataaagtcaagaaatcgataattggaattttatcaactctggtatttcctagtccaatgccaagtattcaaaaaaacacttttcggaacatcgatcaggaggtctatggcgagccaccggatgagagcatcagtcatgcggccaagatatacggacttagtgtgatcctggccgccatcgcattgacacagtggatcattataggttacacccatatgctgagccacagcagatcggaggagcgctacggctggtggcttctgtgtacctttttcgcagtcgccactttatcgtggaccaagctaggacgcaaggtgccctttaactacatcattatcgcagcgatcgtggaaagctcaactatttatatagccatggaacagaagcacaatgagaatagactcgtcaacttctacgccggcattgtagtggttgccttgatgttggcctcgatattttggggcgcctactttcccatgttcattgttcccggtgatctgctgctcagctgtttggtggcaatagccaacattatgatgatcatattctttatcaatgtcctatttatcaactaccagggaatatattttgcggttcggaacacattcgccctggtggccgtctgcatggtgatgtacacggctaccataatccatgatcgccagttcgatgtgcccaagaacgagtacttgttcctcagtgtcctgcagtttttctcctacatgatcctgcacgaacgcatcctggccatatcctttacaagtgcgctcaaaacaagttgttaa

SEQ ID NO: 20148 - protein, 242 aa, DROSOPHILA
MPSIQKNTFRNIDQEVYGEPPDESISHAAKIYGLSVILAAIALTQWIIIGYTHMLSHSRSEERYGWWLLCTFFAVATLSWTKLGRKVPFNYIIIAAIVESSTIYIAMEQKHNENRLVNFYAGIVVVALMLASIFWGAYFPMFIVPGDLLLSCLVAIANIMMIIFFINVLFINYQGIYFAVRNTFALVAVCMVMYTATIIHDRQFDVPKNEYLFLSVLQFFSYMILHERILAISFTSALKTSC

SEQ ID NO: 20149 - DNA, 2651 bp, DROSOPHILA
tttgaacagcgattcataatttagccaaatgattcgtcgaacagaaggtgggaactcaaccaccgacttgtttcgcattgaaacacgcaaaatgcaaaagcaaagccctgccttaaacctgttcaattttattcaccggaccactcattgtttggaatattattcaccacttgagagtggaatcgccgtctacagacctcaagttaacaacttttgtccaagtttgagaagcaattttaacccatatatcccggtgattagtggcttccaatccgtgtgaacttcaggatcctgaaaacctgatatgttatcagagctacagtttcaggattaaacagatgcttattatatctatcactttttatatgtagggtacagcttgcgtttaagaacgagtatcttatagtcgagttcgagccgggtagaaattatatttaaatgccatccacaagtggactacttgcctaaaaatacctgtcttgaattacccgttatacactctatataaaaacatattaagtctaaagctgcgcaatctacacttgagatcagtatctaccggcaagtaaaatagctacatataatgttccgtagatattaacccaatgataagatccgtattacgagacatatggggtctcatataaaccgtataatgactcgtcgtaatcaggtggcgtcaatcggaccgctaaatggtttgagatcattattcacacgctcagaacaacaaaactggtgtcattcaacctcggggccgcttgtttagcgaacatcattttgaaaaaaagctttgataagaactgtgcgtcgggtcagtgggtggttgggcggtgggaggtgggcggtgcgttgggaggagggccccatattcgtgaaaagctcagaacggagacgatggcgcaagctcactgcatgtttgatggcctggcatgtatataacaagtaaattgcgctaaatttctctcagtctcagtccgcgagcgaggcaaatgcgaagatgtcagcgatcaccatacgcgccatgacaatcggggattacgaggaggtcgaggcctttctcgcagtgcacttcttcaagcaggagccgctaatgctgatcccccaggaggatcccaagcagagcgaggtgtcttccgcggaggctgagctacaccgctcgctcataccccaggatctctccctggtggccgtcgacggggagcgcattgtgggcgtggttctggccggtgaattggtacccgaggatctggagagggagtaccaggaggctgagcagaaggagatcacgtgcctgctggacaagatacacaagtttctggccgggatcgagcggcaggccaatatcttcaagcactacggagtggagcgggcgctttacctgtacatgctcggtgtggacgtgtccattcgacgccagagagtgggcacccgcctggtggaggccaccattgagctgggtcgccagcgtggatttcccgtcgtcacatctacctgcagcaaccagaactccaaacgccttatgaccgccctaaacatggagtgcatactcacaaaggattacgcggactacaaggacgagcacggggagatcgtcctgcgggcatccgagccacacacctccgccagtgtcgtggccatacgactgtaagagtaggaaaattaccaaagaatgtagaaacatagctcatggcaacatgatagataggcaatataaggagggggagtcgtaagaaactaaaccgattttgatagataagaaagctttgtttatgtagacattgtaatcaactttgtattgttttcagttcaagtatataggaattcaaactattatcataagtgtttgtcgttgatttcttgggtcttgcaaaataaatgagtaagcgtgcaattaaccgggtatttcccagcactgtcccatccaagatcgtaactcttccacataaatcactttggaaaatctgtccgatttgtctgtgcgattttaagtgtgggataagaaatccggcgatttgcttttgcccaacattagcagttaaagtcgtaaacgagaacagccacttctttcccgtcgagtggcacatcccacgaactttgccctcccattagctcggccttgctgcggggacccacttcatcgtattccatctcggtcgtccattaaagggacgcagcactgttgtcggcactgcggttgccctgctctcatttttccgctttcgcactaaaactaattgttgttttattgtgtttgtaatccaatccactggcgaaacgctagccacatgcgatgcaggcgcaaaccatacatatatatgagatacacatgggcgacggattactccccttcgtcgtcttatctgtgattatatatataaaacatatgattatgtaacatgtgcgttgttttggtttcgattggccgcgaaggctgagcagaattatggatctcacacttggctaccttgagcagaaagctttcttttcacgctaaccgagaagcttttctgattctctggtcgcaagaacctagaagttgtgacaattttcccagatactttttttatgctgccgagttcatttgatgaaggcatgtcagaatagctcgaggtagttagtaacttgaaggattagcattcggtacatag

SEQ ID NO: 20150 - DNA, 651 bp, DROSOPHILA
atgtcagcgatcaccatacgcgccatgacaatcggggattacgaggaggtcgaggcctttctcgcagtgcacttcttcaagcaggagccgctaatgctgatcccccaggaggatcccaagcagagcgaggtgtcttccgcggaggctgagctacaccgctcgctcataccccaggatctctccctggtggccgtcgacggggagcgcattgtgggcgtggttctggccggtgaattggtacccgaggatctggagagggagtaccaggaggctgagcagaaggagatcacgtgcctgctggacaagatacacaagtttctggccgggatcgagcggcaggccaatatcttcaagcactacggagtggagcgggcgctttacctgtacatgctcggtgtggacgtgtccattcgacgccagagagtgggcacccgcctggtggaggccaccattgagctgggtcgccagcgtggatttcccgtcgtcacatctacctgcagcaaccagaactccaaacgccttatgaccgccctaaacatggagtgcatactcacaaaggattacgcggactacaaggacgagcacggggagatcgtcctgcgggcatccgagccacacacctccgccagtgtcgtggccatacgactgtaa

SEQ ID NO: 20151 - protein, 216 aa, DROSOPHILA
MSAITIRAMTIGDYEEVEAFLAVHFFKQEPLMLIPQEDPKQSEVSSAEAELHRSLIPQDLSLVAVDGERIVGVVLAGELVPEDLEREYQEAEQKEITCLLDKIHKFLAGIERQANIFKHYGVERALYLYMLGVDVSIRRQRVGTRLVEATIELGRQRGFPVVTSTCSNQNSKRLMTALNMECILTKDYADYKDEHGEIVLRASEPHTSASVVAIRL

SEQ ID NO: 20152 - DNA, 11467 bp, DROSOPHILA
gatgatgctgatgtccattcagtgtgcttttaccgtgtctgtggacgaggaaaataccctgttagatctgtgattacacccttgatgataccaaatatataattttaatgatttttctactgttttgtttcttaggatagtgtttccaaattgctacttcaactacgtagttccagttgctagagagaaatagtctagagagcaaggccgtttgatgttgtgtttcggtttttaaattccaatttcattgatgatttcagttgactttttttttctggtttccagcaacatgttcatagtcagtttttagagttgattctactgatagagcgaagtgtgcgtgaggttagaaatttaagtgctgtgatttcattaataatagtcaaacatgcaagagaattatttggttaaattatagaattgttatattagtagagtttgaattcagtttcacttttaagtttaattaaacgtttttcatagtgctacatttgatagtagagaaattatagtttaatgcccaattccaaaccacttttcgtacttcccgctaaatcccaacatgcaatactgggtgttagaaaagtatagggaatttggaaaaaaaacgcttacgctgtgaaaagtaaaaacagaacccagacaggccctcttttcttttttgtgcttgtgtgcattggccgagtttttgattgtgtgtgcgctccaaaataaataataatcaaaattaacaacgaaaatctctcacactcgaatattatttttgggatttaagtattagtatggggaacacagtggttggttggttgttggggtggtgattaggaaaatgctgttcactttttgcccagctgtgggttatcaaacgtaatcgtgcatttgggattatttgggtgtgcttgtgtgatttttgtgacgagatcctgtcagccaaaggatatgtgtgtcatatttatttgaatttttggtttcttttgggcctttgtctgtcccgcgctgactatgaacatgtgcagatgccgaatggctggtgggtggacacactgctgcgcacttgacgcattttcagcctttttggccagccgcccagccggccacgcccctcccgagccgccgcccctgtcgccgatgcaccaaaaagctgcgcatgctcattgctcagattgttttggtatggacgcagcttgtccgccttacccagctcctcgctggtggcatacagcagatagttgtcatagacatggctaacactcgagttccgtttggccggcaaatagggcagaaaggcgaagctcgagctggtcgattgggtggccttcagggagggtttcttgcgggccacactgcgacacctcagggtggactgattcgagtagctgggcggtatcatctgcagcttggtgcgatactcatagctggcgggcggattcactggcactgggattagggatctctttcgtttgctgcgcggcggtggctgcggtgctttcgtcaccgactctacctcatcaatgctcgcgtagtccgcctcttttgcgggcccatcggcgctttcggcactatgctgttccggtgactcgtcggtggtttcggtattggctaaattcgttacgtatacgtacgtcagttcgtggtggtgcgtgggtggtgctgtggtggtgctggctgatgcagatgcagatggtttatgcgctgtggttttcgatgctttcgaactggctgttgtgctcgtggtcgactttttgtgtatcgttgccgagtcatggatactgcgactcgatctcgtcttacttgggcgtctgctctcccggcttcccgacgatgggtgctcactgtgcctagagcgactggagtgacctgtagttgggaaaattgagaatttttagatttaaccataatacaaaattataccaaaaggcagttttcattcatattttttataattatattctcagactaaatagcctcaaaaataacatgctggtggagtcaaatagtgtaaactgtgccttttgaactagtaaaaattacttgattacgtttcagcttaaattagtttaaagatttaaatcagtctcagtgagggcctggactaaaattacattgtgcgaagtgtgtgtacgacggttgtgtaaaaagaaattattaacattttaatcagttaaagtttttgataatctgttaaatgtaaaaagttgtggaagttgtatgtgttggctgcaagtgtttctataagttgattttgaagacattattgttaaaactatttattacatcttttttcgtgagatcaatgcaaagtgttgctaggataatttaatcagagtgttgtaagttttgataaaagtgttaattaatctgatcaaaactaaaattcatctggcgaacctaaaacgtttgttcagcctttgcggctgtgtggcacccataatgagtaagcccaaaacaagaagttctgcaagagacaggatcagattaaccggacttgatcactcggttgtatcctttctataaaaaaagcaccaatttttcttgatcttacccctggagcgcgtgagttcatcgcggtgtttctcggtgcctcgagagcgttcccgatcgcgttccttttcccgatcccgatggctgctctgccgcgagcgactttcatccgccacccgggaggatcttatcaagcgactggaagatgaggtcttggtctcagtcgattgatccagctcccggctgtggcgactgtgatgagagcttcgcttcgactcaagggaagatgatcctgctccagtggcactggaactgctccttggcttgctgctgttccgatggacccgaacttcgattggctcatggcgcgacttctctcgcttgggggtacgcatgcgcagacgttcggctcgctgcttggtggccacttggtcatcggaggatccgccgccgtgggtcatggactcccgcgaactggagcgggaccgatcacgtggacaacactcgatggaagactgcgatgagctgcgggccctcgacggcgaaggagtcgactgtctggagttgcggcgcgcctcagaggcgaaggtgccgcgggccacgcccatcgattgtgggtataccttaaccttctcgtcaatggtctccaaaggtttggcgctgcgtcgctgcagcgaacatgatctgcgccgctgatccttgatggctgcctcgtcggagagggcctgtaaaagaaacgatttttgttgagtcttatgtaaatttataaatatgtatgatgctgagcaacttaccttcaaagtctgatcagcgttgcgtgtcatttcgcttaggatctgggcgtctctctgcaggtcgctcttccgctcatagctgcccggcgatcgggatctgttcggcgagtggtctggtgacttgaccctgaaggtggtggtcagttcggtggctatgttctcgtaacagtgctcctcgtcatcatccagatcatcatcattgtggttgtagtcgttggccgtgccgttgtcgttatgatggggactgctgtgtctcagtaggtcgggtctatcgttgagcaattgccacttggtcgtggtcgtggtgtttgccttcacctcatcactgtggctcactttactgcgactgggcagtgtccttctgggatttgtcgtggtcgttgtggatagcttcgtttgctgctgctgcttatgctgaactccaaagtaggagagttcgtgttcgcgcaacttgcgagcaccgcgtgcctcctttacaatcttcaaggactcgctgccagattcgtcggcattatccacggtagactgcgcttggagttgcggttgaatgaagagggttcttggcttggccactggtatcagttggtcaattcgtagagtgggcggagttgccttaggtttctcgatttggggagcatggagcgctatgttcatcacattggacttgggaagatctgaaaaggtgatgaaaaaaatatgtaaggagctttttgattttttgatctaatactttcattaaaatgtactatcttatttttgactatttatgaatttattaagctaaaacagcttaatggctactatcaaatcggactatagttatctactggttcattggttcaattactccttattatattgctttaaatgaactcctctaactcaaaactctatttctctgtagttttagcaagcgttacctgctcgctttagcatttgatcctgtgcctcgattttccagatggttcttttggctttgaggcgactccagctgctggagtactcgctgcccttgaacgtctccgtcggctgctggtctggcgaggaactaccctgggttcccccaccactgtcactgttgctgtcccggaagtaacgcttcacctcctcatcggcactgtcttcctgatcctgctcggcggcatcgtagagccttcgcagttgagtcaactgctggctcaccgggatttgggtgtttcccaataatttcaggcgaggtggagccaacggagttcggggcagggaatcatacaatgcgcttccgaatagatcgctgctcgtaatggaggtggtggatatggtggagggacggcgcgaggaggagtaggatccctcctcctggtagctgtgcgatcgcagcatgggcgtgggcaccactattgttggttgaaccaaggcggactcaatcgaagctatgctcagacgacgcatggcctcatcgaattcactggccgatcgcatggttctcataatcagcgatgtggactttaatccctcgtctaggatgcgctgatgctggcgcagatcctccagcaacagctcctgggcactgggtcgtcggtgttggcggtatttcgagctgggatggtgatgcattgcagtgcctgtgtgggaaatgtgcggaaagtgttgttggtggatttggaaattcatgtttcttattcttttgtttgtttttttttttagagcgtggttatcgagctgagcttagcgggtggtgttagatgtagcattagatgtggtttagaaaagcggcagtcagagttcacaacatgcattaaaaatacaattcagagtacatagagttcgagtcaagtagaggagtccatggctaaatcccagatagactagatcacacaacgtaattcagtggacaaggtactacaaactacaggcattccaactagctaatcaaatgtacaactaagtatacttaggtatatttaaagcaccaacctgattcagcccaatcctcggatcccaggctcacattgatcttggtcgagtacccattgccagctggtgaagattgctgttgctgttggcgctgctctacgatgcgaatcctttcggccacagacttgggactaattggtgaatcactggtgattcctttcggtgaaaaatacattttattacctttaatccgtctgtactattatattcacaacacttaccactatcccttgccgaaggactctcgcgatccgctttcattgccggaacgctccaaaggacgtcggcactatctatgttctcgcccagatgatagggtttcggcttaacaggcttattcttcagaatcccccgaatgttggatagctcgtccgtctcgttgtccgtggtatccacgccactggtggaggtgtaactgttccgcgacgtagactccatcagactgtaacgtggctcgtgcaccggcttggccaccgtggttaccgtcacttgagtgctgctggaggtgctgttactgctactggaaatctgcagcaaataaattgactattatttggattctgataaaataatttgaataattaatggaaattcatttatatcgaatttcagtaaatcaacatttttaataaatattcattttgccttgtgaggcaaataaatttataattttcttgggacctaaaatttagtaaattactcaccggctggctaaccacctccggcggatccatgagagtggctcggtaggccactgtggtggtggctatcgtcttgcggcgctgtgaatcgtcaccaaagtgggtcacctcgctgctcgcagtgctgctggtggagctccctcctccgacggtactggctgacttaaccagactctgcagtggaccactggtggtggtggtggtgttggagcggcggcgtcggcgaaagttttgcgttggcggcggcttgccgtcggtctcgacgatattaacgcgacccgattcggcggcaaagtgcacctccgtcttgcagaactccactcgcttctgggcgctacctttgctcaggtgactggtggtggtgtgggagctgctggtaacggcagtgcctccattcacatgaacctgcgacgttttgcggacatcacgccacgtttcctccacggctatcgaatgacgtttacttagctcaccctctgtggggctggatgacgggatgatgggtttaagggacctgccaaaatgaacaatggtgccaacgccattctgttgttgtgccgcagctgcattcttttcgttcctctcccgctccctttcggtgggcgaccagttgccaagttgctcaccggatctgcccaggccactgtccgtggaggcgtctacccggcagatgctcttatcctccggcggcgacatcttctcgaagccgtaggacttgcgccgcagatgccactcactggaactggtgtccttctgtcgctggcgtgactccaagctgtgcgtattgtggacgggtcgaaaggccgagggagtggattgagccggcggcgtaggatctaccttctccacgctgatctcccgcaccaccactggcttcttttggtgataggccagaaagtcctctttgtagagattctcgtccgaaagcttctttagcttgccgcgtatttcctgcagggactcggcggttaggaaggtgttcctcttggctaccgtgggcttggccgagggagtgttcaatatgttgtccagtgcggccagatccacgtgattattccgcatggccgtgtgaaggcgacgaccgttctccagttccgctcgcagacgggctacgcttaccgaattactcggcaaatccaggggtcgaggtcgggccgaggtcgccggactcttgtagtgatcctgcgactgaaaagagcgacgcagtttgctaaccctgcgccactcacccaccggctgttcggcgggatcctctcgctcccagtcgttgctgagatcatccgtggaaatggagcgggaccgctgaagcagcgtggatcctatcgagggcaatggaggggcgtagaccgactgggacacctgctggcgacgctggtgacgagcggtgagtctgtttgcgaaggagatacagatggggatgtgttactggattcagggccgatcggctaatggaccaaaatttgtgtgcgcgacttaccgcagattgttgtcgtcgtcgtcgtcatcgttataatgccggaaactttccaaatcacgacgctgcgttggcggggcaacagctacgtcagcaccaccagctccaccagaaccacccacgccacttgggagctggccatataagtcagcctgcttggcccaaaccgctgacgacggcgttgatgatgatgataatgatgattctggtcccacaattgcatgtaggcttattttgcccgcacttctgtgggtgttgctcgccgcttgtgttgcagttgttaggttcgaattgttgctgctctggctggaaatgctcgaactgcttttctgtaaatggcaagcacaacaacgagaggcgaaaaattaaaaacaaaattaaacaaaatcaagcatattcaaaaaccagcacaaagacgatctcagtccgactgagcgcattatatagccgggctatatggcgatctcgagtgcgggtgtctttcgtatggttatcgttattgaagccgttgttattggaattgttatgctatataggagtgggtgcagtgtttgacaggaactgcttaaggaagccgcacacttaagtcgcatttaatcgctgaataagccgtggcaaatgaatttccgcattggagacaaatggtttcaagagaattgagtcctcgaataaataaagaacttttaatggaatagatcaggccataagtagcttatggaaatagatctacttgctataaggcaaaataaatcgtacaatataatgcagattaagtagtttaagttaatgtcttaatgtaacgattacaattataaagtatgcaaaacttatgcttctcaaagggtatatttttctaaaaataaatatatttaatgttttctccatagagttaaatatattttttcccattttctaggcttaacaaattgagaaacaaaacgaaattccccgaatacgttttcgtagtaagattaatgaccagaacctcaggtgactgactgtgactgtgggcgttgatcttgtctcaagacactttctcatcattttttttttttttttgccgcccaataattagacacttttaactatgcgaatagcgttttgagagagttggcgtagaaatttcctttgtggtcatgacccaaatgtccagctgaagtgctaagcaacgcctaattgagccacgctattattaaatatttccattcgattccgattcgatcgatgagtcaaacattcagttgtaccagacagtttgtggaaagtctggtaaggtttaatttgatatatgagttatggccagttgcagaaaacaagctacttttatgagtttattttggtagctgtaaaatgttctgaaatgacacttccatttatttataactgatctttttggccaagactaattcggtctgaattcaaaattacccaaacgtttttatagattttatagatgttataagacatgttcgactaaaaaacgaccataaattcacgttattacaattatcggttatgtttccaagaaaatgttataaattattttgcagctctattatttatttaaagcaccccgataaaatcttaatgttgtgaagttaacaaccaccttaggactttctcaagatatttttcgatccctgtgtattacacgatttccttgaatttcccagagccatgagttttcccccaaacacgacaatcggcgactgttaacaactggccattttcggtcattgccatggccatggtcaaaagattactcctgaataaaaaacgaaatggaagaaagcaaacattggctcatgctaatgagctaactaaacaaaaccaactacactgggaaaacaggaggatcaagttgaatatttccaacatataattgactgtactttcaaatttattatcattatgcgttctaatatagaaatataagaatgcagaaaaaattagcaactttcgaaaatattacatacattctgtcagaagaactctttatgtattccagtgtaacaaaggcgattgaaacaagaccctgactgtggactactgcatttgagccgggctcaaacttaccattagattgcttaatttcagacttggagccgtatcgggtaacaaattgtggcagccgttgtgcaaaggctcgtcggcagcgtcctctttatcgctcgcctcgccattaatcacaacaaaatcaacatgatcgtcgattagctcctggctcagtgcagttgcggatgcggaggcagaggcggatgtggcggcgaatggtgtatgaacaatgccagcatcgctgccactgagactgcaatcgtcgctaagctcgcagatgtcaacaccctggctgatgggggataggatagtggactttggaggtggatcgtggccattggtctgactcgtgcgttggtgggtggtggatgtagtggttgtggatgtggaggatgaccacgaggacgaactcttttgcactgtctgggtgcggatcacctgcatggcgccgttggcggtgcgggccttcagcacctccaactgtttgcgttgcgtgtgctgtgtgccatttggctgtgagatgttttgggagtcggatatctggggagagagcggagagagagagagagagggggattcagtggtggcaggataatgagtggatgtttcagggggatattttatggaattaatataaacataatgtagtaataggattttagtaagagttttttaaatttagttggagtgtgctttaggtatgttctatattcattttatccattttattatttttattttaaacacatcccatacatattaaacatatataaatatcaataagcctaaattacaaaatatattaatctgatcttcaaatgttattttagccaccttaactttcacacattgcctgatctaattaatacatcaagagatgccttgttatatcgatttcttacacataatagcaattgaatgggttcaaattaagataaataaaacattaagcaagcgatcgcgatgtgattgtctaaacttcattacgggtgtgggtgtgtcccatgcgaggcgtaaaagtgctttgtcgcatggcattcggccgttggcaacggggcgtatgaaagttgccagacgaaacacttgaccgtcagccaccctttgcccctccctcaaagttgcccctcaaaaatgcctagatgcctcttatctcgacagctgggcgtgctcagttcgcccgcttggcacacgtgaccaaacgccagccacaaatcaaaagactctcgagagcaactgcaattgcaacggcaaacaaaacagaaactgcacccttttgcggtaatgcactcaaaaaaatgggatgtgagatccaagcatttgacaaataattaatttgctcttaaaaaccttcaaagtatttagatctttagatgtaagaaaatactctttcagttattaatttttctttgtgcatagatttgaacaattagcagatccgttcattggatcgtgccatgacacaccatcgagggtaagaaacagaaagagaaatacaaaacacactcgaatcgaactggccaaaagatcgattgtggcaatcgattgcattgatgatttatagtgctaaaatgcataatatgctccaaatgaaaactttaacccgccggttgtccagttcgcggcgtattcgtatcaatgaccaaaatgcagccgcacatttgactatgagtcaaagtgcagcattgtttatatagaatacaaaaaatttgaatgttctccatgcggttcgtaacaaagaaaattgcatattgtatgcaagttttaggttgagtcacctcagtgttctgggttctcacttgaagtcttgtcttttttgtgctgtaactcataactcggcgaatggcgaaaataatttctgtggttatacacttggtaattagcttcattagatgggaattttttttcagctcgttgaacaaagaatggaatataaataagggatacgcaaattctgggaattttgaagaactcggcaccagctttatattttatgatatgcacattgt

SEQ ID NO: 20153 - DNA, 5574 bp, DROSOPHILA
atgggacacacccacacccgtaatgaaccaaatggcacacagcacacgcaacgcaaacagttggaggtgctgaaggcccgcaccgccaacggcgccatgcaggtgatccgcacccagacagtgcaaaagagttcgtcctcgtggtcatcctccacatccacaaccactacatccaccacccaccaacgcacgagtcagaccaatggccacgatccacctccaaagtccactatcctatcccccatcagccagggtgttgacatctgcgagcttagcgacgattgcagtctcagtggcagcgatgctggcattgttcatacaccattcgccgccacatccgcctctgcctccgcatccgcaactgcactgagccaggagctaatcgacgatcatgttgattttgttgtgattaatggcgaggcgagcgataaagaggacgctgccgacgagcctttgcacaacggctgccacaatttgttacccgatacggctccaagtctgaaattaagcaatctaatgaaaagcagttcgagcatttccagccagagcagcaacaattcgaacctaacaactgcaacacaagcggcgagcaacacccacagaagtgcgggcaaaataagcctacatgcaattgtgggaccagaatcatcattatcatcatcatcaacgccgtcgtcagcggtttgggccaagcaggctgacttatatggccagctcccaagtggcgtgggtggttctggtggagctggtggtgctgacgtagctgttgccccgccaacgcagcgtcgtgatttggaaagtttccggcattataacgatgacgacgacgacgacaacaatctgcgactcaccgctcgtcaccagcgtcgccagcaggtgtcccagtcggtctacgcccctccattgccctcgataggatccacgctgcttcagcggtcccgctccatttccacggatgatctcagcaacgactgggagcgagaggatcccgccgaacagccggtgggtgagtggcgcagggttagcaaactgcgtcgctcttttcagtcgcaggatcactacaagagtccggcgacctcggcccgacctcgacccctggatttgccgagtaattcggtaagcgtagcccgtctgcgagcggaactggagaacggtcgtcgccttcacacggccatgcggaataatcacgtggatctggccgcactggacaacatattgaacactccctcggccaagcccacggtagccaagaggaacaccttcctaaccgccgagtccctgcaggaaatacgcggcaagctaaagaagctttcggacgagaatctctacaaagaggactttctggcctatcaccaaaagaagccagtggtggtgcgggagatcagcgtggagaaggtagatcctacgccgccggctcaatccactccctcggcctttcgacccgtccacaatacgcacagcttggagtcacgccagcgacagaaggacaccagttccagtgagtggcatctgcggcgcaagtcctacggcttcgagaagatgtcgccgccggaggataagagcatctgccgggtagacgcctccacggacagtggcctgggcagatccggtgagcaacttggcaactggtcgcccaccgaaagggagcgggagaggaacgaaaagaatgcagctgcggcacaacaacagaatggcgttggcaccattgttcattttggcaggtcccttaaacccatcatcccgtcatccagccccacagagggtgagctaagtaaacgtcattcgatagccgtggaggaaacgtggcgtgatgtccgcaaaacgtcgcaggttcatgtgaatggaggcactgccgttaccagcagctcccacaccaccaccagtcacctgagcaaaggtagcgcccagaagcgagtggagttctgcaagacggaggtgcactttgccgccgaatcgggtcgcgttaatatcgtcgagaccgacggcaagccgccgccaacgcaaaactttcgccgacgccgccgctccaacaccaccaccaccaccagtggtccactgcagagtctggttaagtcagccagtaccgtcggaggagggagctccaccagcagcactgcgagcagcgaggtgacccactttggtgacgattcacagcgccgcaagacgatagccaccaccacagtggcctaccgagccactctcatggatccgccggaggtggttagccagccgatttccagtagcagtaacagcacctccagcagcactcaagtgacggtaaccacggtggccaagccggtgcacgagccacgttacagtctgatggagtctacgtcgcggaacagttacacctccaccagtggcgtggataccacggacaacgagacggacgagctatccaacattcgggggattctgaagaataagcctgttaagccgaaaccctatcatctgggcgagaacatagatagtgccgacgtcctttggagcgttccggcaatgaaagcggatcgcgagagtccttcggcaagggatagtggaatcaccagtgattcaccaattagtcccaagtctgtggccgaaaggattcgcatcgtagagcagcgccaacagcaacagcaatcttcaccagctggcaatgggtactcgaccaagatcaatgtgagcctgggatccgaggattgggctgaatcaggcactgcaatgcatcaccatcccagctcgaaataccgccaacaccgacgacccagtgcccaggagctgttgctggaggatctgcgccagcatcagcgcatcctagacgagggattaaagtccacatcgctgattatgagaaccatgcgatcggccagtgaattcgatgaggccatgcgtcgtctgagcatagcttcgattgagtccgccttggttcaaccaacaatagtggtgcccacgcccatgctgcgatcgcacagctaccaggaggagggatcctactcctcctcgcgccgtccctccaccatatccaccacctccattacgagcagcgatctattcggaagcgcattgtatgattccctgccccgaactccgttggctccacctcgcctgaaattattgggaaacacccaaatcccggtgagccagcagttgactcaactgcgaaggctctacgatgccgccgagcaggatcaggaagacagtgccgatgaggaggtgaagcgttacttccgggacagcaacagtgacagtggtgggggaacccagggtagttcctcgccagaccagcagccgacggagacgttcaagggcagcgagtactccagcagctggagtcgcctcaaagccaaaagaaccatctggaaaatcgaggcacaggatcaaatgctaaagcgagcagatcttcccaagtccaatgtgatgaacatagcgctccatgctccccaaatcgagaaacctaaggcaactccgcccactctacgaattgaccaactgataccagtggccaagccaagaaccctcttcattcaaccgcaactccaagcgcagtctaccgtggataatgccgacgaatctggcagcgagtccttgaagattgtaaaggaggcacgcggtgctcgcaagttgcgcgaacacgaactctcctactttggagttcagcataagcagcagcagcaaacgaagctatccacaacgaccacgacaaatcccagaaggacactgcccagtcgcagtaaagtgagccacagtgatgaggtgaaggcaaacaccacgaccacgaccaagtggcaattgctcaacgatagacccgacctactgagacacagcagtccccatcataacgacaacggcacggccaacgactacaaccacaatgatgatgatctggatgatgacgaggagcactgttacgagaacatagccaccgaactgaccaccaccttcagggtcaagtcaccagaccactcgccgaacagatcccgatcgccgggcagctatgagcggaagagcgacctgcagagagacgcccagatcctaagcgaaatgacacgcaacgctgatcagactttgaaggccctctccgacgaggcagccatcaaggatcagcggcgcagatcatgttcgctgcagcgacgcagcgccaaacctttggagaccattgacgagaaggttaaggtatacccacaatcgatgggcgtggcccgcggcaccttcgcctctgaggcgcgccgcaactccagacagtcgactccttcgccgtcgagggcccgcagctcatcgcagtcttccatcgagtgttgtccacgtgatcggtcccgctccagttcgcgggagtccatgacccacggcggcggatcctccgatgaccaagtggccaccaagcagcgagccgaacgtctgcgcatgcgtacccccaagcgagagaagtcgcgccatgagccaatcgaagttcgggtccatcggaacagcagcaagccaaggagcagttccagtgccactggagcaggatcatcttcccttgagtcgaagcgaagctctcatcacagtcgccacagccgggagctggatcaatcgactgagaccaagacctcatcttccagtcgcttgataagatcctcccgggtggcggatgaaagtcgctcgcggcagagcagccatcgggatcgggaaaaggaacgcgatcgggaacgctctcgaggcaccgagaaacaccgcgatgaactcacgcgctccaggggtcactccagtcgctctaggcacagtgagcacccatcgtcgggaagccgggagagcagacgcccaagtaagacgagatcgagtcgcagtatccatgactcggcaacgatacacaaaaagtcgaccacgagcacaacagccagttcgaaagcatcgaaaaccacagcgcataaaccatctgcatctgcatcagccagcaccaccacagcaccacccacgcaccaccacgaactgacgtacgtatacgtaacgaatttagccaataccgaaaccaccgacgagtcaccggaacagcatagtgccgaaagcgccgatgggcccgcaaaagaggcggactacgcgagcattgatgaggtagagtcggtgacgaaagcaccgcagccaccgccgcgcagcaaacgaaagagatccctaatcccagtgccagtgaatccgcccgccagctatgagtatcgcaccaagctgcagatgataccgcccagctactcgaatcagtccaccctgaggtgtcgcagtgtggcccgcaagaaaccctccctgaaggccacccaatcgaccagctcgagcttcgcctttctgccctatttgccggccaaacggaactcgagtgttagccatgtctatgacaactatctgctgtatgccaccagcgaggagctgggtaaggcggacaagctgcgtccataccaaaacaatctgagcaatgagcatgcgcagctttttggtgcatcggcgacaggggcggcggctcgggaggggcgtggccggctgggcggctggccaaaaaggctgaaaatgcgtcaagtgcgcagcagtgtgtccacccaccagccattcggcatctgcacatgttcatag

SEQ ID NO: 20154 - protein, 1857 aa, DROSOPHILA
MGHTHTRNEPNGTQHTQRKQLEVLKARTANGAMQVIRTQTVQKSSSSWSSSTSTTTTSTTHQRTSQTNGHDPPPKSTILSPISQGVDICELSDDCSLSGSDAGIVHTPFAATSASASASATALSQELIDDHVDFVVINGEASDKEDAADEPLHNGCHNLLPDTAPSLKLSNLMKSSSSISSQSSNNSNLTTATQAASNTHRSAGKISLHAIVGPESSLSSSSTPSSAVWAKQADLYGQLPSGVGGSGGAGGADVAVAPPTQRRDLESFRHYNDDDDDDNNLRLTARHQRRQQVSQSVYAPPLPSIGSTLLQRSRSISTDDLSNDWEREDPAEQPVGEWRRVSKLRRSFQSQDHYKSPATSARPRPLDLPSNSVSVARLRAELENGRRLHTAMRNNHVDLAALDNILNTPSAKPTVAKRNTFLTAESLQEIRGKLKKLSDENLYKEDFLAYHQKKPVVVREISVEKVDPTPPAQSTPSAFRPVHNTHSLESRQRQKDTSSSEWHLRRKSYGFEKMSPPEDKSICRVDASTDSGLGRSGEQLGNWSPTERERERNEKNAAAAQQQNGVGTIVHFGRSLKPIIPSSSPTEGELSKRHSIAVEETWRDVRKTSQVHVNGGTAVTSSSHTTTSHLSKGSAQKRVEFCKTEVHFAAESGRVNIVETDGKPPPTQNFRRRRRSNTTTTTSGPLQSLVKSASTVGGGSSTSSTASSEVTHFGDDSQRRKTIATTTVAYRATLMDPPEVVSQPISSSSNSTSSSTQVTVTTVAKPVHEPRYSLMESTSRNSYTSTSGVDTTDNETDELSNIRGILKNKPVKPKPYHLGENIDSADVLWSVPAMKADRESPSARDSGITSDSPISPKSVAERIRIVEQRQQQQQSSPAGNGYSTKINVSLGSEDWAESGTAMHHHPSSKYRQHRRPSAQELLLEDLRQHQRILDEGLKSTSLIMRTMRSASEFDEAMRRLSIASIESALVQPTIVVPTPMLRSHSYQEEGSYSSSRRPSTISTTSITSSDLFGSALYDSLPRTPLAPPRLKLLGNTQIPVSQQLTQLRRLYDAAEQDQEDSADEEVKRYFRDSNSDSGGGTQGSSSPDQQPTETFKGSEYSSSWSRLKAKRTIWKIEAQDQMLKRADLPKSNVMNIALHAPQIEKPKATPPTLRIDQLIPVAKPRTLFIQPQLQAQSTVDNADESGSESLKIVKEARGARKLREHELSYFGVQHKQQQQTKLSTTTTTNPRRTLPSRSKVSHSDEVKANTTTTTKWQLLNDRPDLLRHSSPHHNDNGTANDYNHNDDDLDDDEEHCYENIATELTTTFRVKSPDHSPNRSRSPGSYERKSDLQRDAQILSEMTRNADQTLKALSDEAAIKDQRRRSCSLQRRSAKPLETIDEKVKVYPQSMGVARGTFASEARRNSRQSTPSPSRARSSSQSSIECCPRDRSRSSSRESMTHGGGSSDDQVATKQRAERLRMRTPKREKSRHEPIEVRVHRNSSKPRSSSSATGAGSSSLESKRSSHHSRHSRELDQSTETKTSSSSRLIRSSRVADESRSRQSSHRDREKERDRERSRGTEKHRDELTRSRGHSSRSRHSEHPSSGSRESRRPSKTRSSRSIHDSATIHKKSTTSTTASSKASKTTAHKPSASASASTTTAPPTHHHELTYVYVTNLANTETTDESPEQHSAESADGPAKEADYASIDEVESVTKAPQPPPRSKRKRSLIPVPVNPPASYEYRTKLQMIPPSYSNQSTLRCRSVARKKPSLKATQSTSSSFAFLPYLPAKRNSSVSHVYDNYLLYATSEELGKADKLRPYQNNLSNEHAQLFGASATGAAAREGRGRLGGWPKRLKMRQVRSSVSTHQPFGICTCS

SEQ ID NO: 20155 - DNA, 3986 bp, DROSOPHILA
gcataacaagcaatagatacactgagcgaaaagagcctaaccattcctaagcttaagtttctttttctagcttaaaaccagtcgaattatattaactattataaagatttactgtatttcagaagttcttaaccttttcagacggaaactttcttactcggctcaacttttcctcatttttgcttgtgtgtatatacttcttgtttattttttgctgtgctaacttcaattctgggtcacgaatttgagccttgcattatattagcgagactttcgggagctcagaaactcaagacatcatttggccaatttataaatgcgcattgagaaaatgtttgcgtttggaatttttagttctctttttcgagccccacagtttcgttgtcatgaaaattatgctaaatgctatcccaggtgacccatatgttaacggtaataagcagcgcagagtatcgcgcggagtaaaaatccgtttaatacagggtcattatataccctacaatacaataattttgtgtaatatacaaacaaatatttaaaaaaaacctttgtctggttagggataagaaagtgccataatttctaccatatcatggtttatagagtattataccattattgtatggttacgtacttttggtcgttacagccaatgtgtgtgcgaaagtaactcagtggcaaaagccatgtttgccgccttcaccttatgccatggcacagttcccaggacactctccgcgggatttatgactaccaaattgatattaatgttggaaaacacgtcgtgctccgctccttcagcaaatatgtggagttggtgtaatggggggagggggttaccttgggcaggattgggaatggttcgctgtgtcagcttggcatcgttgaattttttgactttttacgtagaggggagatcctttcgggcgtttggttacgaattcgccctatggtgtcctgacttggggcgctgtaagccgcgattaacgtaaaatagcgtatgaagagcggccaacagtggctgcaaaaaaatatgccacacgaagcatgtgacaaaaaaatgcatactgaatataatccagctgttccgagtgaacagaatgtaggtcacgaaaggaatgaagtaaactgtgtgtatatagtatatatgtatctataatgcagtatatgcttgcagttttgtgaataaaagttacggcactcacagaccaccgacaccaaacatacatacatttgacgaacattcactaatgaagcagatagttgtgtataacttttatataagtatattgtgtttgagaaatgtttttctcactttaatacctccctatcgtttcagacttaagatagacaacaacggaggcgcttggtgtcccaagcacatggtatctcgtggtctgacggagtacctgcaagtcgacctgctaggtgtccacctggtcagtgccatacgaacccagggtcgctttggcaaggggcagggccaggagtataccgaagcctatgtgattgagtactggaggccgggcctcaagaaatggattcgatggaggagcctccaaggcaaagaggtgagctgaaggcacttataaaagcaggaaatcaaactatggtgtggaaaaggcaattcgcaaaaataactcacagttttagtttactccaaagtgagtttatatcggaataaaccattaaacaaataggatctctgtgagaaaaagtctgtttgcgaagatactctatgctttgtccattcacacattaatcatgagcaggccggggcaagtgtagataaccatctgaaccatctggggacttgggttcgagcggagagtgtgttgaagatattgaatctttaagcgaatcaatttacgtgcgaattactggcaagtggaggagttgagaaaattgcgtaggtgtcgcggctggaaagcgaactcgaacccgttccatcgatttgctggctgccagcaatgtgaaatcaattttagcgcttttgtttttatttcgcctgctcatgatagtattttggcgatcaggttgccacctacacaccacatgccagccacccatttgtaatgcctgccccaattgggccccaactcccttctctcgttccaggtgctgcccggcaacataaacacctacagcgaggtggagaacgtgctccagcccagcgtctttgcgtccaaggtgcgactctatccctacagccagtacgatcgcaccgtctgcctgcgcgccgagatcgtcggctgtgcctgggaaggtaggtgcccattcgcttgccatgagttatgcccccaaccccgaccccactcccacaccataggaacctggaacccctgacccctatatcgccccattcgatcttactcgtggcctgaggccttagctgcaatgtaatgaaagtcggacagaaaataaattattacgagtccgaagactaaaagtactagttcaaaaattaagtttggcgatgggaaagtacactttcaattcccgtaaaatgataatctgagcattaattttctgcgaatatttatatatttttattaaaatatatttatttcccttttgcagagggaattgtatcgtacagtattcccaagggcatgcagaggggcatggacatcgatctgtcggacaaaacctacgatggatacgaggagggtgatcattatgtcaacggtttgggccaacttgttgatggtcagcggggcaaggacaactttcgagccgatattaatggccttggcaaaggtacgattgtcgaagcattttaaagttcaattcttttgaaaattgtaacactttgtcaggttacgaatggattggctggcgaaacgacactttgctcgggcgtccagttgaaatcatattcgagtttgagacagttcggaatttaagtgctgttatcatacacaccaacaacatgttttccaaagatgttcaggtaaataaaaagttaaacacaaaaaccaactaaaatcaagctttttccgtaagcccttaaatcaatgattaaacacatcttaaggtaatcttgcttgccctacttaattttttattttacttgttaactagtgctattcacttaatcaccacatctacaaaattccgttgaagtaaatcgtaaaagcaaaaacgcaatgggttgcctggaaccacaaatgggggtccctcgccagacaaactggcggcgaaatgagcaaataagagctaaacatttccagcaacttccacccaaagcaataataataaaaaaatcgaaaaaaaacgctttttataaacaaaccgaagacgcaatcgaacctaaacaaactaaaattgatatggggagctcttggggtccgactcggagtacttacgagtatggaatggaggggaatcgcggggtatccagtgcacccattatcaagtcatttccttactcactgcagtctctttatcgaaagtaaacaaacagcgtgagtgcgtatatataaataaaagtgcacatacatatatctttatctgaactctggatgccatgtaaacaaatagctatgccacaaaaatgattgtacagtgtttacttttttcgaacactcccaccttgttcaaggaacgccataaacatttttcgttaatctctcaagtttttaaaaataccttttaaagaacatattgctatttaactatatattgttatacctatttaattaagatggctacgactgcatacccgtttaatctggacagtatatttgttatgcattttggtgggatgagagctgctcattactaatgctgagggcaaagtcaaacaaacagacctcaaagtgaatgggaaaaaagtccttaatcttggccagaccactgaccacgatgtgcggttgggctggcttgtcttttgatccaacaggtggtgtgtggagggccacacgcgtctcataattaaaacgcactcagtgtaattttgaggcttatcaatgcgtcataaatgg

SEQ ID NO: 20156 - DNA, 744 bp, DROSOPHILA
atgaagagcggccaacaacttaagatagacaacaacggaggcgcttggtgtcccaagcacatggtatctcgtggtctgacggagtacctgcaagtcgacctgctaggtgtccacctggtcagtgccatacgaacccagggtcgctttggcaaggggcagggccaggagtataccgaagcctatgtgattgagtactggaggccgggcctcaagaaatggattcgatggaggagcctccaaggcaaagaggtgctgcccggcaacataaacacctacagcgaggtggagaacgtgctccagcccagcgtctttgcgtccaaggtgcgactctatccctacagccagtacgatcgcaccgtctgcctgcgcgccgagatcgtcggctgtgcctgggaagagggaattgtatcgtacagtattcccaagggcatgcagaggggcatggacatcgatctgtcggacaaaacctacgatggatacgaggagggtgatcattatgtcaacggtttgggccaacttgttgatggtcagcggggcaaggacaactttcgagccgatattaatggccttggcaaaggttacgaatggattggctggcgaaacgacactttgctcgggcgtccagttgaaatcatattcgagtttgagacagttcggaatttaagtgctgttatcatacacaccaacaacatgttttccaaagatgttcaggtaaataaaaagttaaacacaaaaaccaactaa

SEQ ID NO: 20157 - protein, 247 aa, DROSOPHILA
MKSGQQLKIDNNGGAWCPKHMVSRGLTEYLQVDLLGVHLVSAIRTQGRFGKGQGQEYTEAYVIEYWRPGLKKWIRWRSLQGKEVLPGNINTYSEVENVLQPSVFASKVRLYPYSQYDRTVCLRAEIVGCAWEEGIVSYSIPKGMQRGMDIDLSDKTYDGYEEGDHYVNGLGQLVDGQRGKDNFRADINGLGKGYEWIGWRNDTLLGRPVEIIFEFETVRNLSAVIIHTNNMFSKDVQVNKKLNTKTN

SEQ ID NO: 20158 - DNA, 6697 bp, DROSOPHILA
aagaatcaccacgccgtatacaatgctgcatggatctatcgctttgccatcgatccccattacccgtgtcagacgatcatggaccccatgataaaactggtggtcaagaactgcattatcggcgggtacgcctcactggagtgcactatctccgagtggcaggaaagtgagcgcgacttttatgatgattttgggttcgttacgcggcagatctaccacaaaaagatcattggcagcagtttggcagtgatgaaaacccagctgacctatgggttacgtaccgacggagcagctttgcacaagcaaaactagtgcgttaccaatggtgcaatatagatgatagataaatggattctgtggaatcttatttaatatttacgtatttattctgtgaactttacattccagtcacatattgcgtcccgaactcaaatcacaccgaattatgcccttgatggcgtttctttatcgattcgacaatgtttaaagccagtttagccaatatatagtaagctaatactccacaaacattcctgcatgtcgacagactttagccgttgtcggctcgacaaagagtaaattccgtctaggattaagaagaaactttataatctccacactcgaagttttaataattgtaaacacgttgacactgcttttgtcctgttttattatctctggtttattctttgacatattctatttaaataaataaataaaatatttagtaataaataaaatttgcgtaatgatttagcgtaaatttgatgccacacatctaatgtttcgcattttgctgtgtgattctgctgtaggtacattaatttcttattctttgatgcatttctcggttctgtagcccgttacatggttgaattaaggtgtaatttggaaaaagagtccagtttatgtttgcgtttaaattgccatagcactgcgtataaaaagcctacatgccggggacatgcaatgtttaactaatttcatatatcatctgtctgtatacacttcgttttttattgggattttatgttcctttcatatagttgttctcagttacaattttgcgttagcgcaactaattcttaaaaaaataaacaggagctgccggctagttgctccgcactgtaaatgtaactatgtatttaaatttagtttagttggtttcacttgcatcaactatttaaagcgtgtttcaaaactggctgtgaaattagcatagtttcccgtttcgttttcattttatatattgattctcatctcctgccacgtgagttatagccatctgctgttaaggtaaattgaattcttttggtttcgtcgcaaacagcctcctcctccacttgggttgctatcctcgcatgctgcgccttccacttgcctcctagaagagcttcacacgccgcttcagctcgttgcgtcgccactggggtagccgatagaactccgacctggcgcactgcaagatgtgttcgaattcgatgtccgacagatggcgctgtggtgatagagagcgttatttgcgttctgtctgtgaagttggcttcataacttacctctaggttacagcgatccacgtccgagggcagacggtagtttgtgattagcagtaggtgatagggatagatcttggccggctcgtgcaccagcatcgaatgggacatgttgggcagactgcgccggatgagtccggcctgcggatagtggtaggagagtgctcctgagtaagtgctcgaggcgggcaggtcgccgcccatcagagctcgcctatcgccctcggtgatcgagtccacagaagctgccagaggagaattatgttattctttcgccgagccgggttttcaaaatatatttcacttaccctccgatttgccgcagctcaaatctgtgctgtgggtcttgtcgcccagtcctccataggagaagtcctgttttcgaaaagggcatgggattagttttctgatcaaattgagggacacatgcaacaataataaacgaaaaaccagtgcaagttacaggtgataccaacgggcatccaaacacaagacggggactcaaaggactctacggcatagcaacaacgaaagcggtcttacagtggcaccatgcatcgtggccgcagcggatgtggtggagctgaatgtgtgggagcgtggtgctagcccgtatcctggcttgggcacatggcgcagcgcactcaccactgagcagatgtggatgtagatgtacatgttgatggtgttcaagtgatgttgatatgttcatgatgcaaatgttcgagttttagttggtcaagtgtggatgggtgttagttttttgagttatttgttgtcaggtgtcagggcaacaatagcaaacacatagttgttaggagtggcgcaggatgggtggatgggtgggattgggttttcagacacgcaatgaagcagcagaccaaccagttgagacatatgcgaaacagttgttagttcatccaggtgagcaaaccagtggcggcattggaaagtgagagaaacaagaaacaaataccgtcgtaactattttgggattacatataagcggataggttcgtgtggtagtgggtaagctataagctacataaccgacagcccggcaccaaggatataatctgatctgatcggatcggatcggatctgatgcgatctatgccgatctgagcaacaggcagcacttacggagctgaagccattgcgtatatagggcagagtcgtcgttttgaatccgtatccgggcttgggcggcgatcggtaggaatgtatggctataaacgtaagtgggctaatatataatatcggtatcgaatcgctatttgcctgaaaatcgaaactaggacaatgctctctagaggattaccattgtagctgggcgcgtttccaagcgatttgccaagcgagccacggtagctggtggagcgatcgaacatctcgtcctcgtagaagggcttctggtggtccagattgcgcgatggcgatgctccaatgggcgattcgtatctgtgtaatcaagatgtcataggattagtattactacactatactatatactataaccatatgttttgctatcttatcgttctatttttaaaacaaataataatagatttcttcaagtgcaaaatacaccgagcacgaactagaagatacatttttcaattttcttataacgatcaattttcattatcatcatttttcaattttcttataacgatcaatatcttacctcaatttgtagagtggctccttggaagcggagggcgtcctggatgcgttgcgcggatccaaattgttctgcttccacttcctgtacttggcgtgctccttgaggtccttggcaatcgccgatccgatgcccgagttaagcttttccagctgttcggcttcgcgttgaaggcgtctgtatttttgggaagagatttaataggatctaggatcatagcatgcacaagagattccaatactcactgctgctcctcgccattcttgaccttgccattcggcttgccattctccacattctcgtcctcatcatcggaggcgggcactcccttgtaggtatcactgtatcgccgcctacgctccggatccgtgtagggatacggcggagcgggaaagtcatcccgctcgatcttgggctgctcacctggcggcggcttcttggcggccggatagtgagacagttcaatcggctcctcgttgttcatgccaggactcttgggacgcggcgtctccgagcggatggcgtccaccagcaccttcatggcgctgcgggtccgcgagtggggacgcgacggcgggcggcttccggccacggatcccgcattgctggcggtggtcgcgtatgaggagggccgatggaagtgcggcgacagcggcttcttgtcatacggatcgatcggcttgcgcagatagtgcggcgcatccgtcagatagctgtaggtgtagatgcgcgagatgtcctcggcattgggtcgtccgtactcccggagtatcagacccggactcaccgttcggtagtgctgcaaattaagtgggattagtcctgggctctcatttcaaagtttaaatacatgcagtgccgtgtgtttttcttttcggttttagtattttcaaaaacgatggcagaaaatgaggggaaatcataaagtaaaattataaaacaaaccttgcggctagaggaataaagtgaaccattaaagctcggagttctggagcggatgtactgaaaacgaacgaaaaaataaaaacgcaagctcaaaacaactaaaatgcaagtaactgaaattataaaatcataagtgctgtgtgtaggtgcaaaaagggggtggtaaattgagatgggtgatattttcagggtgcctatataaatataatatataaggttctaaaatagttctaaaatatcacccattctagtatgaaatttgattttaaatgcgtgtgcctttcgtgaattttgcagcattcaaattagttgcaagctcagcagcctctttaaactcgggattgttgtgttggagtctcgagaattatctcagtaccagcggtttatcatctgtagatccgactacttaccatctcgctaagggcactggagctcatccggtcgcattcagtgtctgtgaagttgccattggaggcacctccgaccaccgacgaagtgcctccgccgccgttcaaaattatgccggactcggagggacccggaccgcatcgcggatgccagatggcactgccctgcaggtacatctcctcgccgtcgccgaagggatcgccgcactttgtgcagcgggcacaggtcggatggaagtggtggttgtcgcccgcctggagcaccttgccgctaatgaagcgactgcagtaggcacacttcaccccgaatcccttctggtagcacttctcgcagtagggcaccgcgtctttgcccatgtactccccattgagcaccgcctggcaggccttgcaccggaaacaagagacatgccactgccggtccaacgccaccagtgcctggccctccttcagcagctccccacagccggcacagtcattgggatcgtagtcctccttgaggtgcgccttatgagagatcacactgccgtgctgctggtgggcagtggctctcgtcggactctccgccggaggagctggcgaggagacgcctccacccgtcgcctggcgactgggcgacactggagcacccgtgacgcattgctcgcaaagcacctcctttccggtgttggtcacctgtgaggaggaatatgtgattagttacttatcactcgatctgtggagggtttcagctcaccttactgcccgacttgaagggctgcttgcacttggagcaggtgaagcacttctggtgataggtcttgcccatggtgctgaccacctcgccctccacatactgctggcaatttgcgcacttggtgccgtacagccgctgatagtccggtatgcaatagtaggcgttgtcctttgtgaagaatccgccggtggccagggacttcttgcactggcagcactggaagcaggccttgtggaagtggttgtccgccacgcggagcacctcgccggagcacttcttcgtgcatttcgcacagtagattttttgtttacctgtttgcggggaaaaggggacgaaaacgaagggagaactacggttagtagagcctgacattaaattcattcaatcagtactatcgccagattacgtatacgcagtgttgcgctgatgtcatatgcatgtgatgcgataatgccccaaccttgccccgttttaccgagctcagttcgaagctccgttcccaatgtgctagggtatatcggtctggtcttgtctgtttgtggatgtttcggaatggatatatatattaatatatacatcacaacttatcgtatatcgtatgttgcgagattcgttgtatgtgtgtgtgcgttgtttcccccacacttgtgtgcctatgtaagcacttgtattgacagtcacaaccaggccaactcttctacacaccccgacatggccgtaagtcgtttgtagtctgactcacgggtctggcaagccattaatcttatcattgataaggccaagggcagatattttctttatataaagacagcacacacacaaacactgctcgttaatgtacacacaagtgtggaacaggttaaatagatgtgtgacatggagcccccagttttgcatatgtccatgggggtagcatgcacatgtgtacatagtgtgagaaatatcccaaccaactgcaaataaactgcaaggtagaagcaaagacactagaataactagtgtctttggtagaagataacaagcattcataaagaattacttggaatgcgaaagggggacaaaactgccaccctttgagaatcactgaaagtaaagcgacttctgggaagactctgccgtattgaaactttagatacgtttgctttatcacctgttgaatcaataatctgaccagactcagatatttgctatctgatcgtttgtatctggttcaggagctatatattctcatatatattctcatgagttgacttacatgccaacacatagtgttccttattgcaagatcagtcatgaagggaacttggagctcggaactcggcaccatgacggctgaacgcatcgaaactaattgttggccatgactgatgtg

SEQ ID NO: 20159 - DNA, 2354 bp, DROSOPHILA
atgtcaggctctactaaccgtagttctcccttcgttttcgtccccttttccccgcaaacaggtaaacaaaaaatctactgtgcgaaatgcacgaagaagtgctccggcgaggtgctccgcgtggcggacaaccacttccacaaggcctgcttccagtgctgccagtgcaagaagtccctggccaccggcggattcttcacaaaggacaacgcctactattgcataccggactatcagcggctgtacggcaccaagtgcgcaaattgccagcagtatgtggagggcgaggtggtcagcaccatgggcaagacctatcaccagaagtgcttcacctgctccaagtgcaagcagcccttcaagtcgggcagtaaggtgaccaacaccggaaaggaggtgctttgcgagcaatgcgtcacgggtgctccagtgtcgcccagtcgccaggcgacgggtggaggcgtctcctcgccagctcctccggcggagagtccgacgagagccactgcccaccagcagcacggcagtgtgatctctcataaggcgcacctcaaggaggactacgatcccaatgactgtgccggctgtggggagctgctgaaggagggccaggcactggtggcgttggaccggcagtggcatgtctcttgtttccggtgcaaggcctgccaggcggtgctcaatggggagtacatgggcaaagacgcggtgccctactgcgagaagtgctaccagaagggattcggggtgaagtgtgcctactgcagtcgcttcattagcggcaaggtgctccaggcgggcgacaaccaccacttccatccgacctgtgcccgctgcacaaagtgcggcgatcccttcggcgacggcgaggagatgtacctgcagggcagtgccatctggcatccgcgatgcggtccgggtccctccgagtccggcataattttgaacggcggcggaggcacttcgtcggtggtcggaggtgcctccaatggcaacttcacagacactgaatgcgaccggatgagctccagtgcccttagcgagatgtacatccgctccagaactccgagctttaatggttcactttattcctctagccgcaagcactaccgaacggtgagtccgggtctgatactccgggagtacggacgacccaatgccgaggacatctcgcgcatctacacctacagctatctgacggatgcgccgcactatctgcgcaagccgatcgatccgtatgacaagaagccgctgtcgccgcacttccatcggccctcctcatacgcgaccaccgccagcaatgcgggatccgtggccggaagccgcccgccgtcgcgtccccactcgcggacccgcagcgccatgaaggtgctggtggacgccatccgctcggagacgccgcgtcccaagagtcctggcatgaacaacgaggagccgattgaactgtctcactatccggccgccaagaagccgccgccaggtgagcagcccaagatcgagcgggatgactttcccgctccgccgtatccctacacggatccggagcgtaggcggcgatacagtgatacctacaagggagtgcccgcctccgatgatgaggacgagaatgtggagaatggcaagccgaatggcaaggtcaagaatggcgaggagcagcaacgccttcaacgcgaagccgaacagctggaaaagcttaactcgggcatcggatcggcgattgccaaggacctcaaggagcacgccaagtacaggaagtggaagcagaacaatttggatccgcgcaacgcatccaggacgccctccgcttccaaggagccactctacaaattgagatacgaatcgcccattggagcatcgccatcgcgcaatctggaccaccagaagcccttctacgaggacgagatgttcgatcgctccaccagctaccgtggctcgcttggcaaatcgcttggaaacgcgcccagctacaatgccatacattcctaccgatcgccgcccaagcccggatacggattcaaaacgacgactctgccctatatacgcaatggcttcagctccgacttctcctatggaggactgggcgacaagacccacagcacagatttgagctgcggcaaatcggaggcttctgtggactcgatcaccgagggcgataggcgagctctgatgggcggcgacctgcccgcctcgagcacttactcaggagcactctcctaccactatccgcaggccggactcatccggcgcagtctgcccaacatgtcccattcgataattagttgcgctaacgcaaaattgtaactgagaacaactatatgaaaggaacataaaatcccaataaaaaacgaagtgtatac

SEQ ID NO: 20160 - protein, 765 aa, DROSOPHILA
MSGSTNRSSPFVFVPFSPQTGKQKIYCAKCTKKCSGEVLRVADNHFHKACFQCCQCKKSLATGGFFTKDNAYYCIPDYQRLYGTKCANCQQYVEGEVVSTMGKTYHQKCFTCSKCKQPFKSGSKVTNTGKEVLCEQCVTGAPVSPSRQATGGGVSSPAPPAESPTRATAHQQHGSVISHKAHLKEDYDPNDCAGCGELLKEGQALVALDRQWHVSCFRCKACQAVLNGEYMGKDAVPYCEKCYQKGFGVKCAYCSRFISGKVLQAGDNHHFHPTCARCTKCGDPFGDGEEMYLQGSAIWHPRCGPGPSESGIILNGGGGTSSVVGGASNGNFTDTECDRMSSSALSEMYIRSRTPSFNGSLYSSSRKHYRTVSPGLILREYGRPNAEDISRIYTYSYLTDAPHYLRKPIDPYDKKPLSPHFHRPSSYATTASNAGSVAGSRPPSRPHSRTRSAMKVLVDAIRSETPRPKSPGMNNEEPIELSHYPAAKKPPPGEQPKIERDDFPAPPYPYTDPERRRRYSDTYKGVPASDDEDENVENGKPNGKVKNGEEQQRLQREAEQLEKLNSGIGSAIAKDLKEHAKYRKWKQNNLDPRNASRTPSASKEPLYKLRYESPIGASPSRNLDHQKPFYEDEMFDRSTSYRGSLGKSLGNAPSYNAIHSYRSPPKPGYGFKTTTLPYIRNGFSSDFSYGGLGDKTHSTDLSCGKSEASVDSITEGDRRALMGGDLPASSTYSGALSYHYPQAGLIRRSLPNMSHSIISCANAKL

SEQ ID NO: 20161 - DNA, 3856 bp, DROSOPHILA
atgtttgtggaaaattaaacctttcactcagctcacctcatactcgtactcgtcgtcgtcgcactcgcactcgttcaaactgttgacacgtcctggaaatggaaatctataatgcgccgaaatcagaaacagttgtctatccgaggcgagggttgcaacttgcccttttcgaccccttctcgacatgtggtttgctgtttgggctaaacgcattacatgtcaagacaacgacgtcgctcttagcacttcaagcttacattttatttgcaatatgacaggactttatatcctttttcaatattgagagacaggaaattatgcttgtcagaccggtcggctgatgggttatggctcactttatgctccgctgcaggagattagtcctgaagcgtcgggcgcttagtccttcagcccacttggtccttgcatatttgattagccttccacttaaggggcggtgcccctaccttccttattcagaggtcgataattagtttcgatgttgattcctcagattagagcgaaagaagcacttattgatttcgacatgaaaacccacacgtatctataggtacttaaatatcctagcaactgtatttcttcgaacttatacaaattccagaaaagagaggacttttttccacttagaactcacgcatttaatttttattgagtaacaactttatagaactgataaattgcagtacttgtgaatttcacactaagccatacaaggatgaaacctatttataaattcttgttccgtactttttccattaaatctgtcatttttaatttgcaagccaaagtcaactcctttgaaaaacaaactggacgtagagaacactgggggcgttcttttgtctaagcaaatgcaaatatttggaatccttgacattgcacgagtatctttggggcgctttagctctctggcctaatatttattttctggtatttattttttaattgccctcatgccatgtgctccgcttccttccaggagctgcatcattggccccgaactgtgcgtcaaagtctgctccatcggcactgtgataaaccgctcggcctacgcgtcggactactgccaattggagggcttcaccggcagacagagccagcccatgcccattcgctggatggcttgggagagcgtcctattggtaagatattatagtatatagatcatattatattatatataaagtaatatcaaaaaacacctattcaaaactagaatattttgtgtgaaaatccaatcaaagttctgcattactaataacataactttgaacgttttataggcgtgagtagtaacttagttagtacatacccatacccaaatgtgcaacaataaacaagaatgacatttatatatcatattttttgtgtattagaagctttatatgaaaccttaaacagtaaatccatatatatatatactaattaaaatgtgacaaaggcgggcttagtaaaccccattttaattaatgaaacagaggactgacaacaaatcacttgttcaatgacaaatttcaaagttcaattgtaactatagttattaagccctaaaagtttcggctgttaaatgtcaattttaataccttatgattatatttggtcagaattacccttttcgttgggttaatgcctctccatggcgaacaagcttttatgaaatatgtacccttgtttctgtattgactctatttattctttttatataataatacaacgcccacatcaaatcaataaaataatgtaaaatgtagccccaattaggcggctggttaattaacaaacatgcagagtccattaacccattgggtgctcaactcgtcttatgtcgtgagtgttttttttttttgaccgaaaaaacgtttcatacgcaattttataacaaaagcagtgagtagaaaaaaacatttggcaaagcgtaaaagtaaccaaaaaccgagtgaaatattttataaatccccaagcaaaaaccgcaccaactaaattaattaactacacgaaaaccgggagcagatttttggccagactacgaaaagcaaacggaacgaaatgtacatgaatatagtatgtatgtacgtacaaacattcccacacaatatgacagataaaaataaaaacaaagagcctctgggaggcagaaagactagatacaagtacgagtacgagtcggcgtggtttggggagaaaaggatgcttttagaggtttccagaggcgttcaacagggcccaaataaacgaacgagtgagtgtatagcactgcaggaaaaatcggaattgataagggggcggattgtggaacgctgttgcgtataatgaaaggctgcaaaaggttttagatacatgaacaggagctaaaaggagctaagataaaatgaatgtgggacaaccaaatacttaccgcttcaaaaatatacttactttttgcaatttcccttggttttatatatgtgtatctcctaataattaaatgatctatctgttatctaacatggtttgataatacctctttgcagggcaagttcacaacgaaatcggatgtgtggtcctttgcggttgccctgtgggaaatattgactttcgccagggagcagccctacgagcatttgtcggacaaaagtgtaattgaaaacatcggcctcatatatcgggactacaaaatgcatgtgagtggctatagaaacaattattgatgtggtcaaagaattatgttgcctcgtatttctaggaacttttgccaatgcctccgaattgtccgcgagagatttacgatctgatgtgcgagtgctggcagcgcgacgagtcgagtcgacccagtttccgcgagatacatttgtatctgcagcgcaagaatttaggttttaagccacagacccatacacacatgtattgaaacattctaggcgtagaaatacgaattgaacatgattttagcaggttataattcaattatcaatttcgacagctatccgggaagaacgtaattttaaagagaaatgcatgtagagaacttaatgaataacaatcgcaaatcaaaccccgaatttaatacgttacacattcttcgactgggtatgcccaatcggaaattatccaaatatgtatgtatatcagaggtaacgactgtttgtacggtaaaacacaggaatcgctaacaaatattatacttctaaggacacaatcaagtgaatagcttataaaatccctcgaataatacacattgaaagagtttaagtgtaaataatattggtagaaaactccgtatggtaatatttgtgcattctatccaatggataattaaatggaatcgaaaatgaaaacattgacatatgtgtgtacctatcgctcctccacctgaacgctatctatcaaatcaattatgctttacatatttactagagtaaagtgaaatgagtctatatttataaaaactaaataatgtccacctgccgttgctgccccttttcctggaaattacaactgcattttgacgatgtatcgcgatggaaaaaaaatatttaaagcctgcatataattttgacaataactgtttaaacaaagaagtgtgaaaacaattgtgcaaattgctttgtatttctgcaaatctaaactcgttcgagttaaaaacctaggctaatcgcagacattcgttcttaaatctctagtctacacaaaagtcaattagacgcatatcaaaaatgtattttgtttaaccaaatttttactgtgccttttccctcctattttcttgtgctgtacaaagtcttaataaccgtatatctattttatttaatttgtattctatcaaatgcttaaaaaggtttcgctgaataaagatatg

SEQ ID NO: 20162 - DNA, 422 bp, DROSOPHILA
gagctgcatcattggccccgaactgtgcgtcaaagtctgctccatcggcactgtgataaaccgctcggcctacgcgtcggactactgccaattggagggcttcaccggcagacagagccagcccatgcccattcgctggatggcttgggagagcgtcctattgggcaagttcacaacgaaatcggatgtgtggtcctttgcggttgccctgtgggaaatattgactttcgccagggagcagccctacgagcatttgtcggacaaaagtgtaattgaaaacatcggcctcatatatcgggactacaaaatgcatttttgccaatgcctccgaattgtccgcgagagatttacgatctgatgtgcgagtgctggcagcgcgacgagtcgagtcgacccagtttccgcgagatacatttgtatct

SEQ ID NO: 20163 - protein, 77 aa, DROSOPHILA
MPIRWMAWESVLLGKFTTKSDVWSFAVALWEILTFAREQPYEHLSDKSVIENIGLIYRDYKMHFCQCLRIVRERFTI

SEQ ID NO: 20164 - DNA, 3836 bp, DROSOPHILA
taactggatcttatctacttataagacttcagtccccataaaaaccctaacatgccgtgctggtcaagttcacatgtcaatgccagtggctcaatcgagtatgtattatcgatttaaattcagttttaagtgagtcaacttctatggtctatcgattttttaatcgcactgcacttccgaactgcttaaattatttgcaggtaaacacaggtgtacttgctcataagtatgtcagctgtctgtcagaggcttctgtgagaaaattacatatgtatgtgtgcatatttgcaatgtctttttttttaaattcatatatagatttttatgaattgtgttattgttcataaatttaaatatctctcaaggctagggaactcaatattactacaaatatattattatatacatatatgttacaccacaatataataattaaaaattacactacaaaaaaaatattatttgtatcagctatacttccaatcgcatttgacttaaaatacgcaatattttaatcgacaaacttctatgttctgctagtaagtacaaaataatgataaggcaagatttagattgacagaacaatgcagttaaaattttatagaccacaatatcagtatgaacgataagattgcattgctaacattacgacaaatataaaaccagtgagacgataagccttattaaacaccaaaagaaatgttaatataaatatgttaaattttttgtttagaaatatatttatttatttttacaagcaagggtaaatgtcagtatatgtccaagaacatcattgaatttaaagtaaatatcggcaccattcttatctagctcatctcatcctacagaatcgatttcctccggacctacataaaaccagtaattccattacggattttaatctcacgtgcaatgtagcaggcaaagattacgccaaagaactggaaagaatggaggggaaaattgtagtgaaatgtacttggaagtaattaaacatttgtcatcataggcatagttctttctattttagaccaaccagtctttgagctatttcagcaccataactcacctggaggatggcaatgaccacccctgcagctcctaggctgaccgcatgggcggaaatgtatccggagaatccgtcgaggcatccaactttgtgccggtctgccacgctggactgagcattattgcaggtgaatgtgcccactgcgccgacatgaacgttgcagcaggagatgggcaggtcgccgttagggaaggcggtgatccagtcgttgtatgaggtcacaccacagcactcgaactcatcctggatgtcatcccagagtttcgtggtcgcatttggattgatactgttatactcgttcagcgagtaagtcagagaagttttgatcaaatcggaggcgtcattgcgcagcacatagccactgatgccagcagccagctccaggatgaagatgatggccagcatgaccgagaagctgagcaccaggcaatagttctccttcagggcaccccagcaaccaaagaaagagattatgatgatgaacgatccaatcacgatcaggaacgtggggatcgagaagaactttccggccaggaagagcttatagcccgtatagacggcgccaactccggctcccacggcaatcaagataatgccagtgatctggatggatagttataatgatcaatataagggtctttgtttaaggcctgtgactggtgactcatccaaataaagaccaaatcgttaacttaccaaaaaaattaagttaaatccgaaaagcgtatacttcacagcattggcgctgcccgttagaagcgacatcttgtttgttttagtttatgcgctgtaagatcaatagtaatattaataaaaggcttttgaccaatacgagatatgctctttttacgggccgaaaataaaacacaaccgacgcaaatcgattccgaaagttaaatacgctgcagtcgaaactaagacaccaaggaaggtttcactccctatcaacaaaggccaatatatatatatatacatatatttagttatcaataaatgatatggcacatagcatggcacatctaagccaaatgtggtcaactgttgtatttttaatgtgccgatgttgccgagaacgccatttcagacaagataaacgagcgttttgatgagataagatacgataaaattttttagaaaaagttttcgcatatttcggaacaaaaactaaataagagtaagaaaaaagtgttgttcaatttgttcaaaacaaaaccgtgattaatcatctattaagcctgaacaagcgatcggatttttattgtttcgagtactgtgtgattttcaatattttcaacattttaaggtaaagcggtatttaatggaattcaacaaactgtgtgcctagagtttgcctaaatatatgactcatttttgcagcgaaagcattaaaagcacactaaaatttgaagacacacatatattaatttggctcgatagtagaagattataatcacatttatagataagaaagccaggtgttaagggttcctccgtctatctgatcgatgactcatccatatgccagaccagttggtgcagtggcatccgagtgtccaaaatcacttcacacattggcaaacataattatgtgggttttcgaaagttatttttcgaattgcaacccaactagctatcttaacgttatatttgttcttatcagtggcccagttagagcataacgcattggcactcgagttttattttatcaattttttctgctttttcaatctactcacggcacacagaaagtggacaattttagtttaacttgacggcagttggacaataactgagaggctcttccattaccgaaacgctcgtagaggattattattgcacccataagctttgctacctatcgagttgttggtttgcgtgagtttagtgataaaaagtaaaatatataacgaaatgtggaaaagctgcgaaaaagctcttaacagagttagcacaggtctgcgaaaagagaacttccacgttgttttttttttcgaattgctcgagcaaatatataatatttcattactatattgaacattttgttaatgtattgactgcaaatataacgaacagttttgtatcagccaacatggattacgcatcgtatacgcgatttatccccattcctcaattcctcataaagataaagcaatgacattcgtatttcaaaaactttaattgaaaaatgtattatatttattttcattcactttgcttgtcgtacactaaatgctatcgaagaatatatatgagtatcatttgttattatatatgtttagtttttagtttaattttgtggagttgctggcataattttaatacttgaatttcgagtgcaatgccaaagcgtgtgtttccatttttttttttttcaatgtgtgggaaatgcaatgtggaaatgcgaacaggaactgggaactggaacatattcaaagtcacattttgcaatattagtaagtcggttgttagtttgggtgccgtcaaccttgagtaatttgtttgaaatttatcgccttgccagaaaatttcgcaaattacctaaagaaagtctcatcgaattgggttggtcgttcaggtgttagtgcgtattacaaatgtgtatataaatcatttaaattagatgctttattttttagtagttcgttgcctccgcgccggtgtccccacatcctatttcctatccttgccgtggcgatcccgcggatgcctgctactcgccatcgtcgaggtggccaggctgtggacatggtgtggctgctgctcccga

SEQ ID NO: 20165 - DNA, 794 bp, DROSOPHILA
ttaaactaaaattgtccactttctgtgtgcccgcataaactaaaacaaacaagatgtcgcttctaacgggcagcgccaatgctgtgaagtatacgcttttcggatttaacttaatttttttgatcactggcattatcttgattgccgtgggagccggagttggcgccgtctatacgggctataagctcttcctggccggaaagttcttctcgatccccacgttcctgatcgtgattggatcgttcatcatcataatctctttctttggttgctggggtgccctgaaggagaactattgcctggtgctcagcttctcggtcatgctggccatcatcttcatcctggagctggctgctggcatcagtggctatgtgctgcgcaatgacgcctccgatttgatcaaaacttctctgacttactcgctgaacgagtataacagtatcaatccaaatgcgaccacgaaactctgggatgacatccaggatgagttcgagtgctgtggtgtgacctcatacaacgactggatcaccgccttccctaacggcgacctgcccatctcctgctgcaacgttcatgtcggcgcagtgggcacattcacctgcaataatgctcagtccagcgtggcagaccggcacaaagttggatgcctcgacggattctccggatacatttccgcccatgcggtcagcctaggagctgcaggggtggtcattgccatcctccaggtgagttatggtgctgaaatagctcaaagactggttggtctaaaatagaaagaactatgcctatgatga

SEQ ID NO: 20166 - protein, 150 aa, DROSOPHILA
MLAIIFILELAAGISGYVLRNDASDLIKTSLTYSLNEYNSINPNATTKLWDDIQDEFECCGVTSYNDWITAFPNGDLPISCCNVHVGAVGTFTCNNAQSSVADRHKVGCLDGFSGYISAHAVSLGAAGVVIAILQVSYGAEIAQRLVGLK

SEQ ID NO: 20167 - DNA, 7754 bp, DROSOPHILA
ctgctgtctgtgtgggtggtgcaaagtgtgttttatttactacgctttgattttgcaatgctcctattattattgttgtgtatggcttatccgcgcttcggatgtcgtcgcctacaattttcgtttcattttttgttattatttttctgtgtcgctcgccccctcgcacacacacatgcaaacgctcagcaatcgctctcacgtacagtagcagctttggctcccacacacatgcacactccgccgacgcgtaggcagcgcatactcaatctcccatgagaattttcgcccgctctccgattgtttttgtttgccttaatttattggcagcattgtgtttgttgtggcggaaaatgaaagtgtgttagtgcgggcagcaaaaaaaacccagcaaaaaaaaaaaaacaaaaattaaaaaacaaaagcagcaacctgcgcggccagcaaacaaaaagccgaataagaattgactaacaaactctcacagcaatttcgtttcgaaaacctttgttttcgagcgccgtgtgcatcgcaatcaaagctccgcagatgccactacatccgcgatttgggccaccctttcttcaaattggcccaaacgctatacaatggctaatctctcggccaattgttttcggttacaaaagcaaacaatgaacaaatggcaattttaaaagttgccactattgttgcttttatctatatccgtgatcatgaggatataacaagttacagaaagttgattgtggttttagaagtccgatttcagttctttagacgtacggaattttgatataaaataagaggtttataaagaacagaagcgtattgaatcctttacttataagatgacttacacactaattcttttgtttctaaccatggtcctttctcaaccttttcagttaagtataaagtctaatctcatcacatatcacatcaaacggggcaaaggttggcatgtcgttgtagacagcatccacagcaaaagctacccctcatggatccgtatcaccatatcagacatcatgtgagtgcgcgcagattagcttattgtacttgaattaaattgacctctctccccaacagtatccacccacaagcatagcaggcacaggagtggtggtgggcagctcgactacaatcaaccggccggaactgcaccaaaaatgcaaccggggctcgcactccagtgacaccagttcggcgtacagcggcagcgatacaatggcctcgaactatgcctcgtcgctggaggccgaggagattgacctctccggcctggtggagtccgttgtggactctgacgaggaggacctggcggagagcatggatgtaagtggataaaacatccaatgtatacattacaacgatgtgttagaatgtcattagaaaaggaagaacatctgattatttatttggctttttttttctgatttatttagagtcttaccgtgcgggatgccgtgcgtgactgtctggaaaaggatccggcggagcgcagcgaggaagatgtggaagtactgcttgagttcacgcagggccttaaggcattcacaaacattacgctggcagtgcgaagagcactatgttccgtgatggtattcgccgttgtggacaaggcgggaaccgtggtcatgtcagatggtgaggaactggactcatggtcggtgctcataaacggagcggtggagatcgagcatgcaaatggcagtcgcgaagagctgcagatgggagactccttcggcattctacccaccatggacaagctgtaccaccggggtgtgatgcgtacgaagtgcgatgactgccaatttgtgtgcattacgcagacggactactaccgtattcagcatcaaggcgaggagaatacccggcgacatgaggacgagaatggtttcgttgttatggtcactgaactccggtccattggcggcgccggcactgattctgctggcagtggcggatcggcgacaggagcttcggcttcgctaaatatgaagcgtggtcacgtagttatccgcggtactccagagcgtctgctacagcagctggtcgaggaaaactcgatgaccgatcccacatacgtggaggactttttgctcacacaccgcatctttattcagaacccacaagaggtgaccagcaagttgctgcattggtttgatttggagcaggtggatgcgcacaagacgcaggaactgcgagatcgcgtaacacgcgtcgtgctcctctgggtgaacaaccatttcaccgatttcgaggcggactatgagatgatggagtttctggaagtctttgaggcactgttagagcgaaaaaagttgctaagtcagctgcgcctgttgcacatagcctgtgccgccaaagcacggatgcgcagctgtaccctcactcgatcgtcacgtgacgagccgctcaacttccgcatcgtgggcggctacgagcttcgaggcgtcgccatagccactggaaacgcagcagtgggcatctacatttcgcacgtcgagccgggatcaaaagcccaggatgtgggccttaagcgaggcgatcagattcacgaagtaaatggacagtcgctggaccatgtgactagcaagcgagccctcgagatactcacaggcaccacccatttgagcatcagcgttaagagcaacttgcttggcttcaaggagattatgcaggctcttgagcatggcggtggaaccgctggatccggaagcatttccgcaggcagcggcagtttcaagtccgtgcgaagtccacgccgtatttgcgccaatgatattgctaagttgcacggtcgctctgatagcaccaccgacgaattgtccagcgtcagcgcctcgaatcgggcgcacatggtgcgccttagttccgtcgatatgctacttgaccagccggactgcgctccaccgcaaacgccgccagtgagtgggagcggtaacatggcctccaattttatgcagcaactcttgcaaagcgttaacaatagttcggccaagaagtccggtgggaattcaaactcggatcagcaagatacgaagggcggttttatgactctggcgccaaagcgtcggttgcagaaagcgctggcaaagatgaatttgctcaataagcaaaatcacggcagcagcctaaacgactcctcggatacgctgctcaacgatcccaagtcaaaactttctgcagttagctcgtgcagcagttccactcagtcgtctatcaatggatgcacggtcagtgggggtggccggctctaccagtcgcaatcgaatccggatttaaccagtctcaactatgacggaggcagcgatgcgggtggaaacggtggtggaagattgcaagtgaactacctgaacgcccacattcaccggccatcagcggccagtactttgacaacaaactcgacgcaatcgcacctcttgcccgattacccggaccacgtgctcaaggtgtacaaggcagaccagacgtgcaagtatgtactcatctacaaggagacgacagcccacgaggtcgtaatgctgacgctgcaggagtttggaatacacgaccccagctcgaatttctcgctatgcgaagtgagtgttggcgacgggggtatggtaaagcagcgccggttgcccgatcagctgcagaacctggccgagcgaataagctttgcggcgcgttactacctcaagttaaacgatagcaccgaaccgctggttccagacgaactggccctggaactggtacgcgagtcgaacgtgcacttcctgcacctgaatgcatacgagctggccattcagctcactctacaggactttgcgaactttcgccagattgagtccaccgagtacgtggacgaattgttcgagttgcgctcacgctacggagtgccaatgctgagcaagtttgccgaactggtcaatcgtgaaatgttttgggttgtgagtgagatttgcgcagagcacaacattgtgcgccgcatgaagatcgtcaagcagttcatcaaaattgcgcgccactgcaaggagtgccgtaactttaactccatgtttgcaatcgtctcggggcttggacacggagctgtttcgcgactgcgtcaaacgtgggagaagctgccctccaaatatcagcgactgttcaacgacctgcaggatctgatggatccctcgcgcaacatgagcaagtatcggcaactagtgtccgccgaactactggcccagcaccccatcatcccgttctatccgatcgtcaagaaggatctcacctttattcacctgggcaatgatacgagagttgatggcctaatcaactttgagaagctgcgaatgctggccaaggaggtacgcctgctcacgcacatgtgcagttcgccatacgatctgctgtcgatccttgagctcaaggggcagtcgccatccaacgctctcttctcgctcaatcagatgtctgcatcgcagagcaacgctgccgctggcacagttatcgccgccaatgccggccaggcgactatcaagcggcgcaagaagtcgacggcggcgcccaatcccaagaagatgtttgaggaggcgcagatggtgcggcgggtgaaagcatatctcaacagcctcaaaatactcagtgacgaggaccttttgcacaaattctcgctggaatgcgagcccgcgcacgggtccacgtactcgggcagcatctcgcacggaaatacctcacaccgaagcggtggtggaggcagcatcagtggcggtgctggtggcagctccggtggtggtggcgggggcagttccagcctcaatgccggcgaccaactgagcatctattcgcataccagctccagctcggcgccgaactcctcactatcgcttcgcaagaggcacccaagttcacccaccctttcgactaccagctcaacgagttctaccagcgatcatcaaagaagacagatgcataacaacggcccaaagtttggcacagcctcgccacaagcagttaaaaagatgctatcgctgtcagagtcctccaagattcggccgcaccagccattcgtgccgcgtcacggatccacaatggccggagtgattccaccactgcatcacatgcatgcggcacatggtttcagcacaccgtcgcctggaggagtggtcacctcaccggcaaccagtgcagtggccaatgttcagtgtacgccaagtcctagtccctgctcccaccgacgactggcttctggaggtaatggaattattatcactgcctcattgtatatcactaacttaattgggtccattgcaggcaacattattccctctcgcgcaatacacgagcggtcgcactcggacacaccagctccgccgccgcctctaccctcggtcgatctctccctagagagcagtagtgtaactacatttcgcgatttaccattgcgcaaatccgtgacttccggtaagtgcctcgtgccctaagatcgtagttgtatatcgactaaaaatacgttattagctgctactaaaacccgatgctaagtatgctcatatagtgcgtttcttaatttcggaattcttcagaaatgtttttcgagtatgcttagcaatcgaatcccgataaataaatcgtagtcgccagttatttataccttgttagttgcgctttagactccgttccctgcttgcatttgaaacgtatagtttttggtggttgggttggaattgtttggttgtcggctacacaaacgcaaacatacatataacacgaaaacacaacacacacacttgcaccacgtggtaccatgaaatgaatcccaaatggaggtcaccatttcacggacgccatctcagacatattctttaccctaatttcacacccaacaggttccatatcgtcctgcgacagcggctacgtgcatcagcagcagcattaccacttgcagtaccagcagcagcaacaacagaacagctcgcaacacgagccatccccgccggtctataccgcagccgactgccggctgcttcagcagatatcgaacaacgcggtgacccgcaacttgaacagtccctgtcaaagcacaaacacaccacccagcacacctacacctccaccgaaccagcccacagcaaccattcagctttctgcaccgccgacggcagcagcatacatgcacgcacgcagccagcatcagcagctccagcagcagcagcaatctttggccatgccaccaccgccgccaccgccgtacaatgtgccccccctgggcagtatctacagccaccaccagggcactgctggcagcaggcacctgaaccacatgcatggtaagacgaccggaccgcaagagagatggtttccagattgccgtccaacgacaaaacaacaaatgcaaagcgggagttgagtcgggtctttctgaaataggcgttacaccgggttgttcgacttgtttttctagctacgttttgatctacgttttgtaagcttgacttatgtaccccaccttaattatatcaatttctccttcacaggtggcccgccaaattttatggatagcaccaagtgtaccatatgtcccatgccacccatgaatcaataatgaatcaaattgtgctgttttaaccgctatatgtttatttaattagttgtaagtatgtcgattttatgttatatcttaagaaccataagctcacaagataagctccgactttcagtttccaagaacaacttgagtacttatggttctgaaacgttattattacttttaggtcatcaattctaacaatttgatcttttcatttcagcagatagagttgccaaaatttgtgaatggttgtggtttcaatttcgccagcaatcagaaacaacgtatccccgatcacctttaccctttacggagctgcaaaaatattactagcatccatttgtattgcgtatttacatttagtaactgagaatttaattttagttagggcttaccatttattatttaatttagctaaattctttgtacacactttctacccatcattcaccgccagcgtagaagttgccttttctcttaaaagaaaacgtctgcaggcagaccctctcagcagacccaactaaaactcttttgaagacttttcgtcggcatttacaagtgtaagaacagaacaaaataattttaaagcccagcacaacaacgagacgatcaattgatatagaaacgcaaacggaatcaactcgaagccaccattaattccattaatctatacttctttaatacttatgtacaagctaattttattacaagcatactcctttaaacgctatatatacatatatattacgaaaaaccttcgctccaattccaaatatttagttgttaagcccaaaagagagatagacaaaacattttttcgaatatatttttgaccattcgttccgaagaattcaaaggaagagtggcagacaaatgcaatatttgtgtatagaattatacaactcctagcaatacctagactagcccacaaaaaaaggaaatcatcaaagtacaacttccacgaaagacagaaataagttatgaaagacaaacctgagacatataaaaaaccatatataatcatttttgatcgtatttttctcacacgtaaggaactccaatatgaatatttgtgtgtgcatgaatgcctgttatatacatagatatatacaatatatatatatacaacctacatatacaagctatatacaagaaatctctatatatatacaaaccatgagtggagacccgtttctcg

SEQ ID NO: 20168 - DNA, 4656 bp, DROSOPHILA
atggatccgtatcaccatatcagacatcattatccacccacaagcatagcaggcacaggagtggtggtgggcagctcgactacaatcaaccggccggaactgcaccaaaaatgcaaccggggctcgcactccagtgacaccagttcggcgtacagcggcagcgatacaatggcctcgaactatgcctcgtcgctggaggccgaggagattgacctctccggcctggtggagtccgttgtggactctgacgaggaggacctggcggagagcatggatagtcttaccgtgcgggatgccgtgcgtgactgtctggaaaaggatccggcggagcgcagcgaggaagatgtggaagtactgcttgagttcacgcagggccttaaggcattcacaaacattacgctggcagtgcgaagagcactatgttccgtgatggtattcgccgttgtggacaaggcgggaaccgtggtcatgtcagatggtgaggaactggactcatggtcggtgctcataaacggagcggtggagatcgagcatgcaaatggcagtcgcgaagagctgcagatgggagactccttcggcattctacccaccatggacaagctgtaccaccggggtgtgatgcgtacgaagtgcgatgactgccaatttgtgtgcattacgcagacggactactaccgtattcagcatcaaggcgaggagaatacccggcgacatgaggacgagaatggtttcgttgttatggtcactgaactccggtccattggcggcgccggcactgattctgctggcagtggcggatcggcgacaggagcttcggcttcgctaaatatgaagcgtggtcacgtagttatccgcggtactccagagcgtctgctacagcagctggtcgaggaaaactcgatgaccgatcccacatacgtggaggactttttgctcacacaccgcatctttattcagaacccacaagaggtgaccagcaagttgctgcattggtttgatttggagcaggtggatgcgcacaagacgcaggaactgcgagatcgcgtaacacgcgtcgtgctcctctgggtgaacaaccatttcaccgatttcgaggcggactatgagatgatggagtttctggaagtctttgaggcactgttagagcgaaaaaagttgctaagtcagctgcgcctgttgcacatagcctgtgccgccaaagcacggatgcgcagctgtaccctcactcgatcgtcacgtgacgagccgctcaacttccgcatcgtgggcggctacgagcttcgaggcgtcgccatagccactggaaacgcagcagtgggcatctacatttcgcacgtcgagccgggatcaaaagcccaggatgtgggccttaagcgaggcgatcagattcacgaagtaaatggacagtcgctggaccatgtgactagcaagcgagccctcgagatactcacaggcaccacccatttgagcatcagcgttaagagcaacttgcttggcttcaaggagattatgcaggctcttgagcatggcggtggaaccgctggatccggaagcatttccgcaggcagcggcagtttcaagtccgtgcgaagtccacgccgtatttgcgccaatgatattgctaagttgcacggtcgctctgatagcaccaccgacgaattgtccagcgtcagcgcctcgaatcgggcgcacatggtgcgccttagttccgtcgatatgctacttgaccagccggactgcgctccaccgcaaacgccgccagtgagtgggagcggtaacatggcctccaattttatgcagcaactcttgcaaagcgttaacaatagttcggccaagaagtccggtgggaattcaaactcggatcagcaagatacgaagggcggttttatgactctggcgccaaagcgtcggttgcagaaagcgctggcaaagatgaatttgctcaataagcaaaatcacggcagcagcctaaacgactcctcggatacgctgctcaacgatcccaagtcaaaactttctgcagttagctcgtgcagcagttccactcagtcgtctatcaatggatgcacggtcagtgggggtggccggctctaccagtcgcaatcgaatccggatttaaccagtctcaactatgacggaggcagcgatgcgggtggaaacggtggtggaagattgcaagtgaactacctgaacgcccacattcaccggccatcagcggccagtactttgacaacaaactcgacgcaatcgcacctcttgcccgattacccggaccacgtgctcaaggtgtacaaggcagaccagacgtgcaagtatgtactcatctacaaggagacgacagcccacgaggtcgtaatgctgacgctgcaggagtttggaatacacgaccccagctcgaatttctcgctatgcgaagtgagtgttggcgacgggggtatggtaaagcagcgccggttgcccgatcagctgcagaacctggccgagcgaataagctttgcggcgcgttactacctcaagttaaacgatagcaccgaaccgctggttccagacgaactggccctggaactggtacgcgagtcgaacgtgcacttcctgcacctgaatgcatacgagctggccattcagctcactctacaggactttgcgaactttcgccagattgagtccaccgagtacgtggacgaattgttcgagttgcgctcacgctacggagtgccaatgctgagcaagtttgccgaactggtcaatcgtgaaatgttttgggttgtgagtgagatttgcgcagagcacaacattgtgcgccgcatgaagatcgtcaagcagttcatcaaaattgcgcgccactgcaaggagtgccgtaactttaactccatgtttgcaatcgtctcggggcttggacacggagctgtttcgcgactgcgtcaaacgtgggagaagctgccctccaaatatcagcgactgttcaacgacctgcaggatctgatggatccctcgcgcaacatgagcaagtatcggcaactagtgtccgccgaactactggcccagcaccccatcatcccgttctatccgatcgtcaagaaggatctcacctttattcacctgggcaatgatacgagagttgatggcctaatcaactttgagaagctgcgaatgctggccaaggaggtacgcctgctcacgcacatgtgcagttcgccatacgatctgctgtcgatccttgagctcaaggggcagtcgccatccaacgctctcttctcgctcaatcagatgtctgcatcgcagagcaacgctgccgctggcacagttatcgccgccaatgccggccaggcgactatcaagcggcgcaagaagtcgacggcggcgcccaatcccaagaagatgtttgaggaggcgcagatggtgcggcgggtgaaagcatatctcaacagcctcaaaatactcagtgacgaggaccttttgcacaaattctcgctggaatgcgagcccgcgcacgggtccacgtactcgggcagcatctcgcacggaaatacctcacaccgaagcggtggtggaggcagcatcagtggcggtgctggtggcagctccggtggtggtggcgggggcagttccagcctcaatgccggcgaccaactgagcatctattcgcataccagctccagctcggcgccgaactcctcactatcgcttcgcaagaggcacccaagttcacccaccctttcgactaccagctcaacgagttctaccagcgatcatcaaagaagacagatgcataacaacggcccaaagtttggcacagcctcgccacaagcagttaaaaagatgctatcgctgtcagagtcctccaagattcggccgcaccagccattcgtgccgcgtcacggatccacaatggccggagtgattccaccactgcatcacatgcatgcggcacatggtttcagcacaccgtcgcctggaggagtggtcacctcaccggcaaccagtgcagtggccaatgttcagtgtacgccaagtcctagtccctgctcccaccgacgactggcttctggaggcaacattattccctctcgcgcaatacacgagcggtcgcactcggacacaccagctccgccgccgcctctaccctcggtcgatctctccctagagagcagtagtgtaactacatttcgcgatttaccattgcgcaaatccgtgacttccggttccatatcgtcctgcgacagcggctacgtgcatcagcagcagcattaccacttgcagtaccagcagcagcaacaacagaacagctcgcaacacgagccatccccgccggtctataccgcagccgactgccggctgcttcagcagatatcgaacaacgcggtgacccgcaacttgaacagtccctgtcaaagcacaaacacaccacccagcacacctacacctccaccgaaccagcccacagcaaccattcagctttctgcaccgccgacggcagcagcatacatgcacgcacgcagccagcatcagcagctccagcagcagcagcaatctttggccatgccaccaccgccgccaccgccgtacaatgtgccccccctgggcagtatctacagccaccaccagggcactgctggcagcaggcacctgaaccacatgcatggtcatcaattctaa

SEQ ID NO: 20169 - protein, 1551 aa, DROSOPHILA
MDPYHHIRHHYPPTSIAGTGVVVGSSTTINRPELHQKCNRGSHSSDTSSAYSGSDTMASNYASSLEAEEIDLSGLVESVVDSDEEDLAESMDSLTVRDAVRDCLEKDPAERSEEDVEVLLEFTQGLKAFTNITLAVRRALCSVMVFAVVDKAGTVVMSDGEELDSWSVLINGAVEIEHANGSREELQMGDSFGILPTMDKLYHRGVMRTKCDDCQFVCITQTDYYRIQHQGEENTRRHEDENGFVVMVTELRSIGGAGTDSAGSGGSATGASASLNMKRGHVVIRGTPERLLQQLVEENSMTDPTYVEDFLLTHRIFIQNPQEVTSKLLHWFDLEQVDAHKTQELRDRVTRVVLLWVNNHFTDFEADYEMMEFLEVFEALLERKKLLSQLRLLHIACAAKARMRSCTLTRSSRDEPLNFRIVGGYELRGVAIATGNAAVGIYISHVEPGSKAQDVGLKRGDQIHEVNGQSLDHVTSKRALEILTGTTHLSISVKSNLLGFKEIMQALEHGGGTAGSGSISAGSGSFKSVRSPRRICANDIAKLHGRSDSTTDELSSVSASNRAHMVRLSSVDMLLDQPDCAPPQTPPVSGSGNMASNFMQQLLQSVNNSSAKKSGGNSNSDQQDTKGGFMTLAPKRRLQKALAKMNLLNKQNHGSSLNDSSDTLLNDPKSKLSAVSSCSSSTQSSINGCTVSGGGRLYQSQSNPDLTSLNYDGGSDAGGNGGGRLQVNYLNAHIHRPSAASTLTTNSTQSHLLPDYPDHVLKVYKADQTCKYVLIYKETTAHEVVMLTLQEFGIHDPSSNFSLCEVSVGDGGMVKQRRLPDQLQNLAERISFAARYYLKLNDSTEPLVPDELALELVRESNVHFLHLNAYELAIQLTLQDFANFRQIESTEYVDELFELRSRYGVPMLSKFAELVNREMFWVVSEICAEHNIVRRMKIVKQFIKIARHCKECRNFNSMFAIVSGLGHGAVSRLRQTWEKLPSKYQRLFNDLQDLMDPSRNMSKYRQLVSAELLAQHPIIPFYPIVKKDLTFIHLGNDTRVDGLINFEKLRMLAKEVRLLTHMCSSPYDLLSILELKGQSPSNALFSLNQMSASQSNAAAGTVIAANAGQATIKRRKKSTAAPNPKKMFEEAQMVRRVKAYLNSLKILSDEDLLHKFSLECEPAHGSTYSGSISHGNTSHRSGGGGSISGGAGGSSGGGGGGSSSLNAGDQLSIYSHTSSSSAPNSSLSLRKRHPSSPTLSTTSSTSSTSDHQRRQMHNNGPKFGTASPQAVKKMLSLSESSKIRPHQPFVPRHGSTMAGVIPPLHHMHAAHGFSTPSPGGVVTSPATSAVANVQCTPSPSPCSHRRLASGGNIIPSRAIHERSHSDTPAPPPPLPSVDLSLESSSVTTFRDLPLRKSVTSGSISSCDSGYVHQQQHYHLQYQQQQQQNSSQHEPSPPVYTAADCRLLQQISNNAVTRNLNSPCQSTNTPPSTPTPPPNQPTATIQLSAPPTAAAYMHARSQHQQLQQQQQSLAMPPPPPPPYNVPPLGSIYSHHQGTAGSRHLNHMHGHQF

SEQ ID NO: 20170 - DNA, 7201 bp, DROSOPHILA
ttttaggaatctttgaaaaacgacgagagacttttttcaatgtcatgttgagcgtttatttttgcaacttgtctgcaaaggtgcacaaaaataaaattatttaataatgaatattaccttgaaaaagtgatcttttaattgtatctttgattttcaaagatcctggggacgtcttcttataaatgttcaatattctagtggggaatgaaaaaagtgggcagtttaaaaagatttttaaacttttcatcaaattgagaagacgtctaaaaaatgaatgtctggcttttattaccgaaaaacaaaatttgtcctaaatctgaagactataaattcataatatgtcttcctttttgccacgtattgtatgaaaatgtcttcagatcgccaaactaacatgaagtacatttaattcatattttaagacctatgtgacaattatacatgtattaactatgtttcggaccatcaaaccaaattaacaaaaataaaattaatttttttcaaaccttttctttggggaagcgcgctgggaataattttttaagaaaaaacacgttgcacgtcgcataagagttaaatgtgcttattgctttttatcaatttgttattgtttttatttcgaaatttattaaaatacacatgtataaatagttcggctttaaacctaagcccaattgttgtggctgtggttagttaactggcatttttactggcttgccaaaacaactacctatccgctacttttatatttatgtatgtatctataaagtggccattgtggggggttctgtttttataacaaatctagagcttaaaaactagttggtattaaaatttaacgattatagggacaacagctgccagtagaaatataaaattgctgaacggagttgtactgattttttaaaacgagaactaaaggaaatttgttcgatataaacaatttaagcttaaacaaagaaaaatacttcttgccaagttttccatattctttagaacctcagatgagcctcgtgcgcttcaaataggtaataagcagattgtatatgaacttgtattgcgccagggatggtataatgctatcccgttgatgccttagctgcccgataactcgaggtatatccaggtcctgcgatcgtaagaaaataatgcttatggaaatggaataataaattccctttctccactcacctcattgtggtccaacgtgtacagtaaaagatcggcggtcagtgtcactcccgaacgaccgcctccctccagacagtgaagaagaactggtgggtttgtgttatgtcccggcggaacttcttgcgtagatgccaatcgcacggaattcagctcctcgaggaaatcgaggaagtgattcacatcgcgtggacaattctgctccgcccagtcagcgtactgcaaataccaaacggatcggtatcgacgcgatggtacgtggtaaaggcgcagcttgatggtggtgcatcgatcggtggtttgtgagaattcctgatacacttggaactagaaagtagaacctttgaggaacagaactaaaagcttatgcggttcacttacctgtccaaactcgagacgctgatgactgttacgaggaatatagctcatatcctcggttagctggaccaccaaatacacatccgcctcccatacacactgccagaagatgcgcatggtaagcggttcttgtggcgactgggccacaatatagaaccgctgctttgtgcccacagtggcctgaaaaagatgttccaacaatgaaatacacaatttgcttttcatcttgagtgtcaactgaacgtacagatatggaggaagcattaacgtaaccatgccgattgtctcggcatggagtcagtcgcactctgttgtcgtcatagggtaaaaagttggggtcgtggttctttggctcgttctcctccagcagggcgcattcgtatagggcatgctcccgtcgtttcggtatgcgttcgaactccatgaatagctgcgagtcacttagcttttggtctaggatttggcactggaagttgacaagcgctttaatcgaaatggattccaaatcgtaataacttttaacctaccagtttgtccttggaatatcgtccagaaatgggctgcggcttgttgacgcctgtggaccaacgatttggcaggttgagatcgtcttgggctagctttagctttgccgccagcttggagtgctgacctgccgttgtggccttttccctgcccagtgtggcggatttctgtttgtcgggtgttttgctgcgtgacaaaaagttccatcgcttcttgcgttttaagtctttgctggccgccgatgaggacgtggtgtccagcgttgagttgaacatggaggatgtggaagctgatgtgttggcagaaagattcatggcactgaactgctgttgcagcgtgtctccggccggcgtgatcatgtcgaccgtcgacgacttgtttaggcttgctgttgagcgatgttgtcgtggcggaggtgtggctcccatatctggcgctgcactggcggctcgattggtccgcttaggagcctgcggttccaggaacagcagctccgtgcttgctgctcggtctgcgccgtacttctttatgtttccatcgtcgggtggagaattgacagttacagtaactacgttgttggagctggcgtttcgagcagctggaacagggacaacgcctggggcggactgtatggaggaagctctttgacgcatagcctcagtatttgcggcaccactgctgccaccagaggctctctgtggcaggggtacattctcgtagatgggctcgatggaaccgttcaccaagctcctctgtagtggcgccggtgtcgccgatttatgggacgaagcaaccaccggcggtggaagcgggctgctcgctggcgggggcacagaactacgatatccactcggcggcagggtaggtgaactgcaagatcgtagcgaaaagtattgttatattgtttattttacgacttcattacacttacctctgcgttaccacagatccggcagctgcagctgctgcctgactcatcgctgactgtcgcagctgggacattatagacggctgctcctcgatcatgttgaggttctcgaaggtgccgtgcgggggcagatagggctgcgagtgccccatgtggctcacgtactggtactggtgcaacatggtggctccggaagatgttggaatatttccggcatgtccgcctgcgggcagagcaacgtactgaccgccattgaagagcgtgcggttagagactagatccggcgaggagccgcttacgtagttgcggaaaccctgaaggggacggggagtggccacggccagatcgggcgtggaggaggaactcagccgattgacatacggcggtggggccttgtgacgcatcatatgcatgcgctgcgagagctctaggtatgcctgggcggggctcatgggctgtggatgtgactgcggttgatgctgtgcctggtacaggttgatgtggtggtgtagggcagccgccggctgggccacgtccggataacgatgcgcagtcatatgaccatacagtaagttctcgttgtgcatgcctggattgtgtacatcaggctgggagcccgcatagtaggcatttccgggcgcggccattgccagtgccacattgtggaattccgccgatggtgtgcggtactttagttggaccgccgtctcatagtctggtgccgggcggtatgtgggcagcatggctttgaggcgctcccgctcatcgttgttattgttgttgttgctgcctccgtggtgcaacatgccactgctgctgtgcaggttgttgttgctcaaatccaggcaggagctgctttgtcccaacatctggttagcgctggtagccagcgaaatgttggaggaaatcatctgctgctgctgaatctgttgctgctgctgcatatgttgctgctgctgatgatgctgttgcagttgctcggcggccgccgcttcattgtaatcgtagtcgacataaccaacgctgtcaacgcccaacggaccactctccgcatccgcaccacttcccaggctcgagggcgtggccgtgtcaatatagcgcttgaaaaacttatgctggctaatggtgagcttccagaagtaacgtgccgtgtccgcctcgctgaatataaagcttcccacgatgctgccgccaccatccagcttgttctgctcgatcttaatcgttcgcttgtcgatggtcaccgtgtggaactccttccatggaaaatactgccgaccgttgtccgcgttcaccaccatcccgttgatggccaggcccagcaacaaatcattgccgagcgtgtccttggcggcgaaacgttcctccccatacccctccagctgctggcagcactgtatgtacatctcctccgcctggctctgactcagatgtgcaatgcccgcctgctgctgcaggacctccacgatcagtccctccagcatgctgtcatcgttggccaggccttgcatgttgcgcggcaggaccagcgacttcttcagatagtccttgctctgtttgtcgccctggtagctatcgtactccgcctggcggcagtagagcgccagcagtatggccgtgcggatgtcacaggcgatgcggccctcgtagatgtcgctcttcagctgcagaaagtagtaaaagcgcgtggcttcgtcgctcaagtggcgcacgccagtggtcacgtagtggcgaacgcgcaagtagatcttggggcccgccgcatacttctccagctgccgactgagcgagcgctccaggtcgatccatttgaactcgtcctccttgtccttgcccttgaccaggtagcgcagtccaaagaactccggctgctggattagcaaacgttggcaaacgttgtccaggcactcctgtcccttgctctccgagctgatcgtgcagtccactgtgctggatgtgtctgcaatgtaggtaagagtgaaaacgtgcttcaaacatcggcctaagtcgctccaagcactctaaattcgccgcacaacaacaatttggccctgcccgtcgcacgcgcaaatatgcaaataaagtttataatctctttcgagaccttatacgttttatggacggaaattgtggcggcgccgctcaattggcttctctcatctgtcgtatttcctaactaacgaaacgtaggcctaatgtctaaaacctttctgatggttggagaaatttgggtggttttaattgagtcaaggtcttcagttcgcttgccaaataagtacattcggttaagtgtataagaactacaaaacatgcttttgtttagcccaaaatcgagagtaaataatatacaaaatgtgaagtacgcaaagttaggaagttctcataggcagtctgttagttttagaattaacggtcgctgttatgtgtcctgtgcgcctctgttaactcagcgactgttaactagaatgcaacaagtgaaggcatttttgtggtctgtgccttggaaggcgaattccagctaaactggaagtgggcgccgcatgacaatcgttgtgcacattcccaattaaataatcccaattgcaatggcagacggcagctgttaagttgtggctttgtcaccgatttcttgttgtttctattgtctcgtctccactgttgctattgctgttgttgttgttgtcgttgctgtcgctgttgttgttgtggggggcgtagcgcctctaggaatgtggggcttactcacccagcaggtgatgcactgatataacaaacaaactcttggacgtaacattgtactggcgacactttttcaagaatttcaatggcatttttcgactattttgctccaccggggctccgctgggctcacaaaagtggctaaaacggcagcaccatcgacaccacaggttttttttgggggagtaaattgctcaattggaattagccgatttgaatcagctgattagacacgcaaaccagagcactgcgcgtattggttaagtaaagttaaagatagtaattgggcagttaacgacaataaataaaggaattcacgagaaataaaacgaagagaccgaagtgctgatatcgatacgcaggtgctgactgagtatctcggtggctggcatcgaatggatcgataggcggcattgactatcggtatgtctttgcgcagtgggctgcaagaaaataggtttagttctgttaaagaaaacaagtgcaaccaagaaatatgtaactgaaacaaaacagtttatattttaaaatatataacaatgcagtcagcagtgattaaataaaattcctaaagatattaaaaccactgatacacacgaatacttcgttgtacacagcaagagaataacggtttctagcgaacagtaaaatatcaaacttaacagagctactggacacataggtggcgtgctggcatagctctgttatccgttccaactccagtgctggaaagtgcgcgcaactgagaaatccacaccgcgattcgacgacggtccctctggaattcagtaatttagtactgctgctgccgtggtagtcgtcacttcccctttgcacttgccgccctccgtcaacgttttatcgaataaagcgaattaaaattaagatcgtggcttcgccccgctgcgtaactgaataaagcgaatttaaatcaagggctttgacgtctgccaagctgctgagaggggctgcaacaggaagagcaccagagacggggcacaaatccacatccacatccaccgatcgtcgtctatctacagaggattaggagcagcgcagtcggagatcgcgatcggtgagtttcgaggagccgaatcacaaggccacgcactgtcgaaatccaaaaagcaaaacccgattaccaaaatcgaaatccagtccataattaatttgctgcttagatatttcgagcgctgcattggcggtcaaggttgcagcgacgaggacagatgatggagcaaccgtatcgctcactcgctcgctcacacacacacacacacacagaagagccctgcgagcgagtttaaagttcagtacctgttgctgcgctcgcccagtctccctctccctctcgctctcgcacagcctcgccgccgcccgtgcgatagtgcgctctcgctcactccgtccgcgctgcgtgtaatttaatttaattcacttctg

SEQ ID NO: 20171 - DNA, 4110 bp, DROSOPHILA
cccactgcgcaaagacataccgatagtcaatgccgcctatcgatccattcgatgccagccaccgagatactcagtcagcacctgcgtatcgatatcagcacttcggtctcttcgttttatttctcgtgaattcctttatttattgtcgttaactgcccaattactatctttaactttacttaaccaatacgcgcagtgctctggtttgcgtgtctaatcagctgattcaaatcggctaattccaattgagcaatttactcccccaaaaaaaacctgtggtgtcgatggtgctgccgttttagccacttttgtgagcccagcggagccccggtggagcaaaatagtcgaaaaatgccattgaaattcttgaaaaagtgtcgccagtacaatgttacgtccaagagtttgtttgttatatcagtgcatcacctgctggacacatccagcacagtggactgcacgatcagctcggagagcaagggacaggagtgcctggacaacgtttgccaacgtttgctaatccagcagccggagttctttggactgcgctacctggtcaagggcaaggacaaggaggacgagttcaaatggatcgacctggagcgctcgctcagtcggcagctggagaagtatgcggcgggccccaagatctacttgcgcgttcgccactacgtgaccactggcgtgcgccacttgagcgacgaagccacgcgcttttactactttctgcagctgaagagcgacatctacgagggccgcatcgcctgtgacatccgcacggccatactgctggcgctctactgccgccaggcggagtacgatagctaccagggcgacaaacagagcaaggactatctgaagaagtcgctggtcctgccgcgcaacatgcaaggcctggccaacgatgacagcatgctggagggactgatcgtggaggtcctgcagcagcaggcgggcattgcacatctgagtcagagccaggcggaggagatgtacatacagtgctgccagcagctggaggggtatggggaggaacgtttcgccgccaaggacacgctcggcaatgatttgttgctgggcctggccatcaacgggatggtggtgaacgcggacaacggtcggcagtattttccatggaaggagttccacacggtgaccatcgacaagcgaacgattaagatcgagcagaacaagctggatggtggcggcagcatcgtgggaagctttatattcagcgaggcggacacggcacgttacttctggaagctcaccattagccagcataagtttttcaagcgctatattgacacggccacgccctcgagcctgggaagtggtgcggatgcggagagtggtccgttgggcgttgacagcgttggttatgtcgactacgattacaatgaagcggcggccgccgagcaactgcaacagcatcatcagcagcagcaacatatgcagcagcagcaacagattcagcagcagcagatgatttcctccaacatttcgctggctaccagcgctaaccagatgttgggacaaagcagctcctgcctggatttgagcaacaacaacctgcacagcagcagtggcatgttgcaccacggaggcagcaacaacaacaataacaacgatgagcgggagcgcctcaaagccatgctgcccacataccgcccggcaccagactatgagacggcggtccaactaaagtaccgcacaccatcggcggaattccacaatgtggcactggcaatggccgcgcccggaaatgcctactatgcgggctcccagcctgatgtacacaatccaggcatgcacaacgagaacttactgtatggtcatatgactgcgcatcgttatccggacgtggcccagccggcggctgccctacaccaccacatcaacctgtaccaggcacagcatcaaccgcagtcacatccacagcccatgagccccgcccaggcatacctagagctctcgcagcgcatgcatatgatgcgtcacaaggccccaccgccgtatgtcaatcggctgagttcctcctccacgcccgatctggccgtggccactccccgtccccttcagggtttccgcaactacgtaagcggctcctcgccggatctagtctctaaccgcacgctcttcaatggcggtcagtacgttgctctgcccgcaggcggacatgccggaaatattccaacatcttccggagccaccatgttgcaccagtaccagtacgtgagccacatggggcactcgcagccctatctgcccccgcacggcaccttcgagaacctcaacatgatcgaggagcagccgtctataatgtcccagctgcgacagtcagcgatgagtcaggcagcagctgcagctgccggatctgtggtaacgcagagttcacctaccctgccgccgagtggatatcgtagttctgtgcccccgccagcgagcagcccgcttccaccgccggtggttgcttcgtcccataaatcggcgacaccggcgccactacagaggagcttggtgaacggttccatcgagcccatctacgagaatgtacccctgccacagagagcctctggtggcagcagtggtgccgcaaatactgaggctatgcgtcaaagagcttcctccatacagtccgccccaggcgttgtccctgttccagctgctcgaaacgccagctccaacaacgtagttactgtaactgtcaattctccacccgacgatggaaacataaagaagtacggcgcagaccgagcagcaagcacggagctgctgttcctggaaccgcaggctcctaagcggaccaatcgagccgccagtgcagcgccagatatgggagccacacctccgccacgacaacatcgctcaacagcaagcctaaacaagtcgtcgacggtcgacatgatcacgccggccggagacacgctgcaacagcagttcagtgccatgaatctttctgccaacacatcagcttccacatcctccatgttcaactcaacgctggacaccacgtcctcatcggcggccagcaaagacttaaaacgcaagaagcgatggaactttttgtcacgcagcaaaacacccgacaaacagaaatccgccacactgggcagggaaaaggccacaacggcaggtcagcactccaagctggcggcaaagctaaagctagcccaagacgatctcaacctgccaaatcgttggtccacaggcgtcaacaagccgcagcccatttctggacgatattccaaggacaaactgtgccaaatcctagaccaaaagctaagtgactcgcagctattcatggagttcgaacgcataccgaaacgacgggagcatgccctatacgaatgcgccctgctggaggagaacgagccaaagaaccacgaccccaactttttaccctatgacgacaacagagtgcgactgactccatgccgagacaatcggcatggttacgttaatgcttcctccatatctgccactgtgggcacaaagcagcggttctatattgtggcccagtcgccacaagaaccgcttaccatgcgcatcttctggcagtgtgtatgggaggcggatgtgtatttggtggtccagctaaccgaggatatgagctatattcctcgtaacagtcatcagcgtctcgagtttggacagttccaagtgtatcaggaattctcacaaaccaccgatcgatgcaccaccatcaagctgcgcctttaccacgtaccatcgcgtcgataccgatccgtttggtatttgcagtacgctgactgggcggagcagaattgtccacgcgatgtgaatcacttcctcgatttcctcgaggagctgaattccgtgcgattggcatctacgcaagaagttccgccgggacataacacaaacccaccagttcttcttcactgtctggagggaggcggtcgttcgggagtgacactgaccgccgatcttttactgtacacgttggaccacaatgaggacctggatatacctcgagttatcgggcagctaaggcatcaacgggatagcattataccatccctggcgcaatacaagttcatatacaatctgcttattacctatttgaagcgcacgaggctcatctga

SEQ ID NO: 20172 - protein, 1252 aa, DROSOPHILA
MPLKFLKKCRQYNVTSKSLFVISVHHLLDTSSTVDCTISSESKGQECLDNVCQRLLIQQPEFFGLRYLVKGKDKEDEFKWIDLERSLSRQLEKYAAGPKIYLRVRHYVTTGVRHLSDEATRFYYFLQLKSDIYEGRIACDIRTAILLALYCRQAEYDSYQGDKQSKDYLKKSLVLPRNMQGLANDDSMLEGLIVEVLQQQAGIAHLSQSQAEEMYIQCCQQLEGYGEERFAAKDTLGNDLLLGLAINGMVVNADNGRQYFPWKEFHTVTIDKRTIKIEQNKLDGGGSIVGSFIFSEADTARYFWKLTISQHKFFKRYIDTATPSSLGSGADAESGPLGVDSVGYVDYDYNEAAAAEQLQQHHQQQQHMQQQQQIQQQQMISSNISLATSANQMLGQSSSCLDLSNNNLHSSSGMLHHGGSNNNNNNDERERLKAMLPTYRPAPDYETAVQLKYRTPSAEFHNVALAMAAPGNAYYAGSQPDVHNPGMHNENLLYGHMTAHRYPDVAQPAAALHHHINLYQAQHQPQSHPQPMSPAQAYLELSQRMHMMRHKAPPPYVNRLSSSSTPDLAVATPRPLQGFRNYVSGSSPDLVSNRTLFNGGQYVALPAGGHAGNIPTSSGATMLHQYQYVSHMGHSQPYLPPHGTFENLNMIEEQPSIMSQLRQSAMSQAAAAAAGSVVTQSSPTLPPSGYRSSVPPPASSPLPPPVVASSHKSATPAPLQRSLVNGSIEPIYENVPLPQRASGGSSGAANTEAMRQRASSIQSAPGVVPVPAARNASSNNVVTVTVNSPPDDGNIKKYGADRAASTELLFLEPQAPKRTNRAASAAPDMGATPPPRQHRSTASLNKSSTVDMITPAGDTLQQQFSAMNLSANTSASTSSMFNSTLDTTSSSAASKDLKRKKRWNFLSRSKTPDKQKSATLGREKATTAGQHSKLAAKLKLAQDDLNLPNRWSTGVNKPQPISGRYSKDKLCQILDQKLSDSQLFMEFERIPKRREHALYECALLEENEPKNHDPNFLPYDDNRVRLTPCRDNRHGYVNASSISATVGTKQRFYIVAQSPQEPLTMRIFWQCVWEADVYLVVQLTEDMSYIPRNSHQRLEFGQFQVYQEFSQTTDRCTTIKLRLYHVPSRRYRSVWYLQYADWAEQNCPRDVNHFLDFLEELNSVRLASTQEVPPGHNTNPPVLLHCLEGGGRSGVTLTADLLLYTLDHNEDLDIPRVIGQLRHQRDSIIPSLAQYKFIYNLLITYLKRTRLI

SEQ ID NO: 20173 - DNA, 24248 bp, DROSOPHILA
tttaaagctatcaggcgacaaatggttccaaatcatacgagtaacgagtaacgaattacaaattacgaataactaataacaaattgcaaataacgattttaacgtagatcaaaatcagaaatattacccaagcaagtacttcgatacatgaatacgccacgtgttgtgtaaattaacaaggaatttaccgagcaaattaaccatttaaacgttacgttctgtacattaataaatttaatacgaattgattgccctacgtgtatgtaaataaaagtcctttttcaaaaaagctaaactaatgaaattgcaaaaaaaaaaaacaaaaaatataagaaaattatatactatacaaaattatacgtatgtacggatatacttatttaaaaaataaaatcatgaggcattgacatgacattcaattacaaaacatttcgtttaattaacttaactaagcaccgacccaattccccagataggcaatcataatactgcggtaattgttttggcattctaaagtaaggtgcttttaacccaccttaaatcgatatttggcattttccatagttcgcttcaattacagggtatgcacgtactcaatcgtaaatcccgaaacattggctatacacttgtgtacctaaggctttattaaacactgcgatttcgctactcacatgcctaattctctaagggttttctaggtgcgcttttttttcgaccacaatggataacagctaataataattgtgctagtcgctcccgagtgcaaacagtttggcctgcctcacccgggggcttaattaataacgttgtatttgcgacggattacaaggaacgcaacgaaactttaacgtccaaccaacgaaaaaaagataattatcacagggccattaggagccccactcacgtacagccgttgacatgatggcaaacaatggccaatggcttcggtattggacctggaaacaggcaacggtctgggggctttcattccatttcgggttcacttgatgtcacagagcagggccactccgcgcagggtccagtgcttgggattgaattcggtctcgaagtcaatggaaccgacatactttaggtccgtgcgctgcggtttccgatagatggggcactcgtacagcttgggatccttgccggccgttgtgtttatcgcgtatatatagatgacgggcatctgttcgtagagcaccttcatcttggactcaatcagcttgccgctgcgacgatccagggaggcacctgcggaacacgaattggaatcacccagttcatgaccttgaaagggctgcggggtggacttcggtgttgaacttaccctccaggaacaatccgtggacatagacgccctccgtgggatactcggtgatgtcctccttgttgtagcgcgttatttggttctgcagcaccaccgagtccagggcccaacccttgtgggcacgcgtcacctcctagtatcgattccagggataccagggatttacaagtgcgtatttcaagtaccgccgcagatatgcaaaaaaaaaaaatgaaaatgaaaggaagtgaataacctttgaggtggggaatcagatatgtcaatcagcagaagagggaaaaatgtatgtgcgtcttaatggcataatgcttgggcataaaggaagtgctcctcacaatgcgaacgacaaaggacctattttcgcaggacatcgatttctggttagttaaggcgaagagcgtttggtattcatatcctgttcgcttgttaggcaactatgcaacaatatataatttccgcttactcagctgctacttgttaaaggactcacctgtcgcatggctgttagaaagccttgaggattaaagaagccggtcatccagaacacctggtcatgaattaaaagagattaaatacaatagttttgccatatgagagtactcacctttggtctatctgttgatatccaagtgcgaaactgtccattgcgctcgagcagctcggtgtaccaaaatccgagagtagtcgattcccaggatatctgaaatgcatggcgacaaggacatagtcaagcgaaaataaaggtaagtaagcaatgttatatacataggttggaaaggatttatttgtaggcaaagtataatattgtatataaagattctgtaatccctgcaccgattcatctagccaaatggatgttcatctggcgacagtaggtattcatgtcatgtcatgtcaaagatatgcatccttgggacaaaatatttcacttagcttgatgcctcgagttatggtaaattcggctggtaaattccggcgcattcagaatccgacataagagaagaaaaattatctaactcgtactcgtcctcttgctgatcctgcttggtaatggtctgcaatttctgcacaagcttatgcgtatccatggatacacgggacttcggcatgggagtgtttattcgagccgccttaaaaaatccgtacgtgcgatccaatagatctggctgcgatccactattcgcattgaaggcggtatccttcttcacattgtaatggtgttcagacatcgtcctatcttttgttttaaatgggtcttagtttattgggtgtgtatagttgaagctacactatatcggttgtttctatacgagtattattgaatgttttctctacggcaaccaataatagcatacataatgttccattattcatttcatcatttctagaacgcatcaccacacatattaatgaaaacaaagatatcctttgtttaatgatatttccattattttcagcaggtaactgaatggtgattacaatgctttggggcgtcaaacgttttcgcgcataatttaccagtattgaaacataaaaggctggcgaaaaaatgtatattccccatggcagaaatcaaagcgaaattgtaaaatttccatatttgatagaaattcgaccttgcccaaagcaaaatactaaaggggattaaagtagacagtcgcaattgtgtggcaggggaaatgggttaaataactatttcaccattatcgcagagcatataccttcatccaggtctccgggatgcgggcatcgtacatggcatcgagggactccttcagggcgggactcatcacaatggtgccatcaatcgccagcttgaggtcgcagaggcaggtgtggacgcgtttaatgaccctctgcatccgatcgatttcctgcctgcaattaaatacctccaccgcttattaccatggacatcatgagccatcatgggggtcacttgcctgaggaaaatgttcattggcaggagtatgcccatccgggtcaggttctcgcgcacctcgtaggcgttgtactgggcgggcagtttgcgtagcatgtcatccgccagttggtagacgatgctctcccgggtctcgccaccgcctccgcctccctccttaggctggacactcaggatggtgtcgaggatgcctgcggatggtgggggatcgagaaaattgagaggtaaacaatcaaggatttcggggaccatcgaatatgctaatgcgctaatgcccgagtgggttgatggttgctcctaaaaaaaacttgccgaatattcggtttactgatttcacacattcaactggccatgtccgaattgattatgcaacagggctttacattaaattaagcgcattgataatttacgaccccgtgcatcggtttccattaaatgtgaggcatcatagcatcggaaatcagggaatcacattccgccactcacctttggccgagtttatttggtacgtgatgtcggcattggagtgcaggccaaacacctcgggggtatcgtaggccggcaaactgttgatataatcgatgaatccttgcagactcttcgtgcccggcaccttgtagcccttgtagaactcaaaggaattggacagcagtggttcgcagaaccacacagaggtgaatgtggtaagcagacgcttgtcaaagtcatcggtcacccgaccgccgtactggacctcaccaatcatgtagaccagggtctgccaggagacgcccttcttgggatccatctcgtccagatggttctggatgaactgaacgctggccgcgaagtcagcctggttaaactcgtagggtatgttccagcccagtggaccgaacttgcgccgctcctggacgatggtgtggaggaaggccaccgtatagagcagcgggggccactgggtggccgatgtgtagtcgaggaagtcctgggtgaacgactgaagcggatggagcagccgaaagaaaaaaagattgaaaattaaatattaagcaagcctcctcatatttgcccacctggtagctccgcttgagactggcacgtattccctgtgggggttcattggtgaatttgagagccatctgcagcaggccgatggggaactcgttgtgcggctccgtcgtcacccacatgcggaatgagtcgtctatgtgctcgctctccaccagcatgtcgattatttcagagcagaagggcagcgacaggtgcacgttctggagcagcacccatccaccgatggccatcgactcgattatcatcttacgtgcatggtactcctgtccctggcccatcgacacggatttcagaactgcgggcgattaaacaaataaatgatgacacattttcaactatatctctttgcatggctcacctatgctcttttgcttggccagagctccaatttgggtggtcggatccgatccgatggacagcaggcaaacaaatggagtacgaggttcggactctagcctaaaaatatgtccacagtataatatccgccttctacaatacttaaatatggtttcatatcttgttgatatgcagcaataaatccaagtcataaacatctgattttgatacaaactctttagcttaccacatttcttccaaatcaaggatttgcatttcgctatactccggtcccaaagattcttaaaaaaaaaaaattattagattattaacataaagatgtaagatacaaaaggtgggatatataccttctatatacttctttgcctgcgaaattgtgcgatcgggacaccatgaacggatcagcagcagcttccggaagccatccaggatggcattgtatccgcaggggatctcctcgttctccggcttctcacactcgtaccagcagcgccaatccttctcgttcagctcgatcacctggaggactgtggagaaggtttccagcttgctgatctccaccagattcagccaggtgatgtccagaatccagcggaagggtttcggggtgacggcatttaggtccaacgaggcaccgcctttgatgaaggtgaggaactcctcgtgactgatgtttccattgtggtaatcaatcttgatggccagcatcagggtgaacaactgtttgtgcctctcgtaaagactgcgattggtgaacttgtacacctcgtaggtcaagtaacgcaaaatgatgtttattcgctcctcggtgacgctagacttggttgacttggtgatggaatggttgaagatgaccaggaactgtttcagcgagttctggtacatagcattcacattgctcatctcgacgatcaggaagtaaaggatcgatccacgtttggccaccgccctgaactcctcgcgcgccttcataatcttgcgctccgtgacctccgagatcttgagcttctggttgacctcctccgcagtagtcttcgtgacgcgcaaaacttcgattagagcttcatcatccaccagggagccctgggatgagctcagtcggagcaggaggttcgcctccagttccttcatattccgctggttctgcatgaccgtctcaaagagggccaccctctccgcctccagatcggacttttccatgaggatgacgcgacccaaaagctggtcctcaagcccccgcatggtgaccgtaaagtcaatgatcgaggtcttggcactgacctccggactaaaggctggattgggcaatttcgtggtgatgtagagcataaagcccggcatcacgtcgcactccttgtcgcccaccaacaccttctctatgctgcccgacttgatgaagttcttctccagcacattgtcaatcaccggatccaggtcaatgcccacatcctcgatcagcagtggcctgcccagcgacagcgagtcctcgagatgggtgcggaagtacttgtgattcagggaggttatttgcagttcgttgcgatcctccttgcacttgatccagatcttgccctgcgtctgcggatccaccagcagtggataactgctcgacttggtggctatcagggcattctgtacggacaactcatcgttgggcaatccctgtagcgtccattccgacacggtcgatgagtccaccagcatgttgattatgttcagtccggtggtgaaaggtatgttcttctgcttcagtatgcccatccaagtcttaataagattggctctgaattcctggttgtacggtccgcagtaggagaggaaaccggtggccaacaggacatcgcccaccagtttacccagctgtatcttgaactccttgctctgattggtccagcggtgcttctcatccgacaatccattgatcagcgccgtagctgcggtcatcttgcgcaggcaaacgttggccgcatccgtcagcctctgtttctcgcccacagccttgtcgtactgatccttgacagcctggagggcttcctcacgctcccgcagctgctcctcggcaccagccaagtcgtccatagcgagctgaaaaggtaagtaaggcaaggtatagtaatctgattccttggggagaagaccttcactacagttacctttagtctcgcttcctgcatggtgaggttagccttcaggggcagcacctccttgttgacgctgtgaaagaaggacatcgccttggtccaggacagcaagccagccacgtctccgcacactcggcgtgccatgtccatgttgtagtcctccatgcggaagtacggctgcagcagatcgatcatctcgtcgttgatggtatccttgggatagttttgcagctgcagcaggaaggtggcactggccatcatctggggatggaggaagccagttatagtcgactatgatcgactatgatctatccaagactatgatattatacaagagaccttttggttttaaggaactaattgcatacttatgggggctgcactaatgcaatctgcaaatttgaatagcttaacaaaaaatatagtagcaagttaagaaataaattacaaattaagcagtggaggaagttattcaatatagtaagttgtgcgatcgcacaggagcattgctcctggatcatactacatttagactatcctccttgtgcaaacctttagggattcctgccacgaaggcttcgggcacggtgtgcccgcgtcgggaatgcacggatgcaacttccgcttgaataggatcaggacgcagtccatgatccgcatgattaggtgcggcggacgacccaacttgcgcacggtggcgatgtgcgccggtttgattgtgttcagggcattctcggcctcctcgagagccggctttgccgcctccagcttctcctcggccagcgccttctcgtgggcgatgcaggccaccagggcctcggccttatccttcacgatgagcacctggttcttgacgatctccgcttgcatcgcgcgctccgtcacctccactagcactgattccgcattcttagaggcttctacaagctcctcttccattaccactagatccttcttgaggatctcaaccgaggcggaggcctctttcagtttctccaagcccgtatccatcttctccacaccatcgcgcagctcttgctgcttcatttgatatatattcttgtagccggcaatgaagttcagataagatttgggtgtcacgtgcgttgcgcggcggaatcgctggaagtactcctgcgacgtttccgcaacgatgtcctgtatggagccgagggcattgaccagctcctccttgacggccggtgtgcactcgatctcgaagtggctcagaaagtgtcgggcaaccgagaccaatgcatccttgggccacggatgcagccagtcaatggtgcagccggagaccaaggcggggaagcgctgcaccctggaccggaacgtctcgcccacgggcgagaagcagaaggccacatgcagattggtgcaggtgcgcgccaaaaagaagtccatcacactttccggggtcgctgttttgcgttgattctcgcgtttcatgaccggcgttagctcctgcacgatttcggcctgctcatcgcgcgagaataaatttgatataacgccgctcgagagtatgttgttcagatactcgaggaaaccttcctccttgatatccatgtcggtgaagagaaaggttgtgcccttgccctgaacgccgcaggtgcggtagagcagctttagatcctcaagaaaattggccacgttgtacgaacgcgtcaacgcaatttggaatgtcttgtagccagctatgaacgatgccaatttcgttagcgactgttttccagaaccgccgaccccgacaagcataacggatcccctcggatgccgaatgatgcgggagatcttcaccagatgcagcattgcatccgggaagaacaccaaatccattcccgaccctcgcaccatttcattaaactgggcgaggaacatgacgagacgctcgcggagcacttcatgtgagtggaccggttcgtaaaccttggaaacgaatagagtagatggataactggttagtatctcagcatagatcaagcgaaaaaacttgtattatcgattatcgtggacgcaacgctagaacctgttgcgaattatagcgtcgagtgctcggtaaactttaaacaatacagatacagagataaagttgacctaccttgggtagctccatgtcggtgtcctcgccctcctcgccagttggctcgggggcgtcgcgcatgaaatcaacgaacaccggattcggcaggatcatctgggagtgggagtcgcccaactcctcgcgcacgagacatgccagctctgagccgaaccactccttgtcctggaacgtggtgaagcgatcggcgaatactcgcgtgcactcgtgcttccacaatgccatgaggacactttcggaagtgatcaccgtggataaggtgccaaccatgccctgccaaatgcgcgacaaatcgcgcagactgaaaacgtagtggaacttggccggagtgggcagtagcttctcgcgcgtgcgctgccacagatggcgggtgacgacgatcagcttcttgaccagactgcggatctcgggcacaaagccgcgcttggcgttgtagtgaccctcaccgataacgcggaagatcttatcgatggagtcgttgtcgggaatgttgcaattgaatacgcaaaattggcgctttagacgggatgggatgtcgttgcgtccgccgccgggcaggcccatggccgccacatattggacatcaacgatggtggtgaagtcaccgggcttctccaaactatagaaacccttcatgtccatggattggcgcacaatttcgttggttatttgatcgccccactcattgatctcgggcaaattgatgtcatcgataaagacaatcaatttccggccaccgggtggcccgaaggtgaccccaacgcgcttctccacatagctctcaattgtgcgctgaaactgatacggactggtggccgatgagaagttaaaggaccggcccatgtacgactcaacgttcatcttcttcatgaagttcttcatgatcaccgtcttgcccgtgccctgttcgccaatcaccatcacggcgcgctcctgattggcaatggtgccgatcaggtagtcgatgcgcacattatccacgatgggcaccagaatgctcagatagtctggtgtggaaagctccggatacatatagggggtgacgagcgtcttccacgactgccacacgcccgctggagaaacaaagaagtcaaatattgtgttctcgtgggcactaccctttgggtagtccagctgcgggaaggattccttcacgaagaggttcattctctggcggtcgctagtggagagataaccgcccaggccccaggcgagcgcgaagatgtacaagcggtgcaagtgttctggggtgcacgtgtcctccttctcctcgatcgaagtctccggagggaggtcctctgtggggtcgagtggttatgtggttaatgcatggtcattggatggaaatcagtcacatttatgagtgtcacagaagtctctcttgggttatacttgtagatatatactcttacgttaggtattcaagaaaagagatatctctaggatcgagataatgtagagatttccatgacacatctactctaaaaaaaaaaaactaaaacttttggacgagacacacacaactatttgggttaatacacagataggtacaattacgagaggacgaacacagaaacacaactactgaaggaaggaaggattagaaggacgatcagttgggagccaaagatcccaactgaaagttctaggtacagtatcagtttacacacacagaagcatttggcatgttagctaggcggtcagctctacgattagtatgctcttttggttagttagcaacttagtacggtgattaggatatactttaccgacaatctgactgccaatcgattgccgtcgcgcctcttcgacatgtttttgatgctctaaacgtttattcgctgaaaagttgcaatcattttggatgggtttttgttggggatttgcattgcgttttctcatttaatcgaacctctcgctttggggcttcagttttgggttccttgttaggttatgtacacttaccatcgtggctctccttgctggacatgctcacggcttgttcgtcctcctttttgactggtatcaatccctctaggatgaacagcatctgttggacaatgttgcactgcagcacaggcatctgcaactttaccatctgcactccccagttgtagacctccacgaaggtctgatcgaaaagatccgaaaacgtggacttttcgcctggagcacggttcttcaaccaggcctgaacaactgatcattggagaatataaattgctttatagatgtggttcttcgatagacttatagattgagaggtgacttacttggccgcgaatccaatccagaggaactcatgtagaccattccattgcgggatactgtggctggcgatgcattgtcaatgttgtgcggctcgaatatgatctttacggttggcgccatggtcagacgatcgccattggccagggtcagcgttttgttgtcgtccagcacagagttcagattctctatccaaatactgtccaccggcccgtccagaaccaaccacacatgctcgccggctttcaactttagtgtcttccgccacagtgccgagaatatgccatccgtccaatcattggtggccacatcgaggcgtccaaacatttgggcagccgtgatggccttggggttcatacgcatctcgcgatgattgtcgcccatctgggtcatggccttcatcagggtgtggatgcaggtggtcttgccagcaccacttggccccagggtcatgatgccgtggcgaacatgttgggtctcgtacagctgaatgagtttcaggacccacggaggatggtacaccagactggcttcgtccgtttgctggagaatcgctgcctctagctcagggtaattggttttttccagcgtctataagaggcatataatactacatggactaaaaggatatttaataaaaggttcacctgattgggaaacaaatccgagaccaaggacatgaaaagcggctcatcgtcgtcgatcagcttggaaagattcatgtcgcgcagcacgcgcatcacaatggtgctctcggtgtccttggaattccttcgcttggctgcgcccagtgttcgcaggacggacaggatgttccgcagtccgaaatcgtaatgcacctgtttggtaagctgctcctcgcacaacttgtacagggtgtagaacttcctggccagcgtaatgttttccaggaatccgcaactggccagcttaacacgtatgataatctgtctatccggcaccatcattgccacggtacggaattgaattttcagattctcgggcaattccttgcgaccagcgtatcctggattctacacaagtaacattgcaatttaaaataacattattactaataaatgctagattgtatttatatatgctcgtataaaccataagtgtggaacttgtgctttcctagaatcttaatacttatcttctcagaaccatgtaatgacctggtggggagcagcaaaaatcgacccaaaaccaaataagtcacttaaagcctgaacagttggacccaaaaataggatctggcccaagtctagtttatttgaatttaagccacgactgcaaatattgacctggcacaaagatacaagtgttccgggcaacagcagcaacaggaggaggaggagaaggaggcggtggaggacagaacgacacaagctggtagccacaacaaagggattcgtcattaaactcgttccggtctcccggccagcgtccatttgtctatgtccccgtaatcgtgtgcgacccaattcggtctgtcacataatggctcattaaaataaaatgctctggctgaaattgttatataaatgagcataataactcaatgcgcaaattaaaactgagccaaagccttcaaaaggatcattccctcgaatcggatgtgcaaacttgtgggtggatgctggtagggatttggatgaggtggcgttgattgacatacgccattatacgcgagtcggcgcgtcgccgtgttaacgctaatcgcattacccgatcatagttaccgtcacttgtgattaaactgcgccaagtttcgtttggtctgcacaacaacttaaagttgctctttagctgggattcggattttgggcttccatgtggcagccacagtaatcgagtcatgccgctaacgccgaagtgtaaatacaacagagactccaaagtcttcttttttggccctatttgccttcgaagcaacaacaaaaccacccccccccccctcggttattggttttgtgccgcttttagccgcgccacgaattttcgtatatgctgagtaaattttattacggcttcggttgagagaaattgtacatgactaataacgtggaattatgtgcgtgaacaggacgtcactttcattttggaaaacattttaaaggcctttaatgggtggattgaacgagcagatagcagatagcagatagcagataacaatgctctttcaagtaaattcctttaaaacgaaaataaatcttaaattccagaagatctttggttaagcttgagcaagacaaatatgattaatttttttttcaaagaaactatcttccttataatcaagtaaactacaccaagctctatgaaactagttcgttaactaaaatgccgcatgttaacaaattgaaagtgtatacaattagtttaataaacactgaagctccactcgcaattctttggcgccaaagttattttcgcgttatcctgcgacaaattgaatttatgaaaaaatacaaacagattgtcggcgcttttacatgtgggtgggaataaagctatgtgaatgtttaaccaacgcgaccatgtcactgtgattttgatttaaagaaccacacacacattaccatagttatgaagattccgaattcaggattcatttcaatcgtatcgccatcggtgaaaaggaaggtctttcgcttctcctttttggcggtcaggacgacggccacttgttgggcagccacggataagaccggaagttcaatgcgattgaactcgtcgaagcaaccccaactgccggattgggccaatcccttgtagatgcggcccaagcctctggaatgaaagaaagatagtatttagttctagttttctttaattctagttaacccacctgtaatccatttgatcggagcaattaaagacgaccacatacttggccagcgtcttgcccatatccttgacagtctccgtttttcccgttccggctggtccgcatggagcgccgcccatggacaaggtgagtgcctgggccagagttatgtaacatctgatggtggtttgcaatggaatgaagagaagagaagggaacgtgcggatgcgcacgccgccgactattaaacgtcatggcagacaaaaaaggcacgcttcggaatatcaaaggaagtcctaatgtccgctgacgtctgacgacgacgaatggtaggaaatctacgagccgagatcaagaagcgaatgcaaagcagctggcagcctggcagcagagatgccttctaggaaaatagcgccactttgcagattcccccagtttggcccagactgggtgctgtcaaaagtttatttatgctccgctaagtgaaatttatctttacgggcatgtcaacgtcgtcccgtcgttccacagttagttcgtcttccgctgccgcgggatggaatgaataggttgggtctctctcttcgtctccgacattgacttaaagcgcctttaagtgcccccaaaacgcttgtttgccaccggtgggcgtctgtttacagagcggcattccaaggtggtatccaccacctctgcatcctccacttagtccacccactccaccttcttggccactgaaacggccacgaggaatgtgcggagcacgtgcaggcggttcctattcaggcattcgagcaatgcgaaagtttatcattgaaggagcggacagaataatgccgggaatacaaattaaatacagctcgtataattattgtttaagaattattgagaagcctatggaatgtgggtgggaagagagaatgtttgaactagcaagaaaacattccagtggccaacgagtcgtatacgtaatatttatggatattcgaatgtagcaaaatattaaccaaggttatacttatataaccaacaaataatgcctcaaggagttactagcgaatcaatatcaaactcttcttaagaggcgaacttgtgtaagatatttatcaggaccatgtggcgtatacgtaatatttgcaaatattgcacgttagcctacaaacacataatccaatcctttctcctaaattaaactttatcaatatatgttaccgatctgttagcggtgtgataaccaagcgatccgtgcatcccagatactcgttctgataggtgaatgtgacatccgtaaccgaaatccaagttttgtccaagtcctctttaaagtaaaagcgacactgcttcagccactcaaaatcgttggctgacttgatgttcatgcggcactaaagttcaatgtatatggattgatataaggaaagattacaaaatacgccgcctttcatattggaattcataataaccaactatgggaacccaccaggatatcaaagatatcacgctgatgcacatgaatcgtaatcagggtctcgaaattggtgcgctccctcttcgtgagattgcgcgtagtctggtcgatgagggtgttcagcatctccaggaacttgttgttggtctccatcatgaccttgcgttcgcgtccccgcatcagtgccatttcggcatcccgagtccacaccatctgaatgcccagcagtccgatctgggccggagccttctccaggaagctgagcagcgtaaagttgggatcgttgatggtggcataggcggtacggatgatcgagtgcagcgaggcctgggccgtaaccagcagttgggttagccaggtctccaccgagccctccgctcgaatggccctgtccagctggatcatctcgccctcgctgctgatgatggccatcatcttgttgtactccacgtcgtggaatttcaccgatttggtattgtcgaatatgttgaggaggtggttctgtatggtatgcgaatcggaagcctgacccagtatctctagcagggcaggatctgacacaaagaagaagcgtggaaacatcatgcgcttgcgctccaagtaaccactcaaggatttctggcaaatctccagctgctcctgcagatgcggcagcagctgtttaagcagatcatcgcccacacagcaggccacaacaccgggagtctcgtgggcccgctgcatgatcttctgccaggatttgtctattttcgaaaaccttttcgcctccttaggcagttgcttcgcgatatcgccaccaacaaacacagcctccaaatagacccacatgttctgcacgagtagccatcgctctaggatctcattcgaattggacagatcgtagacccactgctggatctgtttgcggaatggggcattgtagcggttggatagcagggagcccagcaccatcaggctatcctccagctggccaatcgtctcggccgtggtgtcgccccgcagcagcagctcgccgcgattgttgaagctcatgaactgcagctcgtgcacggaccactcgttggtgacctgcttcaacttcgcctcgatgtccttctccttcatcgcactgatgcagatgtcctcgatgtcctccttgtgcttcagcagcggcgcctccaatatgttcttgagcgagaaaccctccgagtcgaactcgaagatgtagcgagtaacatccatgatccgttgccagtggcgtggcttcatggctttattcgccatcaactccagtagcggacacatgtcgttgaagtcgtcgatggtcttcttcagagcatggaacgccggccactccttgaggcccttgggcagcttgcggcagcggttctggaactccatcagctcgttgttgatctcctcgatgtccacctcgttccacggaatgtcgtagtagctgctcacgcggtcgatcacgtcgttgtacagcttatacaatttctgcagcaggttcagctccttacgaatctggccgagctctggatagtccgtctggggcagaccgaagagttcctcgccactttggtacgtctgtaggcgtcgccacatgccctcgaatcgattttgaaacagtatcaatcggtcggaggcctcgcgaggcgtcagtccggcctgcattggtcccgcagtgcggtactccgttacgtaggagatcttgtcctgcttgaagttgtccaaattggtgcgtagatcgtcctggaatgccggctgcatgtccagcagcttaacctgcgcctgcagcgcacctgccaaaagattctgaaatgtggcccgcaaattgtccaccaaatcgaactgctcccgctccacctgcacctcgtagcgggtgaggacattgaaggcttcctattgttgatatttacagtgtaagtaagtatatgcttctagcttgttgattcagtctcacctctatgggatcgatgcgcagctccatgtccacttcctgctcccgaatcttacccagagtctccataatcatacgcacatcgtccaggtcgcggatgggcctgtccagcttgcgatccatctcgttgattaccgcatagacgtagtccatctccttcttgtacttctttttcatggcctgtccgattttgtggttgcaggctggaaatagaaacggggccaagtgtttatccaaagtccatttagcgcggctgaatgatatcgatgtcattaatcaaggcagcctggccaggacgagggctaattcgccttcacccggtcacatcctgccgcgtcctttggctcccaaatcgaatccccccacccctcaattgagtggggaatttatttttggtatgcctgcgcacggctaattcggttaggcaaattagttggcctaattggagtccaatcaatttgaatagcttcccattcgaccaaacaaaagaattcgcgagggtgtccaaaatttatggctgattaaccggagaagactcgatgctttgctgtcagtcgatttaataaaatggtctggatatcatccagaaatggggtgaaaaaacttcatcttaacattttctttggcattaaatttaggctttagtttctcaggaaaatagttaaagaggcaactaatgcttacgtatttcgcccaaaagtagttaatgtttattgtacttagtgataattcagtgcatattaatagatagactattttaatagaaattcaataaatctacctccaaagttaattacacacgatgtagtttcataattattgattataactaacacgagtaattgctatttagtttcaatactaatggagaatatgaattatattcattgtagtgtcaaatggacacattctaaagtaaatgtataagaaataaaaaaatgttttgaaagtttttaaaatacgattaagatgtttgctcaaaacatgttgtgaataaataaagtgatgagctaattttgacttacacttgatctcaatggccaaaccatacttgagcttttcgttgtagacggccacgcactggccaaaaacctccatgtccggctccacaagcagattggcatccaggtccgaaagacatcgcagcgtggtctcaaactcctgcaggccgaactccatcagctggcgggtggtgcggtcgttcttccagaggaagtgatatggcttccagcgcttgatgtaggtttggatctccggcttgacgttcttggtgcagctggccagctggttgaccgccttggccacctccttgttgtccataatggccgagtagaagctcttgagcatgtgcggcatctggggtcgctcctccgaggccaggcagtagatcttccgccgccggctcttcccgccaccggtggactcgttgtggttgcgtccgacgcgcggctgcaccgtcatcgaaacttgctgcggttggtaagacaagattttggagaacattgcgaagctattcagtggggcggtacgcaccggcggatctttgccgctgctccactgcgccacgcccttcgcaatgcccgtgatgttcttgcccgccgtcaccaatatgtcctgcagctcgtccagattcggcttgatgaccacatggggtatctgcagctgcgcgtgcagcgcgaagaccggcttcttgaacaccgtctcgttctcgtcggcgatgaaccgacgccggagggtgtccagagcggcccggatcaccttgatcagcacgtcgatcaccttgcggctgtagtagcgacgcatctcgaccaccgcattgcacaccatgtcctgaaatggtagtgaattcatgttgacagcagaaacccccaaaggggattcctttctcctttctattccaagagatctgtgctctaccattggatttggaactacaacttacgtactcttatgtgaattttatgacaatttagtaaatatgcttttcattaaaatcttctacattaaacccttaatacttttctcaaaggaacctacttcaatttagagtaatcccacttagttgcttttaattgcccgtacctgcatgcctttgggtagactttctgtggtggacaagagggacagtggattctcaaagcaggaccacaggatactccagtcctgctgctgcccgccgccacctccaccactggtcgagggtgcagccgctccaccgcccccacctcctccatcttccggcttgcgtcctccagatccggaattgtccccttttggagtggctgctgctcaatgggtggcactccttaattactccctcactccatccgttcgtagaacttaccatcaaacaaagtaatcacatcatcgccggctatctccttgaaggcagcagttgccctgtccaccaggctgagcacctcctccactgcctcggacaccatttggctcttccgattcagttcgatggccgctttgctggaacaattgtaatataaggtacataagtagacctataattcatacatgattctaaactcgataaattaaaagtagcacaatcaaaagtctagcccagacagttgaaaagtttctcacccagatatgttcccaatttcatgaaatgtacagagcattttcgggagcatatcctaatgaattatgtgaactcatgtcagagtcagactcaccggcaagcttcctcgctccgctccagaaactcgtcaactgtccagatttcatcgtctgctcggaaaacaaatgtgaaaagtttcaaccatcatcatgcaattagaagacaagtgaacaaacttgagaaattaaagcgacgaacctgctggtaaaatttgcagagagacatcctgcatccacatcagcacgtggagaatgcgattggagtagatgtcatggacacgagcgaccaggacatcaaaactctcaatggcctgcttgcagcgctcgtagaactccgtccagttttggtttgtccactggaatggatgaaaaaaacttattggaataaggatatcctttgattgacttacattaatggtgtgtaatcctggtttcaacatcgccgtaagacgcaccaactgcggcaggaacaaaggacgaacctccagctttacagctctcacggtcgatagaaacattttgatcaggcactgcgaggcatgaagagattagctgggcgaacaataaatacatatgttatatgccactcacattgagtgagtcctgtatggtgatgaagtactgctgacgactcatcaacgtcgcagccacaatgggcagctcgatgtccagtttggccagcatcttggcctcccggataagcagtggaatagttggatgcaggttgacaaacagtttatcgccctggaggctaagcaatggctgaaggagacatgcatcggccacgctgacatcctgatccagccatatggacactatctcgtcctcatactcctgcaggatgcccagcacattgtggtaccgcacatccaggtccttggccatgggcaggctgctcagcaccacatgctccatcactgcatccatgagctccgtgatgtggagactcagggcacgacaccagtgaatccttccggcaattggcggaaagttcctggccagcggtggatcatcgcgctgtttgcggaatgttttcaggattcggtccacctccttctctacgtagcgcaggattcgcgtgtacttctcatccattctggtgagtggaattttctcgctcaccttctcgaatcgcaccagaaatcggatgcactgcggtgtctcccaaacggtgtcgaaatccttttcgatcagagtagcaatggtgtcctttaaggagttcgttttgtgaatgaatctctcaaagtcgatgttaaagtctgagttgcggtgatccaggtaatcgtatttcctagaagtcacctcctttttcgcctcctcaaagtgattggaggcatcctcgagtgcttctcccagaagaagtccttccagtcgacgctcgaacaaatgattgtagtcatcaatcaaattgaacatgctaatgattttcgaaagccgctcgcaaaatgtatcaaattttcctggcaattggaattagataagttgtagaagtgattaatgctaaacgtgatgatctcaccgaatacaaagttctcggaaaatccgaaaggcgtctggttcggaagaaaaggttgttccctaaccgtgtagtaggtctcgtggtatatgtgattcaacttgatgcagttgctcagcttggtgcgaatcacattgcgatcctgtgaccaaatagtctccttgcagcgacaagttatgtacgacttgcatgtttcaatcatttggttagttatctaatgataaaatacaatatttataaagtttcaacattataatcattagaatcacaaaacgtaccttgaccatcagcgcggatgtcctttcggatgtgttgtagaactgggagacgctatagatgagtcgcaccgtttgcagcaggctcagaatggactccttcatgctcacgggatcgtccaggtaaagtgaatggcagcacgtctccatggcctggatgaacttggagttgtcgcgcgcctcgttgtagcagaaggtgatcttccggtccgtctccttccactgctttatgatgcgggatccggctaggaagaggcagtgcagcgtgaactgcacctccttgtcctgcaaatgggccagcagctgggagaactgggcaccacgcttcttccagtactccaactcgtcctgcggcccactgtggtcattctccttgcgcagctgctcactctcgccgagtatcttcaggatgccctttgtccagttgttcacgcgctcctccagctgcgcgcaaaactcctgattcttagacatgtccttcacctcctccaccgcatcgattttttcgaacatgtcgcagccatcggcaaagacattgtgatggtcacacacctgttcgcaaacgcgcagggcactgcagaaagatcgcaatcccggcaggagctgtcccttgatgagcccacagctcacgtcctcctcgtcgccctccagactgggaaaggccagggcctgcatgaacacgaactccacaatccgctcgatcgaggttactagtccgatgttcttggcatcgatcactccgcaatatctgtccaatatccaataatcttggatgatttttctacaagcataccgctgtatactcacaaatccttctggaaaccctcctccggcagctgctttgaggtattcacccgaaatatatagatgcatacaccagtgaaggcacaagtccatccatctgtaaggaacagcttcttgtgcttgggtggtggcatgccacttggagatgcgccacctggcggatgataactaacatagatatgattctatattgaaattaggactcaccctgtggggtcttggagctactggaagctacgccggatcgtgagggccccggtttattgggatcgggcactggcgtgggctccggatcatccgtctcctggtagaaccacagcagtttgttcttcatattgggcaggaacagctgattgatctcatcgagctgggaaacggatgctcagagagttatgataccatgtggcaagtgacgcgcctaccatgtccccttcgaatatgtagtccatgagctgatgcctgggcagctgggtggcatcgatcaggagctggaaggtgaactccagccggggatccatctccccacgtcgggcctttcgctcgcattcctcgcgccgccgctgcgcttcgtcagggtccatttttcaaaagtttattcgttatattcgaatccgtgttgtcaggtcagacattcgtgaaaccgtttggtttccagaaaatagtttaacgatcaatattttgcagtgcgtagtggtggtaatgtttttggttgtacaaaaaaaggtattgttgatttcagttcgtaaaacaatttggtgtttacaaaatgttcggttttcaaaattcaaaaacgaaagagaccaagagttcgttagtttcaaaaatggcacatagtaaacttagtaaaagttcgatactacattcaaaaatctacaacaacattacccatatagcatgataataaaataccagaagtaatgcaaaaatcaaaagtagtgacctctaaatgctatacagtataagttgaaaggtgatttcgtaacattttactaggttatctttttgcagcaacggaagtgaagttctttacagttgcatctatgtggattttgggttactcagctaaaaagaaatgaagattggtgtattagaaagatattacatgggtagagcctcaactacgagcaatttacactcgcaacttgcaggttatgcgattacgtaatcagtcaaagggcttctaggaaaatctaggttacttttgtatttataatctaaggcaacaacataggattatatgggttaattagcacgactagcactcaatacgtctagtaattagtgattcgggatttgcacctgcaaaatgtcgccctggtcctcctcctcatcatcatcatcactactgcccccttcggctcgcatggccagaacatgctccaccaactttttcttttgcacgaacatctcgccgaaactctaagcaaaaagcaaattcaccaaaaatcaaagatactcggaatttctctctattcaaaaatcattatagatttactgcgtttttcgatttttgtctgcgcgttgcacaactttttgcctctgtggatttgaataagatgaaaatcctatcgaataaacact

SEQ ID NO: 20174 - DNA, 13855 bp, DROSOPHILA
atggaccctgacgaagcgcagcggcggcgcgaggaatgcgagcgaaaggcccgacgtggggagatggatccccggctggagttcaccttccagctcctgatcgatgccacccagctgcccaggcatcagctcatggactacatattcgaaggggacatgctcgatgagatcaatcagctgttcctgcccaatatgaagaacaaactgctgtggttctaccaggagacggatgatccggagcccacgccagtgcccgatcccaataaaccggggccctcacgatccggcgtagcttccagtagctccaagaccccacagggtggcgcatctccaagtggcatgccaccacccaagcacaagaagctgttccttacagatggatggacttgtgccttcactggtgtatgcatctatatatttcgggtgaatacctcaaagcagctgccggaggagggtttccagaaggatttatattgcggagtgatcgatgccaagaacatcggactagtaacctcgatcgagcggattgtggagttcgtgttcatgcaggccctggcctttcccagtctggagggcgacgaggaggacgtgagctgtgggctcatcaagggacagctcctgccgggattgcgatctttctgcagtgccctgcgcgtttgcgaacaggtgtgtgaccatcacaatgtctttgccgatggctgcgacatgttcgaaaaaatcgatgcggtggaggaggtgaaggacatgtctaagaatcaggagttttgcgcgcagctggaggagcgcgtgaacaactggacaaagggcatcctgaagatactcggcgagagtgagcagctgcgcaaggagaatgaccacagtgggccgcaggacgagttggagtactggaagaagcgtggtgcccagttctcccagctgctggcccatttgcaggacaaggaggtgcagttcacgctgcactgcctcttcctagccggatcccgcatcataaagcagtggaaggagacggaccggaagatcaccttctgctacaacgaggcgcgcgacaactccaagttcatccaggccatggagacgtgctgccattcactttacctggacgatcccgtgagcatgaaggagtccattctgagcctgctgcaaacggtgcgactcatctatagcgtctcccagttctacaacacatccgaaaggacatccgcgctgatggtcaagataactaaccaaatgattgaaacatgcaagtcgtacataacttgtcgctgcaaggagactatttggtcacaggatcgcaatgtgattcgcaccaagctgagcaactgcatcaagttgaatcacatataccacgagacctactacacggttagggaacaaccttttcttccgaaccagacgcctttcggattttccgagaactttgtattcggaaaatttgatacattttgcgagcggctttcgaaaatcattagcatgttcaatttgattgatgactacaatcatttgttcgagcgtcgactggaaggacttcttctgggagaagcactcgaggatgcctccaatcactttgaggaggcgaaaaaggaggtgacttctaggaaatacgattacctggatcaccgcaactcagactttaacatcgactttgagagattcattcacaaaacgaactccttaaaggacaccattgctactctgatcgaaaaggatttcgacaccgtttgggagacaccgcagtgcatccgatttctggtgcgattcgagaaggtgagcgagaaaattccactcaccagaatggatgagaagtacacgcgaatcctgcgctacgtagagaaggaggtggaccgaatcctgaaaacattccgcaaacagcgcgatgatccaccgctggccaggaactttccgccaattgccggaaggattcactggtgtcgtgccctgagtctccacatcacggagctcatggatgcagtgatggagcatgtggtgctgagcagcctgcccatggccaaggacctggatgtgcggtaccacaatgtgctgggcatcctgcaggagtatgaggacgagatagtgtccatatggctggatcaggatgtcagcgtggccgatgcatgtctccttcagccattgcttagcctccagggcgataaactgtttgtcaacctgcatccaactattccactgcttatccgggaggccaagatgctggccaaactggacatcgagctgcccattgtggctgcgacgttgatgagtcgtcagcagtacttcatcaccatacaggactcactcaattgcctgatcaaaatgtttctatcgaccgtgagagctgtaaagctggaggttcgtcctttgttcctgccgcagttggtgcgtcttacggcgatgttgaaaccaggattacacaccattaattggacaaaccaaaactggacggagttctacgagcgctgcaagcaggccattgagagttttgatgtcctggtcgctcacgatgaaatctggacagttgacgagtttctggagcggagcgaggaagcttgccgcaaagcggccatcgaactgaatcggaagagccaaatggtgtccgaggcagtggaggaggtgctcagcctggtggacagggcaactgctgccttcaaggagatagccggcgatgatgtgattactttgtttgatgcagccactccaaaaggggacaattccggatctggaggacgcaagccggaagatggaggaggtgggggcggtggagcggctgcaccctcgaccagtggtggaggtggcggcgggcagcagcaggactggagtatcctgtggtcctgctttgagaatccactgtccctcttgtccaccacagaaagtctacccaaaggcatgcaggacatggtgtgcaatgcggtggtcgagatgcgtcgctactacagccgcaaggtgatcgacgtgctgatcaaggtgatccgggccgctctggacaccctccggcgtcggttcatcgccgacgagaacgagacggtgttcaagaagccggtcttcgcgctgcacgcgcagctgcagataccccatgtggtcatcaagccgaatctggacgagctgcaggacatattggtgacggcgggcaagaacatcacgggcattgcgaagggcgtggcgcagtggagcagcggcaaagatccgccgcaagtttcgatgacggtgcagccgcgcgtcggacgcaaccacaacgagtccaccggtggcgggaagagccggcggcggaagatctactgcctggcctcggaggagcgaccccagatgccgcacatgctcaagagcttctactcggccattatggacaacaaggaggtggccaaggcggtcaaccagctggccagctgcaccaagaacgtcaagccggagatccaaacctacatcaagcgctggaagccatatcacttcctctggaagaacgaccgcaccacccgccagctgatggagttcggcctgcaggagtttgagaccacgctgcgatgtctttcggacctggatgccaatctgcttgtggagccggacatggaggtttttggccagtgcgtggccgtctacaacgaaaagctcaagtatggtttggccattgagatcaagtcctgcaaccacaaaatcggacaggccatgaaaaagaagtacaagaaggagatggactacgtctatgcggtaatcaacgagatggatcgcaagctggacaggcccatccgcgacctggacgatgtgcgtatgattatggagactctgggtaagattcgggagcaggaagtggacatggagctgcgcatcgatcccatagaggaagccttcaatgtcctcacccgctacgaggtgcaggtggagcgggagcagttcgatttggtggacaatttgcgggccacatttcagaatcttttggcaggtgcgctgcaggcgcaggttaagctgctggacatgcagccggcattccaggacgatctacgcaccaatttggacaacttcaagcaggacaagatctcctacgtaacggagtaccgcactgcgggaccaatgcaggccggactgacgcctcgcgaggcctccgaccgattgatactgtttcaaaatcgattcgagggcatgtggcgacgcctacagacgtaccaaagtggcgaggaactcttcggtctgccccagacggactatccagagctcggccagattcgtaaggagctgaacctgctgcagaaattgtataagctgtacaacgacgtgatcgaccgcgtgagcagctactacgacattccgtggaacgaggtggacatcgaggagatcaacaacgagctgatggagttccagaaccgctgccgcaagctgcccaagggcctcaaggagtggccggcgttccatgctctgaagaagaccatcgacgacttcaacgacatgtgtccgctactggagttgatggcgaataaagccatgaagccacgccactggcaacggatcatggatgttactcgctacatcttcgagttcgactcggagggtttctcgctcaagaacatattggaggcgccgctgctgaagcacaaggaggacatcgaggacatctgcatcagtgcgatgaaggagaaggacatcgaggcgaagttgaagcaggtcaccaacgagtggtccgtgcacgagctgcagttcatgagcttcaacaatcgcggcgagctgctgctgcggatggtgctgggctccctgctatccaaccgctacaatgccccattccgcaaacagatccagcagtgggtctacgatctgtccaattcgaatgagatcctagagcgatggctactcgtgcagaacatgtgggtctatttggaggctgtgtttgttggtggcgatatcgcgaagcaactgcctaaggaggcgaaaaggttttcgaaaatagacaaatcctggcagaagatcatgcagcgggcccacgagactcccggtgttgtggcctgctgtgtgggcgatgatctgcttaaacagctgctgccgcatctgcaggagcagctggagatttgccagaaatccttgagtggttacttggagcgcaagcgcatgatgtttccacgcttcttctttgtgtcagatcctgccctgctagagatactgggtcaggcttccgattcgcataccatacagaaccacctcctcaacatattcgacaataccaaatcggtgaaattccacgacgtggagtacaacaagatgatggccatcatcagcagcgagggcgagatgatccagctggacagggccattcgagcggagggctcggtggagacctggctaacccaactgctggttacggcccaggcctcgctgcactcgatcatccgtaccgcctatgccaccatcaacgatcccaactttacgctgctcagcttcctggagaaggctccggcccagatcggactgctgggcattcagatggtgtggactcgggatgccgaaatggcactgatgcggggacgcgaacgcaaggtcatgatggagaccaacaacaagttcctggagatgctgaacaccctcatcgaccagactacgcgcaatctcacgaagagggagcgcaccaatttcgagaccctgattacgattcatgtgcatcagcgtgatatctttgatatcctgtgccgcatgaacatcaagtcagccaacgattttgagtggctgaagcagtgtcgcttttactttaaagaggacttggacaaaacttggatttcggttacggatgtcacattcacctatcagaacgagtatctgggatgcacggatcgcttggttatcacaccgctaacagatcgatgttacataactctggcccaggcactcaccttgtccatgggcggcgctccatgcggaccagccggaacgggaaaaacggagactgtcaaggatatgggcaagacgctggccaagtatgtggtcgtctttaattgctccgatcaaatggattacagaggcttgggccgcatctacaagggattggcccaatccggcagttggggttgcttcgacgagttcaatcgcattgaacttccggtcttatccgtggctgcccaacaagtggccgtcgtcctgaccgccaaaaaggagaagcgaaagaccttccttttcaccgatggcgatacgattgaaatgaatcctgaattcggaatcttcataactatgaatccaggatacgctggtcgcaaggaattgcccgagaatctgaaaattcaattccgtaccgtggcaatgatggtgccggatagacagattatcatacgtgttaagctggccagttgcggattcctggaaaacattacgctggccaggaagttctacaccctgtacaagttgtgcgaggagcagcttaccaaacaggtgcattacgatttcggactgcggaacatcctgtccgtcctgcgaacactgggcgcagccaagcgaaggaattccaaggacaccgagagcaccattgtgatgcgcgtgctgcgcgacatgaatctttccaagctgatcgacgacgatgagccgcttttcatgtccttggtctcggatttgtttcccaatcagacgctggaaaaaaccaattaccctgagctagaggcagcgattctccagcaaacggacgaagccagtctggtgtaccatcctccgtgggtcctgaaactcattcagctgtacgagacccaacatgttcgccacggcatcatgaccctggggccaagtgtgggcgacaatcatcgcgagatgcgtatgaaccccaaggccatcacggctgcccaaatgtttggacgcctcgatgtggccaccaatgattggacggatggcatattctcggcactgtggcggaagacactaaagttgaaagccggcgagcatgtgtggttggttctggacgggccggtggacagtatttggatagagaatctgaactctgtgctggacgacaacaaaacgctgaccctggccaatggcgatcgtctgaccatggcgccaaccgtaaagatcatattcgagccgcacaacattgacaatgcatcgccagccacagtatcccgcaatggaatggtctacatgagttcctctggattggattcgcggccaattgttcaggcctggttgaagaaccgtgctccaggcgaaaagtccacgttttcggatcttttcgatcagaccttcgtggaggtctacaactggggagtgcagatggtaaagttgcagatgcctgtgctgcagtgcaacattgtccaacagatgctgttcatcctagagggattgataccagtcaaaaaggaggacgaacaagccgtgagcatgtccagcaaggagagccacgatgaggacctccctccggagacttcgatcgaggagaaggaggacacgtgcaccccagaacacttgcaccgcttgtacatcttcgcgctcgcctggggcctgggcggttatctctccactagcgaccgccagagaatgaacctcttcgtgaaggaatccttcccgcagctggactacccaaagggtagtgcccacgagaacacaatatttgacttctttgtttctccagcgggcgtgtggcagtcgtggaagacgctcgtcaccccctatatgtatccggagctttccacaccagactatctgagcattctggtgcccatcgtggataatgtgcgcatcgactacctgatcggcaccattgccaatcaggagcgcgccgtgatggtgattggcgaacagggcacgggcaagacggtgatcatgaagaacttcatgaagaagatgaacgttgagtcgtacatgggccggtcctttaacttctcatcggccaccagtccgtatcagtttcagcgcacaattgagagctatgtggagaagcgcgttggggtcaccttcgggccacccggtggccggaaattgattgtctttatcgatgacatcaatttgcccgagatcaatgagtggggcgatcaaataaccaacgaaattgtgcgccaatccatggacatgaagggtttctatagtttggagaagcccggtgacttcaccaccatcgttgatgtccaatatgtggcggccatgggcctgcccggcggcggacgcaacgacatcccatcccgtctaaagcgccaattttgcgtattcaattgcaacattcccgacaacgactccatcgataagatcttccgcgttatcggtgagggtcactacaacgccaagcgcggctttgtgcccgagatccgcagtctggtcaagaagctgatcgtcgtcacccgccatctgtggcagcgcacgcgcgagaagctactgcccactccggccaagttccactacgttttcagtctgcgcgatttgtcgcgcatttggcagggcatggttggcaccttatccacggtgatcacttccgaaagtgtcctcatggcattgtggaagcacgagtgcacgcgagtattcgccgatcgcttcaccacgttccaggacaaggagtggttcggctcagagctggcatgtctcgtgcgcgaggagttgggcgactcccactcccagatgatcctgccgaatccggtgttcgttgatttcatgcgcgacgcccccgagccaactggcgaggagggcgaggacaccgacatggagctacccaaggtttacgaaccggtccactcacatgaagtgctccgcgagcgtctcgtcatgttcctcgcccagtttaatgaaatggtgcgagggtcgggaatggatttggtgttcttcccggatgcaatgctgcatctggtgaagatctcccgcatcattcggcatccgaggggatccgttatgcttgtcggggtcggcggttctggaaaacagtcgctaacgaaattggcatcgttcatagctggctacaagacattccaaattgcgttgacgcgttcgtacaacgtggccaattttcttgaggatctaaagctgctctaccgcacctgcggcgttcagggcaagggcacaacctttctcttcaccgacatggatatcaaggaggaaggtttcctcgagtatctgaacaacatactctcgagcggcgttatatcaaatttattctcgcgcgatgagcaggccgaaatcgtgcaggagctaacgccggtcatgaaacgcgagaatcaacgcaaaacagcgaccccggaaagtgtgatggacttctttttggcgcgcacctgcaccaatctgcatgtggccttctgcttctcgcccgtgggcgagacgttccggtccagggtgcagcgcttccccgccttggtctccggctgcaccattgactggctgcatccgtggcccaaggatgcattggtctcggttgcccgacactttctgagccacttcgagatcgagtgcacaccggccgtcaaggaggagctggtcaatgccctcggctccatacaggacatcgttgcggaaacgtcgcaggagtacttccagcgattccgccgcgcaacgcacgtgacacccaaatcttatctgaacttcattgccggctacaagaatatatatcaaatgaagcagcaagagctgcgcgatggtgtggagaagatggatacgggcttggagaaactgaaagaggcctccgcctcggttgagatcctcaagaaggatctagtggtaatggaagaggagcttgtagaagcctctaagaatgcggaatcagtgctagtggaggtgacggagcgcgcgatgcaagcggagatcgtcaagaaccaggtgctcatcgtgaaggataaggccgaggccctggtggcctgcatcgcccacgagaaggcgctggccgaggagaagctggaggcggcaaagccggctctcgaggaggccgagaatgccctgaacacaatcaaaccggcgcacatcgccaccgtgcgcaagttgggtcgtccgccgcacctaatcatgcggatcatggactgcgtcctgatcctattcaagcggaagttgcatccgtgcattcccgacgcgggcacaccgtgcccgaagccttcgtggcaggaatccctaaagatgatggccagtgccaccttcctgctgcagctgcaaaactatcccaaggataccatcaacgacgagatgatcgatctgctgcagccgtacttccgcatggaggactacaacatggacatggcacgccgagtgtgcggagacgtggctggcttgctgtcctggaccaaggcgatgtccttctttcacagcgtcaacaaggaggtgctgcccctgaaggctaacctcaccatgcaggaagcgagactaaagctcgctatggacgacttggctggtgccgaggagcagctgcgggagcgtgaggaagccctccaggctgtcaaggatcagtacgacaaggctgtgggcgagaaacagaggctgacggatgcggccaacgtttgcctgcgcaagatgaccgcagctacggcgctgatcaatggattgtcggatgagaagcaccgctggaccaatcagagcaaggagttcaagatacagctgggaattcagagccaatcttattaagacttggatgggcatactgaagcagaagaacatacctttcaccaccggactgaacataatcaacatgctggtggactcatcgaccgtgtcggaatggacgctacagggattgcccaacgatgagttgtccgtacagaatgccctgatagccaccaagtcgagcagttatccactgctggtggatccgcagacgcagggcaagatctggatcaagtgcaaggaggatcgcaacgaactgcaaataacctccctgaatcacaagtacttccgcacccatctcgaggactcgctgtcgctgggcaggccactgctgatcgaggatgtgggcattgacctggatccggtgattgacaatgtgctggagaagaacttcatcaagtcgggcagcatagagaaggtgttggtgggcgacaaggagtgcgacgtgatgccgggctttatgctctacatcaccacgaaattgcccaatccagcctttagtccggaggtcagtgccaagacctcgatcattgactttacggtcaccatgcgggggcttgaggaccagcttttgggtcgcgtcatcctcatggaaaagtccgatctggaggcggagagggtggccctctttgagacggtcatgcagaaccagcggaatatgaaggaactggaggcgaacctcctgctccgactgagctcatcccagggctccctggtggatgatgaagctctaatcgaagttttgcgcgtcacgaagactactgcggaggaggtcaaccagaagctcaagatctcggaggtcacggagcgcaagattatgaaggcgcgcgaggagttcagggcggtggccaaacgtggatcgatcctttacttcctgatcgtcgagatgagcaatgtgaatgctatgtaccagaactcgctgaaacagttcctggtcatcttcaaccattccatcaccaagtcaaccaagtctagcgtcaccgaggagcgaataaacatcattttgcgttacttgacctacgaggtgtacaagttcaccaatcgcagtctttacgagaggcacaaacagttgttcaccctgatgctggccatcaagattgattaccacaatggaaacatcagtcacgaggagttcctcaccttcatcaaaggcggtgcctcgttggacctaaatgccgtcaccccgaaacccttccgctggattctggacatcacctggctgaatctggtggagatcagcaagctggaaaccttctccacagtcctccaggtgatcgagctgaacgagaaggattggcgctgctggtacgagtgtgagaagccggagaacgaggagatcccctgcggatacaatgccatcctggatggcttccggaagctgctgctgatccgttcatggtgtcccgatcgcacaatttcgcaggcaaagaagtatatagaagaatctttgggaccggagtatagcgaaatgcaaatccttgatttggaagaaatgtggctagagtccgaacctcgtactccatttgtttgcctgctgtccatcggatcggatccgaccacccaaattggagctctggccaagcaaaagagcatagttctgaaatccgtgtcgatgggccagggacaggagtaccatgcacgtaagatgataatcgagtcgatggccatcggtggatgggtgctgctccagaacgtgcacctgtcgctgcccttctgctctgaaataatcgacatgctggtggagagcgagcacatagacgactcattccgcatgtgggtgacgacggagccgcacaacgagttccccatcggcctgctgcagatggctctcaaattcaccaatgaacccccacagggaatacgtgccagtctcaagcggagctaccagtcgttcacccaggacttcctcgactacacatcggccacccagtggcccccgctgctctatacggtggccttcctccacaccatcgtccaggagcggcgcaagttcggtccactgggctggaacataccctacgagtttaaccaggctgacttcgcggccagcgttcagttcatccagaaccatctggacgagatggatcccaagaagggcgtctcctggcagaccctggtctacatgattggtgaggtccagtacggcggtcgggtgaccgatgactttgacaagcgtctgcttaccacattcacctctgtgtggttctgcgaaccactgctgtccaattcctttgagttctacaagggctacaaggtgccgggcacgaagagtctgcaaggattcatcgattatatcaacagtttgccggcctacgatacccccgaggtgtttggcctgcactccaatgccgacatcacgtaccaaataaactcggccaaaggcatcctcgacaccatcctgagtgtccagcctaaggagggaggcggaggcggtggcgagacccgggagagcatcgtctaccaactggcggatgacatgctacgcaaactgcccgcccagtacaacgcctacgaggtgcgcgagaacctgacccggatgggcatactcctgccaatgaacattttcctcaggcaaagggtcattaaacgcgtccacacctgcctctgcgacctcaagctggcgattgatggcaccattgtgatgagtcccgccctgaaggagtccctcgatgccatgtacgatgcccgcatcccggagacctggatgaagatatcctgggaatcgactactctcggattttggtacaccgagctgctcgagcgcaatggacagtttcgcacttggatatcaacagatagaccaaaggtgttctggatgaccggcttctttaatcctcaaggctttctaacagccatgcgacagttgcctaacaagcgaacaggatatgaataccaaacgctcttcgccttaactaaccagaaatcgatgtcctgcgaaaataggtcctttgtcgttcgcattgaggtgacgcgtgcccacaagggttgggccctggactcggtggtgctgcagaaccaaataacgcgctacaacaaggaggacatcaccgagtatcccacggagggcgtctatgtccacggattgttcctggagggtgcctccctggatcgtcgcagcggcaagctgattgagtccaagatgaaggtgctctacgaacagatgcccgtcatctatatatacgcgataaacacaacggccggcaaggatcccaagctgtacgagtgccccatctatcggaaaccgcagcgcacggacctaaagtatgtcggttccattgacttcgagaccgaattcaatcccaagcactggaccctgcgcggagtggccctgctctgtgacatcaagtga

SEQ ID NO: 20175 - protein, 3508 aa, DROSOPHILA
MDPDEAQRRREECERKARRGEMDPRLEFTFQLLIDATQLPRHQLMDYIFEGDMLDEINQLFLPNMKNKLLWFYQETDDPEPTPVPDPNKPGPSRSGVASSSSKTPQGGASPSGMPPPKHKKLFLTDGWTCAFTGVCIYIFRVNTSKQLPEEGFQKDLYCGVIDAKNIGLVTSIERIVEFVFMQALAFPSLEGDEEDVSCGLIKGQLLPGLRSFCSALRVCEQVCDHHNVFADGCDMFEKIDAVEEVKDMSKNQEFCAQLEERVNNWTKGILKILGESEQLRKENDHSGPQDELEYWKKRGAQFSQLLAHLQDKEVQFTLHCLFLAGSRIIKQWKETDRKITFCYNEARDNSKFIQAMETCCHSLYLDDPVSMKESILSLLQTVRLIYSVSQFYNTSERTSALMVKITNQMIETCKSYITCRCKETIWSQDRNVIRTKLSNCIKLNHIYHETYYTVREQPFLPNQTPFGFSENFVFGKFDTFCERLSKIISMFNLIDDYNHLFERRLEGLLLGEALEDASNHFEEAKKEVTSRKYDYLDHRNSDFNIDFERFIHKTNSLKDTIATLIEKDFDTVWETPQCIRFLVRFEKVSEKIPLTRMDEKYTRILRYVEKEVDRILKTFRKQRDDPPLARNFPPIAGRIHWCRALSLHITELMDAVMEHVVLSSLPMAKDLDVRYHNVLGILQEYEDEIVSIWLDQDVSVADACLLQPLLSLQGDKLFVNLHPTIPLLIREAKMLAKLDIELPIVAATLMSRQQYFITIQDSLNCLIKMFLSTVRAVKLEVRPLFLPQLVRLTAMLKPGLHTINWTNQNWTEFYERCKQAIESFDVLVAHDEIWTVDEFLERSEEACRKAAIELNRKSQMVSEAVEEVLSLVDRATAAFKEIAGDDVITLFDAATPKGDNSGSGGRKPEDGGGGGGGAAAPSTSGGGGGGQQQDWSILWSCFENPLSLLSTTESLPKGMQDMVCNAVVEMRRYYSRKVIDVLIKVIRAALDTLRRRFIADENETVFKKPVFALHAQLQIPHVVIKPNLDELQDILVTAGKNITGIAKGVAQWSSGKDPPQVSMTVQPRVGRNHNESTGGGKSRRRKIYCLASEERPQMPHMLKSFYSAIMDNKEVAKAVNQLASCTKNVKPEIQTYIKRWKPYHFLWKNDRTTRQLMEFGLQEFETTLRCLSDLDANLLVEPDMEVFGQCVAVYNEKLKYGLAIEIKSCNHKIGQAMKKKYKKEMDYVYAVINEMDRKLDRPIRDLDDVRMIMETLGKIREQEVDMELRIDPIEEAFNVLTRYEVQVEREQFDLVDNLRATFQNLLAGALQAQVKLLDMQPAFQDDLRTNLDNFKQDKISYVTEYRTAGPMQAGLTPREASDRLILFQNRFEGMWRRLQTYQSGEELFGLPQTDYPELGQIRKELNLLQKLYKLYNDVIDRVSSYYDIPWNEVDIEEINNELMEFQNRCRKLPKGLKEWPAFHALKKTIDDFNDMCPLLELMANKAMKPRHWQRIMDVTRYIFEFDSEGFSLKNILEAPLLKHKEDIEDICISAMKEKDIEAKLKQVTNEWSVHELQFMSFNNRGELLLRMVLGSLLSNRYNAPFRKQIQQWVYDLSNSNEILERWLLVQNMWVYLEAVFVGGDIAKQLPKEAKRFSKIDKSWQKIMQRAHETPGVVACCVGDDLLKQLLPHLQEQLEICQKSLSGYLERKRMMFPRFFFVSDPALLEILGQASDSHTIQNHLLNIFDNTKSVKFHDVEYNKMMAIISSEGEMIQLDRAIRAEGSVETWLTQLLVTAQASLHSIIRTAYATINDPNFTLLSFLEKAPAQIGLLGIQMVWTRDAEMALMRGRERKVMMETNNKFLEMLNTLIDQTTRNLTKRERTNFETLITIHVHQRDIFDILCRMNIKSANDFEWLKQCRFYFKEDLDKTWISVTDVTFTYQNEYLGCTDRLVITPLTDRCYITLAQALTLSMGGAPCGPAGTGKTETVKDMGKTLAKYVVVFNCSDQMDYRGLGRIYKGLAQSGSWGCFDEFNRIELPVLSVAAQQVAVVLTAKKEKRKTFLFTDGDTIEMNPEFGIFITMNPGYAGRKELPENLKIQFRTVAMMVPDRQIIIRVKLASCGFLENITLARKFYTLYKLCEEQLTKQVHYDFGLRNILSVLRTLGAAKRRNSKDTESTIVMRVLRDMNLSKLIDDDEPLFMSLVSDLFPNQTLEKTNYPELEAAILQQTDEASLVYHPPWVLKLIQLYETQHVRHGIMTLGPSVGDNHREMRMNPKAITAAQMFGRLDVATNDWTDGIFSALWRKTLKLKAGEHVWLVLDGPVDSIWIENLNSVLDDNKTLTLANGDRLTMAPTVKIIFEPHNIDNASPATVSRNGMVYMSSSGLDSRPIVQAWLKNRAPGEKSTFSDLFDQTFVEVYNWGVQMVKLQMPVLQCNIVQQMLFILEGLIPVKKEDEQAVSMSSKESHDEDLPPETSIEEKEDTCTPEHLHRLYIFALAWGLGGYLSTSDRQRMNLFVKESFPQLDYPKGSAHENTIFDFFVSPAGVWQSWKTLVTPYMYPELSTPDYLSILVPIVDNVRIDYLIGTIANQERAVMVIGEQGTGKTVIMKNFMKKMNVESYMGRSFNFSSATSPYQFQRTIESYVEKRVGVTFGPPGGRKLIVFIDDINLPEINEWGDQITNEIVRQSMDMKGFYSLEKPGDFTTIVDVQYVAAMGLPGGGRNDIPSRLKRQFCVFNCNIPDNDSIDKIFRVIGEGHYNAKRGFVPEIRSLVKKLIVVTRHLWQRTREKLLPTPAKFHYVFSLRDLSRIWQGMVGTLSTVITSESVLMALWKHECTRVFADRFTTFQDKEWFGSELACLVREELGDSHSQMILPNPVFVDFMRDAPEPTGEEGEDTDMELPKVYEPVHSHEVLRERLVMFLAQFNEMVRGSGMDLVFFPDAMLHLVKISRIIRHPRGSVMLVGVGGSGKQSLTKLASFIAGYKTFQIALTRSYNVANFLEDLKLLYRTCGVQGKGTTFLFTDMDIKEEGFLEYLNNILSSGVISNLFSRDEQAEIVQELTPVMKRENQRKTATPESVMDFFLARTCTNLHVAFCFSPVGETFRSRVQRFPALVSGCTIDWLHPWPKDALVSVARHFLSHFEIECTPAVKEELVNALGSIQDIVAETSQEYFQRFRRATHVTPKSYLNFIAGYKNIYQMKQQELRDGVEKMDTGLEKLKEASASVEILKKDLVVMEEELVEASKNAESVLVEVTERAMQAEIVKNQVLIVKDKAEALVACIAHEKALAEEKLEAAKPALEEAENALNTIKPAHIATVRKLGRPPHLIMRIMDCVLILFKRKLHPCIPDAGTPCPKPSWQESLKMMASATFLLQLQNYPKDTINDEMIDLLQPYFRMEDYNMDMARRVCGDVAGLLSWTKAMSFFHSVNKEVLPLKANLTMQEARLKLAMDDLAGAEEQLREREEALQAVKDQYDKAVGEKQRLTDAANVCLRKMTAATALINGLSDEKHRWTNQSKEFKIQLGIQSQSY

SEQ ID NO: 20176 - DNA, 9427 bp, DROSOPHILA
caatcgttgtgcacattcccaattaaataatcccaattgcaatggcagacggcagctgttaagttgtggctttgtcaccgatttcttgttgtttctattgtctcgtctccactgttgctattgctgttgttgttgttgtcgttgctgtcgctgttgttgttgtggggggcgtagcgcctctaggaatgtggggcttactcacccagcaggtgatgcactgatataacaaacaaactcttggacgtaacattgtactggcgacactttttcaagaatttcaatggcatttttcgactattttgctccaccggggctccgctgggctcacaaaagtggctaaaacggcagcaccatcgacaccacaggttttttttgggggagtaaattgctcaattggaattagccgatttgaatcagctgattagacacgcaaaccagagcactgcgcgtattggttaagtaaagttaaagatagtaattgggcagttaacgacaataaataaaggaattcacgagaaataaaacgaagagaccgaagtgctgatatcgatacgcaggtgctgactgagtatctcggtggctggcatcgaatggatcgataggcggcattgactatcggtatgtctttgcgcagtgggctgcaagaaaataggtttagttctgttaaagaaaacaagtgcaaccaagaaatatgtaactgaaacaaaacagtttatattttaaaatatataacaatgcagtcagcagtgattaaataaaattcctaaagatattaaaaccactgatacacacgaatacttcgttgtacacagcaagagaataacggtttctagcgaacagtaaaatatcaaacttaacagagctactggacacataggtggcgtgctggcatagctctgttatccgttccaactccagtgctggaaagtgcgcgcaactgagaaatccacaccgcgattcgacgacggtccctctggaattcagtaatttagtactgctgctgccgtggtagtcgtcacttcccctttgcacttgccgccctccgtcaacgttttatcgaataaagcgaattaaaattaagatcgtggcttcgccccgctgcgtaactgaataaagcgaatttaaatcaagggctttgacgtctgccaagctgctgagaggggctgcaacaggaagagcaccagagacggggcacaaatccacatccacatccaccgatcgtcgtctatctacagaggattaggagcagcgcagtcggagatcgcgatcggtgagtttcgaggagccgaatcacaaggccacgcactgtcgaaatccaaaaagcaaaacccgattaccaaaatcgaaatccagtccataattaatttgctgcttagatatttcgagcgctgcattggcggtcaaggttgcagcgacgaggacagatgatggagcaaccgtatcgctcactcgctcgctcacacacacacacacacacagaagagccctgcgagcgagtttaaagttcagtacctgttgctgcgctcgcccagtctccctctccctctcgctctcgcacagcctcgccgccgcccgtgcgatagtgcgctctcgctcactccgtccgcgctgcgtgtaatttaatttaattcacttctgttattaatttgcgctatttgcacgctgtatcgccgcctttcacgtctcaaaccgagtcgtaggccgaattgcataaccaaaaacgcgactcgggtcgccaatcggccatcaagttacttttctgctcgtggctctccgctgagaacagctgtcgactgtctgcttcccgtacagtaagcactcgatatgagcgacgaagctatgttcttaatttccgttaacctgcctttccttattcaaaaaatcaacatttgaaaatcctaagtacaccaactttacacattttccaattggagttggcgttgcatttagtttccaatttattaaaaacaatttgtgaaaaaagccaaccgatatattgttttatgctaattaaacacacacacattaatgacgatgtaaacaaaatcctagtatcaaaatttactacaacgaaattgaaagtggcttagttcgaaaagccgaagtgtgtatactcttgctgccttgtataactgaactctgtaaaatcgttccattttgaaagaactaagaacttagtaggagatactgcaagtctaggtatgtacgtacatacatatttacatatatataaatcagttaaaatataaaaattgtacattgttgtacacttcctaagaacttttatggataaaaattagttctctgaaattcaagttcaaagacaaactaaataaatatattatattatatgttatgacaccccattatagggttacctacctattaaagctagactattagttcttccaattaaagaaccattaaaagggcaggttccgtaatgggattacatttaatggacttcggttaaagtgagcgcggagttacatttcatcctttccagacagccaaactaggtttatgataacgaaagccacttgggcgcgaaataaatatgcatagtcatgcttactttataattctccgtcgattcggacgagtaattcgagagtgtcatcgtgtttagggaattttaaaatcacatatgccaagcgagattctaagcgttatcacgcacattacaagtgtgtagggtgatactagatgggcgtttgttgtgactagatcgtaaactttgtttgaatagatggctaagcagaaataaccaagatcattcatctcattcatttagattaactacttagtcgtaaactagaaaaagaagcactcaaataaagagtgtttttggaggaaacatatacacatttgaacgagttaggatctattgtttcgtaaaaaaaactaaagaaaccgaatttatgttaacatttttggaacatttgttggttttcgtgatatatatgtgtgcttcctaacacaatttaatcattgcgctgtcgtcattccgtcaatcgaacagcacacatgggtgacctataaaaagacgccaattttatgttcacctccacttgttgtcagtgttggttgttatcgggagcgtcgaacacataccttcctcgaaatcggacgagaatgacgatactggcgtcgatttgcatatgcctcgcatgtgtttaatatttattttctgccttttgctgaccacagcaacaagaactattacgcgactctatacaaagttcacgcacgtagcggcgcattagcaacattaaagcattaagtcaaacccgaattcaaggtgaaaattcagtagagctccttaagcccccacaaaacaaaagataacacctgggatcagctcaaacttccaactgcttaagttgagagttctagtaaaaatgctttcggcactagttaaaactcaaagcagtcggggcgaatttcattgaactccaagtgtgcatttcaaaacccaaactctagcttaagtaaaccctctcaatttgcatttcctatgcttttttttataaattcgggtaaagaaacgtatacaaaccgtatatgtacattaaaatctttaagtacttcataaactgaatcctaatgaaagggaatgtattttgtttgggatgattttaatccgatttcacattgacaagtaccaaagcctttgcttagtgcaattggcgatttcctggaacaacggctggtaaaggtgttaatcgagtgattggaaatcaaatttcgttattttgcgccgctcaaagagtatttgcttgggaacagcgcatttcgaacgcttttactcgttttcatcatatctctcgaccggcgacggcattcgataagcgcgtgcataaaacctgttgctcccggcggtcagtgagcagtgctccctaacgcgaaacacacgttgcgtcgccacagaggcggatccaatcgaattcatagctttaattgcaccagtgcagcactgcaagtgatcgacggagtagtcgtagttgtcagtgcaacgggaacgtcccaaggtacgatcgattaaaaccagatgcgcgatttcaatgtcaaccggcggcgctggcggaacatccagctagagcggtaccttgcaccgctaagacaagtgcggaagcggacggactaccgttagacgcacaggcgatgctacgccgccagcgctggtatacgtggaatacattagagtgcgtgtccaaagtgcgcgacatgcaaatggagctagaccaatgttatgcaaagcgaaaactaaagcgccgtgaattctgtgccctttttttgcagtcatacacgtaccaccatggccagcgagcaaacgattgatggagcagccgcaattcccagcggcggcggcgacgaacccttcctgggactgctggacgtggccctattggcggtgctaatcggcggcgcagccttctacttcctgcgtagccgcaagaaggaggaggagccaaccaggagctattccatacagtaagtatagttaaatttgagcaatctaaagcaatctaatccgaagtccaaaaccatggcaattcttgaattgaatagtcagtttcttgataaacctttcaaaaaacatgcatatcacgcgtacaattcaatatttaaaactgcttcttgaatgaaatgccctctagatctattcggttcattccgtcacagatccatatgttccgccgatttgttggaatcgatcggccattatttgacgctgaatgattcacacatcgcaaatgaatgtgtgaataccattgtgtgattcattcgttgatctgagtgtttacctgcgtgttaagataagattcaaatttggctgagattttaacgcatatctttaccttcttcagacccaccacagtgtgcaccaccagtgcgtcggacaattcgttcatcaagaagctcaaggcatccggacgcagtctggtcgtcttctatggctcacagaccggaaccggcgaggagttcgccggccgtctggccaaggagggcattcgttaccgtctgaagggcatggttgccgatcccgaggaatgcgacatggaggagctgctgcagctgaaggacatcgacaactcgctggcggtcttttgcctggccacctacggcgagggagatcccactgacaacgccatggagttctacgagtggatcaccagcggcgatgtcgatctgagcgggctaaattatgcggtgagtacgagcgatatcacacggaacggtcttatctgcatgcatactgattacacgagtccccctcgccaaacacggagtccgttcctcttatcaaaacattgtgccactgataagtgatttttattccacgcccaatcgcaattttggctatctccccgtatttttgcgctttgagttgtttgttgtgttttaatacagctgatgtaagcggaacgaaaacatttgaaatggcattggcggatcctaattaacagataggctgtaacctgatagtgtagcgcgcacggaagagtttgtttttgataataaacctactattattactccccatctcccaaatgccagcagttcagcgtagacaaattgatagaaatctaatcgtttcttggtagccttggaggtgtcatacaccttagtttcgttgacttttaaacaacgttaaatatagcatattttattgttgccgacagtccaactggtagtaaaccaaaaaggagttctatattatcaaccttatcagttgcccaattcgaattccccgccaaactagcagctcaaaaatgcgtcgttcaggttcgcgcgccgtagcagtcggcttttgactggcagcagtcgcacggaatttttagttgcttcttgaaaaacaatgtgctcaatgtcgatctctgttcttgcgcaatttgtttacaattgccgtggaaattctgcggttcaatccagcaaatgtcggccggaaaatgcagagctcgatcgccacatctgcccacctgttcgtcaggttccgccagcaaaagctgttgaatttgctcagcattttgaatagtttacgtaacagaacagctgtcgcgaaaagaaaaattgaatggaaggtagtatgaagttcagttctacaatcaatcatagttcaaactattaaactgataagtgataacactcaaacttattatgagtctcattaaaaaagatggcttagttgttcattcgtgctctgaaattcgcgttcctaagatgcatcatgtattttaagtagttaagttaactgaattccattctatagttactaaatccactcttatctgattccaggtctttggcttgggcaacaagacctatgagcactacaacaaggtggccatctatgtggacaagcgactggaggagctgggcgccaaccgggtctttgaactgggactgggcgacgatgatgccaagtaagtgatgaaggtgtagccaacaatgtgaaccatactcaagtgatacttccccaaaagcatcgaggatgacttcatcacgtggaaggatcgcttctggcccgccgtgtgcgatcacttcggcatcgagggcggcggcgaggaagtgctcatccgccagtaccgtttgctagaacagccagatgtgcagcctgaccgcatttacacgggagagatcgcccgcctgcactcgattcagaaccagcgcccgcccttcgacgccaagaacccattcctggcccccatcaaggtgaaccgcgagctgcacaagggcggtggccgctcctgcatgcacattgagctgagcatcgagggttccaagatgcgctacgatgccggagatcatgtggccatgttccctgttaacgacaagagtctggtggagaagctcggccagctgtgcaacgccgatctggatactgtgttctcgctgatcaacaccgatacggacagcagcaagaagcacccattcccttgccccactacgtaccgcaccgctctgacccactacctggaaattacggccataccccgcacacacatcctcaaggagctcgctgagtattgtactgacgagaaggagaaggagttgctgcgcagcatggcctccatcagtcccgaaggtaagaaattattcacaagacttattactgctgtaccagtaacaggaactcccacgaacatatactaatgaatgttgcattgcaggaaaggagaaataccagagctggatccaagacgcctgtcgcaacatcgtccacattctggaggacatcaaatcctgtcgcccacccatcgatcacgtttgcgagctgctgccccgcttgcagcctcgttactactccatctcgtcgtctgctaagctgcaccccactgatgtccacgttacagccgttctcgtggagtacaagacgccgacgggacgcatcaacaagggcgtagccaccacatatctgaagaacaagcagccgcagggcagtgaggaagtaaaggttccggtattcatccgcaagtcgcagttccgtttgcctacgaagccagagacacctatcataatggtgggtcctggcactggcttggcccccttccgcggattcattcaggagcgacaattccttcgcgatgagggcaagaccgtgggcgagtcgattctctacttcggttgccgtaagcgcagtgaggactacatctacgaatccgagttggaggagtgggttaagaagggcactctcaacctgaaggccgccttttctcgtgaccagggcaagaaggtctacgtgcagcatctgctcgagcaggacgcagatcttatatggaacgtgattggcgagaataaggggcacttctacatatgcgggtaagtaagctagaggatcagccagcacacaagattctcaccataccattctacccatttcagtgatgcaaagaacatggccgtggacgttaggaacattttagtgaaaattttgtccactaagggtaacatgagcgaggctgacgccgtgcagtatatcaagaagatggaggctcagaagcgctactcggccgatgtctggagctaatctgatccaaaagccaaccgatgataagcgtaaagttttctagttcactaagctatgtaagcgtaatttttggtttgggaacttcatgctgcagttcaacaaacgaatgagtaacgattaagtgtatgtctagtgtaattgactctagcttgaccctggactgtttgatgggacaaactgagatggaatctaagtaatgaaatgagcggagtaacaagttaacgattaagtagctgtgtacgagtgcagattagttaaagtcctttatacgagcaatttacttcgtattctcttggtgatttcaatacaaaaacgaaacatgttgtgcaattaaacaatgacattgcaattgtatttttataaataaagaaaagtacggttgacttctataataatgtgtgtttgatgttttcgaaataggataaggataagtagggaacattccaattgaaatttaatactttttcataagaaatagatttttatatatataaatggagattttatttgtctgaaaggaaatataagtgctgcatacgttttgtctgaataataattaaagttcctgtcacaaatttagcgcaattgtaaagttacaacactccacatagctggtagtttgtttttatataatataaatattcttttggcaacgtttttgaaactttaaaccagattatttgtatttacaaatgaacgaaatgttaaatcattaaatacatatttgtaaaaatcctaggtagatatattcaaaaggtacatatatagtagtagtgcaattgtacttcaatccaagacaccagcgcgttcaaagtgcggtagcgtgtagcgcagcgtatccgccagtcggcgggactggaacatctgacgcaccttctgcttggcaaaatcggcgtccttgaagttctccaggttgttgtcggcggtctgggccttgtcctggctaacagtggggaaaatgccgtagctggcaaagaatccgtaggactcgcgacggtggacctcctccaggatttgctcgtagctgggcaccgggatgcccatgtccaggtcgagcagcgttttggccagccgcgcgtggtatgtgcgcagcagctgggtccgccgatgacgcagcacttccaatgtcaggctagtgtagaagaaatagttgaggtcgatgcccggactaccccacacgctcaactggaagtcgatgaggatgaggtcctgcggacgctgtgctccgtcgtacttgaacagcatattgttcacccacaggtcaccgtgattgagtaccttcacctccttttcctgcggtgcctggctgcgttccaagttggcccgctgattttgcatgtacttgccgatcttctcggcgatcttttcgaagccgggccacgtgctcaccaggtg

SEQ ID NO: 20177 - DNA, 2721 bp, DROSOPHILA
ctgccgtggtagtcgtcacttcccctttgcacttgccgccctccgtcaacgttttatcgaataaagcgaattaaaattaagatcgtggcttcgccccgctgcgtaactgaataaagcgaatttaaatcaagggctttgacgtctgccaagctgctgagaggggctgcaacaggaagagcaccagagacggggcacaaatccacatccacatccaccgatcgtcgtctatctacagaggattaggagcagcgcagtcggagatcgcgatcgtcatacacgtaccaccatggccagcgagcaaacgattgatggagcagccgcaattcccagcggcggcggcgacgaacccttcctgggactgctggacgtggccctattggcggtgctaatcggcggcgcagccttctacttcctgcgtagccgcaagaaggaggaggagccaaccaggagctattccatacaacccaccacagtgtgcaccaccagtgcgtcggacaattcgttcatcaagaagctcaaggcatccggacgcagtctggtcgtcttctatggctcacagaccggaaccggcgaggagttcgccggccgtctggccaaggagggcattcgttaccgtctgaagggcatggttgccgatcccgaggaatgcgacatggaggagctgctgcagctgaaggacatcgacaactcgctggcggtcttttgcctggccacctacggcgagggagatcccactgacaacgccatggagttctacgagtggatcaccagcggcgatgtcgatctgagcgggctaaattatgcggtctttggcttgggcaacaagacctatgagcactacaacaaggtggccatctatgtggacaagcgactggaggagctgggcgccaaccgggtctttgaactgggactgggcgacgatgatgccaacatcgaggatgacttcatcacgtggaaggatcgcttctggcccgccgtgtgcgatcacttcggcatcgagggcggcggcgaggaagtgctcatccgccagtaccgtttgctagaacagccagatgtgcagcctgaccgcatttacacgggagagatcgcccgcctgcactcgattcagaaccagcgcccgcccttcgacgccaagaacccattcctggcccccatcaaggtgaaccgcgagctgcacaagggcggtggccgctcctgcatgcacattgagctgagcatcgagggttccaagatgcgctacgatgccggagatcatgtggccatgttccctgttaacgacaagagtctggtggagaagctcggccagctgtgcaacgccgatctggatactgtgttctcgctgatcaacaccgatacggacagcagcaagaagcacccattcccttgccccactacgtaccgcaccgctctgacccactacctggaaattacggccataccccgcacacacatcctcaaggagctcgctgagtattgtactgacgagaaggagaaggagttgctgcgcagcatggcctccatcagtcccgaaggaaaggagaaataccagagctggatccaagacgcctgtcgcaacatcgtccacattctggaggacatcaaatcctgtcgcccacccatcgatcacgtttgcgagctgctgccccgcttgcagcctcgttactactccatctcgtcgtctgctaagctgcaccccactgatgtccacgttacagccgttctcgtggagtacaagacgccgacgggacgcatcaacaagggcgtagccaccacatatctgaagaacaagcagccgcagggcagtgaggaagtaaaggttccggtattcatccgcaagtcgcagttccgtttgcctacgaagccagagacacctatcataatggtgggtcctggcactggcttggcccccttccgcggattcattcaggagcgacaattccttcgcgatgagggcaagaccgtgggcgagtcgattctctacttcggttgccgtaagcgcagtgaggactacatctacgaatccgagttggaggagtgggttaagaagggcactctcaacctgaaggccgccttttctcgtgaccagggcaagaaggtctacgtgcagcatctgctcgagcaggacgcagatcttatatggaacgtgattggcgagaataaggggcacttctacatatgcggtgatgcaaagaacatggccgtggacgttaggaacattttagtgaaaattttgtccactaagggtaacatgagcgaggctgacgccgtgcagtatatcaagaagatggaggctcagaagcgctactcggccgatgtctggagctaatctgatccaaaagccaaccgatgataagcgtaaagttttctagttcactaagctatgtaagcgtaatttttggtttgggaacttcatgctgcagttcaacaaacgaatgagtaacgattaagtgtatgtctagtgtaattgactctagcttgaccctggactgtttgatgggacaaactgagatggaatctaagtaatgaaatgagcggagtaacaagttaacgattaagtagctgtgtacgagtgcagattagttaaagtcctttatacgagcaatttacttcgtattctcttggtgatttcaatacaaaaacgaaacatgttgtgcaattaaacaatgacattgcaattgtatttttataaataaagaaaagtacggttgacttctataataa

SEQ ID NO: 20178 - protein, 679 aa, DROSOPHILA
MASEQTIDGAAAIPSGGGDEPFLGLLDVALLAVLIGGAAFYFLRSRKKEEEPTRSYSIQPTTVCTTSASDNSFIKKLKASGRSLVVFYGSQTGTGEEFAGRLAKEGIRYRLKGMVADPEECDMEELLQLKDIDNSLAVFCLATYGEGDPTDNAMEFYEWITSGDVDLSGLNYAVFGLGNKTYEHYNKVAIYVDKRLEELGANRVFELGLGDDDANIEDDFITWKDRFWPAVCDHFGIEGGGEEVLIRQYRLLEQPDVQPDRIYTGEIARLHSIQNQRPPFDAKNPFLAPIKVNRELHKGGGRSCMHIELSIEGSKMRYDAGDHVAMFPVNDKSLVEKLGQLCNADLDTVFSLINTDTDSSKKHPFPCPTTYRTALTHYLEITAIPRTHILKELAEYCTDEKEKELLRSMASISPEGKEKYQSWIQDACRNIVHILEDIKSCRPPIDHVCELLPRLQPRYYSISSSAKLHPTDVHVTAVLVEYKTPTGRINKGVATTYLKNKQPQGSEEVKVPVFIRKSQFRLPTKPETPIIMVGPGTGLAPFRGFIQERQFLRDEGKTVGESILYFGCRKRSEDYIYESELEEWVKKGTLNLKAAFSRDQGKKVYVQHLLEQDADLIWNVIGENKGHFYICGDAKNMAVDVRNILVKILSTKGNMSEADAVQYIKKMEAQKRYSADVWS

SEQ ID NO: 20179 - DNA, 4191 bp, DROSOPHILA
aggatttgatcatctacagtaccaaggagttcgacttcatcaaactggccgatggcttttccagtggcagcagcctgatgcctcagaaaaggaatccggacagcttggagctgattcgcggcatggccggtgtgatcaccgccaatctgacgggcataatgatgaccattaagggcactccgtccacctacaacaaggacttgcagtacgacaagcaattctgcttccagtccttcgacaagctgtcccaagtgctcgaggttaccgatggtgtcctacagacgattcaggtcaagcaggaatcaatggaggcggcacttagcacagacatgctggccactgactgggtaagttacacctaagagctataattaattaaaatacattacattcccttcttacaggcctactatctggtgaagaagggggttccattccgccaggcgcatcacattatcggtcgcgtggtctcggaggccgaaaagcgcggtgtggacatcactgatttgccgctgggagatctccagaaattcagtcctttatttggatcggatatcgttgcagtggcggactactccaacaatgtccagcaatataatgcgattggtggaaccgccagtagcagcatcgtggaacaactgcgtttgctcaagaagtgcgcaagggatttggccaaacagtcgtaggttcctatgactatttctgtggtaattcttggctatattgaatcgcattgttttacttatcaaaaatatatgttatatgttagtaaagaagaccatacttctgactgaaatcaatataacttctgcaacggaataatatattgtagtatcctttataaaatacttctaccataccttttagcaggtagtctaacaccactgcgtttatttcgttttaatatattttaagttaacaaattaaaaagttacatatacaaggggatcttttaaggaatgctatactgtataaatatggcttcgatcgatgtcgccgcttagttaacgctggggctctggggcgtgtaggtgtagggttcgtgggagccctgctctccgttatccaactgctgatagccggtgacagcggaattctggggcggtgccatctttccgccggagatgaggacgccgaggctctgctgcagctgccagcggcgtgcctcgcggatggacttgttgcggcgcagcgtcttggccagcataaaggcgcagagcacgccgagaagctggacaaaggccacagtggtggctccggtggcaatcagcatggcgctctgcgacacaatgaagttcatcttgcggaagcagccgtagtcgtaggtctccatacaggtcatctgggtggagtcgttcagacttgttggttggttgccgcagcatgagttgggcaccaccacgtcatccactcccagagtgaagttcacattggcggataggtagtccttccagtcctccggctcattaactccgcaacactctagctgtagtcaagaattgagtgaaattatattaagattttctttctttttatttccttgtatatcccatatttaaagattttgcacataccatagattgcatgaagtccactccagattccacgtagggatcgtgttcatactcagccagggcctggttcatggttcggatcagcatgcccctcacctgcgattgcatcacaaaggcggcgatggcggcagaaacctcgaggatgaacaccaggaaaaggcacactccgtactgcaagcaagtgtcatcatattagcacagcacccattaaaatctcacttttaattcagttattcagttaattaatttcgattcacttatttctcttaccagattaatgaccatcacactctccttgacggctccataggcccccagtgcggccactgcgatcagaatgaatccgatggcaatgaggagtgccggtggcgacgagaagtgtccatcgatgaagaggctgaagtcgccgaagatggtctggatcgtagttccaaccataatcaggaggatggcggtcagctggggcgggaaattggcaacggggaaagaaaacattaggaattgcatgtcaaatccaatttgcggtgagatattcagtgtgactttgtgagcgcatggaacgcaaatgatttgcagtaagtgcatttgtctattattatgtccattctgaatgatcaaaaatggcaaactagcgtagtttttaattatactattactttaccgtacttatattataagcgaaaaataaatcttgttaacttattgataataaaaggatagcgtttgtaataatggattgtcattgtttgcctcaactgcacacccactcattttacacactaacatatttattggcttgttttaaagcaaatgtgttaatatttgaatattgtagatcaacaacaaagttaaacaaacatttataacctggcccggaaatacacatgcacatgcacccacactataaaaagtattttggtctggctatcttatcagaatgagtaatttttaaagtgagttatcgtaaggaatggtgaaatatgaaataaaaataattttcaatgaaatacctaatatgtatatgtggttgtaacgaattgctatcatagaatctcaattatttttgatctagctggtattcgtttttagaaagctaacaaaaaacagttggtaagagaaaatggttcttgacctgtttctctttccctgtgatttcccagttagctctcatttgttttcctatcagcgacatacgtaggcgcaaaacaaaaaatatatagagtgctatacccacactcgtttacctcgacggatgataagactaggtgctcagtgtgataaaaaaaaggcaatcgcagaaaatggaaaataacccaagatggcggaacagtgattcatgggtggaattaatggaggattacgatccgggatccagtatcaaggatcatctactcaccgcaaacatgaagctcacgatgatgagcatgtacttggcgcacttcatgcccgaattcagttgcagttccctattcgacattttgctgttcgcagtctcgcttggatgtcagctgcaatttgtggaagtgttaatagcaggccgatttcgatatatagtatagtatagtataatatagtatacagtatcgctcgctttaatttgaccgacccggcagtgcacgtactttaacttttgctggtctcacgtgaactgagtggcaaaacggttaaggcaatcggccaagtcaactgccaaccagccgtctctctcccacgctccgaaaggggctgtccggccttgccgccctctaactcccactcgctctgacactgcgagaaatttaaagcaaaatttaattacaaattttgtcaaatacaattataagcttattattttgaatatttcccttttttcactgcacgtatgtatctgaaaatctcttcttttttaaagaacaccaaataaatatgtaaatctatgaaaacattcagctccgaaacattttggatataataatcctggaagtgtaaatgtgaaattattaaatcccatttactttttcagtgaacttggaacacgtctactctctggaaagctttccaagcgaccgttatcagtttgcaatggctcatagctttccagttagaaaaatatatgataagataacgatttcagtctagttttcgccattaaaaagtatgttctaatatcgaatattgggcccagtcgatggtacattcagtgccctttaaaaactaacggaaactaactggatcttatctacttataagacttcagtccccataaaaaccctaacatgccgtgctggtcaagttcacatgtcaatgccagtggctcaatcgagtatgtattatcgatttaaattcagttttaagtgagtcaacttctatggtctatcgattttttaatcgcactgcacttccgaactgcttaaattatttgcaggtaaacacaggtgtacttgctcataagtatgtcagctgtctgtcagaggcttctgtgagaaaattacatatgtatgtgtgcatatttgcaatgtctttttttttaaattcatatatagatttttatgaattgtgttattgttcataaatttaaatatctctcaaggctagggaactcaatattactacaaatatattattatatacatatatg

SEQ ID NO: 20180 - DNA, 996 bp, DROSOPHILA
tgcactgccgggtcggtcaaattaaagcgagcgatactctgacatccaagcgagactgcgaacagcaaaatgtcgaatagggaactgcaactgaattcgggcatgaagtgcgccaagtacatgctcatcatcgtgagcttcatgtttgcgctgaccgccatcctcctgattatggttggaactacgatccagaccatcttcggcgacttcagcctcttcatcgatggacacttctcgtcgccaccggcactcctcattgccatcggattcattctgatcgcagtggccgcactgggggcctatggagccgtcaaggagagtgtgatggtcattaatctgtacggagtgtgccttttcctggtgttcatcctcgaggtttctgccgccatcgccgcctttgtgatgcaatcgcaggtgaggggcatgctgatccgaaccatgaaccaggccctggctgagtatgaacacgatccctacgtggaatctggagtggacttcatgcaatctatgctagagtgttgcggagttaatgagccggaggactggaaggactacctatccgccaatgtgaacttcactctgggagtggatgacgtggtggtgcccaactcatgctgcggcaaccaaccaacaagtctgaacgactccacccagatgacctgtatggagacctacgactacggctgcttccgcaagatgaacttcattgtgtcgcagagcgccatgctgattgccaccggagccaccactgtggcctttgtccagcttctcggcgtgctctgcgcctttatgctggccaagacgctgcgccgcaacaagtccatccgcgaggcacgccgctggcagctgcagcagagcctcggcgtcctcatctccggcggaaagatggcaccgccccagaattccgctgtcaccggctatcagcagttggataacggagagcagggctcccacgaaccctacacctacacgccccagagccccagcgttaactaa

SEQ ID NO: 20181 - protein, 308 aa, DROSOPHILA
MSNRELQLNSGMKCAKYMLIIVSFMFALTAILLIMVGTTIQTIFGDFSLFIDGHFSSPPALLIAIGFILIAVAALGAYGAVKESVMVINLYGVCLFLVFILEVSAAIAAFVMQSQVRGMLIRTMNQALAEYEHDPYVESGVDFMQSMLECCGVNEPEDWKDYLSANVNFTLGVDDVVVPNSCCGNQPTSLNDSTQMTCMETYDYGCFRKMNFIVSQSAMLIATGATTVAFVQLLGVLCAFMLAKTLRRNKSIREARRWQLQQSLGVLISGGKMAPPQNSAVTGYQQLDNGEQGSHEPYTYTPQSPSVN

SEQ ID NO: 20182 - DNA, 6238 bp, DROSOPHILA
aataattcgataattctattacagcgaaacctatggacggtgcctaattctggacggaatcattcagtgcacggccagggatgagttctcgtaccaggagatgatatctttcctgccgctctgcgcccatcccaatcccaaaaaggtcctgatcgtgggcggtggcgatggcggcgttgctcgcgaggtggtaaagcatccactggtcgaggaagtgcatcaggtggaaatcgacgaccgtgtcgtcgagctgtccaagcaatatctcccagcgatggcctgtggtttcgccaacgagaagttgaagcttaccattggcgatggattcgactatatgaagaaacacaagaacgaatttgatgtcatcatcaccgacagctcggatcccattggtccggcagtgagcctgtttcaggaaagctactacgagctaatgaaacacgcgctgaaggatgacggaatcgtgtgctcccagggcggtagcttctggctggacctggactacatcaagaagaccatgtccggctgcaaggagcactttgctaaggtggcctatgccgtcacctccgttccgtcctatccctgcggccacattggcttcgtcatgggctccctgaacaaaaaccaggacttcgctactcccaagcttggaaagtccgaaatcgattctatagacctaaggtactactcctccgaggttcactccgccgcctttgccttgcctcgatgggtgcagaagcacttttacgaatgaccaggttgcggaaagattcgtgtgtatctgtttgttaaaaataaatatgataataatatgacttgtttatcatcgcttcttaaattcttggatattttcaacaaatgctgactcttgcaatgattcatttttagtcgaatttttgtagcctgagtattttccttccaatccgactaccatctttcagttattttactgttgaaaatagaacaaattgtaatgtttattacgtaatgatatatacagttggctctatttaatttttgtatttgtaagtggatgctgggttaacataatgagacttattgcaatattttacacgaccgaatgttactctcatttatatatcgcatatattgcaaaactttgaaaggaagcgtttcttatatgcaaaaatgaccttaactgcatgtgaataattaactaaaaactgatattcaatttcaataacttaatagaaattaaatcttcaacctgtttaatgactaattaaatattgttatagttaggaaacgcaattgatacataattacaaaattagatgtaaaatatgtacaatcatttaatattggtttttattttctcgcctattctaaagttaattatcatttcttttgtgtcggatagattttggtgtctaatgtgcgtgtttttatgtgtaataaatataatgtatgtgcattgcgattttggtagccgagctccagttttcgaaaaagtcgaatcattttgtgtccaattgagaactatttcacatttttcgaaatagatggataaactaattattgtgtgtgtacgaatactccactcctttgactgggtaaatttgaataaacctataaaaattcctaattcaagtataataattttgtctaaataaatcaatttgtaaatgtgtattccaaaaaaagaatcacgagcagttggaaaaaaattaataataatggttttgaaaaccggagcttgactgtgtataatttgttatgcgattgattttgtatagggaatttcatgtcttcgcgattacatttgttatagcgtgttttatattatcaatataataaaatagggtaggggttttttcttcatgaatggccaacacataacacatctatgaatatcgttcatgtttgctttgctttacgttaaagggaggtactaatttgttaacaatttctatataagtcaaacccgaaccgagtccgctgcctgaaacttaatgtttttctgtttagagtgccagattatttcgacgaccattgaccttattgactaaattgcagatttttaaggctggtcctagcttcaggcccatgtacttcatcatcatctctgaatttagcaataataaagctttaccatcgatttcctacagacgaaaattagataagttactttatttaaggtaattggtaatagctactacttacgtgctttcggaagagatcaccatgaactgcaagggagttgtcgttgctctcgatgtactggatcacctcttcgatggtccagtcgatcggctgcgaccgcagatgtgagtttgccaaagcagaagtgggcgtgctcacgggtgaggtaatcgcggtgtagctcggagaagctcccgcagttgccgctgctccagccggcgcggtggccgccttagccgctgtaactccacctgcagccagtgcagtggacgaggctgactggcagcccgtgaacggcgtggacacggatgtcggcaacgaggcgcttgacgagagcgtcgtcggactcttgtagtagctattcgagggctttacattggcctgctctggatgaacttctgccacaagaggtgccaggtatttgccaattgtgctggtgttcgccgatcctccggctaggctcgtgctggacgacgttgacgagctgctgcaatggctggtagatacgtgcgtggtctggctcgtatcctggtttccgtttgtcgcagagctattcgtattcgtgtttgcgtggtgttggaagcgtactttgcgcagagcctgcgttgtggaggaagtctgcgcgttcgctccgttgggctccgatttgatgaccaccttgttgctggacttgctggcactgttgttgttattgttgagactgtgattgctgttttgctggcttgcaggctccttgccattgttcgtcgaagttttcgacttggactccactggcgatttgacagccaattcctgcttgataatcttctcagagggtgatgtcgttgccgagttggattgacggtttcgcttgtcggcgagcactggcgaggaaggcggtgtggctgactgagtcagttgacgcttccgactattggcgcacttcttgcactcctccgtctcgtggaccaaggaaatgagattcgcacatgcccggcatgtagtgcacagcgtttcgatgaattgggcgaggctttcgtcatccttcattcgcattggcgatggtatttttacctttaagaaacgaagagtatattttaaacatgcttttcattgaatttaattgatcttgaactcactgtgaaatttttccccgctgccgtcacgatatgaacatctccttccagggcaaacagcaactttgagagctgttgcgtatccgtgctggcagctaaaacctcctgcaggcaaagcttggccagcgtttggtaggtgggtcccgtcaccatgcagggcagtttggaattgttgatgaacggaccgcccttgcagttcggatggaagtgggctgtggcaggggaagcgggaaccatagcctcggactcagctacaacagtgtagcggggtcgagggcatcgctgtttgctagagctggagtccatgcgcgatttatggcccggtggctgcatgggatgacaacttctagcgcaccagccggcgggaaaaatgtcacgcgatcggtaattgcaccagtagtcgaatgcccctcgccaaccatcgaatgttacatggatctgatcatccttgattgcatctactgttgcacagcagatgagctgcgggttcttcttgtcgacagcctcgagtttctggcccaccttgaacaggttttcttctggctctggcggctctggctggaagatctcttctggcgccaccatggcattgttgaggatcttgcacagatagccgggccagctggatgcgttcatgcggaatcccagaggcggctgcagcatgccaccgttcttttcacagtgtccaatagcatggatctccgtagaatcgaccagccgccaaaagtcattctgggagtcacttccatccaggcgtagccgcagtctggagccaagcactccgaccacggtggcaatgcaggtggaagtgacgttgcgcggatccaaagcctccagcttcattccgattttaaaatcattgttgggaggattctgagcctgtttgaaacattttgcaggagcagcttcgctacccgtttcctggaaaccacaaaaagtatgagattgggggttaaagcattatcccagcttgacttacctctagataggcatcccagtcgaagacgtggaagctctcgtattgaaagggccccgttggtgcgggcgctccactggccagcaacttgcgctcgctttccgccagacccttgcccgatgccgatccgccgctgtgcctggtcgagcagttcttcttctggtgcttgttcatgcacatgatcgagcagaactccttgttgggcgccccatcgcggatgacgttgtcgcactgggtgcacgcccccttgctgtacgccttgcggaactcggcaatgcatgtttccgagcagaactccttcttgccggtctgcgtgggcaggacgtactgcagcggtagcttgccctcgccgcaccaggtgcatgtggctcgtttggccggtctacctcgttgccgttgcgtggacgcgggcgatgttgtacttccaggggatgcggatgtggatgtggaggaggcggatgcggatgcggaggaggtggcattcgtactggcccctggcgcagcagaattgctcccgctactggtactgctatcacgtccgcccgacatggtttctcgcgtggctgtcctagtagtcgcacttgctgattcgcgccggcaagccccttggcatctcaggcgatttcgatttcgtgtgttccgatccggcggtcaaatcgcattgcggctgccttgaatcattagccaccaatagcaagttttgttttgcagcactaactttccgatttctttcgatttggcctggcgaaattttgcggcgttcttgaggtcacgtaataacaaattggtggccaaatcgcatcgcatcacccaacgaaaacaaacgcgagccgcacaattagtttctggttcaccaaatatcgagctttatatttagagcgctgcgcggatcttgttactcggtttcaatccgaaattagatgattttgagtcgcttaaactccaaaatgttagactttttttacttttacgctcggttccgccatatttgtttttctagtggtgacattcagatctttgcgcatatcgatagttgcttacctgtgacagctcacgaagcgatgaaaataatcaactaatgtgactaatcgaaaaatgttatcgaagcaactaaatgcaattttaaaataacgttaaatgggaaatcacataactgacaataaatagtcaatttaaagagcaaagtagataatgctcaatacttttaccacaatgttgtatttaatttaactgctaatataaataaatatttgtcatttttaaaaacgtaagcccttattatagaaaagaaatttggatttcctgtcaaaaattgtacagcgtaatgtaaaaactatttagtctagtaaactgaaccgttttggttttgagaatataaacttataaccgaattcctacgttttaatatcagctcatagtatttcccagtaaaactaacaaaacgctcgtgaatcaaatttgcacagcatcaagtgggcgtaaattggtgaataatataaaaagtctgtaaatttgaaagcgcacggcacacatcagccgaaaatcaaaaaaaaaaaaatgggttagtcaacaaaactaatatctaccaatttatagaacgctctggtatgtaaacatttccattgaactgggagaaattcgcaataaagcggttcagatagtggaaaatgggttgaacaagggaaagttttgatattttaataaaatcatgtataacataggaaagcggttttcgtaattaccaaaaccatgaaacaatcaatactgaaatacaaaaatatgttactatcaaaataatggcttatacgattggcctaaggctttattaggtcaagcaaattaatattacttgcttacctttcgttaattttatttgctgaagagcgtcgcaaatgtcaagaagtctagcaaattactagaaattacataagtgtgtttcgtttgcagtaaattcagtaagtcgaaagcggctcaaagatgaaac

SEQ ID NO: 20183 - DNA, 4054 bp, DROSOPHILA
ggcggaaccgagcgtaaaagtaaaaaaagtctaacattttggagtttaagcgactcaaaatcatctaatttcggattgaaaccgagtaacaagatccgcgcagcgctctaaatataaagctcgatatttggtgaaccagaaactaattgtgcggctcgcgtttgttttcgttgggtgatgcgatgcgatttggccaccaatttgttattacgtgacctcaagaacgccgcaaaatttcgccaggccaaatcgaaagaaatcggaaagttagtgctgcaaaacaaaacttgctattggtggctaatgattcaaggcagccgcaatgcgatttgaccgccggatcggaacacacgaaatcgaaatcgcctgagatgccaaggggcttgccggcgcgaatcagcaagtgcgactactaggacagccacgcgagaaaccatgtcgggcggacgtgatagcagtaccagtagcgggagcaattctgctgcgccaggggccagtacgaatgccacctcctccgcatccgcatccgcctcctccacatccacatccgcatcccctggaagtacaacatcgcccgcgtccacgcaacggcaacgaggtagaccggccaaacgagccacatgcacctggtgcggcgagggcaagctaccgctgcagtacgtcctgcccacgcagaccggcaagaaggagttctgctcggaaacatgcattgccgagttccgcaaggcgtacagcaagggggcgtgcacccagtgcgacaacgtcatccgcgatggggcgcccaacaaggagttctgctcgatcatgtgcatgaacaagcaccagaagaagaactgctcgaccaggcacagcggcggatcggcatcgggcaagggtctggcggaaagcgagcgcaagttgctggccagtggagcgcccgcaccaacggggccctttcaatacgagagcttccacgtcttcgactgggatgcctatctagaggaaacgggtagcgaagctgctcctgcaaaatgtttcaaacaggctcagaatcctcccaacaatgattttaaaatcggaatgaagctggaggctttggatccgcgcaacgtcacttccacctgcattgccaccgtggtcggagtgcttggctccagactgcggctacgcctggatggaagtgactcccagaatgacttttggcggctggtcgattctacggagatccatgctattggacactgtgaaaagaacggtggcatgctgcagccgcctctgggattccgcatgaacgcatccagctggcccggctatctgtgcaagatcctcaacaatgccatggtggcgccagaagagatcttccagccagagccgccagagccagaagaaaacctgttcaaggtgggccagaaactcgaggctgtcgacaagaagaacccgcagctcatctgctgtgcaacagtagatgcaatcaaggatgatcagatccatgtaacattcgatggttggcgaggggcattcgactactggtgcaattaccgatcgcgtgacatttttcccgccggctggtgcgctagaagttgtcatcccatgcagccaccgggccataaatcgcgcatggactccagctctagcaaacagcgatgccctcgaccccgctacactgttgtagctgagtccgaggctatggttcccgcttcccctgccacagcccacttccatccgaactgcaagggcggtccgttcatcaacaattccaaactgccctgcatggtgacgggacccacctaccaaacgctggccaagctttgcctgcaggaggttttagctgccagcacggatacgcaacagctctcaaagttgctgtttgccctggaaggagatgttcatatcgtgacggcagcggggaaaaatttcacagtaaaaataccatcgccaatgcgaatgaaggatgacgaaagcctcgcccaattcatcgaaacgctgtgcactacatgccgggcatgtgcgaatctcatttccttggtccacgagacggaggagtgcaagaagtgcgccaatagtcggaagcgtcaactgactcagtcagccacaccgccttcctcgccagtgctcgccgacaagcgaaaccgtcaatccaactcggcaacgacatcaccctctgagaagattatcaagcaggaattggctgtcaaatcgccagtggagtccaagtcgaaaacttcgacgaacaatggcaaggagcctgcaagccagcaaaacagcaatcacagtctcaacaataacaacaacagtgccagcaagtccagcaacaaggtggtcatcaaatcggagcccaacggagcgaacgcgcagacttcctccacaacgcaggctctgcgcaaagtacgcttccaacaccacgcaaacacgaatacgaatagctctgcgacaaacggaaaccaggatacgagccagaccacgcacgtatctaccagccattgcagcagctcgtcaacgtcgtccagcacgagcctagccggaggatcggcgaacaccagcacaattggcaaatacctggcacctcttgtggcagaagttcatccagagcaggccaatgtaaagccctcgaatagctactacaagagtccgacgacgctctcgtcaagcgcctcgttgccgacatccgtgtccacgccgttcacgggctgccagtcagcctcgtccactgcactggctgcaggtggagttacagcggctaaggcggccaccgcgccggctggagcagcggcaactgcgggagcttctccgagctacaccgcgattacctcacccgtgagcacgcccacttctgctttggcaaactcacatctgcggtcgcagccgatcgactggaccatcgaagaggtgatccagtacatcgagagcaacgacaactcccttgcagttcatggtgatctcttccgaaagcacgtaatcgatggtaaagctttattattgctaaattcagagatgatgatgaagtacatgggcctgaagctaggaccagccttaaaaatctgcaatttagtcaataaggtcaatggtcgtcgaaataatctggcactctaaacagaaaaacattaagtttcaggcagcggactcggttcgggtttgacttatatagaaattgttaacaaattagtacctccctttaacgtaaagcaaagcaaacatgaacgatattcatagatgtgttatgtgttggccattcatgaagaaaaaacccctaccctattttattatattgataatataaaacacgctataacaaatgtaatcgcgaagacatgaaattccctatacaaaatcaatcgcataacaaattatacacagtcaagctccggttttcaaaaccattattattaatttttttccaactgctcgtgattctttttttggaatacacatttacaaattgatttatttagacaaaattattatacttgaattaggaatttttataggtttattcaaatttacccagtcaaaggagtggagtattcgtacacacacaataattagtttatccatctatttcgaaaaatgtgaaatagttctcaattggacacaaaatgattcgactttttcgaaaactggagctcggctaccaaaatcgcaatgcacatacattatatttattacacataaaaacacgcacattagacaccaaaatctatccgacacaaaagaaatgataattaactttagaataggcgagaaaataaaaaccaatattaaatgattgtacatattttacatctaattttgtaattatgtatcaattgcgtttcctaactataacaatatttaattagtcattaaacaggttgaagatttaatttctattaagttattgaaattgaatatcagtttttagttaattattcacatgcagttaaggtcatttttgcatataagaaacgcttcctttcaaagttttgcaatatatgcgatatataaatgagagtaacattcggtcgtgtaaaatattgcaataagtctcattatgttaacccagcatccacttacaaatacaaaaattaaatagagccaa

SEQ ID NO: 20184 - protein, 877 aa, DROSOPHILA
MSGGRDSSTSSGSNSAAPGASTNATSSASASASSTSTSASPGSTTSPASTQRQRGRPAKRATCTWCGEGKLPLQYVLPTQTGKKEFCSETCIAEFRKAYSKGACTQCDNVIRDGAPNKEFCSIMCMNKHQKKNCSTRHSGGSASGKGLAESERKLLASGAPAPTGPFQYESFHVFDWDAYLEETGSEAAPAKCFKQAQNPPNNDFKIGMKLEALDPRNVTSTCIATVVGVLGSRLRLRLDGSDSQNDFWRLVDSTEIHAIGHCEKNGGMLQPPLGFRMNASSWPGYLCKILNNAMVAPEEIFQPEPPEPEENLFKVGQKLEAVDKKNPQLICCATVDAIKDDQIHVTFDGWRGAFDYWCNYRSRDIFPAGWCARSCHPMQPPGHKSRMDSSSSKQRCPRPRYTVVAESEAMVPASPATAHFHPNCKGGPFINNSKLPCMVTGPTYQTLAKLCLQEVLAASTDTQQLSKLLFALEGDVHIVTAAGKNFTVKIPSPMRMKDDESLAQFIETLCTTCRACANLISLVHETEECKKCANSRKRQLTQSATPPSSPVLADKRNRQSNSATTSPSEKIIKQELAVKSPVESKSKTSTNNGKEPASQQNSNHSLNNNNNSASKSSNKVVIKSEPNGANAQTSSTTQALRKVRFQHHANTNTNSSATNGNQDTSQTTHVSTSHCSSSSTSSSTSLAGGSANTSTIGKYLAPLVAEVHPEQANVKPSNSYYKSPTTLSSSASLPTSVSTPFTGCQSASSTALAAGGVTAAKAATAPAGAAATAGASPSYTAITSPVSTPTSALANSHLRSQPIDWTIEEVIQYIESNDNSLAVHGDLFRKHVIDGKALLLLNSEMMMKYMGLKLGPALKICNLVNKVNGRRNNLAL

SEQ ID NO: 20185 - DNA, 3940 bp, DROSOPHILA
tagttttttgtaatcaggtagttggaggaataagttcttgctatatttctatttttaattttcttgtagtctctctggaacctccaatcgcgtttttaccggcgttgtcctgaaacatgccaacggtattcgaaaatttacggacacagcggacgtatactttggcgatctgctgccagaacaaattcagagctatgtggactctggagatcccctgtaagcagctaatatggaagatataatgaccattagttttgactttaaaattgcagagataaagctggtgcttatggcgttcaaggacctgcaggcgcgctcatccaccgaatcgatggggacttttactgtgtcatgggtctgcccctgcatcgactgtgctgtgaactaaataagcttttcctagaggatctatcctcgtaagagctggtgtcatcgtcgccgtcatcatcacagcggaactatccgaggtttatgcggcaacaagcgtcagaggctacacacactccagcgattttaatcttggttgataagcggctatatgactccgacgttgagggcctgtttgctcatttttagcccaagtcaattaaaaataaaaaatcatataacagcgagcagaattgtagtacattctgtacgagagaacagggaacagtggtcatattgctttgaaatttttcgaaaaatttaaactccgtattgacctagattttatagctttgtattagttgacaaatagtacataatccatatttatttgaattgaagcaatctgtaaataactggttattttttaactttactttcactttttacctaaagtatttacaacattttcattgaaactactgttcccactgagagaatctcacttttggcgtgccccaatcatttaaaaatgagcaacttttgttttaaagataacatggttgtacgacacagtgaagtatctgcgagcagccccagtagtcaaacaactgttacgccaatcggatccatcatgacccagatccccgagagctgttataagatgtggggtggtaggttcaccgaggggccgcatgaggctctccattcgctgaataacagcctgccctacgattctcgcctctatgcggatgatttggacgccagcaaggcgtatgcagaggcactccatcgagctggtctcatcaactcagccgaggcggataagttggtaaagaatctggagctgttgcgattcgattggatcgagggaactgtgaagattctacccggtgacgaggatgtgcacacggtgaacgagcgattgctggtggagattaccggcgaactgggccagcggcttcacacgggcagaagcagaaatgaccaggtggtcacggacatgaagctatggcttcgcaaggccattcgtgagaccttgggccggctgagtggcatcattgaaactgccaccaggcaggcggaactccacctgggcgtcctcatgccaggatacacgcatctgcagcgggcccagaccgttcagttctcccactggctgctctcgcacgcgtttgcattaagggaagatggccagcggctgttggagctaagggatcgggcgaatgtcctgccccttggaagtggcgctctggcgggaaatccccttggcatcgatcgtttgtggctggccgagaggctgggattctcgggtgtcacagccaacagcatgcacgccgtgggagatcgagattttgtaggtgagtcgcctggtgggagaaacgcccacttaagtcatttcaaagtcgttgataatggattttgcttccattgatttcttatcagcgtaccgctccatttttgattattcaggggagacactgataagtggggctcttttaattgcccagattaaacaatagaaggaaagttgattacacattttggtttttggtttttttcctacaaaacagaatattgttttatgaaaacattttttttttttaaataattaaattgccttgcaatggaacttgtaccttttatacatatgctttgatatatattctttaattagaatttggtccttatcaaccttctagttgacttcatctactgctgctctatggtgagcctgcatctgtcccgattggcggaggatttgatcatctacagtaccaaggagttcgacttcatcaaactggccgatggcttttccagtggcagcagcctgatgcctcagaaaaggaatccggacagcttggagctgattcgcggcatggccggtgtgatcaccgccaatctgacgggcataatgatgaccattaagggcactccgtccacctacaacaaggacttgcagtacgacaagcaattctgcttccagtccttcgacaagctgtcccaagtgctcgaggttaccgatggtgtcctacagacgattcaggtcaagcaggaatcaatggaggcggcacttagcacagacatgctggccactgactgggtaagttacacctaagagctataattaattaaaatacattacattcccttcttacaggcctactatctggtgaagaagggggttccattccgccaggcgcatcacattatcggtcgcgtggtctcggaggccgaaaagcgcggtgtggacatcactgatttgccgctgggagatctccagaaattcagtcctttatttggatcggatatcgttgcagtggcggactactccaacaatgtccagcaatataatgcgattggtggaaccgccagtagcagcatcgtggaacaactgcgtttgctcaagaagtgcgcaagggatttggccaaacagtcgtaggttcctatgactatttctgtggtaattcttggctatattgaatcgcattgttttacttatcaaaaatatatgttatatgttagtaaagaagaccatacttctgactgaaatcaatataacttctgcaacggaataatatattgtagtatcctttataaaatacttctaccataccttttagcaggtagtctaacaccactgcgtttatttcgttttaatatattttaagttaacaaattaaaaagttacatatacaaggggatcttttaaggaatgctatactgtataaatatggcttcgatcgatgtcgccgcttagttaacgctggggctctggggcgtgtaggtgtagggttcgtgggagccctgctctccgttatccaactgctgatagccggtgacagcggaattctggggcggtgccatctttccgccggagatgaggacgccgaggctctgctgcagctgccagcggcgtgcctcgcggatggacttgttgcggcgcagcgtcttggccagcataaaggcgcagagcacgccgagaagctggacaaaggccacagtggtggctccggtggcaatcagcatggcgctctgcgacacaatgaagttcatcttgcggaagcagccgtagtcgtaggtctccatacaggtcatctgggtggagtcgttcagacttgttggttggttgccgcagcatgagttgggcaccaccacgtcatccactcccagagtgaagttcacattggcggataggtagtccttccagtcctccggctcattaactccgcaacactctagctgtagtcaagaattgagtgaaattatattaagattttctttctttttatttccttgtatatcccatatttaaagattttgcacataccatagattgcatgaagtccactccagattccacgtagggatcgtgttcatactcagccagggcctggttcatggttcggatcagcatgcccctcacctgcgattgcatcacaaaggcggcgatggcggcagaaacctcgaggatgaacaccaggaaaaggcacactccgtactgcaagcaagtgtcatcatattagcacagcacccattaaaatctcacttttaattcagttattcagttaat

SEQ ID NO: 20186 - DNA, 1469 bp, DROSOPHILA
atgacccagatccccgagagctgttataagatgtggggtggtaggttcaccgaggggccgcatgaggctctccattcgctgaataacagcctgccctacgattctcgcctctatgcggatgatttggacgccagcaaggcgtatgcagaggcactccatcgagctggtctcatcaactcagccgaggcggataagttggtaaagaatctggagctgttgcgattcgattggatcgagggaactgtgaagattctacccggtgacgaggatgtgcacacggtgaacgagcgattgctggtggagattaccggcgaactgggccagcggcttcacacgggcagaagcagaaatgaccaggtggtcacggacatgaagctatggcttcgcaaggccattcgtgagaccttgggccggctgagtggcatcattgaaactgccaccaggcaggcggaactccacctgggcgtcctcatgccaggatacacgcatctgcagcgggcccagaccgttcagttctcccactggctgctctcgcacgctggcgctctggcgggaaatccccttggcatcgatcgtttgtggctggccgagaggctgggattctcgggtgtcacagccaacagcatgcacgccgtgggagatcgagattttgtagttgacttcatctactgctgctctatggtgagcctgcatctgtcccgattggcggaggatttgatcatctacagtaccaaggagttcgacttcatcaaactggccgatggcttttccagtggcagcagcctgatgcctcagaaaaggaatccggacagcttggagctgattcgcggcatggccggtgtgatcaccgccaatctgacgggcataatgatgaccattaagggcactccgtccacctacaacaaggacttgcagtacgacaagcaattctgcttccagtccttcgacaagctgtcccaagtgctcgaggttaccgatggtgtcctacagacgattcaggtcaagcaggaatcaatggaggcggcacttagcacagacatgctggccactgactgggcctactatctggtgaagaagggggttccattccgccaggcgcatcacattatcggtcgcgtggtctcggaggccgaaaagcgcggtgtggacatcactgatttgccgctgggagatctccagaaattcagtcctttatttggatcggatatcgttgcagtggcggactactccaacaatgtccagcaatataatgcgattggtggaaccgccagtagcagcatcgtggaacaactgcgtttgctcaagaagtgcgcaagggatttggccaaacagtcgtaggttcctatgactatttctgtggtaattcttggctatattgaatcgcattgttttacttatcaaaaatatatgttatatgttagtaaagaagaccatacttctgactgaaatcaatataacttctgcaacgg

SEQ ID NO: 20187 - protein, 445 aa, DROSOPHILA
MTQIPESCYKMWGGRFTEGPHEALHSLNNSLPYDSRLYADDLDASKAYAEALHRAGLINSAEADKLVKNLELLRFDWIEGTVKILPGDEDVHTVNERLLVEITGELGQRLHTGRSRNDQVVTDMKLWLRKAIRETLGRLSGIIETATRQAELHLGVLMPGYTHLQRAQTVQFSHWLLSHAGALAGNPLGIDRLWLAERLGFSGVTANSMHAVGDRDFVVDFIYCCSMVSLHLSRLAEDLIIYSTKEFDFIKLADGFSSGSSLMPQKRNPDSLELIRGMAGVITANLTGIMMTIKGTPSTYNKDLQYDKQFCFQSFDKLSQVLEVTDGVLQTIQVKQESMEAALSTDMLATDWAYYLVKKGVPFRQAHHIIGRVVSEAEKRGVDITDLPLGDLQKFSPLFGSDIVAVADYSNNVQQYNAIGGTASSSIVEQLRLLKKCARDLAKQS

SEQ ID NO: 20188 - DNA, 3465 bp, DROSOPHILA
atgcgggtaagtaagctagaggatcagccagcacacaagattctcaccataccattctacccatttcagtgatgcaaagaacatggccgtggacgttaggaacattttagtgaaaattttgtccactaagggtaacatgagcgaggctgacgccgtgcagtatatcaagaagatggaggctcagaagcgctactcggccgatgtctggagctaatctgatccaaaagccaaccgatgataagcgtaaagttttctagttcactaagctatgtaagcgtaatttttggtttgggaacttcatgctgcagttcaacaaacgaatgagtaacgattaagtgtatgtctagtgtaattgactctagcttgaccctggactgtttgatgggacaaactgagatggaatctaagtaatgaaatgagcggagtaacaagttaacgattaagtagctgtgtacgagtgcagattagttaaagtcctttatacgagcaatttacttcgtattctcttggtgatttcaatacaaaaacgaaacatgttgtgcaattaaacaatgacattgcaattgtatttttataaataaagaaaagtacggttgacttctataataatgtgtgtttgatgttttcgaaataggataaggataagtagggaacattccaattgaaatttaatactttttcataagaaatagatttttatatatataaatggagattttatttgtctgaaaggaaatataagtgctgcatacgttttgtctgaataataattaaagttcctgtcacaaatttagcgcaattgtaaagttacaacactccacatagctggtagtttgtttttatataatataaatattcttttggcaacgtttttgaaactttaaaccagattatttgtatttacaaatgaacgaaatgttaaatcattaaatacatatttgtaaaaatcctaggtagatatattcaaaaggtacatatatagtagtagtgcaattgtacttcaatccaagacaccagcgcgttcaaagtgcggtagcgtgtagcgcagcgtatccgccagtcggcgggactggaacatctgacgcaccttctgcttggcaaaatcggcgtccttgaagttctccaggttgttgtcggcggtctgggccttgtcctggctaacagtggggaaaatgccgtagctggcaaagaatccgtaggactcgcgacggtggacctcctccaggatttgctcgtagctgggcaccgggatgcccatgtccaggtcgagcagcgttttggccagccgcgcgtggtatgtgcgcagcagctgggtccgccgatgacgcagcacttccaatgtcaggctagtgtagaagaaatagttgaggtcgatgcccggactaccccacacgctcaactggaagtcgatgaggatgaggtcctgcggacgctgtgctccgtcgtacttgaacagcatattgttcacccacaggtcaccgtgattgagtaccttcacctccttttcctgcggtgcctggctgcgttccaagttggcccgctgattttgcatgtacttgccgatcttctcggcgatcttttcgaagccgggccacgtgctcaccaggtgatgcaactccttgccattgcccgagaagaactgcatcagtagtccatcgtctttggctaagcccctcggcgatagcattccgtcgccatatgcatcgaagatgtgcggatcctggccaaatcgaatcaattccataaagtttcaccattgtactcattttataaatgaaatacttaccaccacagccaaggccatcgaagtggcatgaaactccgccaagcgctccatgacaagctgacaatgctcctcgttcagtcccaactcgcgcgaagccatcacgaagcccttctccgccagatcttcgaacacaagggagttctccggctgttttaggtagtgataaagtctttgcaagaataaggatataggttaaaccacagtacgttgagaataatttgtctatgtcacattacgatgtaacagtgcgtatgagtaatatgggattaagtagtttgatgagtaatgagcaatttaaggccggctttgagactttttgagactcacttaggtccgaatctccggttgcactgcatcaagagctctagccgcggtagcacttcgtaataggtgatcttctccttgaggtaaacttgcaggtcatcaatgaactccaccgagtccaggtggggaatgctcttcacaataaacgccatgtgctgctccggatgatcggggcgcttaaacgaaaccttcactctgtagatttgactgcagtagttctcgcccgtgctgctgcccatccggatgtgaatggagagcagctgcaccctggctgttcgcagagctgtctccagcacctcctcgaagaagggcacgtccaggtggctgggtggagcaaccacgtccgcgtcgaacacaatgctacacatcttgggatcgtttgaaaagtggctaccaggcggtgctcaatttatatacgtgtcgctatgatcttgcccagctgaatccggcggcgcaattaattatagttatgtgtatccagttatgtgtagtattatactttcagttatatatagactttaatagacgacaacgagatgtctaatttttcgatatttgtaaaacacgcaacgcggagacgtcgacctttttaggcgcatttaactagtaatttgacttcctgttttgaactctgccgacaatattcagtttgaatatttttcgaattctgctggatgaattccacttgcagcgattggcagctcattatcttatcaagttttgattcgaatttgcattaatccaacgagtttctgataagggaacgctttcagtcaagtgtcaatccgaagctaattatatgcgaacgcttcttaaatatattatatttgtacgtaatcgtttatattaaatctgtttggcatgattacattcaatatcttaccttaaaggtaatatgattaggccatatatcgcactaaacacaaggtttagatgatattattaagatggctactatcctcctacattttaggtgatgggtattataaaaagaatatacctcattcggtactttatatatgcaacctgttgtataaaagctatagctttaataaacacattagacagaagataacactattctacttttttttataagttgacctaatgatagagccctaataaaataatcccagactgcagaaactaagtgactgagaatgtttgaaggaaacaaccatgaaatcatcaaattctgaatgcacgtgatcgctaagggtattattatctaatacctacgtggttattcaagatgattgtaagctttataagaaatgcgtaatatatactgtgtaatttattaattcaagctcaagctgactgtgcttccataaggtttccaaactcaatcgttt

SEQ ID NO: 20189 - DNA, 1178 bp, DROSOPHILA
tgttcgacgcggacgtggttgctccacccagccacctggacgtgcccttcttcgaggaggtgctggagacagctctgcgaacagccagggtgcagctgctctccattcacatccggatgggcagcagcacgggcgagaactactgcagtcaaatctacagagtgaaggtttcgtttaagcgccccgatcatccggagcagcacatggcgtttattgtgaagagcattccccacctggactcggtggagttcattgatgacctgcaatgcaaccggagattcggacctaaactttatcactacctaaaacagccggagaactcccttgtgttcgaagatctggcggagaagggcttcgtgatggcttcgcgcgagttgggactgaacgaggagcattgtcagcttgtcatggagcgcttggcggagtttcatgccacttcgatggccttggctgtggtggatccgcacatcttcgatgcatatggcgacggaatgctatcgccgaggggcttagccaaagacgatggactactgatgcagttcttctcgggcaatggcaaggagttgcatcacctggtgagcacgtggcccggcttcgaaaagatcgccgagaagatcggcaagtacatgcaaaatcagcgggccaacttggaacgcagccaggcaccgcaggaaaaggaggtgaaggtactcaatcacggtgacctgtgggtgaacaatatgctgttcaagtacgacggagcacagcgtccgcaggacctcatcctcatcgacttccagttgagcgtgtggggtagtccgggcatcgacctcaactatttcttctacactagcctgacattggaagtgctgcgtcatcggcggacccagctgctgcgcacataccacgcgcggctggccaaaacgctgctcgacctggacatgggcatcccggtgcccagctacgagcaaatcctggaggaggtccaccgtcgcgagtcctacggattctttgccagctacggcattttccccactgttagccaggacaaggcccagaccgccgacaacaacctggagaacttcaaggacgccgattttgccaagcagaaggtgcgtcagatgttccagtcccgccgactggcggatacgctgcgctacacgctaccgcactttgaacgcgctggtgtcttggattga

SEQ ID NO: 20190 - protein, 353 aa, DROSOPHILA
MGSSTGENYCSQIYRVKVSFKRPDHPEQHMAFIVKSIPHLDSVEFIDDLQCNRRFGPKLYHYLKQPENSLVFEDLAEKGFVMASRELGLNEEHCQLVMERLAEFHATSMALAVVDPHIFDAYGDGMLSPRGLAKDDGLLMQFFSGNGKELHHLVSTWPGFEKIAEKIGKYMQNQRANLERSQAPQEKEVKVLNHGDLWVNNMLFKYDGAQRPQDLILIDFQLSVWGSPGIDLNYFFYTSLTLEVLRHRRTQLLRTYHARLAKTLLDLDMGIPVPSYEQILEEVHRRESYGFFASYGIFPTVSQDKAQTADNNLENFKDADFAKQKVRQMFQSRRLADTLRYTLPHFERAGVLD

SEQ ID NO: 20191 - DNA, 3459 bp, DROSOPHILA
aagtgtcaatccgaagctaattatatgcgaacgcttcttaaatatattatatttgtacgtaatcgtttatattaaatctgtttggcatgattacattcaatatcttaccttaaaggtaatatgattaggccatatatcgcactaaacacaaggtttagatgatattattaagatggctactatcctcctacattttaggtgatgggtattataaaaagaatatacctcattcggtactttatatatgcaacctgttgtataaaagctatagctttaataaacacattagacagaagataacactattctacttttttttataagttgacctaatgatagagccctaataaaataatcccagactgcagaaactaagtgactgagaatgtttgaaggaaacaaccatgaaatcatcaaattctgaatgcacgtgatcgctaagggtattattatctaatacctacgtggttattcaagatgattgtaagctttataagaaatgcgtaatatatactgtgtaatttattaattcaagctcaagctgactgtgcttccataaggtttccaaactcaatcgtttttatggttacttcggatctcgaaacctacaacccgaaatgtaaccatatatgtataagtccctgattcgattgcgtcaatgtgatcttatcttaatattttctcattctcaggcatcagaaatcagcgtacactcatagaataagtggtatacttaagcgactatgaattgaaaacataagtggttatgtgttgtgcaagcccctgaaaattgtctgataccatattcctgaaatctgaataaaaaatacatttcgttagtttgatttattgcattgaagtcaggtttggtactttaatcaatccaaaacatttacattctcaggccgaaagctaatatagctatatcaaggatgtgtgccttggaagagcctccatttatatcacagaaccccaaccattataatactcatgccacttttcagtagtccccgaagacgccaagtgaatcagctcgcttcagagcccacttttggtggtcgttcaggaacttttgcgagaagatggcatccatcttgcgctgcttgaaggcctcgtcctgcatgttctcaatgctgttgtcctgggccagctccttgggcatggtgatcatgggcaggaaggcgaacatgccgaaaagtccgtaggtttcgcggctgcgcagctcgtactgcagatcctcatagctgggaatgtcctcgaagcgggcgtactccagagcatccttgaaggatgcatagtacaccttgatgagctcctcgcggcgctcctgcagcaattgcagcttgatgctggtgttcaggaagaagttcagatcgcaggccggactgccatagaagctgagttggaagtccacgaagatggcacgcgtgggaacgtccggctgtgaagcgttatcgtatccgtacatgaagttattggtccacaaatccccgtggttgagcaccacgtagcgatcacccttcctcggcctgggcgcatccgcacacacgttccggaagttgtccataaggcgctgcaagtgcttgctaatcttctcgtagccggcccagctcgctgagctcttgatgaggcccttgaggaagccgccgaacatttgctcgaaggtgtcgctcttcatcaggatgtcctcgctgagcatgccacgcgtgtattgcttcacaatagcgggatcctgtggaattgcaaaaaggaagtcattacgaagttcgaggattctccagagtcatcactgctaccttcttggccagcaccatggaggtggcatggaactttcccagttgctgaagaatgagtgaggcgtggttccagtccaggcctttttcacgcgaggccaccttgaatccctctaccgtgaggtcactgaacacgatcgtttgcaccggagtcttcacagagtgatagtatctgatgtgagatagagatgctagtaagcactgtgtgcctttatccaaaactttcattaacttactttgctccgaatgtgtcgccacggctgaggatatccaatcgcggcaagacatcagtgtaggtctgcttctccttgatgaacacacagacatcctccagaaactgagtggcttcggtgatcggaatggtcttcacaattagcgaaagctgctccgtcaccggggattccccaccgtcggcccatctagcgaacgagactccgacacgatagatagccgagcaatagttgtcccccggattgctgccccacgcaaaattgatctccttcagggtcaccttcgactcccgcaaaccctcctccagggtctctgtgaagaagtgctcgttgagatactcgggcaccgagatattctgctcgttcttaatgaccaccatttcgaatctctaactaaagcgatacacctccgatcgaaaccttaacgcttgcctttcgtagccaactgattttgcggcctcgtagaactcagcgttttatatttgcttgcaatagtgttagtttttttgggaaatgtttatacgacaattccgagcttttcgtatgactgtggtgtcatcgtaaaaataaactaattaggtggtaaaaggtatagtgggtcgaatatgaattgaatttatattctagttctatttaaatataaaagtcgtctacaaaatatgtattggggctctttaaagtttcacttaaaataatctgttatatatttctttattaaattttacaatgttgtgcttcctaagccatacccttgtgcaatatctatagctatctattttttgtgacattttcttacttactttcttaaatttttacttacttacatatcaactgcgacccactgtttgcctcgagctttctaagagccaaaagtctcagtctagtgtctaactctatgcgttttgcatagtcatccacatccaacgaaatacactagcttgtgggttgatgaaaccctaattaatttttagctcttgttttcgttttgttttgatagcagcaacctgttgaacaaagtcattcgaccacgtcataggtgctctatggagagattgagattcgattcggctgatagttcggattgacaacaggcggtgcttcgctgctggaacaccgcccgtcagtgggtcaacagacgtggtatttgctccgggtgttatcaactctgcttgaggcatccgtatcggaatatacaattctagaatcatttaaacgtgccgtccatctcatatatacacgtgtattttttactcacggtgatgatagtgttaaacatcaacgggttcagggaaggatttggacagcgcgggggatttggaccagatttatataatcacctagtttctcacttagttctattagtattttctttgtatgatgattaacgcaaattctcatcaagttaaccaactcatttaggaattaacataaaataa

SEQ ID NO: 20192 - DNA, 1331 bp, DROSOPHILA
aaaggcaagcgttaaggtttcgatcggaggtgtatcgctttagttagagattcgaaatggtggtcattaagaacgagcagaatatctcggtgcccgagtatctcaacgagcacttcttcacagagaccctggaggagggtttgcgggagtcgaaggtgaccctgaaggagatcaattttgcgtggggcagcaatccgggggacaactattgctcggctatctatcgtgtcggagtctcgttcgctagatgggccgacggtggggaatccccggtgacggagcagctttcgctaattgtgaagaccattccgatcaccgaagccactcagtttctggaggatgtctgtgtgttcatcaaggagaagcagacctacactgatgtcttgccgcgattggatatcctcagccgtggcgacacattcggagcaaaatactatcactctgtgaagactccggtgcaaacgatcgtgttcagtgacctcacggtagagggattcaaggtggcctcgcgtgaaaaaggcctggactggaaccacgcctcactcattcttcagcaactgggaaagttccatgccacctccatggtgctggccaagaaggatcccgctattgtgaagcaatacacgcgtggcatgctcagcgaggacatcctgatgaagagcgacaccttcgagcaaatgttcggcggcttcctcaagggcctcatcaagagctcagcgagctgggccggctacgagaagattagcaagcacttgcagcgccttatggacaacttccggaacgtgtgtgcggatgcgcccaggccgaggaagggtgatcgctacgtggtgctcaaccacggggatttgtggaccaataacttcatgtacggatacgataacgcttcacagccggacgttcccacgcgtgccatcttcgtggacttccaactcagcttctatggcagtccggcctgcgatctgaacttcttcctgaacaccagcatcaagctgcaattgctgcaggagcgccgcgaggagctcatcaaggtgtactatgcatccttcaaggatgctctggagtacgcccgcttcgaggacattcccagctatgaggatctgcagtacgagctgcgcagccgcgaaacctacggacttttcggcatgttcgccttcctgcccatgatcaccatgcccaaggagctggcccaggacaacagcattgagaacatgcaggacgaggccttcaagcagcgcaagatggatgccatcttctcgcaaaagttcctgaacgaccaccaaaagtgggctctgaagcgagctgattcacttggcgtcttcggggactactga

SEQ ID NO: 20193 - protein, 424 aa, DROSOPHILA
MVVIKNEQNISVPEYLNEHFFTETLEEGLRESKVTLKEINFAWGSNPGDNYCSAIYRVGVSFARWADGGESPVTEQLSLIVKTIPITEATQFLEDVCVFIKEKQTYTDVLPRLDILSRGDTFGAKYYHSVKTPVQTIVFSDLTVEGFKVASREKGLDWNHASLILQQLGKFHATSMVLAKKDPAIVKQYTRGMLSEDILMKSDTFEQMFGGFLKGLIKSSASWAGYEKISKHLQRLMDNFRNVCADAPRPRKGDRYVVLNHGDLWTNNFMYGYDNASQPDVPTRAIFVDFQLSFYGSPACDLNFFLNTSIKLQLLQERREELIKVYYASFKDALEYARFEDIPSYEDLQYELRSRETYGLFGMFAFLPMITMPKELAQDNSIENMQDEAFKQRKMDAIFSQKFLNDHQKWALKRADSLGVFGDY

SEQ ID NO: 20194 - DNA, 4270 bp, DROSOPHILA
gccatacccttgtgcaatatctatagctatctattttttgtgacattttcttacttactttcttaaatttttacttacttacatatcaactgcgacccactgtttgcctcgagctttctaagagccaaaagtctcagtctagtgtctaactctatgcgttttgcatagtcatccacatccaacgaaatacactagcttgtgggttgatgaaaccctaattaatttttagctcttgttttcgttttgttttgatagcagcaacctgttgaacaaagtcattcgaccacgtcataggtgctctatggagagattgagattcgattcggctgatagttcggattgacaacaggcggtgcttcgctgctggaacaccgcccgtcagtgggtcaacagacgtggtatttgctccgggtgttatcaactctgcttgaggcatccgtatcggaatatacaattctagaatcatttaaacgtgccgtccatctcatatatacacgtgtattttttactcacggtgatgatagtgttaaacatcaacgggttcagggaaggatttggacagcgcgggggatttggaccagatttatataatcacctagtttctcacttagttctattagtattttctttgtatgatgattaacgcaaattctcatcaagttaaccaactcatttaggaattaacataaaataaataaaatgctgcttttttcttaaaaatcaataattgtttgatagttggtgcctgcaaatcgaagctaatccgctcctgaccgtaggtaatgaatattgcctcagtagtaaaagcccagcccatccaacttatcacgcacacgctaacaatagattaaatcatttccacagagcttttgcgttatcacactcagtaatttcggtgtggcacaaaataatttaaaacactagaaaaaatattttaaaaccaaacggaatcatagcattttaaattaatttaaatgaatattttattcgctcactcgattcacttgccaataacatgcttttgagcaaatgttatgcggtgccagttttgaaagttcgccttctgctgttgcgccttctcagccttcagttgcataatgtagttctccatcagctgactgggcgtggtttgttgaaagttcaaagtgggcgtgggcacggttacgcccagatccatctgccgtcgagccttccaccttcgacgcagtccatccagcccaaaggccggcacctcaatgcacaggaaataggccagttccatgccactaattagggagcagccaagaaaaagaccggcaattcctccaaagctaactggtggaaaaatcctgattatttattaattagctatgtctcttaatacatagtttgtggaacaaattacgggattatagaagctatttgatttcgtactgacccattaagtccacccagccgaagacgaggctggtgcgatagaccataatggtctcgaagcgaaagtgcacatccaggtccacataggagttgtttgcgtacacatccggtggcaggaaggcgggccggacatcgctgatgtagttgagggagtagcagttgcggaagcacttgcaggacattccctgaaattggttgcgaacgaactccttctcgccgggattgtgggagtagatgagcaggtctgcgggtgagggatactggttttataaggtcttctttggtgagcctggactcctactaaccattgtgctcagcgaggcacagcaaatcctgcgcccgacacgatcgatattgacctggtcagagaaaccaatgaatcgatcatttggtaacgattttgataacgtgctcacccggtggaaacagtaggtccattgtgcagttgcaatagcgcaccaagtactcctgatggcactcggactgacagttttcaatcatgtaaacgtatccttgcagcgacttgaaatccttgctgttgtgctcatccttgaggcatccaaagtgcaggattagaaatagccttggtgggtattaacaagataaccactcacatcgaagacgcactggcgctggtcggagcgaactccccgggtgtcgttgtcatagaagtagatgacgggttcgatctccatggtcgtctccgtgttcgcggccacgaagaacggattgttgtgccacacaaatggctcggtaaccatgacatcgatgcccttcatggcattcgtctccctgtgccccggccagtgcttcgcgggctggatgagaacacgcacggagagggcgctcatgggacccgccgacccagtacgccagggccacatgggatcgagcagctgcatccgcctgccctcttccgtctccagcgagttgaaagcccagcacaagccgttcttgctgcgccgcttcgagaagatctcgcagcagtcgtaggcatggtggcgccacaggcattccgcgagcagctcgttgcagcgccaggtcataaaatccaccacctggctgaaattgacatagttgagcagctccgttggctggttgcgcaatcgctcgaaggactgaaagtgaccgaagtaagcatcgtcgtaggtgcccacaatcagctcgaagagctcctgctgggcggagttgctgccgttggccaggaatcttgacttcgcctccgccaggcgttgccagttgaggcgattccggttgcagatcgttatgaccggaaatggtatgcggtaaaccggaaaccgcgtgctatccaccaccgtctggaagtgggcggcgttgtagcgggcggagagaatcaggcaaacgtacaccgcgcccaggaaggcactcacaaaggtgcacagccagacgaatcgctcccatcgactggccttggcactaagcagcctgtccaggccgtggatagtggtccgtttgccaaagcgcagggccagctgccaggaggattgggccaactgttgggccaggcgactggatctcgatggctgctgctgctgctgaagctttgaaggaggaaagtaaaccagtgtcatgtcggcacaggactcactgagtctggtcgcaaggaatgccaggtttttataccgtccatgtgccgtgaacggaatgcgtgctgaaatgcagtggtaattagatgccgtttagcgcgttgacaagccacaaaatgcggctgacatgccgaccccttattagactgacccggctgtcacccaaaggtcgagtcaatcgattgcctactcccaggagatctaacctgattcgcagccaatggtcatggtttaggctaatgagcatcgaaataaattcaattgaatgcaatcaaacgcaattgatttgcaaacagtgataaaaaatcgctgtctacgaattataatggtggtgcgacctttgaataccctaagatacacttttcaagcatttccaactgattttttccaatttggtctttgagttaaggaactttaaattcgctaatcaactgtcactcaaagattaagtcaatctcttgatgtgaaaagctaattggtatcaaaatcagcaaggacttgtattatttatgtgacaaagtgactgatgtattcaacaccttgcaaggatcaaaaaatttcgagtttggttataaaagccatgatgcaccataaaggactcatatcaaaatgttcgttcgctcaactgaaaaggaaacgcgagtggtggctgataggatacggcgacaggaccaaaatcctttggcgccagtcaatacaaaatcagaaatccaaagagcttggactttactgatcgatagctacatatccagatcgcacatccatggattgtatttgctcttcttaccctcgatgcgacgacgtatgcggtgagataagcaagtcatcatcaaattgggaaaaaataatatatctttaatagagttttgtgggcactggccctgatctgcgcctgcaccgttctgttccacgttagctatttgctgggtgaccggtaccacaacaagcagtttcagaccatcgttgcccacgcccatgcctcaatccatcacatcgcctttccagtggtcatcatctgcaacaagaaccgactgaactggtctcggctgccagagatcaagtccttatacaatattactccgtcccaagatgaactctttgatcgcatcctcaccgcctacgatggtttcagttttcacaaattcaacgcattcgattcgctgctgggcgagtccttggatgaacttaatcacctgaacttcacggaaatcgtgatccagatgtcgtggagatgtgacgaaatcctg

SEQ ID NO: 20195 - DNA, 1788 bp, DROSOPHILA
atgctcattagcctaaaccatgaccattggctgcgaatcaggttagatctcctgggagtaggcaatcgattgactcgacctttgggtgacagccggcttcagcagcagcagcagccatcgagatccagtcgcctggcccaacagttggcccaatcctcctggcagctggccctgcgctttggcaaacggaccactatccacggcctggacaggctgcttagtgccaaggccagtcgatgggagcgattcgtctggctgtgcacctttgtgagtgccttcctgggcgcggtgtacgtttgcctgattctctccgcccgctacaacgccgcccacttccagacggtggtggatagcacgcggtttccggtttaccgcataccatttccggtcataacgatctgcaaccggaatcgcctcaactggcaacgcctggcggaggcgaagtcaagattcctggccaacggcagcaactccgcccagcaggagctcttcgagctgattgtgggcacctacgacgatgcttacttcggtcactttcagtccttcgagcgattgcgcaaccagccaacggagctgctcaactatgtcaatttcagccaggtggtggattttatgacctggcgctgcaacgagctgctcgcggaatgcctgtggcgccaccatgcctacgactgctgcgagatcttctcgaagcggcgcagcaagaacggcttgtgctgggctttcaactcgctggagacggaagagggcaggcggatgcagctgctcgatcccatgtggccctggcgtactgggtcggcgggtcccatgagcgccctctccgtgcgtgttctcatccagcccgcgaagcactggccggggcacagggagacgaatgccatgaagggcatcgatgtcatggttaccgagccatttgtgtggcacaacaatccgttcttcgtggccgcgaacacggagacgaccatggagatcgaacccgtcatctacttctatgacaacgacacccggggagttcgctccgaccagcgccagtgcgtcttcgatgatgagcacaacagcaaggatttcaagtcgctgcaaggatacgtttacatgattgaaaactgtcagtccgagtgccatcaggagtacttggtgcgctattgcaactgcacaatggacctactgtttccaccgggtcaatatcgatcgtgtcgggcgcaggatttgctgtgcctcgctgagcacaatgacctgctcatctactcccacaatcccggcgagaaggagttcgttcgcaaccaatttcagggaatgtcctgcaagtgcttccgcaactgctactccctcaactacatcagcgatgtccggcccgccttcctgccaccggatgtgtacgcaaacaactcctatgtggacctggatgtgcactttcgcttcgagaccattatggtctatcgcaccagcctcgtcttcggctgggtggacttaatggttagctttggaggaattgccggtctttttcttggctgctccctaattagtggcatggaactggcctatttcctgtgcattgaggtgccggcctttgggctggatggactgcgtcgaaggtggaaggctcgacggcagatggatctgggcgtaaccgtgcccacgcccactttgaactttcaacaaaccacgcccagtcagctgatggagaactacattatgcaactgaaggctgagaaggcgcaacagcagaaggcgaactttcaaaactggcaccgcataacatttgctcaaaagcatgttattggcaagtga

SEQ ID NO: 20196 - protein, 595 aa, DROSOPHILA
MLISLNHDHWLRIRLDLLGVGNRLTRPLGDSRLQQQQQPSRSSRLAQQLAQSSWQLALRFGKRTTIHGLDRLLSAKASRWERFVWLCTFVSAFLGAVYVCLILSARYNAAHFQTVVDSTRFPVYRIPFPVITICNRNRLNWQRLAEAKSRFLANGSNSAQQELFELIVGTYDDAYFGHFQSFERLRNQPTELLNYVNFSQVVDFMTWRCNELLAECLWRHHAYDCCEIFSKRRSKNGLCWAFNSLETEEGRRMQLLDPMWPWRTGSAGPMSALSVRVLIQPAKHWPGHRETNAMKGIDVMVTEPFVWHNNPFFVAANTETTMEIEPVIYFYDNDTRGVRSDQRQCVFDDEHNSKDFKSLQGYVYMIENCQSECHQEYLVRYCNCTMDLLFPPGQYRSCRAQDLLCLAEHNDLLIYSHNPGEKEFVRNQFQGMSCKCFRNCYSLNYISDVRPAFLPPDVYANNSYVDLDVHFRFETIMVYRTSLVFGWVDLMVSFGGIAGLFLGCSLISGMELAYFLCIEVPAFGLDGLRRRWKARRQMDLGVTVPTPTLNFQQTTPSQLMENYIMQLKAEKAQQQKANFQNWHRITFAQKHVIGK

SEQ ID NO: 20197 - DNA, 2985 bp, DROSOPHILA
agcagcccggggagcatccctatgtgcaccgggaggagtccggcctggtgtgcgagtgcctgcacaactgcaagtccctaaccctgctgaccgatatgcgaaagagtgtccagcaaccctggctacagcccaattccagcgccatcgagagcatgtggctcaacgtttacttcaagaagccctccatgctggtctacaagaccaacctgatttacacctgggtggacttgattggtatgctattgtgatgaagctatgtgtatatttcctatgtatccttttcagtttcatttggaggcatttgtcagctttgcttgggatgttcaattatcagcctcatcgaattcgtattctttgcgctgtacaaagtgcctcaactctattgggagcgtttttcgaacgaacatcgaagcaacaaataatgtagttttaacgccagatataatattacattttttaagctgagctcaaaaatggtttaaaattatttcgtatcctcgatggtttttgtttcataatttgacttatattttacattttcaaataatagcaacggctcaaacccctttaaattatacaacaattggaaaatagaaatagaacaacgacagcaacattatatttttcgagattaatttcgaagttcttattcaacatacatcttatattctactcataatttacttatatgttacatatattttacataacacgtaaaaacgttcacaaaattcatataaaatacatagcttttcgatatcgaattcaattttcgaaaatatattcgaagtggatattttacttatattatacaataaatctttacatgtattcatacatgtatgtatctacgtcttatgtagaattctcctagtcgtgctatacattgcgtttcagctgccggaagatagatggatccttgatgtcactgtatctcagaaatgatttattaacgtgcacaaatattttttatggctacacgttgcaaagcaacttttttctatcctgagcaatggcatttcggtcgaaccatcatttgcatcaccttgtaggaataactctcagtgcgccaagaatgccagacgatgcccttccactgaaagtactgcccctcatcacctttcacatagatgccgaatagattactgaaataataaaattgcttaaaatctgcaaataatcgtacaaaataattacctgtaagtgcagttcaaatgccaccaagcacccacatactcctcggcacagtttttgtgccacccatcattgtccctatcgaaagtggagaagttttggttcctgttgtgaatcatggagtcccctgcgtcgccggtaaattcgcccagtttggtcattgcatagaacttgttttcgctttcgataaagatttcatcgtaatgcgcatatcgtgtctgtccttcaaagtcctcaaggtgtatgtataactcatggggctgtgacttagttatggcatgcaatttgtccaagccaatgaagaaatctccatcgagctgcccgaagccgtttttgtactccgcccagctgcggaagaagttcaacttgttgctggtgcggcgggccatcacagtccatccagttccggcaatctctgcatcgcaagacacctggaagggcttcagtcccaacacctgaacggtatagattccgtgagcaggtggataggtgggacactggctgggatatcttccggacaatccagttgtatttaaatctgaactactcttctggatattttcagtactagcattggattggttttcctcgagcagggcgagtaccaatttgtacaacgattttagttcgggtttgtttctaagaaatggaagcttgttaacataacatagcttttggaagtggaattacaaatatacctgatagcggtatcattttgaaaactctgtgggatgattgaattcttagaagatttaaggacttaaaggtatatgatttacctcactatccatcgcttccgttgaataaaatgagagacccagaaatgccacatatatccacactgatcgcatcgcagcgcgtttataactgaatcaactttaccatgacaccttatattttattactgagtcataatcaaaaactaattatgataataatcataaatattactaattatatcaaatggccttattatacggtatcgcactttattgtggctaaataaatcatttatgctagtaaatagctagatttgctgtcaaattctaatatcattccggcggtgatctaatcatcattatcaatacttatacataaaattgtttattaataaagctaagagaaaatgtgggtttttcgtggaaaaaaattactaattaatctagttgttcaatgcgttaaagatttctgacgtctttcccgaatataagttttattccaatccctaaatttcattgccgtattttaattacacagttgataatcacactttgattaaggaaaaagaataaaagctaatttgaaaatttcgaataatttttaaagcacggccataagacttacagacattcgtatggcactaaagtggctggagcagacttcaaaatatatctgtttttgtgggtcttccatcctagtgagtttttaacggcttattgaatgccggcgggcggtgtcttaactgctgcaatgtcgcgttcgccgcttaacaagcgtcctccggatggggatgcgaatttggatggggatgggaatggggatgtgggcatgcccgatgctccgtgcagctgggggcgattgtggctgcgtctggcggagcgggtcgggattggaaggggtcttgtcgaaattacgctcataaacgtgacttgacataataatctggagctggagcgctctgacttcgttcacttgctttgtctttggcacttgccttctgattcccggcccttctgtctccggtggccatctttgcctcggatttctttaccttacccgcagccgctttca

SEQ ID NO: 20198 - DNA, 819 bp, DROSOPHILA
atggatagtgagagttttcaaaatgataccgctatcagaaacaaacccgaactaaaatcgttgtacaaattggtactcgccctgctcgaggaaaaccaatccaatgctagtactgaaaatatccagaagagtagttcagatttaaatacaactggattgtccggaagatatcccagccagtgtcccacctatccacctgctcacggaatctataccgttcaggtgttgggactgaagcccttccaggtgtcttgcgatgcagagattgccggaactggatggactgtgatggcccgccgcaccagcaacaagttgaacttcttccgcagctgggcggagtacaaaaacggcttcgggcagctcgatggagatttcttcattggcttggacaaattgcatgccataactaagtcacagccccatgagttatacatacaccttgaggactttgaaggacagacacgatatgcgcattacgatgaaatctttatcgaaagcgaaaacaagttctatgcaatgaccaaactgggcgaatttaccggcgacgcaggggactccatgattcacaacaggaaccaaaacttctccactttcgatagggacaatgatgggtggcacaaaaactgtgccgaggagtatgtgggtgcttggtggcatttgaactgcacttacagtaatctattcggcatctatgtgaaaggtgatgaggggcagtactttcagtggaagggcatcgtctggcattcttggcgcactgagagttattcctacaaggtgatgcaaatgatggttcgaccgaaatgccattgctcaggatag

SEQ ID NO: 20199 - protein, 272 aa, DROSOPHILA
MDSESFQNDTAIRNKPELKSLYKLVLALLEENQSNASTENIQKSSSDLNTTGLSGRYPSQCPTYPPAHGIYTVQVLGLKPFQVSCDAEIAGTGWTVMARRTSNKLNFFRSWAEYKNGFGQLDGDFFIGLDKLHAITKSQPHELYIHLEDFEGQTRYAHYDEIFIESENKFYAMTKLGEFTGDAGDSMIHNRNQNFSTFDRDNDGWHKNCAEEYVGAWWHLNCTYSNLFGIYVKGDEGQYFQWKGIVWHSWRTESYSYKVMQMMVRPKCHCSG

SEQ ID NO: 20200 - DNA, 3543 bp, DROSOPHILA
tcgcctccgccaggcgttgccagttgaggcgattccggttgcagatcgttatgaccggaaatggtatgcggtaaaccggaaaccgcgtgctatccaccaccgtctggaagtgggcggcgttgtagcgggcggagagaatcaggcaaacgtacaccgcgcccaggaaggcactcacaaaggtgcacagccagacgaatcgctcccatcgactggccttggcactaagcagcctgtccaggccgtggatagtggtccgtttgccaaagcgcagggccagctgccaggaggattgggccaactgttgggccaggcgactggatctcgatggctgctgctgctgctgaagctttgaaggaggaaagtaaaccagtgtcatgtcggcacaggactcactgagtctggtcgcaaggaatgccaggtttttataccgtccatgtgccgtgaacggaatgcgtgctgaaatgcagtggtaattagatgccgtttagcgcgttgacaagccacaaaatgcggctgacatgccgaccccttattagactgacccggctgtcacccaaaggtcgagtcaatcgattgcctactcccaggagatctaacctgattcgcagccaatggtcatggtttaggctaatgagcatcgaaataaattcaattgaatgcaatcaaacgcaattgatttgcaaacagtgataaaaaatcgctgtctacgaattataatggtggtgcgacctttgaataccctaagatacacttttcaagcatttccaactgattttttccaatttggtctttgagttaaggaactttaaattcgctaatcaactgtcactcaaagattaagtcaatctcttgatgtgaaaagctaattggtatcaaaatcagcaaggacttgtattatttatgtgacaaagtgactgatgtattcaacaccttgcaaggatcaaaaaatttcgagtttggttataaaagccatgatgcaccataaaggactcatatcaaaatgttcgttcgctcaactgaaaaggaaacgcgagtggtggctgataggatacggcgacaggaccaaaatcctttggcgccagtcaatacaaaatcagaaatccaaagagcttggactttactgatcgatagctacatatccagatcgcacatccatggattgtatttgctcttcttaccctcgatgcgacgacgtatgcggtgagataagcaagtcatcatcaaattgggaaaaaataatatatctttaatagagttttgtgggcactggccctgatctgcgcctgcaccgttctgttccacgttagctatttgctgggtgaccggtaccacaacaagcagtttcagaccatcgttgcccacgcccatgcctcaatccatcacatcgcctttccagtggtcatcatctgcaacaagaaccgactgaactggtctcggctgccagagatcaagtccttatacaatattactccgtcccaagatgaactctttgatcgcatcctcaccgcctacgatggtttcagttttcacaaattcaacgcattcgattcgctgctgggcgagtccttggatgaacttaatcacctgaacttcacggaaatcgtgatccagatgtcgtggagatgtgacgaaatcctgagagattgtcactggcagacagcgtccagagactgctgtaaactctttcgacctcgccgcctgcccctcggctattgtctggcattcaacgagctggaaaagcgacgaggcacggagacgggaatcaacacggggctactactgaggctacttttgcgggaggggcaacatgctccggggaattcagggctaaagggtttctgggtaggtagaagtctcagcagggatgggcttaataagctactttccagcaacaaataaggaggacagctaaatcttctagaattttcttcaccttccagctaacagtggtggaatcttcagtgtggttcggtttccccatcgaggtggtgccccacagccgcaccaatgtggccgttacagcggtgtaccactacttcgacgagagcacactgagcctgccctccagttggcggcactgcgtcatggactacgaggaggagagcgagcactttcgtacgctggagggccagaagtatatgctggagaactgccaagcggagtgccagcagcggtatctgttgcgctactgcaactgcaccgttgacctgttctatccgccatccaattatcccgcctgtcggctaaaggatctgccctgcctggcggcacacaaccatttgctgcaaaacttcgagcagcccggggagcatccctatgtgcaccgggaggagtccggcctggtgtgcgagtgcctgcacaactgcaagtccctaaccctgctgaccgatatgcgaaagagtgtccagcaaccctggctacagcccaattccagcgccatcgagagcatgtggctcaacgtttacttcaagaagccctccatgctggtctacaagaccaacctgatttacacctgggtggacttgattggtatgctattgtgatgaagctatgtgtatatttcctatgtatccttttcagtttcatttggaggcatttgtcagctttgcttgggatgttcaattatcagcctcatcgaattcgtattctttgcgctgtacaaagtgcctcaactctattgggagcgtttttcgaacgaacatcgaagcaacaaataatgtagttttaacgccagatataatattacattttttaagctgagctcaaaaatggtttaaaattatttcgtatcctcgatggtttttgtttcataatttgacttatattttacattttcaaataatagcaacggctcaaacccctttaaattatacaacaattggaaaatagaaatagaacaacgacagcaacattatatttttcgagattaatttcgaagttcttattcaacatacatcttatattctactcataatttacttatatgttacatatattttacataacacgtaaaaacgttcacaaaattcatataaaatacatagcttttcgatatcgaattcaattttcgaaaatatattcgaagtggatattttacttatattatacaataaatctttacatgtattcatacatgtatgtatctacgtcttatgtagaattctcctagtcgtgctatacattgcgtttcagctgccggaagatagatggatccttgatgtcactgtatctcagaaatgatttattaacgtgcacaaatattttttatggctacacgttgcaaagcaacttttttctatcctgagcaatggcatttcggtcgaaccatcatttgcatcaccttgtaggaataactctcagtgcgccaagaatgccagacgatgcccttccactgaaagtactgcccctcatcacctttcacatagatgccgaatagattactgaaataataaaattgcttaaaatctgcaaataatcgtacaaaataattacctgtaagtgcagttcaaatgccaccaagcacccacatactcctcggcacag

SEQ ID NO: 20201 - DNA, 1392 bp, DROSOPHILA
atgttcgttcgctcaactgaaaaggaaacgcgagtggtggctgataggatacggcgacaggaccaaaatcctttggcgccagtcaatacaaaatcagaaatccaaagagcttggactttactgatcgatagctacatatccagatcgcacatccatggattgtatttgctcttcttaccctcgatgcgacgacgtatgcgagttttgtgggcactggccctgatctgcgcctgcaccgttctgttccacgttagctatttgctgggtgaccggtaccacaacaagcagtttcagaccatcgttgcccacgcccatgcctcaatccatcacatcgcctttccagtggtcatcatctgcaacaagaaccgactgaactggtctcggctgccagagatcaagtccttatacaatattactccgtcccaagatgaactctttgatcgcatcctcaccgcctacgatggtttcagttttcacaaattcaacgcattcgattcgctgctgggcgagtccttggatgaacttaatcacctgaacttcacggaaatcgtgatccagatgtcgtggagatgtgacgaaatcctgagagattgtcactggcagacagcgtccagagactgctgtaaactctttcgacctcgccgcctgcccctcggctattgtctggcattcaacgagctggaaaagcgacgaggcacggagacgggaatcaacacggggctactactgaggctacttttgcgggaggggcaacatgctccggggaattcagggctaaagggtttctggctaacagtggtggaatcttcagtgtggttcggtttccccatcgaggtggtgccccacagccgcaccaatgtggccgttacagcggtgtaccactacttcgacgagagcacactgagcctgccctccagttggcggcactgcgtcatggactacgaggaggagagcgagcactttcgtacgctggagggccagaagtatatgctggagaactgccaagcggagtgccagcagcggtatctgttgcgctactgcaactgcaccgttgacctgttctatccgccatccaattatcccgcctgtcggctaaaggatctgccctgcctggcggcacacaaccatttgctgcaaaacttcgagcagcccggggagcatccctatgtgcaccgggaggagtccggcctggtgtgcgagtgcctgcacaactgcaagtccctaaccctgctgaccgatatgcgaaagagtgtccagcaaccctggctacagcccaattccagcgccatcgagagcatgtggctcaacgtttacttcaagaagccctccatgctggtctacaagaccaacctgatttacacctgggtggacttgattggtatgctattgtga

SEQ ID NO: 20202 - protein, 463 aa, DROSOPHILA
MFVRSTEKETRVVADRIRRQDQNPLAPVNTKSEIQRAWTLLIDSYISRSHIHGLYLLFLPSMRRRMRVLWALALICACTVLFHVSYLLGDRYHNKQFQTIVAHAHASIHHIAFPVVIICNKNRLNWSRLPEIKSLYNITPSQDELFDRILTAYDGFSFHKFNAFDSLLGESLDELNHLNFTEIVIQMSWRCDEILRDCHWQTASRDCCKLFRPRRLPLGYCLAFNELEKRRGTETGINTGLLLRLLLREGQHAPGNSGLKGFWLTVVESSVWFGFPIEVVPHSRTNVAVTAVYHYFDESTLSLPSSWRHCVMDYEEESEHFRTLEGQKYMLENCQAECQQRYLLRYCNCTVDLFYPPSNYPACRLKDLPCLAAHNHLLQNFEQPGEHPYVHREESGLVCECLHNCKSLTLLTDMRKSVQQPWLQPNSSAIESMWLNVYFKKPSMLVYKTNLIYTWVDLIGMLL

SEQ ID NO: 20203 - DNA, 3997 bp, DROSOPHILA
aattgaaactagattattttttaccgaatgcactttgtgctagggaagtaccactgtacctaggcaaactggttgcaagtgagaggactacgtgcgagtgaatgtgttagggaatttgtgagtgtgcatcacaattgttgcatgcggttcggccgggagtgaaaagttgctagcagctgcttttttcagttttgtttattccaatttgttttgtttttgtatcgctgcccagtgaagttttataatagactgagagatttcacttttatgtgggaggccccctatccaaagatgcaccatcacacttccccgcttcaaaaaaattcatttcacattgcacctatctacattccaaaacactaagtccaacgcgtgacgcgaaaagtttttgaaaaattcagataaaatatcgctaactatttaggtagcaatgtggacggaagcccacgtagtgacgaagcgtatcacgatagggaatgtactataaagtatcaaacaatttgttgatcacttttcccaagaattaaatttaccaaacaccaagttacgaagtaattgataaaaccacatagcaaaataaccatttaattcttagcgatagggggactgtttgcattacccattagccacttagatttatcgatcacgatcatctggaatcgtaatatttcacagagttaagggaatccagccaaatgtatgcataacaaatgcaagttacgaaatcgacgcgatcgaagcagtacgatcgtgatcaaaatattgagtttgaaaatcgcaccctataacccgattacatacgaaatgtctatgctacttttcatgtcatgtgtccgttattcggttttcggtttttattcccttaaaagtagcttctttaaccaaaaataatatcattgtcattgcagccacgtcgcatctgaaatcaacgacctatatctatatttacataaagtagacacccccctaactaaatcccaagcggatttcgacccagaaaatgagctcggcgatcgttggagccgcctcggccattggaggagcggtaacggcggccaccagcaacagttggttcatcccgatgctgatggcagcggtggcctattttcagtacgaggagatcatcgatccggaatcaaagcccagtgatgtgggcggcgacgacatcctcgaccattatgactttatagtgataggtgccggatcggcgggggccgtggtggcgaatcgattgacggaggtggagaactggaatgtacttttgctggaggccggtggcgatgaaacggaactcacggacgtccctttgatggccggctacctgcagctgtccaagattgactggcagtacaagacggaaccatcgggaacatcttgcttgggtacgtctgcctaagggatcgtcttaatttaaacacgatctttgatttaatacatatatttctataaagaaaaagtaaaggtcgatgactaagttcccatacatcctatgtttcagcaatgcaaggaggtcgctgcaattggcccagaggcaaggttcttggcggcagctctgttcttaactatatgttgtatctgcgaggatctaagcatgactacgacaactgggaggctatgggcaatcccagttggtcgtatcgcgacgctctgtactattttaagaagtcagaggataacaccaatcagtatctggccaatacaccatatcatgccactggtggttatctgacagttggtgaggctccatatcacacaccactggcggctagttttgtggaggccggcgtggagatgggctacgagaatcgggatctgaatggtgaaaagatgaccggatttatgattgcccagggcacaacacgacgcggatcgcgatgctccacgtcgaaggctttcttaagacctgcaagattacgtccaaatttgcatatctccatgaactcacacgtaacacgcatcatgatcgatcccgtgacaaaactagccttcggagtggagttcgttaaggatcagaaactttaccatgtgagggccaccaaggaggtggttctatccggtggatcggtaaatagtccacaactgctgatgctcagtggcgtgggtccacgaaaggagttggccaaacatcgaataccgctaatcaaagaactgagtgttggtgaaaacctgcaggatcacattggtctgggcggcctgacttttctggtgaatcaacccgtgtccattgtggagaatcgttttcataccatgtcaactgtactgcaatacgctgtatttggccaaggcccattgaccatattgggtggcgtggagggattggcctatgtgaacaccaagtatgcaaatagctcactggattggccagatattgagtttcattttgtatccggatcgacgaattccgatggcggatcgcaactgcggaaggctcatggattaactgatgctttctatagagctgtctttgaaccgatcaacaatcgagatgcctggagcataatacccatgttgctgagaccgcgcagcgtgggaaatattcgcctgaggagcggaaatcctttcgattacccctatatctttcccaactatctgacggatgacttcgatatgaagaccctgatcgagggcgtgaagatagcggtggcattatcccgaacgaaagccatgcagcgatttggttccagaatttcgagcatccgctggccgggatgcgagcaagtaccgctattcaccgatgccttttgggaatgtatggtcaggcggtatacgtctaccatctatcacccggtgggcacttgcaaaatgggcccctattgggataaggatgcggtggtggatgccaagctaagggtctacggtatccgaggacttcgcgtcattgatgccagtattatgcccaagttggtgtctgccaatacgaatgcgccggtgattatgatcgccgagaagggcagcgatatgattaaggagttctggatcaagaacaccattgtctgaacgaaacttactttatagcgtagataaactatagttttctagagctgatttcctaacagttttaggaacttattaataaatcagctcataaaaactgtgctttatccattgaatgtctgaatgtgtggttaacgtgaatgttttattgattgaactgagtatgattgcctgtgaatgttaagattaagtgtctgcgagttgtgtatatgttttagaaattaagcccaagctgatgacccatacaaaattattttattaaactcaaattggtcctcatttttttttgaagtatcttataagcacgcccttgtatttattttaatatagtgtgaacgcaataaacaattaaaatacggtcattccgtgatttttgttaaattggtcagggaatatggacttatcgcctaaatgtcacttatcaaaatttttttatagctttggacgctatcaataattgctttaataaaacacgacacgacattcgataattggagcagccaagataagttactgatattgttaaaatacacagtatataatctgatggtaagagctttttgtgtaagatcatttcatgacgctaaaataataactgctatactagttaacagtcttaacagcgccacctgttggccggggcctcaagctgagggttattaatatatatgggcttgaaattttatatgtttgctttcgtatttttatggccggcaaacagaaagcagcccgaaaaattaaataaaagcggacagagtatacgtatattttggttgatatggttatcgtgcgcgatattcttttaattgtggctgaaatgccgtaccaaacggatcgcttaacttgattagtgttaaattagttaaaaatgggcgatcagcgcgtacacaaaccgcggacagcgaagacaagaacccttcgcgtcaataggatattattaccgatgttgcttctgttttcaggagaaactacatcagttgtgacccaattgttttcggtggat

SEQ ID NO: 20204 - DNA, 1881 bp, DROSOPHILA
atgagctcggcgatcgttggagccgcctcggccattggaggagcggtaacggcggccaccagcaacagttggttcatcccgatgctgatggcagcggtggcctattttcagtacgaggagatcatcgatccggaatcaaagcccagtgatgtgggcggcgacgacatcctcgaccattatgactttatagtgataggtgccggatcggcgggggccgtggtggcgaatcgattgacggaggtggagaactggaatgtacttttgctggaggccggtggcgatgaaacggaactcacggacgtccctttgatggccggctacctgcagctgtccaagattgactggcagtacaagacggaaccatcgggaacatcttgcttggcaatgcaaggaggtcgctgcaattggcccagaggcaaggttcttggcggcagctctgttcttaactatatgttgtatctgcgaggatctaagcatgactacgacaactgggaggctatgggcaatcccagttggtcgtatcgcgacgctctgtactattttaagaagtcagaggataacaccaatcagtatctggccaatacaccatatcatgccactggtggttatctgacagttggtgaggctccatatcacacaccactggcggctagttttgtggaggccggcgtggagatgggctacgagaatcgggatctgaatggtgaaaagatgaccggatttatgattgcccagggcacaacacgacgcggatcgcgatgctccacgtcgaaggctttcttaagacctgcaagattacgtccaaatttgcatatctccatgaactcacacgtaacacgcatcatgatcgatcccgtgacaaaactagccttcggagtggagttcgttaaggatcagaaactttaccatgtgagggccaccaaggaggtggttctatccggtggatcggtaaatagtccacaactgctgatgctcagtggcgtgggtccacgaaaggagttggccaaacatcgaataccgctaatcaaagaactgagtgttggtgaaaacctgcaggatcacattggtctgggcggcctgacttttctggtgaatcaacccgtgtccattgtggagaatcgttttcataccatgtcaactgtactgcaatacgctgtatttggccaaggcccattgaccatattgggtggcgtggagggattggcctatgtgaacaccaagtatgcaaatagctcactggattggccagatattgagtttcattttgtatccggatcgacgaattccgatggcggatcgcaactgcggaaggctcatggattaactgatgctttctatagagctgtctttgaaccgatcaacaatcgagatgcctggagcataatacccatgttgctgagaccgcgcagcgtgggaaatattcgcctgaggagcggaaatcctttcgattacccctatatctttcccaactatctgacggatgacttcgatatgaagaccctgatcgagggcgtgaagatagcggtggcattatcccgaacgaaagccatgcagcgatttggttccagaatttcgagcatccgctggccgggatgcgagcaagtaccgctattcaccgatgccttttgggaatgtatggtcaggcggtatacgtctaccatctatcacccggtgggcacttgcaaaatgggcccctattgggataaggatgcggtggtggatgccaagctaagggtctacggtatccgaggacttcgcgtcattgatgccagtattatgcccaagttggtgtctgccaatacgaatgcgccggtgattatgatcgccgagaagggcagcgatatgattaaggagttctggatcaagaacaccattgtctga

SEQ ID NO: 20205 - protein, 626 aa, DROSOPHILA
MSSAIVGAASAIGGAVTAATSNSWFIPMLMAAVAYFQYEEIIDPESKPSDVGGDDILDHYDFIVIGAGSAGAVVANRLTEVENWNVLLLEAGGDETELTDVPLMAGYLQLSKIDWQYKTEPSGTSCLAMQGGRCNWPRGKVLGGSSVLNYMLYLRGSKHDYDNWEAMGNPSWSYRDALYYFKKSEDNTNQYLANTPYHATGGYLTVGEAPYHTPLAASFVEAGVEMGYENRDLNGEKMTGFMIAQGTTRRGSRCSTSKAFLRPARLRPNLHISMNSHVTRIMIDPVTKLAFGVEFVKDQKLYHVRATKEVVLSGGSVNSPQLLMLSGVGPRKELAKHRIPLIKELSVGENLQDHIGLGGLTFLVNQPVSIVENRFHTMSTVLQYAVFGQGPLTILGGVEGLAYVNTKYANSSLDWPDIEFHFVSGSTNSDGGSQLRKAHGLTDAFYRAVFEPINNRDAWSIIPMLLRPRSVGNIRLRSGNPFDYPYIFPNYLTDDFDMKTLIEGVKIAVALSRTKAMQRFGSRISSIRWPGCEQVPLFTDAFWECMVRRYTSTIYHPVGTCKMGPYWDKDAVVDAKLRVYGIRGLRVIDASIMPKLVSANTNAPVIMIAEKGSDMIKEFWIKNTIV

SEQ ID NO: 20206 - DNA, 4158 bp, DROSOPHILA
aaaaacaaaaatgtaaaattcgatacaacgataaactacaaaataaattatgttttattacacactaatttaagcaaaggaaccgaaaaaaattcgaattgttgccaaacaaaaagtgcagcatacttttagggtggaaaatccattttggcacggtaaacatttagaaccggaatctgtagccgaaggttaaccggttcactgtaactgtaactgaaccggaacggaaataaaggtaaatgttgatttcctgtaccgaagcggtagaactggttaagggtttaaacctaattgatttcatttatacaacgttttcgttttcttacgacaaactgttacttaccgaatcaagtgcccatctgaaaaatccgaaacgtaataagttccttgatatgtatgtacataaaatttgcccggcagcttatgaaaagataacaattttttgttcgcgaaaaatttgccgcctctttcctagctatttccttgtgatcgataagaatatagcatttatagaatatagaaattttcagcttaaaccatatattattaatgtgataagcatataagtaacccccattgaaattagcttagctaatgtcaaaaacgcgactatgaaattaagtttacaaaatgaattagtatacttcatttgaactttgtagatttttttttttttgttgtcttgtcgtagacattgtagataagccctctactcaaatgccgaaaagaaaatacgtatttaaatcgctgataagctaaccaagcaaaaagagccgagctgcaagaattctacaagcacagtcgtcggaagaaaccccgcaagtggggtagtgtgggtaataatatttggtgtagcggcgatgagagagcacaaatgcgaatacggcatacgacatacggaatatatgtacataaaatcgaaaccgcgtgaaacgagattttagttgaatttgagcaagcggcaaacgcgcaacacccgtcctgaagcatcgataaatcggattcggaatcggaatcgccaaactcgtcgggttaaaatacaatcagcagctttactttgaaatgatcgtatctaagcacctgagaaaagaactttttaaagtgccgcagtacaggtgcagcttatgaatctcgccgaagtgaaataaacgtgcggaaagatcagctattcctttgcccgatagtaaatccaagaagcaatggtgcaaaatctgtggactgccctccttctgctgggcagtgccacctgcggttcgagtgtgccggtcaaggcaaatgatccggaacagagttgtccgtacctcggagagtgcaattccacgatcaatcagcagcacatcgatacgctgatgtcctacgtggacagcgaaaaaaatccctgcgaggatttctatgcctacgcctgcggaaaatggcgggcgaagcatggaagccacacaaccgccacgatgatcagcgaatcgcaaattaaccgccagtacgaggatttgttcctacaactgctgaggaatcccagcgccccggaatatggataccccatgttcgccaaggtgttggcccattaccagtcatgcatcgcgctggagaagccggatctgaggcgatacatcgagctactggaccgggatctgctcgcctccttaaactccacacactggatgcacctgctggcagctctggggcgctacggctaccacggtcactacgtccaagtagaggtacgttggtacaacgccacccatcacatgatcttcctgctgccgcacaatcgccacctaaacctgagtctcacgcaagacatctatgatgcgctgagtcaggatggctcctcctggccaccgctccaccagctacaggagcagttcagaagtttggagcagaacttggtgcgactggctaagccccattcggcggacgataccttccggaattacagtctggatcagattcggacggaggtgccgggtctgcattgggacgaggcgctgaggacacagctgggcagatcggtgccggggaatcatgtcttccaggtggacgacttggacgcgatcgaggggcttgtggagtacctcaatacggtagatactctgctgctcaatcggtacagcctggcaagatttctcagccacctgcttgagctgccacataacccgctggccacttgggagtccggacagcggtcgcggggaaggaactgtattcgtcacatgcgccgctctgtttacctgccgatgaactacgtctacgagagaagtttctactcccggcgccgccacgcggatgagctggtcatccacagcgtcttccagcagctgcagagtcagctggagctgcgggtccagcacaacgccttcaatctaagtcaggatctggtgaaatcgctgcaggcaaaggtgcaccagatgcgcatcaatgtgggcaacctaccgcccaatgtgacggagcaattctattgggacagcgaccggcggtggagcgtgggcagggacttctacgagaatcacctgaacagcctgctctactactacacgctcgtcgccgatttggaaagcagctcggaccaggaggagcgggacatctggtacagcttcaatatgcatacgcccgagtttcccgacaacatcgatgccacgccgtacttctactgcctgggcaacatcatcttcgtgccgtactcctacgtaaagcgtcccttcttcgatgccaacttctggccagcgctgctctacggtgatctggccaacaccctgggccacgagatcatgcacgccttcgacaccgatctggtggactacgatgcgcagggtaatctgcgtaactttagcgaccagttgggcgaagtggagctctacaacggagcggttggatgcctgaacagcagcgctgttatgctaaacgagcgcacctccgacgtcagcggatcccggctggccatgcaaacctacggtggcgactggctcactcggtcgggcaacgggcgtctgtacttcctccagttcgcccacttcttctgcggcgacgagggcgaccagtaccatgactccggcagccagcggctgaactacgccctcggccaggtgccgcagttcgcagaggtgttccggtgccatgttggctccggaatgaccagcgcggaccagtgtcccttctggtgagggatgcccagagacggtcggtgactcccactgctagtcggtgtatagctttaattaggaacccaagtattgtgaataaacttctatgcttagcaattgcgtatgcggttcgcatctgtcgggcggattttccgacacggactgagttaattttcaattacgtgtgcaacgtgatagacaagacatcggtgagcagtagatgcccttccaggatgttcgctgtcaggcactgaaaaaataggggggtaggtactcacacctacgcagaggaaataaagaaaatgggatgcttccttcagtcgaaatatttaacagtgtgagcgagaacctttttaaaagtacaaaatgtttcgactctgtttgtgcaccttgaacttttgccgatttcctctgccgaagagctcacgtgtgcttttccttgcttgcccacggtgcgtatgtgttacccggcgtgcttttatttatttgctaattaacacccatcctgcgcggagcagacggcagcccagagggcgacgaccatccagaatccgacttagattccaaatcccggccccaagtcggtggttgcactgtgcaacttgttgaaggtcgtcgcgcaaatcgctcatacgccgcgtgggtcttgaaggcgcgtggcaagcggtcggtttcgcctggcaaccgcattaatgggccattaacaacctgccgggatgatagcgcgtgagccgcgtgtcaaacagcggtcagccccaaatcgtggttgtttccgatgaatgggcgaccgtacgtttgtctttgccccacaaatggactagaaacgggaaacttgaattgattctgcgataaagaacgtatgcctcgagacactcgagctactcatgtgaaatggggtgtggggctcagtcatctaaatcaatattctgcggttccaatttggtatgtttcagattattttctagtttcttgtgagtcagcaaaatgtaaaggataaacacatctttagcagtctgaattc

SEQ ID NO: 20207 - DNA, 2158 bp, DROSOPHILA
gattcggaatcggaatcgccaaactcgtcgggttaaaatacaatcagcagctttactttgaaatgatcgtatctaagcacctgagaaaagaactttttaaagtgccgcagtacaggtgcagcttatgaatctcgccgaagtgaaataaacgtgcggaaagatcagctattcctttgcccgatagtaaatccaagaagcaatggtgcaaaatctgtggactgccctccttctgctgggcagtgccacctgcggttcgagtgtgccggtcaaggcaaatgatccggaacagagttgtccgtacctcggagagtgcaattccacgatcaatcagcagcacatcgatacgctgatgtcctacgtggacagcgaaaaaaatccctgcgaggatttctatgcctacgcctgcggaaaatggcgggcgaagcatggaagccacacaaccgccacgatgatcagcgaatcgcaaattaaccgccagtacgaggatttgttcctacaactgctgaggaatcccagcgccccggaatatggataccccatgttcgccaaggtgttggcccattaccagtcatgcatcgcgctggagaagccggatctgaggcgatacatcgagctactggaccgggatctgctcgcctccttaaactccacacactggatgcacctgctggcagctctggggcgctacggctaccacggtcactacgtccaagtagaggtacgttggtacaacgccacccatcacatgatcttcctgctgccgcacaatcgccacctaaacctgagtctcacgcaagacatctatgatgcgctgagtcaggatggctcctcctggccaccgctccaccagctacaggagcagttcagaagtttggagcagaacttggtgcgactggctaagccccattcggcggacgataccttccggaattacagtctggatcagattcggacggaggtgccgggtctgcattgggacgaggcgctgaggacacagctgggcagatcggtgccggggaatcatgtcttccaggtggacgacttggacgcgatcgaggggcttgtggagtacctcaatacggtagatactctgctgctcaatcggtacagcctggcaagatttctcagccacctgcttgagctgccacataacccgctggccacttgggagtccggacagcggtcgcggggaaggaactgtattcgtcacatgcgccgctctgtttacctgccgatgaactacgtctacgagagaagtttctactcccggcgccgccacgcggatgagctggtcatccacagcgtcttccagcagctgcagagtcagctggagctgcgggtccagcacaacgccttcaatctaagtcaggatctggtgaaatcgctgcaggcaaaggtgcaccagatgcgcatcaatgtgggcaacctaccgcccaatgtgacggagcaattctattgggacagcgaccggcggtggagcgtgggcagggacttctacgagaatcacctgaacagcctgctctactactacacgctcgtcgccgatttggaaagcagctcggaccaggaggagcgggacatctggtacagcttcaatatgcatacgcccgagtttcccgacaacatcgatgccacgccgtacttctactgcctgggcaacatcatcttcgtgccgtactcctacgtaaagcgtcccttcttcgatgccaacttctggccagcgctgctctacggtgatctggccaacaccctgggccacgagatcatgcacgccttcgacaccgatctggtggactacgatgcgcagggtaatctgcgtaactttagcgaccagttgggcgaagtggagctctacaacggagcggttggatgcctgaacagcagcgctgttatgctaaacgagcgcacctccgacgtcagcggatcccggctggccatgcaaacctacggtggcgactggctcactcggtcgggcaacgggcgtctgtacttcctccagttcgcccacttcttctgcggcgacgagggcgaccagtaccatgactccggcagccagcggctgaactacgccctcggccaggtgccgcagttcgcagaggtgttccggtgccatgttggctccggaatgaccagcgcggaccagtgtcccttctggtga

SEQ ID NO: 20208 - protein, 652 aa, DROSOPHILA
MVQNLWTALLLLGSATCGSSVPVKANDPEQSCPYLGECNSTINQQHIDTLMSYVDSEKNPCEDFYAYACGKWRAKHGSHTTATMISESQINRQYEDLFLQLLRNPSAPEYGYPMFAKVLAHYQSCIALEKPDLRRYIELLDRDLLASLNSTHWMHLLAALGRYGYHGHYVQVEVRWYNATHHMIFLLPHNRHLNLSLTQDIYDALSQDGSSWPPLHQLQEQFRSLEQNLVRLAKPHSADDTFRNYSLDQIRTEVPGLHWDEALRTQLGRSVPGNHVFQVDDLDAIEGLVEYLNTVDTLLLNRYSLARFLSHLLELPHNPLATWESGQRSRGRNCIRHMRRSVYLPMNYVYERSFYSRRRHADELVIHSVFQQLQSQLELRVQHNAFNLSQDLVKSLQAKVHQMRINVGNLPPNVTEQFYWDSDRRWSVGRDFYENHLNSLLYYYTLVADLESSSDQEERDIWYSFNMHTPEFPDNIDATPYFYCLGNIIFVPYSYVKRPFFDANFWPALLYGDLANTLGHEIMHAFDTDLVDYDAQGNLRNFSDQLGEVELYNGAVGCLNSSAVMLNERTSDVSGSRLAMQTYGGDWLTRSGNGRLYFLQFAHFFCGDEGDQYHDSGSQRLNYALGQVPQFAEVFRCHVGSGMTSADQCPFW

SEQ ID NO: 20209 - DNA, 3815 bp, DROSOPHILA
taaactatagttttctagagctgatttcctaacagttttaggaacttattaataaatcagctcataaaaactgtgctttatccattgaatgtctgaatgtgtggttaacgtgaatgttttattgattgaactgagtatgattgcctgtgaatgttaagattaagtgtctgcgagttgtgtatatgttttagaaattaagcccaagctgatgacccatacaaaattattttattaaactcaaattggtcctcatttttttttgaagtatcttataagcacgcccttgtatttattttaatatagtgtgaacgcaataaacaattaaaatacggtcattccgtgatttttgttaaattggtcagggaatatggacttatcgcctaaatgtcacttatcaaaatttttttatagctttggacgctatcaataattgctttaataaaacacgacacgacattcgataattggagcagccaagataagttactgatattgttaaaatacacagtatataatctgatggtaagagctttttgtgtaagatcatttcatgacgctaaaataataactgctatactagttaacagtcttaacagcgccacctgttggccggggcctcaagctgagggttattaatatatatgggcttgaaattttatatgtttgctttcgtatttttatggccggcaaacagaaagcagcccgaaaaattaaataaaagcggacagagtatacgtatattttggttgatatggttatcgtgcgcgatattcttttaattgtggctgaaatgccgtaccaaacggatcgcttaacttgattagtgttaaattagttaaaaatgggcgatcagcgcgtacacaaaccgcggacagcgaagacaagaacccttcgcgtcaataggatattattaccgatgttgcttctgttttcaggagaaactacatcagttgtgacccaattgttttcggtggatagcagtggcctcggcatttcgctgatgcaatcggtggccatagctctgaatgcatccagcctcgccctggccaacaacaccgcctggccgctgcaacacgaaccgccagaggatcggttggagatcgagagctatgactatatagtggtgggtgcaggtagtgccggatccattgtggccagtcgattgagtgagctgtgccaggtgaaggtcctgctgctggaggagggacaattaccaccgctggaatcggaaatctttggtctgaccggtgcactgcatcatgacgagcggtacatgttcctggaggaagcagtgcccaatccgaaatgctgccaggcaatggcatccatgcacggctgcgtttggtggcatggtcgcatgatgggcggtggtggtgccattaatggcaatatctttatacccggcagtcgggagaacttcagacgctggaattcaaccggctgggattggacgcaggtccataagacctactctcgcctgcaacaacgtctgaatccctcctatcttcaaccgaataagctaaacttgaagttggccaacctaatatactccggttccgcagaactgggtgtaccacggatgaaacagccattgatagcgggtgctacgttcggttacactcatcatgtcccggtgaccgttaaccaaagacgaagggccagcagcgcacgtttgtatttggccaatgatcaagtgaatagaagaggtaacctaaaggtaatacgaggagctcaagttcagcgggtactactaaatgcggctggatcccgagcaactggagtgatttataccctaaatggtgtggaacacacggcgaaaacgttaggcgaagtcatcctaagcgcaggaaccctcaattccgccaagttgcttctgctttcgggcatcgggccgcgggaggagctacaaagatggaatataactacgcaccaggaccttccagtgggtcgaaatctacaagatcatggaatgatgccattgtttctgctcttcggttcgaattgtgccgtcaacagtacacgggatcccacagaaaatccctatgctcctgtatctatcacacagtatctactggataatcagaagggtcctttggccagtggcttctacatgatgggctacatcaattccagttcgccgagcagcagtcgtggtgaacccgatctgcatgtggtggcccacactcttttgcccaaaggaagtaccggaagctttggctatttgggctttcggccagagttgattcaggctcagcaggatatcttgcagaaaggagatctactgcaaataatgggctcactgttgcgtcccctttcacatggcaaagtgagtctatcgagtaaaaattccgctgatcaggcaaaaatcgaaaaccactatggcgaggctgtagaggatcagcagacgctacttcgctatgtgcgatatattcaaaagttgagcaaaacccgaccttttcgtcgatgtggtctacgactttggaagccgcccctccacgaatgcgatacattagctgccgattccgatgactactggttgtgttacatccgatatttctatgtgggtgcctggcattccgtgggcacttgtcgcatggctccaagaaagggagtggattcccaggagaatggaggcgtggtggacgaaagattgagggttcatggggtcaagggtcttcgtgtggtggatgccagcattatgccggaattgccagcgggcaatacgaatggacccgccatgatgattggtgaaaaaggggcacaaatgattctcgacgatcgggaggcgaataatgaggtgattcaggaatgctgatcttttataatatgtattataactttaagagaaactgcaaataagttttgatatctttgtaaaaaaccaaaaccatatctttgtttgaccaataaagctttagcataagtagttggtatggaaggtttcacatttttgtgatagtataataatttttaaactacttcaaatacttgatatttacaaccgatttttcatcataacttggcgatgaagagtcgtatggctgaaagattaaatgctttaaacaactaattaacagtgttatagacgacttttttcgtgggtatgaaaattaattttttgttttatttttttttttaataactcaaagaggtattcaatatttgcgttatcaagaaagtattagtacttactcaaacttaattacaaatcgatttggatttaaaaaacaaactcaacgaggtatgatattccatattcgggccaattatttcaatgttctgcttataatattgtctatttttttctcgaaaaatctgggaaacgaattttgccaaaaaatgcaatattaaagattggttttttgggtataacttggctaaaaatggtcacacagcaaaaaaaattaccattttattctccttataacaaatactaatcgcccatttcacttttaaacggattttgtaaaattaatttttggccaaattttcgcatttttttaaggggtaccatcataaaaatatgcaaaaaattgaaaaaatttagaattcccaaatttgaatacaaatcgatttggatttaaaaaacaaactcagcgaggtatgacattccatatttgggccattattttcaatgttgtgctcaaaatactgattatttttttctcaaaaaatcagggaaacgagtttcggccaaaaatgcaatatttaagattggttttttgggtataacttggctaaaaatgttcacccagcaaaaataattaccattttatactcctgattaccaattctaacaacttctttcactttta

SEQ ID NO: 20210 - DNA, 1815 bp, DROSOPHILA
atgcaatcggtggccatagctctgaatgcatccagcctcgccctggccaacaacaccgcctggccgctgcaacacgaaccgccagaggatcggttggagatcgagagctatgactatatagtggtgggtgcaggtagtgccggatccattgtggccagtcgattgagtgagctgtgccaggtgaaggtcctgctgctggaggagggacaattaccaccgctggaatcggaaatctttggtctgaccggtgcactgcatcatgacgagcggtacatgttcctggaggaagcagtgcccaatccgaaatgctgccaggcaatggcatccatgcacggctgcgtttggtggcatggtcgcatgatgggcggtggtggtgccattaatggcaatatctttatacccggcagtcgggagaacttcagacgctggaattcaaccggctgggattggacgcaggtccataagacctactctcgcctgcaacaacgtctgaatccctcctatcttcaaccgaataagctaaacttgaagttggccaacctaatatactccggttccgcagaactgggtgtaccacggatgaaacagccattgatagcgggtgctacgttcggttacactcatcatgtcccggtgaccgttaaccaaagacgaagggccagcagcgcacgtttgtatttggccaatgatcaagtgaatagaagaggtaacctaaaggtaatacgaggagctcaagttcagcgggtactactaaatgcggctggatcccgagcaactggagtgatttataccctaaatggtgtggaacacacggcgaaaacgttaggcgaagtcatcctaagcgcaggaaccctcaattccgccaagttgcttctgctttcgggcatcgggccgcgggaggagctacaaagatggaatataactacgcaccaggaccttccagtgggtcgaaatctacaagatcatggaatgatgccattgtttctgctcttcggttcgaattgtgccgtcaacagtacacgggatcccacagaaaatccctatgctcctgtatctatcacacagtatctactggataatcagaagggtcctttggccagtggcttctacatgatgggctacatcaattccagttcgccgagcagcagtcgtggtgaacccgatctgcatgtggtggcccacactcttttgcccaaaggaagtaccggaagctttggctatttgggctttcggccagagttgattcaggctcagcaggatatcttgcagaaaggagatctactgcaaataatgggctcactgttgcgtcccctttcacatggcaaagtgagtctatcgagtaaaaattccgctgatcaggcaaaaatcgaaaaccactatggcgaggctgtagaggatcagcagacgctacttcgctatgtgcgatatattcaaaagttgagcaaaacccgaccttttcgtcgatgtggtctacgactttggaagccgcccctccacgaatgcgatacattagctgccgattccgatgactactggttgtgttacatccgatatttctatgtgggtgcctggcattccgtgggcacttgtcgcatggctccaagaaagggagtggattcccaggagaatggaggcgtggtggacgaaagattgagggttcatggggtcaagggtcttcgtgtggtggatgccagcattatgccggaattgccagcgggcaatacgaatggacccgccatgatgattggtgaaaaaggggcacaaatgattctcgacgatcgggaggcgaataatgaggtgattcaggaatgctga

SEQ ID NO: 20211 - protein, 604 aa, DROSOPHILA
MQSVAIALNASSLALANNTAWPLQHEPPEDRLEIESYDYIVVGAGSAGSIVASRLSELCQVKVLLLEEGQLPPLESEIFGLTGALHHDERYMFLEEAVPNPKCCQAMASMHGCVWWHGRMMGGGGAINGNIFIPGSRENFRRWNSTGWDWTQVHKTYSRLQQRLNPSYLQPNKLNLKLANLIYSGSAELGVPRMKQPLIAGATFGYTHHVPVTVNQRRRASSARLYLANDQVNRRGNLKVIRGAQVQRVLLNAAGSRATGVIYTLNGVEHTAKTLGEVILSAGTLNSAKLLLLSGIGPREELQRWNITTHQDLPVGRNLQDHGMMPLFLLFGSNCAVNSTRDPTENPYAPVSITQYLLDNQKGPLASGFYMMGYINSSSPSSSRGEPDLHVVAHTLLPKGSTGSFGYLGFRPELIQAQQDILQKGDLLQIMGSLLRPLSHGKVSLSSKNSADQAKIENHYGEAVEDQQTLLRYVRYIQKLSKTRPFRRCGLRLWKPPLHECDTLAADSDDYWLCYIRYFYVGAWHSVGTCRMAPRKGVDSQENGGVVDERLRVHGVKGLRVVDASIMPELPAGNTNGPAMMIGEKGAQMILDDREANNEVIQEC

SEQ ID NO: 20212 - DNA, 6750 bp, DROSOPHILA
ccttgacccccggattccggcggtcttgcccgccactcggggttccatgtcacgtgcgctcgctcggcggagtaagtatgtatgtatgtatgtgggtctgtgcggaattgattgatttgccagcgaaggtggcgcactggaagacagacagacagacagactgacagacggacggacggactgatagggctgatgaaattacaagtcgcgcatcgtcattcagaccgattgtgggcatgttatgcgagtaaacggattttgcggcaatgaaataattgccaacattacagaactggtagtgtctaattaacccgcactgataaagcggggtacatgccgccgctcagattttcaaaattgcatggccctgcattgagtgcccaaaatctgaaaccaaatattcgcgttccggtgtcgccgacagaagcggtggctacttagcaagtggaaccactgcgtccccgtccattccagttggatatggaacgccagccacatgagtttatcataaagcacccactaaatttttgccgctgctgttggcgaccacaatgtttgtaaatgtttttcaccgtcgaatggtatttcggggattgctttgtttgtcatttggggtatttgccaactgaccaactactgtccatctgaatgattttggtgtgcctcttttggcttaaatagcaatatattcagataccaataaaggcacgtctgatagaattcaggccacgggagcaatccgtttgaatttatcgtatcattgagttgtaagccgttttggccgttaatagccatcgaattctcatatcttcactggtctgcctagaatataagttattgacattctaatcattttcttgagcccatgatgatatttaaagtctagattagtttacggtttaaaaagcactgagctttgatgctgattcaatcagctgattcttaattcgtggtgattggctttattatcagctgtgatattccgtaaagccggcaaatgagcccttagatcgatgtaaatgtactatgttatttggcgcaaataaccacgctttttcgcggtcttttgtttacaaaattaatttgtaatttgtttatgaagttgtgcgtgttaaatactgtgttgcctaaagtagatcatagttcaacaaggaaatccttaacaaagtaagttaactaatttatataaatagccggcctgttttagaaagcccaaaaaagggttagagaacgcttttgtcttgaaaatttggaatatttggaaagtatacccttcccatgtaaacaacttcagctttgtgataaaaaaataggcactccgttttgctaaaagtaaaaaagcgcattaaaaccaaaaattaaagataaaatcgttaaatatcaggcagttaaaagatgtatcccattatggaacttatcattgtagctctgtaactcatcagctccagctctgccacctgagcatccgcaaatctcagcccctgatttcattttatggctctgtcggtgtgaaagtcactttgtggcaaactgcaagcaaagttctgcttatccctggggtcctgaattcggttcgttttcgctccaaatttcagcaatagtcagatgaagaattttcagtgtgtgatttttattgtggctgcaattcgcctgggtcttgttaacattcgcatttttctcggaaaattcgttcggttgcagtataatgatgatgctgggagttgatttcgctgagttactgcaataattggaatttaaattttaaggactttccgtcagctgtctttcgagtgaatcctcggttatcccttctttccagaaccttacattttacatctattgcacagccctaatattacctacctgttttctttgtttcaggtcacctggatatatatttatagcggaaaggttcgcgaaaataattaaatatcggttagcgcgaggaaaatccatcgatccgacagctgcggctgttaatcttacctgatcgctgctagttggattaaggaaaatctgaggcagtgggtgggcaataaaatctgcacccaatccatattttacctgatcattgtatataagctattagcaaaatgccagaaagccacagttacaaactgaaacgtctaacgtcaacaacaagacagcaaactaataccaaaatggtcctaagcaattccacgccgaacaaccagtccaagcacaaccagatggtagtggacacggcagccatgaacagtgatgatctcagcgagctactgcagctgaacgcggagatcgaggaacgtcgtcgctccagccgccacggagatgccagcaccgcctgtggcctgctccgagctacgatgaccagggaggaactcttcgagatttcctcgctggatgatgatcgcttcctgaccgccctggagtaccaaaactcgtttgcatcaccgcgccgagtgcaggttaccgacctggacttgtccagcatcgagaatctgatgaagtacttcgacgaagaggtacctgtgacgccaacaaagacactgggtaccaccaaggcagcgggtaacacgggtaaagtggccagcacaattgccaagttggccctccagtcggatccggtcacgccgcccaagccaaaagtgggtagtggccacctaaagatcagcgagctcaagcagaaatacgaacagctgccggagatggagacgccacgctctgcatatcaggcttccagaaaggtatccgcgtcgctgcccatgaaggtcaaggagatggcccagctgtttaactccaagatcagccaggtgatgcgacgtacagaggaaccacagtatgttcagctgcaaaatgagatgtcgccggaggttaaggcacagaaccgcctggtgtcgccattagagtccccagttcaaggaccctgcctggtggccgaggaagttttccgcgagttgagcgtgaaggacaaagccctgctgttcaacaagttcatcggtgacatggcagccaagcaccccaagttcactgcacatgccgcagatctcaaggagaaggtaaacaaacaggtggcacgaggggaggtggtggctgaacgacaagccagtgttaagcatctcgcccaggagttggaagcgaaatgtatcctggagccgggatcgccaccgcgaccaggtggtgtctctccccccaagacgactgagagcaaaacggagacatgcacctcccagctgcatgtgagcaccctgactgtgatcctcaagccaagtccagagcgcagagctccacagccacgaccccgccgatgcctggatcgtcagagcgatgaacatgcccgagagccatcccagaagcgaaacctcgccgcgattcgcaccatgatgccaacggaggcctatgcgccaccaaagaaaatccgacgcactcgacaggagcgcaccggtgcggatagccaaatgttttttcagaacgaacacctcgaaaccctgttctacagctggctcagctcggagaacggtgtccagttcgacattacgagtgtgtctgacggtcagcagaccattgagatagccaccgaggagggtaatcttctggagcaaccgctacttgagccgagcaccgctactctggaggatgtgagccaaaagtccgccgtcgagcggcttctggaggaggccatcgcaaaattagagctagataacgagtccaagaaggagacacaagtcgaggaaaagaaggagatggatacagctcaggatcccatcgttcaagtcactccgcgacgcattaagcgccaggcgccgccagtgccagccccacgacccagtctaagtcaagttacctccagtgcatccagctgcaagcaatccgaggctgaggaaagtgaatccgggttgtctacactccccaaggtaagtgatatctttaataagtggattcatgaatgttgactcattgttcttaattttctatcacagataaccagcgacgaatcccagccagagacgcccaaggatgacttgcagacaggtgaatttgattttgccaagccccagcgtccgccacgcaagaagaaaatgcgccgaactcttacatggaaaaaggagaactccattgtcgaggccactgcaataacctcaacggactccgattcagattacaagcctccgctatcaggagcggccaagaagaagtccggtgctatctgtaacccacttccaatgcccgagccaagtttcattgagttggataagtcactgatgcgccacttgaactcgccccggaagatcaagtcggcatacaccctcaccgtgatgtcatctccctcgccgaatgcagacagcgatcagtctcctagtcagacaccaaggcaatccctggtacaggccatgcgggacagtttcgtggatcagggctttgagacatgctcgaacgatccgatggacaacagtccgatacgccgatcttcgcttggagccacggaatcgaagccatccggtttttccacgccagttaagggacgccatgcttccagtccggcgcaacaacaactgttcagtccgattctcatccaggagcgccctcgtcgcagttccctggccatgcaagtgatccgggaggatcatccgctcgatctggacgccacctccagctcaccctccacaccgtgcagtgagcgggagttcttcgccaatgccccgactgttgaaattgataactcccaggatgagagtccgaccggcaaggcgcactcaatgttctggatcacctctggggacttcacagtctccctggaaatcttcaagaacagcccggagcgcctgcgactgctgtacgaaatcttcacccagaaaagctgggagactcgtgacctggccttcggaatcgacggacacaagttcattcgcggagctcccagttccgactccgtccgacagtcgctgcccgagcgtccacccagtgtgaagggctgctctcactattggttcgccagcggagatctcgcagtgcccttcagcggaaaactgatgtccagcgagaagatcgagcggctgtttgccttcctcagcggagagcagtcggagttgcgcttcggcgttgaccacattgagttcagcagcgtgcctgagttctggcccaccacccagaagtattccatcgagagcagctacagcatactggtgggtctgcagacaggtgccagcaatggcctggagggtcgcagcaagtactcctggcccaacagcagcatcagtgccaaccaggcgatcaagaccagcgacctggatcagacggagttcgagtccgatagcttcggcaacaacagtggtaggctgtccttttcgcctgatctcttctccctggactacgaggcggttcccctggacgagctgtttgccaaggctcctccctctgccgccacacccgccatgtccgtgccgcaaatgatgcagaccctcaagcagcagcagtccaaacttcgcagtgtggagcagcgcattcgtggctacgccaagcccgcgaatctggccgactcttcgctggagcactgccgcaacacgccgcaatatgtccacaagctgcgctccatcatccgggccattgacaacattggacgcgacgatggcttccgcggctgctcgatggagcagctcgagagcttcatgtacttcctcagcgagtatgcggatgtgtgcctggccaactgcagcgagcacatggacaagattctcgacaccctgatggaccggagggccgtggaggtctgagcgatggtgctacctcatcgggatctgactttattttaagattttataaacaattagttcctagacattaacatataatgttacaaagattttagataataaactttaaagagaaaagttaaagccattcagtgtatttccttgggcatgcagagtccaacaaaatcaggggttctggagggcatagctccttgctatcctgcagacacgtaggagtctggcaagcatcacgtttcctgcaagcacatggtttctttttcttgctctcatcaagcaaatgctcctgttgcatcaacttcagacattcctggccaaggataccatgttagtgcacatccagtggccaagggaatccgtttggggccaaaaggagttgctgggttcggttcaataacaatttcacgtgcaaaagtgctgcgcaaacatggtatcagagaaaagtactaactattaatgcaataaatggttacttgttcaacataaaataaaagtcccgtcgacattcttttgactttcaaataaaaaataatagttatatttttgcacaagtaccactggtcaatatcaagaaccacagattactgaaataaaagtcgcttaagttttaagaagcaatcccaaatacatagatattttatttgtttctttcgcagtgccagtttgttccgctcggggagcaagttaataaatatacattatcactcttatcgttaagaaacacaaactaaggcctatgatatatgtaggtatttaaatatatatatatatatgtatttctgtatgagtagtttagaacttacatatttggatttggctttatttggattatttctcaactgtaaacccgtcttaactgatcagctaactaaattatgtatcaacagttttcgcttcaatcgtgaatattcgtaattcatatttgcttagttacttatttaggttaatggtttttgattaatgcattttaggtgcctgtttttcagagtatttaagcctttcg

SEQ ID NO: 20213 - DNA, 3970 bp, DROSOPHILA
agcccttagatcgatgtaaatgtactatgttatttggcgcaaataaccacgctttttcgcggtcttttgtttacaaaattaatttgtaatttgtttatgaagttgtgcgtgttaaatactgtgttgcctaaagtagatcatagttcaacaaggaaatccttaacaaagtcacctggatatatatttatagcggaaaggttcgcgaaaataattaaatatcggttagcgcgaggaaaatccatcgatccgacagctgcggctgttaatcttacctgatcgctgctagttggattaaggaaaatctgaggcagtgggtgggcaataaaatctgcacccaatccatattttacctgatcattgtatataagctattagcaaaatgccagaaagccacagttacaaactgaaacgtctaacgtcaacaacaagacagcaaactaataccaaaatggtcctaagcaattccacgccgaacaaccagtccaagcacaaccagatggtagtggacacggcagccatgaacagtgatgatctcagcgagctactgcagctgaacgcggagatcgaggaacgtcgtcgctccagccgccacggagatgccagcaccgcctgtggcctgctccgagctacgatgaccagggaggaactcttcgagatttcctcgctggatgatgatcgcttcctgaccgccctggagtaccaaaactcgtttgcatcaccgcgccgagtgcaggttaccgacctggacttgtccagcatcgagaatctgatgaagtacttcgacgaagaggtacctgtgacgccaacaaagacactgggtaccaccaaggcagcgggtaacacgggtaaagtggccagcacaattgccaagttggccctccagtcggatccggtcacgccgcccaagccaaaagtgggtagtggccacctaaagatcagcgagctcaagcagaaatacgaacagctgccggagatggagacgccacgctctgcatatcaggcttccagaaaggtatccgcgtcgctgcccatgaaggtcaaggagatggcccagctgtttaactccaagatcagccaggtgatgcgacgtacagaggaaccacagtatgttcagctgcaaaatgagatgtcgccggaggttaaggcacagaaccgcctggtgtcgccattagagtccccagttcaaggaccctgcctggtggccgaggaagttttccgcgagttgagcgtgaaggacaaagccctgctgttcaacaagttcatcggtgacatggcagccaagcaccccaagttcactgcacatgccgcagatctcaaggagaaggtaaacaaacaggtggcacgaggggaggtggtggctgaacgacaagccagtgttaagcatctcgcccaggagttggaagcgaaatgtatcctggagccgggatcgccaccgcgaccaggtggtgtctctccccccaagacgactgagagcaaaacggagacatgcacctcccagctgcatgtgagcaccctgactgtgatcctcaagccaagtccagagcgcagagctccacagccacgaccccgccgatgcctggatcgtcagagcgatgaacatgcccgagagccatcccagaagcgaaacctcgccgcgattcgcaccatgatgccaacggaggcctatgcgccaccaaagaaaatccgacgcactcgacaggagcgcaccggtgcggatagccaaatgttttttcagaacgaacacctcgaaaccctgttctacagctggctcagctcggagaacggtgtccagttcgacattacgagtgtgtctgacggtcagcagaccattgagatagccaccgaggagggtaatcttctggagcaaccgctacttgagccgagcaccgctactctggaggatgtgagccaaaagtccgccgtcgagcggcttctggaggaggccatcgcaaaattagagctagataacgagtccaagaaggagacacaagtcgaggaaaagaaggagatggatacagctcaggatcccatcgttcaagtcactccgcgacgcattaagcgccaggcgccgccagtgccagccccacgacccagtctaagtcaagttacctccagtgcatccagctgcaagcaatccgaggctgaggaaagtgaatccgggttgtctacactccccaagataaccagcgacgaatcccagccagagacgcccaaggatgacttgcagacaggtgaatttgattttgccaagccccagcgtccgccacgcaagaagaaaatgcgccgaactcttacatggaaaaaggagaactccattgtcgaggccactgcaataacctcaacggactccgattcagattacaagcctccgctatcaggagcggccaagaagaagtccggtgctatctgtaacccacttccaatgcccgagccaagtttcattgagttggataagtcactgatgcgccacttgaactcgccccggaagatcaagtcggcatacaccctcaccgtgatgtcatctccctcgccgaatgcagacagcgatcagtctcctagtcagacaccaaggcaatccctggtacaggccatgcgggacagtttcgtggatcagggctttgagacatgctcgaacgatccgatggacaacagtccgatacgccgatcttcgcttggagccacggaatcgaagccatccggtttttccacgccagttaagggacgccatgcttccagtccggcgcaacaacaactgttcagtccgattctcatccaggagcgccctcgtcgcagttccctggccatgcaagtgatccgggaggatcatccgctcgatctggacgccacctccagctcaccctccacaccgtgcagtgagcgggagttcttcgccaatgccccgactgttgaaattgataactcccaggatgagagtccgaccggcaaggcgcactcaatgttctggatcacctctggggacttcacagtctccctggaaatcttcaagaacagcccggagcgcctgcgactgctgtacgaaatcttcacccagaaaagctgggagactcgtgacctggccttcggaatcgacggacacaagttcattcgcggagctcccagttccgactccgtccgacagtcgctgcccgagcgtccacccagtgtgaagggctgctctcactattggttcgccagcggagatctcgcagtgcccttcagcggaaaactgatgtccagcgagaagatcgagcggctgtttgccttcctcagcggagagcagtcggagttgcgcttcggcgttgaccacattgagttcagcagcgtgcctgagttctggcccaccacccagaagtattccatcgagagcagctacagcatactggtgggtctgcagacaggtgccagcaatggcctggagggtcgcagcaagtactcctggcccaacagcagcatcagtgccaaccaggcgatcaagaccagcgacctggatcagacggagttcgagtccgatagcttcggcaacaacagtggtaggctgtccttttcgcctgatctcttctccctggactacgaggcggttcccctggacgagctgtttgccaaggctcctccctctgccgccacacccgccatgtccgtgccgcaaatgatgcagaccctcaagcagcagcagtccaaacttcgcagtgtggagcagcgcattcgtggctacgccaagcccgcgaatctggccgactcttcgctggagcactgccgcaacacgccgcaatatgtccacaagctgcgctccatcatccgggccattgacaacattggacgcgacgatggcttccgcggctgctcgatggagcagctcgagagcttcatgtacttcctcagcgagtatgcggatgtgtgcctggccaactgcagcgagcacatggacaagattctcgacaccctgatggaccggagggccgtggaggtctga

SEQ ID NO: 20214 - protein, 1173 aa, DROSOPHILA
MVLSNSTPNNQSKHNQMVVDTAAMNSDDLSELLQLNAEIEERRRSSRHGDASTACGLLRATMTREELFEISSLDDDRFLTALEYQNSFASPRRVQVTDLDLSSIENLMKYFDEEVPVTPTKTLGTTKAAGNTGKVASTIAKLALQSDPVTPPKPKVGSGHLKISELKQKYEQLPEMETPRSAYQASRKVSASLPMKVKEMAQLFNSKISQVMRRTEEPQYVQLQNEMSPEVKAQNRLVSPLESPVQGPCLVAEEVFRELSVKDKALLFNKFIGDMAAKHPKFTAHAADLKEKVNKQVARGEVVAERQASVKHLAQELEAKCILEPGSPPRPGGVSPPKTTESKTETCTSQLHVSTLTVILKPSPERRAPQPRPRRCLDRQSDEHAREPSQKRNLAAIRTMMPTEAYAPPKKIRRTRQERTGADSQMFFQNEHLETLFYSWLSSENGVQFDITSVSDGQQTIEIATEEGNLLEQPLLEPSTATLEDVSQKSAVERLLEEAIAKLELDNESKKETQVEEKKEMDTAQDPIVQVTPRRIKRQAPPVPAPRPSLSQVTSSASSCKQSEAEESESGLSTLPKITSDESQPETPKDDLQTGEFDFAKPQRPPRKKKMRRTLTWKKENSIVEATAITSTDSDSDYKPPLSGAAKKKSGAICNPLPMPEPSFIELDKSLMRHLNSPRKIKSAYTLTVMSSPSPNADSDQSPSQTPRQSLVQAMRDSFVDQGFETCSNDPMDNSPIRRSSLGATESKPSGFSTPVKGRHASSPAQQQLFSPILIQERPRRSSLAMQVIREDHPLDLDATSSSPSTPCSEREFFANAPTVEIDNSQDESPTGKAHSMFWITSGDFTVSLEIFKNSPERLRLLYEIFTQKSWETRDLAFGIDGHKFIRGAPSSDSVRQSLPERPPSVKGCSHYWFASGDLAVPFSGKLMSSEKIERLFAFLSGEQSELRFGVDHIEFSSVPEFWPTTQKYSIESSYSILVGLQTGASNGLEGRSKYSWPNSSISANQAIKTSDLDQTEFESDSFGNNSGRLSFSPDLFSLDYEAVPLDELFAKAPPSAATPAMSVPQMMQTLKQQQSKLRSVEQRIRGYAKPANLADSSLEHCRNTPQYVHKLRSIIRAIDNIGRDDGFRGCSMEQLESFMYFLSEYADVCLANCSEHMDKILDTLMDRRAVEV

SEQ ID NO: 20215 - DNA, 4336 bp, DROSOPHILA
ccaagtgctataaatgattttataatactcgtttaatctggttacgactttttcggagcgataaaaactgtgcagtttggaactcagttttcaaagccatttttcttatctaaatgtgttatcaaggaaatctctgttacgttgttttttttttcattctaacttggctgcagctcttaaatggcgagcaatgctattcaaatatatattatattatattttaattatatatgaagtttaaaaaatgttataaaattttaaaaacaattttcttattttttaaatctatgctttgattttagaaatatagcacatatgtaattattaatattatattatattatggctatttgtttatatgcacttcatcaaaatattccaattgcatccagaatgcgaagcgatcgaaaaatatataaagtaattggaagaaagtagttcaaatgaccgatgaactcatttcgattgctattctggttctcatcgtgatgatgccgattcagaaactgaacaatttctatacactactaacatttatttaaaacgtataatgcttcactctttatcgttaaaaataaagacacacacaaaaaagacaaacaacgatgtttcgataagcattaaagtcaaagtaagctttttacagttttcacattgattaaagttttataaagctgctaagaatgtttaaagaaatccgcaaaacatttttacaacatttacattaaaatttagtttggtttccttaccgttttgtattttcttcttgtgtattgaaaaattaaattaatcaccattaagcgtatttattatctcgctctcgctctgccaatggctaagtcaacgtcctcgtcggttggtcgccgcagggggaggatgcactgtacctgcttatcagatcagtggctataaaagcgaatcttcagccgcgactgcgcctcagagtcaaatagaaccgggtccaaacgagtggcacaggctaacggaaaagcaaaacgcaatgtcactagacggtggccagaatcttaacttggatgcggcggccattggcccagatccatgtggatccgttccagcaacacctggcattggattatggagtggcatggtgaccattcttgtgcaaacgcttctatcgtcccagtgtctagtttcgcccgccagccagtggccagtggactatgttggcgatttgagtcaaccctacgattttgtggtcattggagcaggatctgcgggatccgtggtggccagccggctgagcgagaatcccgactggagagtgctcgtcctggaggcgggcggtgatccacccgtcgaatctgaggtgagtgccatcatatattggcatatgccatgagatcgtaccttggttttttctaatcttacacacaaagctctgtaaaatacaatctaaactaaacttttccactcttgagcttttccatctactaacgaggcaaaacaaacccacaccaacaccataccataaaataataatcgtaaatgtaattataatgatggaataaacaattctcataaaaggaggtaatagagttaccaaaatcaattgatgttactgcatttaaatttgcatacaaattattgtagcattcttcatagcattagtttaaaatttccctcaaaaatcattttatgtctataagtatgcaataattagaaactaatatattatatataatattctatattccctcgcagttgccggcactattctttggactgcagcacacgaacttcacgtggaattacttcacagagcccagtgatgaggcctgtcaggcaatgaaagatggtcgctgctattggccacgaggcaaaatgctgggaggatcgggaggagtgaatgccatgctatatgttcgtggcaatcgcagggacttcgatggctgggcggcaatgggaagcacgggctggagctatgatcaagtgatgccgttcttcgaaaagtcggtcacgcctcaaggtaatgccacccatcctaagggttatgtaaccctaaaaccgttcgagcgaaaagataatgacatacatcaaatgatcatcgatggaggtcgggagttgggacagccatatgtggagagattccaagagggcagtgatacgggctattcccatgtgccgggtaccgtgagacaaggtcaaaggatgagcacaggcaaaggatatttgggtgcagtctccaagtctcgtcccaatcttcatgtggtcaagaatgcactggtcaccaaattggatctcgatggcgaaacggtgaaagaagttaaattcgaaagggctggtgttacccatcgagtgaaagtgaccaaggatgtggtgatctcggccggcgccatcgattcaccagcacttctcctgcgttccggcattgggcccagtaaacatttgaaggagttgggcatacccgtaaaactagatcttccaggagttggacgcaatctccaggatcatgtccttgtgcccgtctttttgagactggatgagggtcaaggcgagccaatgacggatcaggctgccctggatagcatatatcagtacctaatctatcgcgccggacctctggctgctcacagcaccgcctccttggtggggtttataaacacaaatgcgagtagcgatggtgcttatccggataccgagaaccatcatatgttctttcagagagcccatcacgcttcgctagaactttttaccaagggtctatccattcaagaccaatatacagaagtattgcaagaatatcttaaggactcccatttgctgtgcgtttttgttctactctcacatcctgcggccagaggtgaattgcgtctaaagagtacagatcccaaggtgccgccgatcctaaccagtaattatctaacggaatcggaggatgtggccaccttgatgaggggcatacgctacatcgagtccctcgaacagacgaaagcttttcaggatcatctggccgagatcgctaggattccgattaaagagtgcgatcaaatagagaactaccgcagtgaggagtactggcgatgctatgccaaatacttcaccgtcacctgttaccatcaatcgggcaccgtgaaaatgggccccgactacgataacgaggcctgtgtgagtcagcgtttgaaggtccatggattggagaaccttagagtggcggatgccagcataatgccagcggtggtcagtgccaatacaaatgcggccacggtgatgattggtgagagggcggcccacttcatccaggaggattaccagggtgaggcagttggcgccaatggaggtctatgggtgccgcatatgcatgcggatgaattctagtttgatgattccaaacacagaactcgtttcgattggcaacttgtcaacaacatcagttgttgatatcaaaacaaaatgcatccatttaaatgtatagatttcatcacaattcggtttatcgaactatgtaaattactacaccctttcctttgcattacgagaaggttcttagcaacaagtttagcccacgtttaacaaaattcttaaatcgatatttataaaatgttttgcaagtatttttcaaaaagattttttttttgttattgtttaagtattggttattaaatagagttttttttttctacaattataataaaaaatttagaaaacaaaagccaatgcttatgtgtttgtttttttcctaaaatatgaaatatgcgcttttataattataagttaatagattatataaatatcataaatgaatcctacagcttgccaattaatgatggacctaagcgagcttcgaaaaacaaatagataaactttctgtaacatttcgccgtagaattctctaacttatttacaaggaagaaccaagctacggataaagaaatagatacaacataaaaatcagcttctaaagtacctgtcattattaagatgtttagcatatttggtccaaacttaacccacaaacccaaacaacaggtttacgctggcgataccccaacaaaaatacaacctgctcttatcagctggaagcgaaagaaaaaaagaagaaaaaaacacggccaccaacgagcataaagataaccgagtgcagagcccagggaggctatagattctccattctccaatctctaatctcgattttgggtggcttctatgggtcgctgcgggcttatcacaccacggttagctaatcttcgagtgataaggggagtgccgtgcagctgctgaaggcggaaggtgcgtctaatttatgtctgtgtatatatgggtatatatgccatacacctagttacggctatatactcgtacacatacgactcgaagc

SEQ ID NO: 20216 - DNA, 1941 bp, DROSOPHILA
atgtcactagacggtggccagaatcttaacttggatgcggcggccattggcccagatccatgtggatccgttccagcaacacctggcattggattatggagtggcatggtgaccattcttgtgcaaacgcttctatcgtcccagtgtctagtttcgcccgccagccagtggccagtggactatgttggcgatttgagtcaaccctacgattttgtggtcattggagcaggatctgcgggatccgtggtggccagccggctgagcgagaatcccgactggagagtgctcgtcctggaggcgggcggtgatccacccgtcgaatctgagttgccggcactattctttggactgcagcacacgaacttcacgtggaattacttcacagagcccagtgatgaggcctgtcaggcaatgaaagatggtcgctgctattggccacgaggcaaaatgctgggaggatcgggaggagtgaatgccatgctatatgttcgtggcaatcgcagggacttcgatggctgggcggcaatgggaagcacgggctggagctatgatcaagtgatgccgttcttcgaaaagtcggtcacgcctcaaggtaatgccacccatcctaagggttatgtaaccctaaaaccgttcgagcgaaaagataatgacatacatcaaatgatcatcgatggaggtcgggagttgggacagccatatgtggagagattccaagagggcagtgatacgggctattcccatgtgccgggtaccgtgagacaaggtcaaaggatgagcacaggcaaaggatatttgggtgcagtctccaagtctcgtcccaatcttcatgtggtcaagaatgcactggtcaccaaattggatctcgatggcgaaacggtgaaagaagttaaattcgaaagggctggtgttacccatcgagtgaaagtgaccaaggatgtggtgatctcggccggcgccatcgattcaccagcacttctcctgcgttccggcattgggcccagtaaacatttgaaggagttgggcatacccgtaaaactagatcttccaggagttggacgcaatctccaggatcatgtccttgtgcccgtctttttgagactggatgagggtcaaggcgagccaatgacggatcaggctgccctggatagcatatatcagtacctaatctatcgcgccggacctctggctgctcacagcaccgcctccttggtggggtttataaacacaaatgcgagtagcgatggtgcttatccggataccgagaaccatcatatgttctttcagagagcccatcacgcttcgctagaactttttaccaagggtctatccattcaagaccaatatacagaagtattgcaagaatatcttaaggactcccatttgctgtgcgtttttgttctactctcacatcctgcggccagaggtgaattgcgtctaaagagtacagatcccaaggtgccgccgatcctaaccagtaattatctaacggaatcggaggatgtggccaccttgatgaggggcatacgctacatcgagtccctcgaacagacgaaagcttttcaggatcatctggccgagatcgctaggattccgattaaagagtgcgatcaaatagagaactaccgcagtgaggagtactggcgatgctatgccaaatacttcaccgtcacctgttaccatcaatcgggcaccgtgaaaatgggccccgactacgataacgaggcctgtgtgagtcagcgtttgaaggtccatggattggagaaccttagagtggcggatgccagcataatgccagcggtggtcagtgccaatacaaatgcggccacggtgatgattggtgagagggcggcccacttcatccaggaggattaccagggtgaggcagttggcgccaatggaggtctatgggtgccgcatatgcatgcggatgaattctag

SEQ ID NO: 20217 - protein, 646 aa, DROSOPHILA
MSLDGGQNLNLDAAAIGPDPCGSVPATPGIGLWSGMVTILVQTLLSSQCLVSPASQWPVDYVGDLSQPYDFVVIGAGSAGSVVASRLSENPDWRVLVLEAGGDPPVESELPALFFGLQHTNFTWNYFTEPSDEACQAMKDGRCYWPRGKMLGGSGGVNAMLYVRGNRRDFDGWAAMGSTGWSYDQVMPFFEKSVTPQGNATHPKGYVTLKPFERKDNDIHQMIIDGGRELGQPYVERFQEGSDTGYSHVPGTVRQGQRMSTGKGYLGAVSKSRPNLHVVKNALVTKLDLDGETVKEVKFERAGVTHRVKVTKDVVISAGAIDSPALLLRSGIGPSKHLKELGIPVKLDLPGVGRNLQDHVLVPVFLRLDEGQGEPMTDQAALDSIYQYLIYRAGPLAAHSTASLVGFINTNASSDGAYPDTENHHMFFQRAHHASLELFTKGLSIQDQYTEVLQEYLKDSHLLCVFVLLSHPAARGELRLKSTDPKVPPILTSNYLTESEDVATLMRGIRYIESLEQTKAFQDHLAEIARIPIKECDQIENYRSEEYWRCYAKYFTVTCYHQSGTVKMGPDYDNEACVSQRLKVHGLENLRVADASIMPAVVSANTNAATVMIGERAAHFIQEDYQGEAVGANGGLWVPHMHADEF

SEQ ID NO: 20218 - DNA, 4055 bp, DROSOPHILA
tgacactacagtggctctaattgccggttgtgaggattgcgcatacgccccgttgacggcggcaaggatatgaagaaaaacgtcggtgagacaaattaaacgcgtcatttccttattaaatatcaaaatctaatcttgctgtatattaaaaagtatttgggcaccaaaaatcctgataaaatgaacagtacaatctgcttcctttggaatcaaggaactgtcggagtttcaagtttaaagaccccccaaaatactggcgcccatttaaaaaggggtgtacatatacatttgcctatgacagtggcgcaatatcaaagggtataaataacacatatagcctagtcacttactgtacagctttatgttgccgtccatgtcgccccgaggatttttggcgacgcacttgtagttgccataatcgctgctctgaacgttggtaatcgtgagccgcatggtcgccttgtacgacggatggccgggaatggtttcggttctgaaagtggagagacggaggcatcagcgtgaggcaagttcaatgacagccattgtgctcattgtgggtcagttccacaacagcccacaatcgggtatcaaggccaaggtgaaactgataagcgcgcacttatgtctaatcaaaatgcgacctagcctacaaagtacagtggctccaggtactgaagatccaatttaaagtcaaatattataatatcttacgagtgtttaatgctttgaagaatatgccaccaaatggggtataaagtacgttctaggatcatgttcttcgaactttgaacctattaaagcatttttgttaattatcacctttgcctgaaaatagaaaggtcaagtggtcaagtactgggtgtgtatatatagctaggatccactgctcctcccacgatgatgactgacaggcgatgggcctgctctagtccgcagtctccgcgatccgggcaaatcgtagtccggccagttgcaatttgtcacagtcgaaaccatcatgctgaagctaagcctagtggcctggctcatattttcgctggcttggcgcaccacgcccaccgcctgtcgccagaccaacgcaccccagagcgttcaggaaatgctggccgagcagctgcaaagctacatggatacgaaggcgcgtccctgcgagaacttctaccagtacgcctgcggcaactggcagatccagcagcaggagcagcactccctgcgcgacagagattggacgagggatcggcagcggtaccagggtcagatgctgcccaccgacaccctgggactgatagaccactccgtgaatcggaagctggagctgctgctgcggcgaaggaatgagagctccttcgagtcggactcctcgattctggagcagatgcgactctactaccgttcgtgcaaacgccttaagccgtacaacctcaagaagtacctgcagctcctgccccccagcaactccacgcagtggccatcggtgggtcggggctggcgtccggagcggttcgactggataacgaccttggggcgactgcgtctgcacggactgaacggggtgctgctgcgggaggaggtactgccgcgatgggatgactctcgcaactacagtatctatgtgaacaagccgagtcgccaggagacgcagcccatgggagaaggtgccatgatcgagctgcttctggacattgggcagacaaagcgaacggccaatgccttggctcgccaggtggacgacttcgaacgaaaattgcaccgcctgcaggagctggaggacgacgaaggaccacgagaaatgcagcttggttacttggactcgtacctgccacagctacgatggttatccttcatgcgccaggtacgcattgactccgagctggatctgcgctccacattaatcatcgagaatattccgtacctcagggccctgagcgatctgatggaatcggagagcccggacaccgtttgcagctacatcatgctcaagtggttggccttcctcaagcaacagggacccgcggacatctcacgaggtgagtgcgtggccgccctcagaagagccatgcctctggccagtagctggctggtgggtcagcagttctccgatccggaatccgaatcctacgtaagctcactgttccagcgtttgaaggtgcgatttggccaaatcttggctgagaaccgaatgagactatcgccaccactggtgcacatcctgcagcagaaactgcgcgcagttcgactgcagatgggcttctttcagacggaggaaattgaggatgtggagcagtaccacgtccgcatcgacctgagcggccactccttctatggcaaccagctggtcttgctgcgacaacgcgttgaggcgaaccacgatctgctttacataaatgtgacaaacttcgcaaattccacggggagcaacttgagttacctgtcggaaagctgggaggccagcaactcgtcgcccctgtatgtgagaccacgcaatctggtcctggtgccgcacggtctgctccagctgcccatctggcatcgaaacattagcgccctgcagcagcacgccgtgatgggatttgtcctggcccacgagctggcacacggattcgatatgttgggaatggactacgacgccatgggaaacatcatggggcccgtggaggagatcggcgctagccgtcagttccgacaaggactccagtgtcttcagcaacagatggccaccggttccaagtggatcgacgaaaagctggccgactttgtggctctgcgtctagcgtatgagacctttttcggggtgcgggacaagcgggagcccagggatcctctgctgccgcagttcagccagcggcagctattcttcatcaccttcgcccagttcttttgcggccggacgcccgtgctcagtccgcgatctcagtcggaggctcatttgaagcacgccgcggatgagttgcgtgtgatgcagacgctggccaattttgaagagttctctagggagttcgggtgcgataagaaggccaagatgcaggccagccagcggtgccgcatctggtaatagttctctttccatctctcccacaggacatggcaggatccagtgatgaataaataaaatctcacctaacgaagagttttttaaatgtgagtgagtaactcgatggggtagtgaactcttttcagatccatctagtttattgtttaatatagttttatacactagtagatttcaagcactacttgaatccagttaccacagttggcacttttcaggctgattgctctttgctggacaaccaaaagcttcgtgaaacggcgcgaacccattgagcatttgctgcagacgcgtctcgtcgttgtcgtgaccaacgaagtttattggatcaccatcgccgcagaagaactgtgccagattgaggaagaagatttgttgcggcggaatggtcgtaaaatcggttagactcatttgcgagctgttctggaagtaggtggaataggccagatccagtccagcaatgtctgcaatacgctcgtccagatactgtgtactgttccggttcaggcactgtaaacccgccacaaagcgtggcgaactggatatctgcggtccgatttcgtgtatgttcccatatctgtcataataaagacccacggtgtcgactgagtgcatcaactcatgggcaagtacgaatcccaacaggctgtacttgaatatgtcgtggctatccgctgcaaagaatggctcctgtagaagtccgtgtggcacaacgatgatgtttagtcgcattaggtagtagggtccggagctcatggccgttttaggatccgacaagtagaagaactcatcgggtgtcggagcactttggttaagttgtaaaacctgctttctggtgcggaactccagcaggttaagatgttcacgtgcgtagtcgaaatcagggagcggaaagacaagatcctcatagtgccggctgacaaagctacgatggtcacgacctcttggcaaattcccaatattgagaacgacatgctgagcttttgtggcaaccatactgttc

SEQ ID NO: 20219 - DNA, 2055 bp, DROSOPHILA
atgctgaagctaagcctagtggcctggctcatattttcgctggcttggcgcaccacgcccaccgcctgtcgccagaccaacgcaccccagagcgttcaggaaatgctggccgagcagctgcaaagctacatggatacgaaggcgcgtccctgcgagaacttctaccagtacgcctgcggcaactggcagatccagcagcaggagcagcactccctgcgcgacagagattggacgagggatcggcagcggtaccagggtcagatgctgcccaccgacaccctgggactgatagaccactccgtgaatcggaagctggagctgctgctgcggcgaaggaatgagagctccttcgagtcggactcctcgattctggagcagatgcgactctactaccgttcgtgcaaacgccttaagccgtacaacctcaagaagtacctgcagctcctgccccccagcaactccacgcagtggccatcggtgggtcggggctggcgtccggagcggttcgactggataacgaccttggggcgactgcgtctgcacggactgaacggggtgctgctgcgggaggaggtactgccgcgatgggatgactctcgcaactacagtatctatgtgaacaagccgagtcgccaggagacgcagcccatgggagaaggtgccatgatcgagctgcttctggacattgggcagacaaagcgaacggccaatgccttggctcgccaggtggacgacttcgaacgaaaattgcaccgcctgcaggagctggaggacgacgaaggaccacgagaaatgcagcttggttacttggactcgtacctgccacagctacgatggttatccttcatgcgccaggtacgcattgactccgagctggatctgcgctccacattaatcatcgagaatattccgtacctcagggccctgagcgatctgatggaatcggagagcccggacaccgtttgcagctacatcatgctcaagtggttggccttcctcaagcaacagggacccgcggacatctcacgaggtgagtgcgtggccgccctcagaagagccatgcctctggccagtagctggctggtgggtcagcagttctccgatccggaatccgaatcctacgtaagctcactgttccagcgtttgaaggtgcgatttggccaaatcttggctgagaaccgaatgagactatcgccaccactggtgcacatcctgcagcagaaactgcgcgcagttcgactgcagatgggcttctttcagacggaggaaattgaggatgtggagcagtaccacgtccgcatcgacctgagcggccactccttctatggcaaccagctggtcttgctgcgacaacgcgttgaggcgaaccacgatctgctttacataaatgtgacaaacttcgcaaattccacggggagcaacttgagttacctgtcggaaagctgggaggccagcaactcgtcgcccctgtatgtgagaccacgcaatctggtcctggtgccgcacggtctgctccagctgcccatctggcatcgaaacattagcgccctgcagcagcacgccgtgatgggatttgtcctggcccacgagctggcacacggattcgatatgttgggaatggactacgacgccatgggaaacatcatggggcccgtggaggagatcggcgctagccgtcagttccgacaaggactccagtgtcttcagcaacagatggccaccggttccaagtggatcgacgaaaagctggccgactttgtggctctgcgtctagcgtatgagacctttttcggggtgcgggacaagcgggagcccagggatcctctgctgccgcagttcagccagcggcagctattcttcatcaccttcgcccagttcttttgcggccggacgcccgtgctcagtccgcgatctcagtcggaggctcatttgaagcacgccgcggatgagttgcgtgtgatgcagacgctggccaattttgaagagttctctagggagttcgggtgcgataagaaggccaagatgcaggccagccagcggtgccgcatctggtaa

SEQ ID NO: 20220 - protein, 684 aa, DROSOPHILA
MLKLSLVAWLIFSLAWRTTPTACRQTNAPQSVQEMLAEQLQSYMDTKARPCENFYQYACGNWQIQQQEQHSLRDRDWTRDRQRYQGQMLPTDTLGLIDHSVNRKLELLLRRRNESSFESDSSILEQMRLYYRSCKRLKPYNLKKYLQLLPPSNSTQWPSVGRGWRPERFDWITTLGRLRLHGLNGVLLREEVLPRWDDSRNYSIYVNKPSRQETQPMGEGAMIELLLDIGQTKRTANALARQVDDFERKLHRLQELEDDEGPREMQLGYLDSYLPQLRWLSFMRQVRIDSELDLRSTLIIENIPYLRALSDLMESESPDTVCSYIMLKWLAFLKQQGPADISRGECVAALRRAMPLASSWLVGQQFSDPESESYVSSLFQRLKVRFGQILAENRMRLSPPLVHILQQKLRAVRLQMGFFQTEEIEDVEQYHVRIDLSGHSFYGNQLVLLRQRVEANHDLLYINVTNFANSTGSNLSYLSESWEASNSSPLYVRPRNLVLVPHGLLQLPIWHRNISALQQHAVMGFVLAHELAHGFDMLGMDYDAMGNIMGPVEEIGASRQFRQGLQCLQQQMATGSKWIDEKLADFVALRLAYETFFGVRDKREPRDPLLPQFSQRQLFFITFAQFFCGRTPVLSPRSQSEAHLKHAADELRVMQTLANFEEFSREFGCDKKAKMQASQRCRIW

SEQ ID NO: 20221 - DNA, 3955 bp, DROSOPHILA
ttggctataacttgacataaaatggtcacacagcaaaaagaattacatttttatactccttattagcaatactaactattcctatcactttttaaaggattttgtaaaaataattttttgacaaattttcgcatttcttgtacggggaaaaattaaaaaaaaaaaatggcaagaaatttaagtgttcaaattgggattccaatcgattaggaatttaataacgagcttaacgagatattacatttcatattcagacaaatagatccatacttattttccagcggaaggaaaatgaaaatgaaggaaaatgtttttgtaaaacagcttttaatcgaaactaacaattcccatcacttcttaatttaattattattaataatatttagatcttggagtaaaggttaaagtctagtctgcttttgaaccaattgtaaatgaccaattaaatgtgcatatgaacgatatgaacaagcattttttaatagcttaactgcgaactcagttgcctttcagtgcacgagtttatttatgatcttccacgcttatcgtattttccatttttttctttctcattttttgaatgctgttttgttttggtcagcccatttgtttatggtcgtgcttggagtaaggctataagaatgctctataaataatatccattgtttagtatcaagttgttatacatattatattcctcatctgattcagacgatattaagaacatacgccaatttaaacaatgcagattacggattttacagtttaataaactttaataaacataaggtagaatttctgtattactattttcttttgcagaccagtgttatcttggagtaactgggattgcagaagcccgtgttttgcatattggtcaatgcactcacagatataatgcatcttggtggatcagcaaaattaacttaagctggatcagcagtttcgttggagtatagaaaaatagttgcgccgataatcagtcagttgtattttcacaatgtcggcgatcaacacgtttgtggccatgtggcggtttctgctgacccttggtccctcggccatgatcattctgctactgaacaagggaatcctagagcaacggccggatattgtggatgagcagcatcgcgtacgctccatacatatcgaagatcttcgtgaatcttacgattttatagtcattggcggcggatcggcgggttgtgttttagccgccagactctcggagaatccggaatggagcgtactacttttggaagccggtggggatgagcctcttctcatcgatttgccgcaattgtatccggtattccagcgaagcccgtgggactggaagtatcttaccgaaccatcggatcgctactgcttggccatggaggatcaacgctgcttttggccaagggccaaagttttgggaggatgcagttccatcaacgcgatgatgtatatacgtggaaatagacgggactacgatcaatgggcggcattgggaaatcccggctggaattatgacaatattctgcactatttccgcaagttggaggacatgagggtgcctggattcgaacatagtccgtatcatggacatggaggtcccatttccgttgaaagatataggtgaattgcaaataccactgagaaattgcatttttcaaagtcattttttctagatttccttcgccacttttggatattttcatgagagctgcccaacagctgggcatggttcatcccgatggtgatttcaatggtcgatctcagacaggattcgctccaccgcatggaagccttcgcgatggattgcgctgtagtgccaacaaaggatatattcgacgcagttggcagcgtcctaatttggatatcgtcctgaaagcatttgtcgagcgaattgtgatcgatccgcaatcccatcgagcaattggagtgatctttgaatatggtctgctgaagcacacggtcagagccaaacgagaggtgattctgtccgcaggatccttggctagtccacagctgctgatggtcagcggtgtgggccctagggatcaactggaaccacaaggcattccggtggtccagcatttaccgggagtgggtggcaatctgcaggatcacatctccacctcgggtgcaatctatacgtttgacagtggacaaaatcgccatctgtcgtttattgtgcccgaaatgatgaatgaacaggcggttgaggatttcgttcaaggatcagatagcttcttctacgccatgccagtgagtgaggtgatgggctttttcagcactcgttatcaggatccccgattggattggcccgatgttcagatctttatgggcagctatggctatggagccgatggtggaatgattggtcgcagaggagctgccattacattggacaactatgccgaggcgtttgagccggtgctctaccaggactcgtttgtaatagctccactgctgatgcgaccacgctccagaggatacctacagttacgctctgcagatcctaaagttcatcctctaatccatgccaactactatgacgatccgcacgatatggccgtgatggtggaaggcctgaagttggcccatcgtctaacccaaacgccggtgatgcaatccctgaatgccactatgaatatctacgagtggcgcaattgcccggaagtggaatacctcagcgatgccttctgggagtgcttggccagattttactcgcagacgatctatcatccggtgggcacatgcaaaatggctccagcttcggatcccgccggtgtcgtagatccccgactgcgggtcagaggaatgcgaggattgcgggtcatcgatgccagtataatgcccactattccaactggaaatacgaatgctccgactctaatgctggcggaaaggggagcggatatcatcaaggaggactggcgccactatagagatggaggttggggttaggtaccatgatatcatttcctttgtactttaatttaaagcaataaactaatttttaaaccgagcaaacgatggctgcgttggctttcatatatagagtaaacttgcaacaaaaaacgtgttactcgtgcaatgggagaacctttataaatatatacataatacatttgccaatcatgagaaggtatttatggatatgatagaaaaacgatcttgcaacctagataagcccttcgagaactattaagttaaatgcatgcctggctaatggccacatatggcattggattttttcttttttttttcgcctgagagtcaacgaatgcagccactgcgattagtaatccatatatcaattgaaactaaccatatagtataatggagaactattcattgttgtcattccgcaggtcagctaatttgctttggtaatgatcttggcattcatttgactcatggtgctgtttgtttcccattttcaattcaattcatttagtttttcatttatgctcaattctctgttttaaagtgtgagaacttgtaatagcacttcccagcgttcggaactttcgcaattttgtagtgattacttatgattttgtattccggtatagtttcgattggagagcatattcgttttgtggcttagtagcttaaaaattaaataattaaaaagatttttaaaattattcccttttattttgattacttatgttaatctaactattttcctataaacatttctttcaaatatttttttgtaattatggaaatatggcaaggagtatctgttagtttcattcatgatatgaaagcattgttctcaatcgattttgctcgtaatttatgagcggccactgaacctaaatggcaaatggcagcgcgagcttacgagttttaccagtttgagtgtctcagtgggccatggctttgcattgggccgcaaatcggaagaggttttcgagacttttcatgcgagtgcgcggcgattgaactggtcatt

SEQ ID NO: 20222 - DNA, 1902 bp, DROSOPHILA
atgtcggcgatcaacacgtttgtggccatgtggcggtttctgctgacccttggtccctcggccatgatcattctgctactgaacaagggaatcctagagcaacggccggatattgtggatgagcagcatcgcgtacgctccatacatatcgaagatcttcgtgaatcttacgattttatagtcattggcggcggatcggcgggttgtgttttagccgccagactctcggagaatccggaatggagcgtactacttttggaagccggtggggatgagcctcttctcatcgatttgccgcaattgtatccggtattccagcgaagcccgtgggactggaagtatcttaccgaaccatcggatcgctactgcttggccatggaggatcaacgctgcttttggccaagggccaaagttttgggaggatgcagttccatcaacgcgatgatgtatatacgtggaaatagacgggactacgatcaatgggcggcattgggaaatcccggctggaattatgacaatattctgcactatttccgcaagttggaggacatgagggtgcctggattcgaacatagtccgtatcatggacatggaggtcccatttccgttgaaagatatagatttccttcgccacttttggatattttcatgagagctgcccaacagctgggcatggttcatcccgatggtgatttcaatggtcgatctcagacaggattcgctccaccgcatggaagccttcgcgatggattgcgctgtagtgccaacaaaggatatattcgacgcagttggcagcgtcctaatttggatatcgtcctgaaagcatttgtcgagcgaattgtgatcgatccgcaatcccatcgagcaattggagtgatctttgaatatggtctgctgaagcacacggtcagagccaaacgagaggtgattctgtccgcaggatccttggctagtccacagctgctgatggtcagcggtgtgggccctagggatcaactggaaccacaaggcattccggtggtccagcatttaccgggagtgggtggcaatctgcaggatcacatctccacctcgggtgcaatctatacgtttgacagtggacaaaatcgccatctgtcgtttattgtgcccgaaatgatgaatgaacaggcggttgaggatttcgttcaaggatcagatagcttcttctacgccatgccagtgagtgaggtgatgggctttttcagcactcgttatcaggatccccgattggattggcccgatgttcagatctttatgggcagctatggctatggagccgatggtggaatgattggtcgcagaggagctgccattacattggacaactatgccgaggcgtttgagccggtgctctaccaggactcgtttgtaatagctccactgctgatgcgaccacgctccagaggatacctacagttacgctctgcagatcctaaagttcatcctctaatccatgccaactactatgacgatccgcacgatatggccgtgatggtggaaggcctgaagttggcccatcgtctaacccaaacgccggtgatgcaatccctgaatgccactatgaatatctacgagtggcgcaattgcccggaagtggaatacctcagcgatgccttctgggagtgcttggccagattttactcgcagacgatctatcatccggtgggcacatgcaaaatggctccagcttcggatcccgccggtgtcgtagatccccgactgcgggtcagaggaatgcgaggattgcgggtcatcgatgccagtataatgcccactattccaactggaaatacgaatgctccgactctaatgctggcggaaaggggagcggatatcatcaaggaggactggcgccactatagagatggaggttggggttag

SEQ ID NO: 20223 - protein, 633 aa, DROSOPHILA
MSAINTFVAMWRFLLTLGPSAMIILLLNKGILEQRPDIVDEQHRVRSIHIEDLRESYDFIVIGGGSAGCVLAARLSENPEWSVLLLEAGGDEPLLIDLPQLYPVFQRSPWDWKYLTEPSDRYCLAMEDQRCFWPRAKVLGGCSSINAMMYIRGNRRDYDQWAALGNPGWNYDNILHYFRKLEDMRVPGFEHSPYHGHGGPISVERYRFPSPLLDIFMRAAQQLGMVHPDGDFNGRSQTGFAPPHGSLRDGLRCSANKGYIRRSWQRPNLDIVLKAFVERIVIDPQSHRAIGVIFEYGLLKHTVRAKREVILSAGSLASPQLLMVSGVGPRDQLEPQGIPVVQHLPGVGGNLQDHISTSGAIYTFDSGQNRHLSFIVPEMMNEQAVEDFVQGSDSFFYAMPVSEVMGFFSTRYQDPRLDWPDVQIFMGSYGYGADGGMIGRRGAAITLDNYAEAFEPVLYQDSFVIAPLLMRPRSRGYLQLRSADPKVHPLIHANYYDDPHDMAVMVEGLKLAHRLTQTPVMQSLNATMNIYEWRNCPEVEYLSDAFWECLARFYSQTIYHPVGTCKMAPASDPAGVVDPRLRVRGMRGLRVIDASIMPTIPTGNTNAPTLMLAERGADIIKEDWRHYRDGGWG

SEQ ID NO: 20224 - DNA, 4734 bp, DROSOPHILA
gggcttctttcagacggaggaaattgaggatgtggagcagtaccacgtccgcatcgacctgagcggccactccttctatggcaaccagctggtcttgctgcgacaacgcgttgaggcgaaccacgatctgctttacataaatgtgacaaacttcgcaaattccacggggagcaacttgagttacctgtcggaaagctgggaggccagcaactcgtcgcccctgtatgtgagaccacgcaatctggtcctggtgccgcacggtctgctccagctgcccatctggcatcgaaacattagcgccctgcagcagcacgccgtgatgggatttgtcctggcccacgagctggcacacggattcgatatgttgggaatggactacgacgccatgggaaacatcatggggcccgtggaggagatcggcgctagccgtcagttccgacaaggactccagtgtcttcagcaacagatggccaccggttccaagtggatcgacgaaaagctggccgactttgtggctctgcgtctagcgtatgagacctttttcggggtgcgggacaagcgggagcccagggatcctctgctgccgcagttcagccagcggcagctattcttcatcaccttcgcccagttcttttgcggccggacgcccgtgctcagtccgcgatctcagtcggaggctcatttgaagcacgccgcggatgagttgcgtgtgatgcagacgctggccaattttgaagagttctctagggagttcgggtgcgataagaaggccaagatgcaggccagccagcggtgccgcatctggtaatagttctctttccatctctcccacaggacatggcaggatccagtgatgaataaataaaatctcacctaacgaagagttttttaaatgtgagtgagtaactcgatggggtagtgaactcttttcagatccatctagtttattgtttaatatagttttatacactagtagatttcaagcactacttgaatccagttaccacagttggcacttttcaggctgattgctctttgctggacaaccaaaagcttcgtgaaacggcgcgaacccattgagcatttgctgcagacgcgtctcgtcgttgtcgtgaccaacgaagtttattggatcaccatcgccgcagaagaactgtgccagattgaggaagaagatttgttgcggcggaatggtcgtaaaatcggttagactcatttgcgagctgttctggaagtaggtggaataggccagatccagtccagcaatgtctgcaatacgctcgtccagatactgtgtactgttccggttcaggcactgtaaacccgccacaaagcgtggcgaactggatatctgcggtccgatttcgtgtatgttcccatatctgtcataataaagacccacggtgtcgactgagtgcatcaactcatgggcaagtacgaatcccaacaggctgtacttgaatatgtcgtggctatccgctgcaaagaatggctcctgtagaagtccgtgtggcacaacgatgatgtttagtcgcattaggtagtagggtccggagctcatggccgttttaggatccgacaagtagaagaactcatcgggtgtcggagcactttggttaagttgtaaaacctgctttctggtgcggaactccagcaggttaagatgttcacgtgcgtagtcgaaatcagggagcggaaagacaagatcctcatagtgccggctgacaaagctacgatggtcacgacctcttggcaaattcccaatattgagaacgacatgctgagcttttgtggcaaccatactgttctgctcactggttagcccaaggcgattctcattgatttgcagtagaaactgccggcgcagctgttcaaagaccttcgtaacttcctgggtgtactgctgtagtgtcgcagggtccaggaagcgctccttgtagagcaggttcgatgccagattcatgttgcggcgcatatccgtgacgcaatcaatgtgctcattgctgtcaataaagtcgtctatgaggtagagcacgaatcgggtcatgatgtagttggccaccacctcggcgtccgtggagtccatcagccgcttaaggcccgtgaagtactttgcattctgcgcctgcatcacgtagtgatgtgagacactatggccaactattgactcgacgaaaccctgccatgcgtagccggttttgtactcccactggcgcaaagtccaagtctcgctttcatcatcgtcgtccacttcggttaggacgcgtatggcggactctagccttctgatcttccgcacaaggggtaatatgcttttcgtcggcacaccaatgatctggagagtggcgagggtacttagaaaaccgcccaggtgctgcgcgtccccttcgagactaggcatactgatgtccagtcggaagcggttactgttctcagagctccgtaagaccaacacgttcaccaaaacattggtaaacccatagcggtataggtgtcccaaggacttcatccacttgaattgagcctttggccatggctcgccgcggggcataaactggggccatgtaagtgcctggccaggaggggctagtctaaggtagtgctccatcttgcgtgtactcggcggagcttcacggcaggtgcggtagaagtgcaagaccttggcctccacactggactcgttgaagccgggtgactgggagcgctggtgcagctcgtgcatcagttggactaggtttccgttcaccttgtggtccagcatctggatgatctccgtgaagggatcgtcgcggtgacgtactgcgtacttgccgcaggcatattgaaagtaggtgccgcacgcactggaatcctccgccacgtagctgaggatgttgttcattagccgtgaattgggatccgcctcgacattctgggttgttggagcagcgcaaataggaacaataaacaggcaggcaatcaaccacatcgcagacagcaaactgagccgagatcccagattgctggaagcgactggccgcggaacgtcgacatatcagcgaaatataatgtgcccacagctgataatccagccaagagataacccaaaacatcctcaatcgagaggtgaaaagacaatagcacgatgacttcaacttacttgtactttgatgactcagtgatcatttgatcgttttcgcgcgtccaatagttaagtgaggtcggattcgcctcgatgaagcattccagggtgatgttgaatccaatgggaatacccaccagctgatgcggtatccagaccatgggcgaaactgaaacgaaatatatatatatatgaatataagaaaacccaactaagtccggatatcaattgacttacagtccacgctgactttgatccgcttggacacacttggcggcacaccattcgatgcgatgcacaggtaggcgcccatgtgcagtcgcgaaatccgctccagctccagggaatccgtctccaagtcgtgcactgcaatcatttctgggtaaatggcaagccagaggctggtctaaggattggactcaccctcgagcgtcttgttaataacgattttgttgccgtcatcgcgtttccatttgatggtcggctccggactacctttcgccttgcagcgtagcgtaacgttatcgccctcgcgcacgatgatgtcactggaggtcagagcgtcgtctatattcggcggcactattggatggagagagcgagaggcggacattaggagagtattttacccaaaaactacacggaaccgtgcaaagctcgatttaaatgcaaaggacagaagtgaaaagttccactttcatgtaaatgtcgttgccaagaaagcggaaaccggtgaaaaacactcctaggactacagagacatgggaataccctttcaaagagaagcacttgtaatgctaataactggcttatcaaagctacccccagacaagttggacttccccaaggcagttaggaagtggaaaaaaaaggaacatttcacgcattgttgactccaatgcgctcactccccagtgagttcttgttctactcacagtcactgcgtaactttaagcctaattagctttgcatccagattcagatttgaagtccgtttgaaatccgttgctcctggcgaaataaggaatcattctgttaattcaaaaatcgatgcggcaaccttcatcaagttgtcatcaggtttcacttcccttgccattcactttgtttgagggattttttcaatcttccgggaaactcttttgtatttggtcgaaaatcccagaaaatctttaatgaaaaatctatgcaaatcacagggaagcatggaaaaggtcatggaatggacagcataccgcactggcttaatatctggcaatgcacactggttccaacccgaagttagctgcgataaattaccattctttttcaaatgtatcttatttaaatggagtgtttaccagaacttggagttggtagttggagctgtgttagttgtgtacatttgttagctttgacagttgtttttttttataaatttctaaagttgcctgaaatgcagttttccattccaacaaaaaatcataaattttatttgctcctgcaattttccgggggtcaaggccaggtcttccatgacaggtcacgtatttgcagtgacctgtcgccattcattctgaattggacagctaatcaatggcagtcgggtcagcaaatgtctggttttcggcaca

SEQ ID NO: 20225 - DNA, 2472 bp, DROSOPHILA
atgtccgcctctcgctctctccatccaatagtgccgccgaatatagacgacgctctgacctccagtgacatcatcgtgcgcgagggcgataacgttacgctacgctgcaaggcgaaaggtagtccggagccgaccatcaaatggaaacgcgatgacggcaacaaaatcgttattaacaagacgctcgaggtgcacgacttggagacggattccctggagctggagcggatttcgcgactgcacatgggcgcctacctgtgcatcgcatcgaatggtgtgccgccaagtgtgtccaagcggatcaaagtcagcgtggacttttcgcccatggtctggataccgcatcagctggtgggtattcccattggattcaacatcaccctggaatgcttcatcgaggcgaatccgacctcacttaactattggacgcgcgaaaacgatcaaatgatcactgagtcatcaaagtacaacaatctgggatctcggctcagtttgctgtctgcgatgtggttgattgcctgcctgtttattgttcctatttgcgctgctccaacaacccagaatgtcgaggcggatcccaattcacggctaatgaacaacatcctcagctacgtggcggaggattccagtgcgtgcggcacctactttcaatatgcctgcggcaagtacgcagtacgtcaccgcgacgatcccttcacggagatcatccagatgctggaccacaaggtgaacggaaacctagtccaactgatgcacgagctgcaccagcgctcccagtcacccggcttcaacgagtccagtgtggaggccaaggtcttgcacttctaccgcacctgccgtgaagctccgccgagtacacgcaagatggagcactaccttagactagcccctcctggccaggcacttacatggccccagtttatgccccgcggcgagccatggccaaaggctcaattcaagtggatgaagtccttgggacacctataccgctatgggtttaccaatgttttggtgaacgtgttggtcttacggagctctgagaacagtaaccgcttccgactggacatcagtatgcctagtctcgaaggggacgcgcagcacctgggcggttttctaagtaccctcgccactctccagatcattggtgtgccgacgaaaagcatattaccccttgtgcggaagatcagaaggctagagtccgccatacgcgtcctaaccgaagtggacgacgatgatgaaagcgagacttggactttgcgccagtgggagtacaaaaccggctacgcatggcagggtttcgtcgagtcaatagttggccatagtgtctcacatcactacgtgatgcaggcgcagaatgcaaagtacttcacgggccttaagcggctgatggactccacggacgccgaggtggtggccaactacatcatgacccgattcgtgctctacctcatagacgactttattgacagcaatgagcacattgattgcgtcacggatatgcgccgcaacatgaatctggcatcgaacctgctctacaaggagcgcttcctggaccctgcgacactacagcagtacacccaggaagttacgaaggtctttgaacagctgcgccggcagtttctactgcaaatcaatgagaatcgccttgggctaaccagtgagcagaacagtatggttgccacaaaagctcagcatgtcgttctcaatattgggaatttgccaagaggtcgtgaccatcgtagctttgtcagccggcactatgaggatcttgtctttccgctccctgatttcgactacgcacgtgaacatcttaacctgctggagttccgcaccagaaagcaggttttacaacttaaccaaagtgctccgacacccgatgagttcttctacttgtcggatcctaaaacggccatgagctccggaccctactacctaatgcgactaaacatcatcgttgtgccacacggacttctacaggagccattctttgcagcggatagccacgacatattcaagtacagcctgttgggattcgtacttgcccatgagttgatgcactcagtcgacaccgtgggtctttattatgacagatatgggaacatacacgaaatcggaccgcagatatccagttcgccacgctttgtggcgggtttacagtgcctgaaccggaacagtacacagtatctggacgagcgtattgcagacattgctggactggatctggcctattccacctacttccagaacagctcgcaaatgagtctaaccgattttacgaccattccgccgcaacaaatcttcttcctcaatctggcacagttcttctgcggcgatggtgatccaataaacttcgttggtcacgacaacgacgagacgcgtctgcagcaaatgctcaatgggttcgcgccgtttcacgaagcttttggttgtccagcaaagagcaatcagcctgaaaagtgccaactgtggtaa

SEQ ID NO: 20226 - protein, 823 aa, DROSOPHILA
MSASRSLHPIVPPNIDDALTSSDIIVREGDNVTLRCKAKGSPEPTIKWKRDDGNKIVINKTLEVHDLETDSLELERISRLHMGAYLCIASNGVPPSVSKRIKVSVDFSPMVWIPHQLVGIPIGFNITLECFIEANPTSLNYWTRENDQMITESSKYNNLGSRLSLLSAMWLIACLFIVPICAAPTTQNVEADPNSRLMNNILSYVAEDSSACGTYFQYACGKYAVRHRDDPFTEIIQMLDHKVNGNLVQLMHELHQRSQSPGFNESSVEAKVLHFYRTCREAPPSTRKMEHYLRLAPPGQALTWPQFMPRGEPWPKAQFKWMKSLGHLYRYGFTNVLVNVLVLRSSENSNRFRLDISMPSLEGDAQHLGGFLSTLATLQIIGVPTKSILPLVRKIRRLESAIRVLTEVDDDDESETWTLRQWEYKTGYAWQGFVESIVGHSVSHHYVMQAQNAKYFTGLKRLMDSTDAEVVANYIMTRFVLYLIDDFIDSNEHIDCVTDMRRNMNLASNLLYKERFLDPATLQQYTQEVTKVFEQLRRQFLLQINENRLGLTSEQNSMVATKAQHVVLNIGNLPRGRDHRSFVSRHYEDLVFPLPDFDYAREHLNLLEFRTRKQVLQLNQSAPTPDEFFYLSDPKTAMSSGPYYLMRLNIIVVPHGLLQEPFFAADSHDIFKYSLLGFVLAHELMHSVDTVGLYYDRYGNIHEIGPQISSSPRFVAGLQCLNRNSTQYLDERIADIAGLDLAYSTYFQNSSQMSLTDFTTIPPQQIFFLNLAQFFCGDGDPINFVGHDNDETRLQQMLNGFAPFHEAFGCPAKSNQPEKCQLW

SEQ ID NO: 20227 - DNA, 3385 bp, DROSOPHILA
ttcttgactgaacaagccagttttacattacgccccgcaggcactgtaatattttcgatcacatccgtgaactcgggatcttcgctgatgactgcgaatagtaaaaaaaaataaatattttaataagtaataataaatatcaacataaaaatgtatatattcataaaaaccccaacttctcatcctttcttgagaagagttatcattattgtagtgagaatttaaagaattcttttttcacacatgcaaaagtctgccttttgtaacaacatatatcagataattttttgccttttacagaagcaaattgaacttgacactgtgttctaaataataaaagaatatcaactttcgcacttgattttgtcatataaaagctatcgtatgaccacagaacagctgcataacatagcaaccaccatgtctgctattcgggatggctataccaccatgtcgtcctttttttgacggctaactgtgccacggaaacttctgctgcaccggcaactcatttaagttctaatcacctgcaacgacgacaattaattagctggctttggccaacgacagcggcagcagcagtcattagtctgaaggcccatcggtaccacaagggagccatgatgctgcagcttcagctggagctgaagcaggagcaagagttgaatccttagagccctggcagcatctgataaacaacgagcagtggcaacaccaggagaagcaacactaacggcaacatctgcataatgcggcaaaaggaagttgctgtccgctcaccccgaagatgtggaaaggtgttcctggacgatacttaagcgaaatcagatgcggcagacggatattaaaagcaggcgacaaccgcaggaactggcaaaatgtaattatgttgtgaaacttgtcctttcaaacgctgtcaattgcagcacaggcgatgtcttcaatataagatattagtatgtggaactatatagccaaaagcacgcaactctcatcatttaagtagcaaagtttggttttattataaatgtcatctcatcttagctcattgcacttggcccggatcatgttgaaggtaaccgtgccgacgctttgtgccgcgttgtggagcagctcaaagatgtgccggttgcgctgaccctgctccacggtccgctcgtgcaagcgacgcagtgcgtccgagtaggccgtgtacttggcctcgcactccgtgtccagcttgaagacctgatacagctgctgcagatcgtacaattggcgtgcggtctcgtcgtatagcaaactgggtgactgtggcaacagctgctcccagtgctcgtgcaccaggtctaggaattcaaaattgctaaaaagaaagatgacgaacaggtccagtcccttggtcttcagctgggcgagaagatgttcggtgatgtgctcgctgctcgatgtgtcccgcatctcctcgtaatcggtgcgcaagtggtgctccaggtacgcatacacccgttgacgtttctcgaagaagtcctccgtggcaagcatgacgtccagctgctgctgcatcttgtccagcttggcactgctcccggccagatcagcatggtcaccgtcgatgatgtcctgcagcagggaacgcagtatgtgcaggtagttgtcgatgatttcggcgccggataacttgacccgctcgtacagctgcgccccgaactcattgagatccaagccggtggagttcacctcctttttggtcagattgagttgccccaatgccgccccgactgtctgttcgttgatcaggcgactgccgcgatgaggagccggtcggtcaagttgctggcagaggcggtgcatgcgcatcattcggatctcttgtgtgctagtctcctcggcagccctcagcgtggatctgactcggttcagaaagaccaggttgcgcagcacaatggtgtactccatatccgtgtccaggtgcggacgcacgtcgagcagctgcttgatgagcgtcaccttcaattgaagctttggtgttgcgcgagctgcactcatctcttcggtgtagttggcattccgaggaatgcgtcctagacgatccaggtagtcgttgagactcggttcaatccgctgttgcaccaggtcgcttaactcgcgcagaagctccagctggaagtccttcacaccaagatccagctggggagcaacaggatccgcctgcatgagcggcaagaggcacacccatggcagccaccactcgatcatcatcttagagggagctggctccaactgattttgattgcagaaactgcgttgttgtcgccgccagttggctgattagacgaaggggcttagattggggtcagtagtcaagtcggtgatgcggttagttcgtctgatatgccaagccgaccactgacgattaaccagtgcgaaagcgaactgcgctcagttcgacagccttatcgctacggagctggcactgagagaaataatgggtaatccaattcgtgcaaattatattatattttattttctgctaataatcgaacgcaaattaaggacagcgaaaataagaaaggaaagagttcagcgctgattacaattcctctgtcagaaaccagcacaatttaatacataactttttatttgaaggtaatgcatttttatcctttccccatttcgacaactattgttcgtcgaaagggcattagtggcaacaactgactggtgaatcgggataggattgaatgagggaatcgattcgctgtaacctggtgcccgtgcaactgcaaatggccaggacattggtccctacaatgtatcaaatagtcagcgctccttcccaatttgtctgtgcgggcaattgttgaccgaactcaaactgagcgcgtgtgcgggatacctatcacaagttagcttaaagttgcagactgcagactgctgccatttgacgacagaacttcagcggaatcccaaatgggatgtggcatgaatccacatggattccaaatcagcgatgctcgtcgttcttcattctatggcgcagcttgattgaagttcgtcaaattgattgaactcatgccacttcccctttgccaacttttagcgaaaacacttgatttcgatttcgttcgaacatttctgtgcattagcctttaatattcgatcaaagggtatctgcaaccgcataatggccaacaccttttaagacgaaacccaaaacgcaaaaaaaaactatggaaacggtttggcaaagagcgtaaaaatggggaaaaatggttaagaaaaaatgaaaggcacaccgataaagtttttaggaaaaaaaaaaatgtaagaaaaaataaaagataccaaaaacctgaagaagaaattttccaacaattgcacaattggcatgggctacgcattc

SEQ ID NO: 20228 - DNA, 1385 bp, DROSOPHILA
tcggcttggcatatcagacgaactaaccgcatcaccgacttgactactgaccccaatctaagccccttcgtctaatcagccaactggcggcgacaacaacgcagtttctgcaatcaaaatcagttggagccagctccctctaagatgatgatcgagtggtggctgccatgggtgtgcctcttgccgctcatgcaggcggatcctgttgctccccagctggatcttggtgtgaaggacttccagctggagcttctgcgcgagttaagcgacctggtgcaacagcggattgaaccgagtctcaacgactacctggatcgtctaggacgcattcctcggaatgccaactacaccgaagagatgagtgcagctcgcgcaacaccaaagcttcaattgaaggtgacgctcatcaagcagctgctcgacgtgcgtccgcacctggacacggatatggagtacaccattgtgctgcgcaacctggtctttctgaaccgagtcagatccacgctgagggctgccgaggagactagcacacaagagatccgaatgatgcgcatgcaccgcctctgccagcaacttgaccgaccggctcctcatcgcggcagtcgcctgatcaacgaacagacagtcggggcggcattggggcaactcaatctgaccaaaaaggaggtgaactccaccggcttggatctcaatgagttcggggcgcagctgtacgagcgggtcaagttatccggcgccgaaatcatcgacaactacctgcacatactgcgttccctgctgcaggacatcatcgacggtgaccatgctgatctggccgggagcagtgccaagctggacaagatgcagcagcagctggacgtcatgcttgccacggaggacttcttcgagaaacgtcaacgggtgtatgcgtacctggagcaccacttgcgcaccgattacgaggagatgcgggacacatcgagcagcgagcacatcaccgaacatcttctcgcccagctgaagaccaagggactggacctgttcgtcatctttctttttagcaattttgaattcctagacctggtgcacgagcactgggagcagctgttgccacagtcacccagtttgctatacgacgagaccgcacgccaattgtacgatctgcagcagctgtatcaggtcttcaagctggacacggagtgcgaggccaagtacacggcctactcggacgcactgcgtcgcttgcacgagcggaccgtggagcagggtcagcgcaaccggcacatctttgagctgctccacaacgcggcacaaagcgtcggcacggttaccttcaacatgatccgggccaagtgcaatgagctaagatgagatgacatttataataaaaccaaactttgctactt

SEQ ID NO: 20229 - protein, 400 aa, DROSOPHILA
MIEWWLPWVCLLPLMQADPVAPQLDLGVKDFQLELLRELSDLVQQRIEPSLNDYLDRLGRIPRNANYTEEMSAARATPKLQLKVTLIKQLLDVRPHLDTDMEYTIVLRNLVFLNRVRSTLRAAEETSTQEIRMMRMHRLCQQLDRPAPHRGSRLINEQTVGAALGQLNLTKKEVNSTGLDLNEFGAQLYERVKLSGAEIIDNYLHILRSLLQDIIDGDHADLAGSSAKLDKMQQQLDVMLATEDFFEKRQRVYAYLEHHLRTDYEEMRDTSSSEHITEHLLAQLKTKGLDLFVIFLFSNFEFLDLVHEHWEQLLPQSPSLLYDETARQLYDLQQLYQVFKLDTECEAKYTAYSDALRRLHERTVEQGQRNRHIFELLHNAAQSVGTVTFNMIRAKCNELR

SEQ ID NO: 20230 - DNA, 5109 bp, DROSOPHILA
acaccctttcctttgcattacgagaaggttcttagcaacaagtttagcccacgtttaacaaaattcttaaatcgatatttataaaatgttttgcaagtatttttcaaaaagattttttttttgttattgtttaagtattggttattaaatagagttttttttttctacaattataataaaaaatttagaaaacaaaagccaatgcttatgtgtttgtttttttcctaaaatatgaaatatgcgcttttataattataagttaatagattatataaatatcataaatgaatcctacagcttgccaattaatgatggacctaagcgagcttcgaaaaacaaatagataaactttctgtaacatttcgccgtagaattctctaacttatttacaaggaagaaccaagctacggataaagaaatagatacaacataaaaatcagcttctaaagtacctgtcattattaagatgtttagcatatttggtccaaacttaacccacaaacccaaacaacaggtttacgctggcgataccccaacaaaaatacaacctgctcttatcagctggaagcgaaagaaaaaaagaagaaaaaaacacggccaccaacgagcataaagataaccgagtgcagagcccagggaggctatagattctccattctccaatctctaatctcgattttgggtggcttctatgggtcgctgcgggcttatcacaccacggttagctaatcttcgagtgataaggggagtgccgtgcagctgctgaaggcggaaggtgcgtctaatttatgtctgtgtatatatgggtatatatgccatacacctagttacggctatatactcgtacacatacgactcgaagcgaaatgcaaatgtctccaagcgatttttgttttttttttttttttgttgatttacgaacgccgatggcatacgaaaagcgttcgcggcccggccgtacaaattccggttgaaagccggtccggtagaacagttgtcgtcgagcggagagagcgttcgcacgtgtgccgcaggtggattacggatttttgaagtcgagaataaccgcaggatcacacgaggataatacagtgcttagccagtgggtattccgtggatttatagtgcaaggcttaaagttcaggatttttaattttataaggaagaagacttatggaatttttaaaccagatagattcataccgataacttccgaaatccttggcaaggaaaatagaaacggaggaccaaatactaactgctagtttgctaaagctcctattgaacatttttttaagagcagagtttaatttattattgtttgaggaaaggttcttaaacatgtcctattgttttttaaatactttttttgttttgctttttgtttgggatggctttagtataagtagtatttctgacaattttttatctaataataaaaaaaagtatttttccttaaatattctttaaagaagaattttaaaactctgtgttttttattcccagaactttttaaaatgctcttatttctttttactgttgcactaatggccaatttttcttttagcacaactaaaggacattttggaacaccacaatggagttccttagcgcccagtgcgctgcccgttcggcgggtccggcaaatacgctgatgtccttgctcctgtccacgctgattaccaagtactgcgatttgagcggacaaaatcaatggccagaggacaagggcgattggctggaacaggctggtggcttcaagcatgactacgactttattgtgattggatcgggtacatcgggcgcagtggttgctggtcgtctggccgaggtaaagaactggaaagtgctgctcctggaggccggtggtgatccaccaattgagacggagttcgttgcctggcacatggccacccaattctccgaatgggattggcaataccactcgaaaccgaacggacgtgcgtgcatggcgatgaagggcgaaagttgccactggccgaggggcaaaatgttgggcggcacgaatggaatgaatgccatgatctatgccagaggaacgcgtaaggatttcgatgactgggaagagaggggcaatcccggatggggctacgatgaggtgctgaaacacttccgcaaggccgaggatctgcgttccacgcgaccggactacaagcccggcgatcatggcgtcggtggaccaatgggactgaacaattatgtatccgacaacgaattccgcactaccatacgcgccggcatgcaggagatgggctacggcagtgctccggactttaccgaaggctcgtttgtgggtcaaatggacatcttgggcactcaggatggtggtcgtcgtatcaccaccgcccgatctcatctgaagaagaatacgcccaatctgcacatcctgcgacatgctcacgtcaagaagatcaatctggatcgtaacaatcgagccgaaagtgtgacctttgtgcatcgcggcaagaaggagtacacggtgaaggccagtaaggaggtcatcgtgtccgccggtgccattggttcacctcagatcctgttgctttcaggtgagttttacagttagttagtcgaaattcgaatatgaaagtaggcattactaacagtatttgttgatatcatcatatagataatttgttttcaaaaccttcaaaaatatcagaaaacccgtttaaatgaccgcgctaaacgtattttttgatattctattcttgataacatataaatatcatttcggatctccggatagttaaattttgatagtgtttaaaacgaggtaccttttcaatatgcaattgataacagccagttcaaaataaggaaatgcgaacacgatagcgtgtttagattagaatttttctcggtgcacaagtgagatatacatactttcatccttcaatcctactttaagcccctaaatcttgttgattttagcttagcttctgtttttatttgttgcatctgaaaagcctgaaaaggcttttgataagcgcggatcgggggacgattagatagtcggaatacgatatcagacccaagcaacggagcctcttgtcgatgagatgtcaatgtcaaatcggccgcaaggtcgcgcaaggtcaagcgggtatgtctgtccgatcggtagggcttgtaaaaatttgtatggaaaataacgttctagagatataaccaaatcttttacgattgtggggtttaccaggtgtcgacttctagattttaagtgtagtatttcaccatagttgaaattcacaaacctgcaatgaaaaacaataagaaacagttagtgaaattatttaagcggaatatttagagaaaatcttcttgaagaacaagttctaaaacaattttcataataactcacatgaattttaaactaaaatgggactggttttttagtttgacttaggaactggtttctctatgtatatcaaacattctaaacaaaacaaaaaatacgcagttaaatatacagctggttttaatgatacaccgaaactagttaagcatttgagactttaaatatgaagtgaattagtttaagtaattgaaactttttattttctcaggcatcggtcccgccgatcacttgaagagcctgggaattcccgtgaaactggaccttcccgtgggtgagaacctcaaggatcacgccagtctgccgatgatcttccagatcgacaagtcaactgctcgcaaaccaaccgaggaggagctagtggatgccatgtacaatctgctgatgggtcgttatagcaaactgttgcaccacgaggccaccgccttgacgggattcattaacaccacctcgattgagggacccaatccggacatccagaccaccaatttcttcagcctaatgcagagtcctgaacttaagggctatgtggctgcaaccggattcaatgatcgcgtggccaagagcattttgtcggccaatcaggagaccaatacctacattacgtatttgctgcatctgaagccattctcggcgggaagtttgaccttgcaatctgcgaactatttggacgctccgatcatcgatcccggttatatgaccgatgagcgcgatgtagacacctatattagggccttgaacatctacaagaacttgccgaataccaaagccttcagtgagagggaggccgcactccacaaactggatttggaggcatgcaatggtctgacctatcagtcggatgactactggcgttgctatatccgtcacatgaccaccaccgtttaccatccggtcggaaccactcgcatgggaccatccactgatcccactgccgtggtcgatccccaattgagggttcatggtgccaagggattgagggtgatcgatgccagcattatgcccgacattgtgggtgccaacaccaatgctgcatgcattatgatcgccgagaagggggcggacatgatcaaggaggagtatctgggcggaaaacataccgagctctaagctcagcgatattttacgacataagctttaactttttgtccgattttttttttgttatattaaatatatgcttcttacatagaattgtaattgaatgtttagatcatgatatcattttaataacaagaaggactagtaagaatgcttgcaaagtcaagacatttagaatccagttcgaggaatcttaatcaattgttaactctacatttttatctacgtttccttgattttctacacgtctttggttgacgtcctaactaaaatgtacaatggctgtaaaactgttttaagcttctactaaattacaattgtccttaatgcttttaaagttggaaaattaaatgtatctttgaattaaattttttttactgagcgaggatattaaaaaattcctgccaatttaattttgggtgttaaaatcgattgataatatgatttatctggcaaatgcgaaaatcgcaccatcagcattaagtggcgattgtatggaatctcggcgatacttgatggttagctacgttttggttttgattgacagctttcacttttaattttttgccgtcttgttttatttattgccttctgcatttatttggaactagggatatatatatatatat

SEQ ID NO: 20231 - DNA, 2004 bp, DROSOPHILA
tcgagcggagagagcgttcgcacgtgtgccgcaggtggattacggatttttgaagtcgagaataaccgcaggatcacacgaggataatacagtgcttagccacacaactaaaggacattttggaacaccacaatggagttccttagcgcccagtgcgctgcccgttcggcgggtccggcaaatacgctgatgtccttgctcctgtccacgctgattaccaagtactgcgatttgagcggacaaaatcaatggccagaggacaagggcgattggctggaacaggctggtggcttcaagcatgactacgactttattgtgattggatcgggtacatcgggcgcagtggttgctggtcgtctggccgaggtaaagaactggaaagtgctgctcctggaggccggtggtgatccaccaattgagacggagttcgttgcctggcacatggccacccaattctccgaatgggattggcaataccactcgaaaccgaacggacgtgcgtgcatggcgatgaagggcgaaagttgccactggccgaggggcaaaatgttgggcggcacgaatggaatgaatgccatgatctatgccagaggaacgcgtaaggatttcgatgactgggaagagaggggcaatcccggatggggctacgatgaggtgctgaaacacttccgcaaggccgaggatctgcgttccacgcgaccggactacaagcccggcgatcatggcgtcggtggaccaatgggactgaacaattatgtatccgacaacgaattccgcactaccatacgcgccggcatgcaggagatgggctacggcagtgctccggactttaccgaaggctcgtttgtgggtcaaatggacatcttgggcactcaggatggtggtcgtcgtatcaccaccgcccgatctcatctgaagaagaatacgcccaatctgcacatcctgcgacatgctcacgtcaagaagatcaatctggatcgtaacaatcgagccgaaagtgtgacctttgtgcatcgcggcaagaaggagtacacggtgaaggccagtaaggaggtcatcgtgtccgccggtgccattggttcacctcagatcctgttgctttcaggcatcggtcccgccgatcacttgaagagcctgggaattcccgtgaaactggaccttcccgtgggtgagaacctcaaggatcacgccagtctgccgatgatcttccagatcgacaagtcaactgctcgcaaaccaaccgaggaggagctagtggatgccatgtacaatctgctgatgggtcgttatagcaaactgttgcaccacgaggccaccgccttgacgggattcattaacaccacctcgattgagggacccaatccggacatccagaccaccaatttcttcagcctaatgcagagtcctgaacttaagggctatgtggctgcaaccggattcaatgatcgcgtggccaagagcattttgtcggccaatcaggagaccaatacctacattacgtatttgctgcatctgaagccattctcggcgggaagtttgaccttgcaatctgcgaactatttggacgctccgatcatcgatcccggttatatgaccgatgagcgcgatgtagacacctatattagggccttgaacatctacaagaacttgccgaataccaaagccttcagtgagagggaggccgcactccacaaactggatttggaggcatgcaatggtctgacctatcagtcggatgactactggcgttgctatatccgtcacatgaccaccaccgtttaccatccggtcggaaccactcgcatgggaccatccactgatcccactgccgtggtcgatccccaattgagggttcatggtgccaagggattgagggtgatcgatgccagcattatgcccgacattgtgggtgccaacaccaatgctgcatgcattatgatcgccgagaagggggcggacatgatcaaggaggagtatctgggcggaaaacataccgagctctaa

SEQ ID NO: 20232 - protein, 623 aa, DROSOPHILA
MEFLSAQCAARSAGPANTLMSLLLSTLITKYCDLSGQNQWPEDKGDWLEQAGGFKHDYDFIVIGSGTSGAVVAGRLAEVKNWKVLLLEAGGDPPIETEFVAWHMATQFSEWDWQYHSKPNGRACMAMKGESCHWPRGKMLGGTNGMNAMIYARGTRKDFDDWEERGNPGWGYDEVLKHFRKAEDLRSTRPDYKPGDHGVGGPMGLNNYVSDNEFRTTIRAGMQEMGYGSAPDFTEGSFVGQMDILGTQDGGRRITTARSHLKKNTPNLHILRHAHVKKINLDRNNRAESVTFVHRGKKEYTVKASKEVIVSAGAIGSPQILLLSGIGPADHLKSLGIPVKLDLPVGENLKDHASLPMIFQIDKSTARKPTEEELVDAMYNLLMGRYSKLLHHEATALTGFINTTSIEGPNPDIQTTNFFSLMQSPELKGYVAATGFNDRVAKSILSANQETNTYITYLLHLKPFSAGSLTLQSANYLDAPIIDPGYMTDERDVDTYIRALNIYKNLPNTKAFSEREAALHKLDLEACNGLTYQSDDYWRCYIRHMTTTVYHPVGTTRMGPSTDPTAVVDPQLRVHGAKGLRVIDASIMPDIVGANTNAACIMIAEKGADMIKEEYLGGKHTEL

SEQ ID NO: 20233 - DNA, 11765 bp, DROSOPHILA
ttatatattgttcttaaaaagccatgtagaacagtttgattttcataggatttaataaaaacaaatgcagtcttataataaaaaattatatatacggatgcaaaaacaagcaaattaaatccaattaaacgtatgtgccaatgtttgtgatcaaaaactgtttttaaaagtcagctgccgcggaaaatgcagttggatttgctggagaaaaacgtgcgcatgcgcaaccgatttgctggcagcgacgccggcgtcctctgccacggctaccgcctctgccggcgctgcagcagcggagacaaaacgtcgcaggccagcttttgtggctcagaaacgcagcgactgccaaccgaggcacacacgaaaacgggctggcgaggcgaattatccagtgaaccggttaaccgattatccattatccattattgtacgattacccataaccgataccaaaatcagagcgcgcgcggcctagctaactaatttcaattacaatttatttatttttgtttctgtttactcaatgtgtttacgaggcctaaatgaaagtgcagaaaggcaagtgactttgaatgcgaacgtgacgatggcacagagagaaaatatcacaataatagtccatgaaaagcagtaaacgaataataacccattcttcaccctacaagcttaaaatattattaacagctttttcatctgtaaagcatcgcaatcaccatgttgtttttaagctagaacttctccatttaaacgcttcatttttcaatatacatgttgagaaacttgaaataaccgtattgtgatgttttttttcccagtgtgctttgatagtgaatgcaaaaattcaacaaaagtggcacgaataactactcatcgcaatgcagtcacagcaatagagcgaaactaaaccttaggaaacgcccaaagaaattcaagaaagcaaggaagggcaatccttccctgaaaaaaattgtcccagtaaacagatccccctcctaaaatcatggttgtagttccagctctaggcgccgccgccgtttccgtgggcggtctgctcttcaaggcgagtgccgcatctaaggcggcggcggcagcgggcgtagcagcggcaggagcctccaaattgggcctggccatcgccggtgctatcaaactggccaccgctgttattggcgttggtaaactgaccatattgccctttctgatagcggctatagcctactataattacgatctcttcgatccggagaatcgaccattcaacgtgcagcaagtggatttggcctatgatttcatcatcatcggtggcggttcggcgggtactgttctggcctccagactatcggagataccgcactggaagatcctgctcctggaggccggtggacatgagacggaaatctccgatgtgccgctgttgtcgttatatttgcataaaagcaaaatggattggaagtatcggtgagtcaatgtgttgagaaaattcaagattgtacattttcaaaaactatacatgtctaaaaatcaaatacaattgtattgaaaagaagttgttactcaaattgagttgtgattattgttcttctttcaattgtatataaatcgtgtaccttctaacctcagcatatttttaattctacctacacttaattcttttaaatatatatataaatgtttacttccttatttcgcctggtaaaatgtgaaatatttttctacaattttactgggtcaaatagttggccttagcagtggccgggcgtgccctttgctttcgccctttttttttttttggccagctcatcccgatgacgttgccatttttccaaagttggcaacgaattctgtccatatgctaatccgcatcgatgagttgtagtcattagtattcggaatagaccaaatagacagctcaacttgaatgggttgcgggttcagacgacccaagacgatgatcatgatgatgatgatatgatggtgccaaaggccggattcgtttagttagcaaccgcctgccaaatttcagactatttgcaagctgtcttcacacgcaaacagtgaaacgatttcagcattcgtggaaaagaaaggaaaaatgcactgacttataagatttacttacatcaaattaacaggaaagtcaacatgttggatttagtttttggggaaaaccattgggaaatatttggtggctccttaagagcgctattaaaattattaataaataatattaaattgaaagttatgcattagatcgtattgtttaagctcaagttttaataggtcattcatttttcagcatattgaaagacatttccttctcatagcaccattaacacagcaattactttacgacagttttcattgcatttctcttgatttgtggcttctgctctccagtgatcccatttcttcgatctttcacttttctccggcccactttcatttcccggctcatccccccaccatccagaatgttccaattagataaagacaaacgtagaccattaccatttaccagtatcatctcgatggataatcttccaatttttttgtttttctggctgtgtctcgctttcaaatagcaattaagtgcggctttatatggccgcttgagcatccattaaccagaaatttcggcttaacaataaatggaaaatgatcagtgcttctgagagactgattcgaattagaacgggctaccgttaggcaggccttttggacccgaggcttctacttttttagattttattttattttatttattttttgtttttggggtgggccccactgatttcattcagatcgttttctatctcacggcatttcattaataacagctgatgccgatgatcaacggcaccctgtggccaccggctctcaaattaacaaatcgaacttcactgcttaattattcatgagctttggcatttttttttttttttttggttttttttcttggaattttgttcgagcgtgttaccaataccgtaatccatttaactgtttaatgtgacagaaggctgggtgttttgggttgggtctataggcctagcggcgatttgcgttcggttttctttatgagtcttcttcgctctttttggcttaaagtttcactttcagaattccattcaattccattagtattcccattccctttcattgtctttcgttttcatacaattccttttcttttttacattcccattcctattccattatattttggcataattgaatgcaatatgcggttaagtgcatgcgaattaaatcatagggtgcaaaacacagtaaacaatgtaagcacaccgcgaaataagtacacattgcagtatacgattattatgctaatctacccacgtgaaataaactctaatatatcacatttatgctactcgcaaaatttgttacacttttaagtgagtctattttttttttcagtttagcgagtatgaagaaattctgtttcaatgtaaagattataaaggaataagaaataattgatgttctgttttattaaataattattttaaatcaaaattaaattcttgttcccccataatggccaaaaatcgttcagtgcacaaaaacaaaaacccaaactaagtgcatcgagtgtggcaatataatcgagtgtgtttctgaatcattgcatcattggcaaactcgggagagtcgcggcagcagtatctgcatttttgtatctcagtttttttttttttttttttggtatctccgtgctaccaactgccagtcagctggatctgcagagagcaaagtatccgaaaaagtgtgagtgttgtttgttttggggtgcaatttgttcaaaaaatcaaacctcgaaaaccgctttgcaagcaacgggaaatacagtcaaccgactgaaacgaaatggaatctgagttgtacagtgaaaaagagacagaggctcgacaatcactctcacgtcaatcatcgccggtaatcttgattgactcactcatgggcttaaaagtttcacccaactgagaaagtcactgaattggtgtcatcagtttggtatctgcttggattcagtgtcaaatttttggagttcaaggtcgtggaaagacgttcattagagtttgagttcctcagagtttctaaacaccaaaatccctttgcaaaaataattgcaaacattgccaaaaacctcgctgcactgataataaatcaaaagtccatttttaactacatacattttgtttgcgattataggataaaaagtatacaacttgccgctaaatatttcataacccattcatgtgcaactatcgctgcaagtcatttcaaagtattcaaattcgcagccagcgccacagtaggcgccgcctaaaaccaacaatggttctacagcgtaaacaagcagcccgttgagaggcagaaaatgtggcatggagggctcccaaaaacctgactcgttaacccccgcaaacaaaccccatctgtggtgcattccacttgggagattacgcaactcgagttggcgatgacccccagtcttatccgcatcattaaattccctcctcgcgatcgttaatgccagagatattttttggcatccacagtggagacacacccctgacgaattcgcatgcaagctgaaaagcggatatcattttatggaccaaaaatatgcaatatgaagagaaaaaagtgtgctctgtataaacataattttaaaggagttatttcttcaaagtggatactcttttcaatcttttataaaaatttggaaaaaaaaagttgttcaaatacaacatcctttttagaacccttttttgttaacacttcaattctcgcagtgtatattctgcgatcgggatatcctatgccggtccagtctaatttcccaacataaaaccggatcgtatcggcgttgctccaagctgcatgatatggtattgtatggtatggtatatggtatggcaaagtgggttaggcggcctgcaggtctgcatgaaaatggcacaaaacgaggcacaatgaaacgaaccgaaatgaaatgaaatggaatgaaacggcgctgatacttggcaattgcacctaatcgagccgggttgccaatcgccaaaagccactaaaaatcggtgaggagagtggcttttatacgtgagccggttaaatggacaggcttcggtgggttttttttatactcgagacaagtgcctcgtacctcgaattgtgtcaaccgggcaataaaaaccaagtaaaaaaaaaaaaataataataataaaaacaactgcacaccatgtttgcctaaaatgaagaatcaccgattaacactaaatattgatatggttatgcatgtatttcatttcatttgaatttacacaatcgaaaacatgaaacttgttatgaaaccagacggagcgcaaatatttgcttttaatctaattaacaccaatggatcaacggacagattatgtaaagtggaaaattattagacatttatatgttgaggatatggttcgtggtaatacgaggacatcgaactattgtttattgtttcctattataagctgtttaccataacatttatgtatacaaaaatagcagtaaaatggtagactctggaattttctctctacaatttttctcacatttcactcagcaattaagttaattaataaacatttccattaataaatcacatgaaaccgttttacaacctaatgcggctgctaagtgattttatatggcaatcaacagcagttccatctgaatgcgttacatttttttggcttcttgggttggggaattactgaggggccttaaccaactttcggttaacgagcattaaacaattacgaaaataatgcaatcaactcgaattttcggcatgcatattcatttcataagcggcaattatgattgcttagcccgtcgaatgtccctaatgcgtgtttcatatccactgtttctagatttatttgcaaaaaaaaaaagaaaaaacaatacttgcttataaatgataaaatcgctgaactttacaagcttaatcgaaagaaacgcactgcagcttaaacaattatcattatgtcactaatgtcttttgctgatctttttcagattactttaaaaaatttaaaattatataaaactttgcagttgtgtagcatttcaccagaatgtgaaatgttttttttttatgttatgttataattttaattaattatagtatgacttccgcttaaaggattcccccaatagttaccaaaattcaccaatattttattcccatttctaaacaattgcttttaggacaagatttacacttcccacacccacaaaaaaaaacaacaccaaataaactaagcgaaatgagttaataataatttgttacgtttatgtgagttaactgttaaatggcaaataaaaagcaaacaaattgcgtcagttgtgcgtctcgcacagtggaaggccgaagttgaggcgaaagtttttttcttttcttatatttttctctctcaattttgtttacctgcgagtttcgatgtgtggttgcacctgtagtatctgcggtatctatgagaaatggccacagcacgtagccaataagtcagtatgccaaacaatgtgccacagtggggcaacagtggcgcgaatcgatattaatggctcgtcaacggacggtaagatagggttttaagcgaagagaaaataatattcatcaccgatcggggcagcataaatcagacgcccaatatgtgcatgtcgtatgctaattaccccttaccctaatcccttccaacctctaacttaaggaaaaatacaaataaatataaaaaaaagggaccggttttgacaccctaatcgcaagagatgcaaatgcatttgaactggcaagtgactgatgggccatggagagcctaaaattaacactaatttaccgaatacaattaactgacatcttcactattcagtttagtggcgatatagcagtttataaataatataaatacaaaatacaaaaaccctttacaaacaatctatttcgcaaatacacattaaaggattaaatcattttactcacaacctatttcctaacaccacttatttttaatcaaaatttggttctaatcataatttaaatatagctaaatagatttaacccctatttgattagcgctagcttaaatagggtatcaccaacttcgaggcgattttatgattttaataaatttaaactctttctctgtggctttggcacgcttttcgccccgcagcaatcatttgctgaccaagttttccgcaactgacatttgatttccgtttgttttcttcgtcgtcgcgagtttcccagtggggtttggttaacttggttaagtcgtctcttgattattgcctgtcactggtaatttgtatttttattaacgacaaaagaaaaaaatgtcttcctatgtctttagcagcgggtataatgggcgcccaaaagaaatggaatttcggattattagattcggaagagctgagatgaaaaaaaaaagaaaataaaccaccagagttgtcaaaacgttttgttggccaatttgtcggtttatattggctgcactcacggcaggaaaaaaagtattcgaataatgctgggaacttaacaaatggattattatcttaacaaatgcgtaactttgactgggatatccgctaattggtagcgcttgaaattgcagggtgcaatttatcgtattttttcttattttgttaggcttttttttttgttgtataattaacatttctttcctctgatttcttctttatggagttttatttcctattttgttcattgacactataatttctttacagaaatatcgtgtaaatatcttaccaaaatgtattcaataaaatttgtttcaagtcatttctgttagtttatcggttaatatagttgtatggctttttttttgggtacttgttgcattttctttgtactaaaatatttgtcactatttttttctgtaatttaattttcgttttttcattccttatatcctaagaaattttccttaatttattatcaatttcggttgtttttttgtgcatcgcttttatattcctgacttcatgtaattgcaattttattggcattacattcaagttttttacgattttcagtttgctattaaaataaccataatttttattatctttatcctattttctacataaaatagcaatttttctccagctgtgctgtgatttttgaccatgcttgagcaacctatctgcaatttttcaaagcaacctccgcagcactataatccacactttaaatgccattcgtagatactcatactcatggataccatttaaagccacttaaagggcaaaagtacgaaggggaggtcgcttggttcattgcctcatagacatttctcagtttttggccaaatgagcgtttaacactggctttgtgtgtttgtgttgtaattaagttggccactgggcaacttgccattattttttccacctttttcggaggagtgggcgtggcactcctgagactaatgcgctttcattgtcgcttttgttgacttgccacaaaaaaaaaaaaaaaacaaaaataatcggatatctcagcttgtttggtcttggcgagattcgctaattgttttcacccagtcgtaatctttgtggctacctatttcaataagcttaacttggagatttgctctttccttgcgttttctaatctacaagatatttatttttatctatttacagcacccaaccacaaccgacagcctgtcaggcaatgaaggacaaacgctgctgttggacgagaggcaaagttttgggcggcagttcggtgctaaatacgatgctctacatcaggggaaataaacgagactttgaccagtgggcggattttggaaatcccggttggtcgtacgaggatatactgccctatttccggaagtctgaggatcagcggaatccctatttggccaggaacaaacgctaccatggcacaggtaagtcgaatgatatttaaatgtggtctcttaatgctcaaaatagtgtgtaatttcatataaaaattgacacatttaacaaactaaatcgttaaagatgagtgcataaacaaatgacctaaagtttacaacttatagctttgattgtttcccaaacataaacatatcactacatcttgttttcatgacaatttttttgtacaaatattagaagagtagtttcaacggagcatatgaagatcgcaatgtattctttatatttctaattatacaatttataattattaattttgattttaggaggcctttggaccgtccaggacgcgccatacaacacgcccattggaccggcatttctgcaggctggcgaggaaatgggctacgatatcgtcgacgtgaatggagagcagcagacgggtttcggtttctatcagttcaacatgcgtcgcggttcccgcagctccacggccaaatcatttttgcgaccagcacgtctgcgacccaatcttcatgtggccctcttttcgcatgtcaccaaggtcctaaccgatccccatacgaaacgagcgactggagttcaatttatacgagacggaaggctgcaaaatgtatatgccaccagggaggtgatcctgtcggcaggagccattggatcgccgcatctgatgatgttgtcgggcattggacacggcgaggaattgggcagagtgggcataccactggtgcaacatctgccgggcgtgggacagaatctacaggatcacattgccgttggcggcatagccttcctcatcgactatcccatttcgattgtgatgaagagaatggttaatatcaataccgcacttaggtatgccatcacagaagatggtcctttgacctccagcattggtttggaggcggtggcttttattaacacaaagtacgccaatgccagtgacgattggccggatatgaactttatgatgacctcggcatcggtgatgtcggatggcggtagccaggtgaagactgcccacggtctgaccgatgagttctaccaggaggtattcggggaggttaacaatcgcgatgtctttggcgttttccccatgatgctgagaccgaagagcaggggctacataaagctggcgtcgaaaaatcccctcagatatccgttgctctatcacaactacctcacccatccggatgatgtgaatgtgctgagggagggcgtcaaggcggcggtggccatgggtgaaacgcaggctatgaagagattcggtgctagatattggaacaaaccagtgccgaattgcaagcacctgaccctgtacaccgatgactattggaactgctttatcaggcagtatacgatgacgatataccatatgagtggtacggccaaaatgggaccacccacggatccttgggcagtggtggatccccagctgagagtttatggcatacccggactgagagttatagatgccagcataatgccggccattacgaatggcaatattcacgcaccggtggtgatgatcggcgagaagggtgcggatatgataaagcaattgtggctaacccccacaacggcgccagtgggggttcaaggtcaggggccgagcccgcgtcaaggtcacaacacgagcccagcgccaccaccgcgaacccagtggcggagtaaacgatcattaaactccacggaagcagacacagaaacggagaacagtgaaaacttggacattggaacatcacctgtacatcaatggccactgccaaggtcgtagccattgcaagttgtgggggggggtttaaaaggggtcaaacggatggggtggggtttgttggggttgtttttggttcatcagttggaaggggggggttagcacaaatttccgccttctaaataaatttaatttattaagctcaacttgctcttctcattctcactgctattcgcactctagccaaacgaataaatgaattaccctttttttcgcgagaaagccgcccctatctgctccacccatgatcgtagtcatttaagcgcttcatgtaaatatcgagtcatttatgctaatttttacatttttttttttaaatatgcatcgtcgcctgttgtgtgtgtctaatcgaaatgtgtattttttgttttacttttattgttaatttgacgccgcgtacacttggagtacctcaattagttcgtaagtcgaagattacgattacgatgcaaatgtttcgttagttcttaaatgtaaagtaactcaataaaacgaataaatacgaatattacctcaagcgttgcttaatgcagaagattttatttcagagttatataataatatatatttactttcaaatctaacgatatatgtaggtttgtatctggtctaaaaatcaaacgaaagtttgtttgtaacagcttacagattgaaatgtaaggtctatcccggtttacttacagtttgacatcgggcttactcattttttattaagtcacagtttgaaattcaccacgaaaagcttggtcaaagcttacctgtaatgaaagatataaacagagattattggtaagcaaatattttcaaataaaagcttctcatttgtaaagtcggctaaaaagcaggcttgcgattttaagagctttaagaaagctgcatactttcttaagccgatttaaaatagggaatctaaactaatttcaagtggcccaaagtaattgaagagtttcgataaagctattaagtaaaatcgtatgttccacctccagtcagaacttggcag

SEQ ID NO: 20234 - DNA, 2181 bp, DROSOPHILA
atggttgtagttccagctctaggcgccgccgccgtttccgtgggcggtctgctcttcaaggcgagtgccgcatctaaggcggcggcggcagcgggcgtagcagcggcaggagcctccaaattgggcctggccatcgccggtgctatcaaactggccaccgctgttattggcgttggtaaactgaccatattgccctttctgatagcggctatagcctactataattacgatctcttcgatccggagaatcgaccattcaacgtgcagcaagtggatttggcctatgatttcatcatcatcggtggcggttcggcgggtactgttctggcctccagactatcggagataccgcactggaagatcctgctcctggaggccggtggacatgagacggaaatctccgatgtgccgctgttgtcgttatatttgcataaaagcaaaatggattggaagtatcgcacccaaccacaaccgacagcctgtcaggcaatgaaggacaaacgctgctgttggacgagaggcaaagttttgggcggcagttcggtgctaaatacgatgctctacatcaggggaaataaacgagactttgaccagtgggcggattttggaaatcccggttggtcgtacgaggatatactgccctatttccggaagtctgaggatcagcggaatccctatttggccaggaacaaacgctaccatggcacaggaggcctttggaccgtccaggacgcgccatacaacacgcccattggaccggcatttctgcaggctggcgaggaaatgggctacgatatcgtcgacgtgaatggagagcagcagacgggtttcggtttctatcagttcaacatgcgtcgcggttcccgcagctccacggccaaatcatttttgcgaccagcacgtctgcgacccaatcttcatgtggccctcttttcgcatgtcaccaaggtcctaaccgatccccatacgaaacgagcgactggagttcaatttatacgagacggaaggctgcaaaatgtatatgccaccagggaggtgatcctgtcggcaggagccattggatcgccgcatctgatgatgttgtcgggcattggacacggcgaggaattgggcagagtgggcataccactggtgcaacatctgccgggcgtgggacagaatctacaggatcacattgccgttggcggcatagccttcctcatcgactatcccatttcgattgtgatgaagagaatggttaatatcaataccgcacttaggtatgccatcacagaagatggtcctttgacctccagcattggtttggaggcggtggcttttattaacacaaagtacgccaatgccagtgacgattggccggatatgaactttatgatgacctcggcatcggtgatgtcggatggcggtagccaggtgaagactgcccacggtctgaccgatgagttctaccaggaggtattcggggaggttaacaatcgcgatgtctttggcgttttccccatgatgctgagaccgaagagcaggggctacataaagctggcgtcgaaaaatcccctcagatatccgttgctctatcacaactacctcacccatccggatgatgtgaatgtgctgagggagggcgtcaaggcggcggtggccatgggtgaaacgcaggctatgaagagattcggtgctagatattggaacaaaccagtgccgaattgcaagcacctgaccctgtacaccgatgactattggaactgctttatcaggcagtatacgatgacgatataccatatgagtggtacggccaaaatgggaccacccacggatccttgggcagtggtggatccccagctgagagtttatggcatacccggactgagagttatagatgccagcataatgccggccattacgaatggcaatattcacgcaccggtggtgatgatcggcgagaagggtgcggatatgataaagcaattgtggctaacccccacaacggcgccagtgggggttcaaggtcaggggccgagcccgcgtcaaggtcacaacacgagcccagcgccaccaccgcgaacccagtggcggagtaaacgatcattaaactccacggaagcagacacagaaacggagaacagtgaaaacttggacattggaacatcacctgtacatcaatggccactgccaaggtcgtag

SEQ ID NO: 20235 - protein, 726 aa, DROSOPHILA
MVVVPALGAAAVSVGGLLFKASAASKAAAAAGVAAAGASKLGLAIAGAIKLATAVIGVGKLTILPFLIAAIAYYNYDLFDPENRPFNVQQVDLAYDFIIIGGGSAGTVLASRLSEIPHWKILLLEAGGHETEISDVPLLSLYLHKSKMDWKYRTQPQPTACQAMKDKRCCWTRGKVLGGSSVLNTMLYIRGNKRDFDQWADFGNPGWSYEDILPYFRKSEDQRNPYLARNKRYHGTGGLWTVQDAPYNTPIGPAFLQAGEEMGYDIVDVNGEQQTGFGFYQFNMRRGSRSSTAKSFLRPARLRPNLHVALFSHVTKVLTDPHTKRATGVQFIRDGRLQNVYATREVILSAGAIGSPHLMMLSGIGHGEELGRVGIPLVQHLPGVGQNLQDHIAVGGIAFLIDYPISIVMKRMVNINTALRYAITEDGPLTSSIGLEAVAFINTKYANASDDWPDMNFMMTSASVMSDGGSQVKTAHGLTDEFYQEVFGEVNNRDVFGVFPMMLRPKSRGYIKLASKNPLRYPLLYHNYLTHPDDVNVLREGVKAAVAMGETQAMKRFGARYWNKPVPNCKHLTLYTDDYWNCFIRQYTMTIYHMSGTAKMGPPTDPWAVVDPQLRVYGIPGLRVIDASIMPAITNGNIHAPVVMIGEKGADMIKQLWLTPTTAPVGVQGQGPSPRQGHNTSPAPPPRTQWRSKRSLNSTEADTETENSENLDIGTSPVHQWPLPRS

SEQ ID NO: 20236 - DNA, 3093 bp, DROSOPHILA
agaacagaattatttaagaaatgtcttataacatccgttaaaactaatattaactctttcagggacttgactgctgctcggacaacgccatatcgttccactacgtctcccccaatcaaatgtatgtgctggattatctgatctaccatctgagaccgtacgggatcataaacacacccgatgcgttgccgaataagctagccgtgggcgaactgatgccggagatcaaggagcaggcgacggaaagcacaagtgatggggtctccaagagatccgccgagacaaagacgcaataatagagacacacgggtagacacctaatgtacatatagcttttgtatatatcaatagataattgtgtaatccaacacgatgaatcgctacaagctatcctagcaatgccattaccacttccataaaacaactttatgtcctcggtccatttcttcacatcccgaaaaggtttcgtttgggctccactgcggagctcttcccttttgtacaaataccaaaactagttataatttagttatgttactgtagtatgtaattaagtctaggttgtacaattataaagtcatcactaatagggcgcatttactattgaattctggttttccgtcactaagttggccattacgtgtttatgagtcgcctaagtaaatcctatacatatgtagttgtatatttaatctcttttgtgattgagattattgcgtattatagatcttaatcttctacatgtattgaataaaatgaaaattaattacaatgtatttttaatgtctgaataaattttaacgcaagcaagtttcttattgtaaccagcaaaatttgaaatttgaagtacactgcaacttagagccatcgattcatttgcgccgtcaagataataatatcggtgcatgtctcagctatttggtgtgttatcgtctatcggcttatcgttagttatcgtttcacctcccatctctataacacatgttttgtttgtaaataaaataagtaataatgttggcgccaattaagcacttattagggaattatcgcatagtcttagccagcggctctccacggcgacaggaactggtcaagatgttggtaggttacatcagatctcgaaatccatccaagacataaccgattaccttttttaagggactaaatgccgaattgtgtccttcgacttttgaggagaatttaaacttggaggactttaaggagttctcggattatattgaagccactgctctgggaaaagccgaggaggtctactcgagattgaggtccacgggggactctaaaaatctaattgtcatagccgcagatacgatggtcaccttgggaaaggagatctatggaaaacccaaggatcctgcggatgctatacgcatgctaaccaagtaatggcctttccatttacattattatatatcctaggtcagaactattaacattaatgattccttggatatatacatactgacagaggaattgttatacaatagttttttgtaatcaggtagttggaggaataagttcttgctatatttctatttttaattttcttgtagtctctctggaacctccaatcgcgtttttaccggcgttgtcctgaaacatgccaacggtattcgaaaatttacggacacagcggacgtatactttggcgatctgctgccagaacaaattcagagctatgtggactctggagatcccctgtaagcagctaatatggaagatataatgaccattagttttgactttaaaattgcagagataaagctggtgcttatggcgttcaaggacctgcaggcgcgctcatccaccgaatcgatggggacttttactgtgtcatgggtctgcccctgcatcgactgtgctgtgaactaaataagcttttcctagaggatctatcctcgtaagagctggtgtcatcgtcgccgtcatcatcacagcggaactatccgaggtttatgcggcaacaagcgtcagaggctacacacactccagcgattttaatcttggttgataagcggctatatgactccgacgttgagggcctgtttgctcatttttagcccaagtcaattaaaaataaaaaatcatataacagcgagcagaattgtagtacattctgtacgagagaacagggaacagtggtcatattgctttgaaatttttcgaaaaatttaaactccgtattgacctagattttatagctttgtattagttgacaaatagtacataatccatatttatttgaattgaagcaatctgtaaataactggttattttttaactttactttcactttttacctaaagtatttacaacattttcattgaaactactgttcccactgagagaatctcacttttggcgtgccccaatcatttaaaaatgagcaacttttgttttaaagataacatggttgtacgacacagtgaagtatctgcgagcagccccagtagtcaaacaactgttacgccaatcggatccatcatgacccagatccccgagagctgttataagatgtggggtggtaggttcaccgaggggccgcatgaggctctccattcgctgaataacagcctgccctacgattctcgcctctatgcggatgatttggacgccagcaaggcgtatgcagaggcactccatcgagctggtctcatcaactcagccgaggcggataagttggtaaagaatctggagctgttgcgattcgattggatcgagggaactgtgaagattctacccggtgacgaggatgtgcacacggtgaacgagcgattgctggtggagattaccggcgaactgggccagcggcttcacacgggcagaagcagaaatgaccaggtggtcacggacatgaagctatggcttcgcaaggccattcgtgagaccttgggccggctgagtggcatcattgaaactgccaccaggcaggcggaactccacctgggcgtcctcatgccaggatacacgcatctgcagcgggcccagaccgttcagttctcccactggctgctctcgcacgcgtttgcattaagggaagatggccagcggctgttggagctaagggatcgg

SEQ ID NO: 20237 - DNA, 809 bp, DROSOPHILA
aataagtaataatgttggcgccaattaagcacttattagggaattatcgcatagtcttagccagcggctctccacggcgacaggaactggtcaagatgttgggactaaatgccgaattgtgtccttcgacttttgaggagaatttaaacttggaggactttaaggagttctcggattatattgaagccactgctctgggaaaagccgaggaggtctactcgagattgaggtccacgggggactctaaaaatctaattgtcatagccgcagatacgatggtcaccttgggaaaggagatctatggaaaacccaaggatcctgcggatgctatacgcatgctaaccaatctctctggaacctccaatcgcgtttttaccggcgttgtcctgaaacatgccaacggtattcgaaaatttacggacacagcggacgtatactttggcgatctgctgccagaacaaattcagagctatgtggactctggagatcccctagataaagctggtgcttatggcgttcaaggacctgcaggcgcgctcatccaccgaatcgatggggacttttactgtgtcatgggtctgcccctgcatcgactgtgctgtgaactaaataagcttttcctagaggatctatcctcgtaagagctggtgtcatcgtcgccgtcatcatcacagcggaactatccgaggtttatgcggcaacaagcgtcagaggctacacacactccagcgattttaatcttggttgataagcggctatatgactccgacgttgagggcctgtttgctcatttttagcccaagtcaatt

SEQ ID NO: 20238 - protein, 181 aa, DROSOPHILA
MLGLNAELCPSTFEENLNLEDFKEFSDYIEATALGKAEEVYSRLRSTGDSKNLIVIAADTMVTLGKEIYGKPKDPADAIRMLTNLSGTSNRVFTGVVLKHANGIRKFTDTADVYFGDLLPEQIQSYVDSGDPLDKAGAYGVQGPAGALIHRIDGDFYCVMGLPLHRLCCELNKLFLEDLSS

SEQ ID NO: 20239 - DNA, 4930 bp, DROSOPHILA
cattgagacattcgagactctcgagagacaagagacaaaaaaatcaagagtcgaggattttttttcttgctgtttgctttttccgcctgtcaaacggcattgaacttgaaaaactagccagcgagagaaagaaaattagagaaatatatacagccgcggaaagacaatataatactatatacagaaaagaaaatgaaagaaatggctatctaatgagattcagctgacatcatttgaatatttatatttttaaattcaatttcaatgcggtttgataacgttttattttcgttgcttgcgaaaaatgtaaacaagttcgttgcctaagtcttttgtttgactgcgcgtgtgacagcgccatctgttggttaacgattgccaaactggaggctttggtatatatacacgaattttggatataatgcggcttccgctagacaataatgcttgcatgttgctgattttcgagcctgtttcgtttctgtttcgtttttgtttttgtttgcgaagtcatgcaacaatggcaaccatgttaacaagaaatccaaaaaaagccacttcaatgctcatcagttacccatcatccataaatggatgaatgatagcgaggctcccacgcttttgattgtcgttatctggaaatagttgaaagctggttgctccatcaatggattagggtgggaaatattgagatgttgtcagccaaaccgaaataatgattgcaatcaaatcaatcataatgaggttttaaattgtggtgcttgaattaaattttcatttttcagttcttattaaaaaaaaaaactaccagaaaagttaaccgaaattatatttagcaatacagtataccaaacccatttaaataaagttactttattacaacataacagtatactatatattattcctatgttaagttttttatcacttatttaacaagtaattaagtgacttaagtttacttttatcattgcagttctgttcatatttctgtcaaaatatgggccaagagatatcgcaacagcaaaatcagcaacaccaacaacaccagcagcaccaacaacaacaactaccccaccacaaacgacaaccacagcgaaaaagcttcagcggcattagcaccaccaatcagccgatttacacgcccacaagtcacctatccaccagctcctcctccatcaacaccaacgattatagccacaataataccagcaataataataataataatcagaactaccgattgcgtcacaagtacaacttgagcaagcaaacctacgaaaggagcaaaatagcagcgagttcagcgagtacaagtcaatccgatacggattcgcattacgccaaactaaacctacagaggagcagttcgcagagttcggatagcggcatctataactcctcctgtcactgcagttccatatcctcgatatcggccgtcagcagcagtgcgagcagcagtcgcagcagcagcagctctagtcgcggttgtcccagttctgtggtgtccagcaaatcgaaccgctcgttggacaaacagaaacactatctaagccatcacctgtacatcaagtcctatctggacatcttggaggaggacgagcgggcacgggcacacttcaaatccgctcgtccgggcggcattcgcaactatacacccaagatcttggccagcggagaatcgagcttatcgggcaactccagcaccaacacagctctatcatccagtgctccagctcattgctacggcccgggaaagagaacaacagtcggcggaacaagcggatcaggtggagcagcaggagcaacaggaacaggagcacagggaacggatccgtggatttgacaattactgaaacatggcgtttggaacaatgacgtctttgcttggcatgatcccgctgctggcgatcggcatgaatttctatcgctatcaaagcgtagatcccgagaacaaggtccaggagccaaccgtcgtaagttgaatgttccaaattatgacaattatcaataaacatcgttattaacaccatatatgccaacaaaatcatttagttatgggtatctattccactaatagttctccataatggtaattgagctctaggtgaatcctaattactttaaagtatcttttgcatacattttaaagctaaataaataaatatcaataaatatatttaattaattttccatttcttttagatacgtcgtcagtatgatttcgtggtgattggcggcggatccgctggagctgtggtggcgaatcgcctgagtgaggtgcgcaactggaccgttctgctactcgaagccggcggtgatgaaacggagatctcggacgtgccagctctggcgggctatctgcagcttacggagttggactggaagtaccagactacgccttcatccacccgccagtattgtcaggcgatgaagggcgatcgctgcttttggccaagaggaaaagtcttgggcggaagttctgttttaaatgctatggtctatgttcgtggctccaagaacgactataatcattgggcatcgttgggtaatccgggttgggactacgacagcatgctcaaatacttcctgaaatcggaagacgtacgaaatccctatttggccaagacgccataccatgaaacaggtggatacctgacggttcaggaggctccatggcgtacaccactctcgatagccttcctccaagcgggcattgagatgggctatgagaaccgggacattaatggagcccaacagacgggcttcatgcttacgcaaagcacaattcgccgcggtgctagatgctccacgggcaaggccttcattcgtccagttcgacagcgtaagaatttcgatgtcctgctccatgcggaggccacaaggatcctgttcgataagcagaagcgagccattggtgtggaatacatgaggggtggccgcaagaatgtggttttcgtgagaagagaagtgatagccagtgctggagctctgaatactcccaaattactgatgctttccggagttggtcccgctgagcatctgcaggagcacaatatccctgttatttcggatctcccagtgggcaacaatatgcaggatcatgtgggtctgggtggactcaccttcgtggtggacgctccactgactgtcacccgcaatcgtttccaaaccattccagtttccatggaatatatactaagggaacggggtccgatgacattttcgggcgtagaaggtgtcgcctttctaaacaccaagtaccaagatccctcggtagactggcccgatgtccaatttcatttttgtcccagttccattaactccgatggtggcgagcagataagaaagatactgaatctacgagatggtttctacaacacagtgtacaaaccactgcagcacagtgaaacctggtcgattttgcccctgttgctgagacccaagagcacgggatgggtgcgcttgaattcgaggaatccgcagcatcagcccaagatcataccaaactattttgcccaccaggaggacatcgatgtgctggtcgagggcatcaagttggctatcaatgtctcgaatacccaggcatttcagcgtttcggctccagattgcataatattccgctgccaggctgtagacatttgccattccagtcgaatgaatattgggcatgttgcatcaaggagtttacgttcaccatctatcatcccgccggcacatgtcgcatgggacccagctgggatgttacggccgtggtggatccgagattacgggtctatggcgtatccggagttcgagtggtggacgccagcattatgccaacgatcgtgaatgggaatcccaatgctccggtcatcgcgattggcgaaaaggcctccgatttgatcaaagaagattggggcgtcaggcgggcgcacacttccgcttagttaagaagttgtctatcgctaatttatgtttcaactagtcaaatgtggattaactgatgtaatattatcgctatgtgtttttgttttatcaaattcctcgttttgttcaccgttaaatttatgcttagttatttggataagtttagtgtacaaagtcccacaaaactgttttttttttattactttatcaagcattttattaaatatttatgtacctatttatgaaaaaaaatagttttttactctggttacttgtttatttattttgacacatataagtcggctattggcggggactttaaaatggatatttttgttttatttaaaacaccaataaattagctattttaattaatgctttttggttttcatttcgactactctgttcgtatatataaatggaactattttctaactattcaccaatgtttggtttatctgatgtaagttttctggataaatatattatttattattatattattaggatttactatattttttgttgtcaaatacattttatctacatgaaatcgcatgtaactcaaagaattcttagactctcatgtaatcttacatgacaactgtcattcatttgattgttatttaagccaaaagaattgatagacaaaataattttaggtagcttatactcatatatagcagacaattgtaaatttaagaatataaatattttaattattatatgtttactttgaattaagtcgtttggagtgcacttagcatgtacatgaaccgtggtcaatcgttagctaagacatcaaccgcagagaaagtgaagtcacgaagtttataatttgtattcaatttttcaatttgccttaagtgctgggcgtttttttttttgcgcacgccccttttggccagctttctgggctgcccactcttccgcttaaccaaagccaaatgtcaaaaattgccagtatgatagaaaaatgcccccgcgaaggcccattgaaatgtataaactctctgcatt

SEQ ID NO: 20240 - DNA, 2598 bp, DROSOPHILA
atgggccaagagatatcgcaacagcaaaatcagcaacaccaacaacaccagcagcaccaacaacaacaactaccccaccacaaacgacaaccacagcgaaaaagcttcagcggcattagcaccaccaatcagccgatttacacgcccacaagtcacctatccaccagctcctcctccatcaacaccaacgattatagccacaataataccagcaataataataataataatcagaactaccgattgcgtcacaagtacaacttgagcaagcaaacctacgaaaggagcaaaatagcagcgagttcagcgagtacaagtcaatccgatacggattcgcattacgccaaactaaacctacagaggagcagttcgcagagttcggatagcggcatctataactcctcctgtcactgcagttccatatcctcgatatcggccgtcagcagcagtgcgagcagcagtcgcagcagcagcagctctagtcgcggttgtcccagttctgtggtgtccagcaaatcgaaccgctcgttggacaaacagaaacactatctaagccatcacctgtacatcaagtcctatctggacatcttggaggaggacgagcgggcacgggcacacttcaaatccgctcgtccgggcggcattcgcaactatacacccaagatcttggccagcggagaatcgagcttatcgggcaactccagcaccaacacagctctatcatccagtgctccagctcattgctacggcccgggaaagagaacaacagtcggcggaacaagcggatcaggtggagcagcaggagcaacaggaacaggagcacagggaacggatcccgtagatcccgagaacaaggtccaggagccaaccgtcatacgtcgtcagtatgatttcgtggtgattggcggcggatccgctggagctgtggtggcgaatcgcctgagtgaggtgcgcaactggaccgttctgctactcgaagccggcggtgatgaaacggagatctcggacgtgccagctctggcgggctatctgcagcttacggagttggactggaagtaccagactacgccttcatccacccgccagtattgtcaggcgatgaagggcgatcgctgcttttggccaagaggaaaagtcttgggcggaagttctgttttaaatgctatggtctatgttcgtggctccaagaacgactataatcattgggcatcgttgggtaatccgggttgggactacgacagcatgctcaaatacttcctgaaatcggaagacgtacgaaatccctatttggccaagacgccataccatgaaacaggtggatacctgacggttcaggaggctccatggcgtacaccactctcgatagccttcctccaagcgggcattgagatgggctatgagaaccgggacattaatggagcccaacagacgggcttcatgcttacgcaaagcacaattcgccgcggtgctagatgctccacgggcaaggccttcattcgtccagttcgacagcgtaagaatttcgatgtcctgctccatgcggaggccacaaggatcctgttcgataagcagaagcgagccattggtgtggaatacatgaggggtggccgcaagaatgtggttttcgtgagaagagaagtgatagccagtgctggagctctgaatactcccaaattactgatgctttccggagttggtcccgctgagcatctgcaggagcacaatatccctgttatttcggatctcccagtgggcaacaatatgcaggatcatgtgggtctgggtggactcaccttcgtggtggacgctccactgactgtcacccgcaatcgtttccaaaccattccagtttccatggaatatatactaagggaacggggtccgatgacattttcgggcgtagaaggtgtcgcctttctaaacaccaagtaccaagatccctcggtagactggcccgatgtccaatttcatttttgtcccagttccattaactccgatggtggcgagcagataagaaagatactgaatctacgagatggtttctacaacacagtgtacaaaccactgcagcacagtgaaacctggtcgattttgcccctgttgctgagacccaagagcacgggatgggtgcgcttgaattcgaggaatccgcagcatcagcccaagatcataccaaactattttgcccaccaggaggacatcgatgtgctggtcgagggcatcaagttggctatcaatgtctcgaatacccaggcatttcagcgtttcggctccagattgcataatattccgctgccaggctgtagacatttgccattccagtcgaatgaatattgggcatgttgcatcaaggagtttacgttcaccatctatcatcccgccggcacatgtcgcatgggacccagctgggatgttacggccgtggtggatccgagattacgggtctatggcgtatccggagttcgagtggtggacgccagcattatgccaacgatcgtgaatgggaatcccaatgctccggtcatcgcgattggcgaaaaggcctccgatttgatcaaagaagattggggcgtcaggcgggcgcacacttccgcttag

SEQ ID NO: 20241 - protein, 865 aa, DROSOPHILA
MGQEISQQQNQQHQQHQQHQQQQLPHHKRQPQRKSFSGISTTNQPIYTPTSHLSTSSSSINTNDYSHNNTSNNNNNNQNYRLRHKYNLSKQTYERSKIAASSASTSQSDTDSHYAKLNLQRSSSQSSDSGIYNSSCHCSSISSISAVSSSASSSRSSSSSSRGCPSSVVSSKSNRSLDKQKHYLSHHLYIKSYLDILEEDERARAHFKSARPGGIRNYTPKILASGESSLSGNSSTNTALSSSAPAHCYGPGKRTTVGGTSGSGGAAGATGTGAQGTDPVDPENKVQEPTVIRRQYDFVVIGGGSAGAVVANRLSEVRNWTVLLLEAGGDETEISDVPALAGYLQLTELDWKYQTTPSSTRQYCQAMKGDRCFWPRGKVLGGSSVLNAMVYVRGSKNDYNHWASLGNPGWDYDSMLKYFLKSEDVRNPYLAKTPYHETGGYLTVQEAPWRTPLSIAFLQAGIEMGYENRDINGAQQTGFMLTQSTIRRGARCSTGKAFIRPVRQRKNFDVLLHAEATRILFDKQKRAIGVEYMRGGRKNVVFVRREVIASAGALNTPKLLMLSGVGPAEHLQEHNIPVISDLPVGNNMQDHVGLGGLTFVVDAPLTVTRNRFQTIPVSMEYILRERGPMTFSGVEGVAFLNTKYQDPSVDWPDVQFHFCPSSINSDGGEQIRKILNLRDGFYNTVYKPLQHSETWSILPLLLRPKSTGWVRLNSRNPQHQPKIIPNYFAHQEDIDVLVEGIKLAINVSNTQAFQRFGSRLHNIPLPGCRHLPFQSNEYWACCIKEFTFTIYHPAGTCRMGPSWDVTAVVDPRLRVYGVSGVRVVDASIMPTIVNGNPNAPVIAIGEKASDLIKEDWGVRRAHTSA

SEQ ID NO: 20242 - DNA, 9262 bp, DROSOPHILA
tatttttatagcttgtgaaatcttactagaaaaaaaaaaaaaaaaaatacaaaaatcttatatttttaaacggggttttctctataacttggtaaaaaaaaggtggcacatctaacgaaaaaaaacactgttttatactgctcataagcatacctaactatccctatcataattttaatgattttcaaaaatcaaaatttgaacaagttttcggtaattttatattctttcctttctagattgtgatttttggagatatttcagacgtacaattatcaatttatatattatgcacatatatttgtattcattctttgagaaagtaatattcgaaagagtggacacaaatcttagaaccaaccccaaaaacaaacccttaagatagtttccaacagctgttttgccaaatatatggtgactagtagcgagtgatgagagaaacaggccattgataaatcgaagtcacaccacttatatatacaaactacatatcttacctataatattttagtttaatagaagttttttttataattttcaaatcactctcgctctttatagaaagccggtaccggtttacaccccctttccgacacaagcatataaaaagaacagcgagagagagagagagtgagctttggttctctcacttaattctgttgattgcacaggtagaaacaaataacttgtatactgcgatatttaaatttatttgtttttgtactaatttgtactatattctggttaaatatgaaatagttaaaaatacttattgggaactgatattttaaataatatatttaataatacttggtgtaattaaattcaaattttttacttttattgcactagacagcaataatagcttatgtttcaacttcgatcataatcataaatttttttaatttacaactttcaacattttcttgccagtgtactctgttctcttcgttctcgctcgtgctcagttttagaattcgcggcagttgtttttgtttgtccggcgcgttcgcttgcttcacttatgcgcttgttgaaaatcaaggaaagggcgcggaaaataagtttaattaaatatttcgagtggctcgactaacacagcaattaagcgaatgtgcaaaacgtgaaagcagttgtgaataaaacgcactcatcgcgaaattaaaagctttttgggagcgtcctgcgatggagaaacgcgtgaggaaaaatcaattcgtaagtaaatgggcgacgcgaaaaacggtgatttaaaaatcaaatgaaatgaaacgcgtgcggaatttacctgaacggaaaactaatcggtcagcaaaaattgcgttttgtgccaaaacagaaagcgcaataaatataatatacaattgcgcatatggtgtatgtacatagagtgcaagaagaacgtgacaaggaagagcaaacgaaggtgaagagtgtgaataaaaccaaaacaataagaacgaacaagtttaagccactgttacggcaagtaacgcacgagaatatacatatgtacatatattggtttccaactggaaactgaaattgactagaaggaagtggaaggaagaattgcctgacggcctttccttccagtccggccactcacactaccaaagccccttgctgcaggatgttaaaataaagctaatgaagaaaagaattgagaacagtataaaaaaaatagctaaactcttgggtccccattcctaaaatatttgtaaactctgatcctatgcctaaaaattataaaatcaatgcaaaaagtttaaattataaggtacagcatttattaaatttaacgttctgttccaagtgtgtttgaggcatttaaggcgacaactctaatatgttatctgtttgagggtcgttggtcttgagtatttttaataacccgctaaacacaaaggaatatgttgataactaggcgagaagtggcttcccaattcgtgatgtcttatcctggtggttgttgttgtctctgttaatgtaatgacattccccaaacagctgcattttggtttctcgctctccggctctcttcagttgtcatttccgttatgccctgccatgcactcagccctccccctctattcccttttgcatccggggggtgaattaactgcagccgaaacgcatttactttaatttatttgtggttccagtgggcgtcactttctctccctctcatttttatctcgacagagagagagagagcagcacatgctattgtgcgtgcatttgtatttgtatttctcgtctctgctctctgattagccttctcttgttattgttgcggggataattcatatgcagattgcacctagtgattgccattcaaattcaactgatagtggaagctggaacttgtactataaacatacatatggttcttcctgcttcaagtaaaaaaacagtagccatttccatcagtcatcaaagtaatgaactctccttgcaacatatgggactgaataagaatagtactttatgctacttttagcatgttttcgttttccagaagagaactacctagtaaatgagttttaataattatgaatgactctaaaagactgatccttaaagagctccttacttaatgtattattacattatttttaaaaatattcaataccaagtcaaatagtttttaatgtattatttcttgtattgggtgtatttgttcttaaatgtgtgttatttcgtaaagccaaaaatctgaatttgaatagactaacccaataaccttaaaccagctgtgccatgccccgcgggctatactatagaatattgttcaatggccccaaaaaggtgccatttcacgtgagattcaggtgaatagcgctatacctattcattaatcagcaatcaattatctatcagcaaagccttttaatcaatatttaattaagaactcacattccgacttttcttcttatacattgcttttgtcgatgtcgtttgaacaacagagtaatagatattgttcattgggacagaaaataatagttacttgagaactcttatagataagctctccgtaaagtatacaaaattttaaggaatggaattctttaaggttgaactaatggcataatcacttttctcattcgttcgttatatgaatcatattaatatttccattttcatttgctgtattgtactattacacgatgaacaaagaaacagagttttaaaaacgaatgccatgttttttttttgtgcctgataacaattccgcagtccagttccactttgataaacagctgccgacatcattgtgccagtccttactgtattgtttatctgaaagggaagttactgaaagtgaattgaaataaaacgagaatcatagagccaaaacattaagtacagggtactttgcttatacgggctccaaaaataaaatacaataactgaattaaaatatttgcgggatcgcagagcgtggctgattttattgaccgcagatgaaaagcggccaaacaaaacaattgtacaattggtttggtttctggttttagtttgtctttctggcccattctgtttttacatttttttttttaaattacgatgaatggactgtcacgctagtctgagtatagggcagcaaaaaagcaaaaggcactctattaactgaatgacataataataaatttagtttagcttaatttctattaacaggtgctccattacgcgctctcgatgaattagttaagaactagattattattattattatacatatatagtgaataagaatttaagctacataagttgacttttgggaaaacttaactacaatattaagctggttttgaaaaacccataaatatagttatgcttatctatttgagttatgatgaggtaaacgttttatgtcaagggttctacacacacacattgagggaattttttaagctttacaatgccacaaaatatttttttttattatctgtgcaaggtactacatctttgacgagacaaactggtgttataatgttttattatctttggctttatctgagtacgccacaaacaccgaaatttcaaagataacaactaaaatacgtaatagcacgaataaagctaatcaccatggatatcaaatagatcactgaaatagaattgccagacagtatgaattatatacacgttcatattcgtgctaccgaacagtatgtgattatataattttcttttttgctcgacaagtaatttttcaattggccgctgcagtgcatgggaatagtttttggatcggcaatggatctaatattagaacatttgtaaatacaatatttgccacgattcgcaaacttttgtttgttattcactccacgcaaatcgggcatcccaaaggcgttcgaatctgatcagtagactacaatgataagcaaatacgcggttaaattgcgtttaattgctattgtacattagattggagcggcgatgtcggtctgacatgttgttcatgcttaaatttaattaatttgcaaattacaattgcaattgcaaagcgccaagcaagtcgggcaaacacactggtctctgatgtgccacccacacaacctagcattgcattcccagtttacaattgataattgctgggctcaggggtctatctcagattttcaaaatccttgacctggtgactgcatatcctcggtgtgaattggtctgaagctgtcgaagtcatcgatgcgcagcggaatggcgatgagtttagccaggccgtaaaatacggctaagcacagaaaaatggtcagaatcatttggctgggcggcactaaaaaacacataatgtttataaaaacctgcttgttaaatgtatgaactcagcaaacccttgccggtgaaccaaggcagtttaggactagacgatatcatttttatcacacttaacactttgatgacagagttccaaatgagatataaagtcaaattgaactatcgactttaaaaaaccaccaactgatcaaacaaaagctacgcctaaccaaccattcatacatacagtgatccctagtaaaaaaggcaaaaagtgaacaacaatagcccagaagtggaactacgttcaatacgacatttgttatgtttaaacttttaaaaagtattgtaatatacagtatctatagatactgctaatactgctaatgttattgccaggaatgagtacttcaaatatgctagagcaattctccgaaatcattatctgtatgctgcaaatagactataagtccgaaattatatcgtagccaacggaaattgacccagaaattgttattagcacataaccaaagtaatcggcaatggacgttggtgataacaaataataatacattgctgataagttgcggttgtatggaaaatgataagagccggccatactaatttccacgaccatgtcattcgccgaaaatcaattacccaaatgcccatgccaccccatatgcatatctacatgcattagcaagacacttttcttgctttacatttatttcacagataagtggaaactacagcgaaaaatgaaaagagaacaaagcgtacattgcttaaaaaccatctgcatttcggagttctagccgcacttattaaccaagtgccgactcgtgcgggtgcaaaactgcagaaaagattgatttactttggttggcgcagctggtttgcattcgcctgctggtcttgctaccaatttaattgttttatccatgcaaacaaaattattgagtaagtgctaaatagaagattcactaaacaatgactgcgacgggacaaaacaaaaacgattttcgtgctcgaatcgaagatttaattgttctaacaaatgtgacgactgcaagtaattattcgaaaataaagtttatttttggccactaagtgaagtcattcattccttatgcacttacaaagccatttagttgaaatatagttaattaattaacatttattaagtaattatcactagttgtgtgcctagttcaacgacaccaacgaaaaccattcaattatattgttttagtacctgtttagctgattgctaactaaacaaaactctgaaactaaaagaaacccatgacgaaaaagttatctttattacggtgtcaaaagtttaattgcgtttctatttgcactttgccacagaataggcaaaatacttagtgtccaaaatcccatgagattctctatgttgtccgctagttttatgacacaaactcgaaaaaagcaaaatattctttgcgcagactcttgatttttctgccttttctttttgcaatgtttacgtacggcgaaaaggcaacgtagtgcagtaatctcggaaggaaagaacgcgaaaaaacagacacgtgcaaaacttaaaacgagcaaatatagaaaaattgaaatgttttctgaaataaatatttatcagcaatgttgctgcagttgcagaatgcaactccgagcggcggcaattgtcacgttttgcatgagattaacacagttcgagttaaccatgcggaggcgagccaatccgagccgaaacagccaactccatgctcagatagttgacacaaatgaccgagtgcagatgcgttccgaaaaacgcaacgattcgttctaaaaatacatacacgtggctaatttgctggcgatttgctctcggactctattgcagaaaatgtaaggagaagctcgcaacggaattccccccgcaacgaagaaacgcaaccaaagaagctgccagtcctcacaaacggatcctgaaagttccttccacacacaagccagcaaactcaaaacaaaagccaaatgactgccaacagtctgctaggaaggtccatactcaatgaaggtgagtaaaggtgcaccaactaataaagatataataatatataaagatatatgctcgaatgtatttcaaatgtgtatctttacttatagcgtttagccatcttaaaaggtgtctcaagtatgttctaatatggcagcttcgtagaaaaacagtgtagcatatctttagacaccatattaacttaataacatatgtgaatgaacatccatattaattcagtctacattcttcgcaggtcgctcaaacaagcgatcatttgtgtccctgattgtgggcctgatcgtgggcttctgcctggcggagctgttcgtctactccacgccggagcgaagtgaattcatgccatacgatggccatcggcacggcgacgtgaacgatgcacatcacagccacgacatgatggagatgtccggaccggaacaggacgtgggtggacacgagcacgtgcacgagaactcgaccattgcggagcgactgtacagcgaggtgcgtgtgctctgctggatcatgaccaatccgagcaaccatcagaagaaggcgcgccacgtgaagcgcacctggggcaagcgttgcaacaagctgatctttatgagctccgccaaggacgacgagctggacgcagtggctctgcccgtaggcgagggtcgcaacaacctatggggcaagacgaaggaggcctacaaatacatctacgagcatcacatcaacgacgccgactggttcctgaaggctgacgatgacacatacacgatagtggagaacatgcgatacatgctgtatccgtacagtccggaaactccagtctacttcggctgcaagttcaagccgtacgtgaaacaaggctacatgtccggcggtgccggctacgttctcagccgggaggctgtgcgtcgctttgtggtcgaagccctgcccaatccgaagctgtgcaagtcggataactcgggtgctgaggacgtggagattggcaaatgtctgcagaatgtaaacgtgctcgctggggactcgcgagactcaaacggtcggggtcgcttctttccatttgtgcccgagcaccatctgattccatcgcacacggacaagaagttctggtactggcagtatatcttctacaagacggatgaggtaagaacagaattatttaagaaatgtcttataacatccgttaaaactaatattaactctttcagggacttgactgctgctcggacaacgccatatcgttccactacgtctcccccaatcaaatgtatgtgctggattatctgatctaccatctgagaccgtacgggatcataaacacacccgatgcgttgccgaataagctagccgtgggcgaactgatgccggagatcaaggagcaggcgacggaaagcacaagtgatggggtctccaagagatccgccgagacaaagacgcaataatagagacacacgggtagacacctaatgtacatatagcttttgtatatatcaatagataattgtgtaatccaacacgatgaatcgctacaagctatcctagcaatgccattaccacttccataaaacaactttatgtcctcggtccatttcttcacatcccgaaaaggtttcgtttgggctccactgcggagctcttcccttttgtacaaataccaaaactagttataatttagttatgttactgtagtatgtaattaagtctaggttgtacaattataaagtcatcactaatagggcgcatttactattgaattctggttttccgtcactaagttggccattacgtgtttatgagtcgcctaagtaaatcctatacatatgtagttgtatatttaatctcttttgtgattgagattattgcgtattatagatcttaatcttctacatgtattgaataaaatgaaaattaattacaatgtatttttaatgtctgaataaattttaacgcaagcaagtttcttattgtaaccagcaaaatttgaaatttgaagtacactgcaacttagagccatcgattcatttgcgccgtcaagataataatatcggtgcatgtctcagctatttggtgtgttatcgtctatcggcttatcgttagttatcgtttcacctcccatctctataacacatgttttgtttgtaaataaaataagtaataatgttggcgccaattaagcacttattagggaattatcgcatagtcttagccagcggctctccacggcgacaggaactggtcaagatgttggtaggttacatcagatctcgaaatccatccaagacataaccgattaccttttttaagggactaaatgccgaattgtgtccttcgacttttgaggagaatttaaacttggaggactttaaggagttctcggattatattgaagccactgctctgggaaaagccgaggaggtctactcgagattgaggtccacgggg

SEQ ID NO: 20243 - DNA, 1727 bp, DROSOPHILA
ccggcgcgttcgcttgcttcacttatgcgcttgttgaaaatcaaggaaagggcgcggaaaataagtttaattaaatatttcgagtggctcgactaacacagcaattaagcgaatgtgcaaaacgtgaaagcagttgtgaataaaacgcactcatcgcgaaattaaaagctttttgggagcgtcctgcgatggagaaacgcgtgaggaaaaatcaattcgtaagtaaatgggcgacgcgaaaaacggtgatttaaaaatcaaatgaaatgaaacgcgtgcggaatttacctgaacggaaaactaatcggtcagcaaaaattgcgttttgtgccaaaacagaaagcgcaataaatataatatacaattgcgcatatggtgtatgtacatagagtgcaagaagaacgtgacaaggaagagcaaacgaagaaaatgtaaggagaagctcgcaacggaattccccccgcaacgaagaaacgcaaccaaagaagctgccagtcctcacaaacggatcctgaaagttccttccacacacaagccagcaaactcaaaacaaaagccaaatgactgccaacagtctgctaggaaggtccatactcaatgaaggtcgctcaaacaagcgatcatttgtgtccctgattgtgggcctgatcgtgggcttctgcctggcggagctgttcgtctactccacgccggagcgaagtgaattcatgccatacgatggccatcggcacggcgacgtgaacgatgcacatcacagccacgacatgatggagatgtccggaccggaacaggacgtgggtggacacgagcacgtgcacgagaactcgaccattgcggagcgactgtacagcgaggtgcgtgtgctctgctggatcatgaccaatccgagcaaccatcagaagaaggcgcgccacgtgaagcgcacctggggcaagcgttgcaacaagctgatctttatgagctccgccaaggacgacgagctggacgcagtggctctgcccgtaggcgagggtcgcaacaacctatggggcaagacgaaggaggcctacaaatacatctacgagcatcacatcaacgacgccgactggttcctgaaggctgacgatgacacatacacgatagtggagaacatgcgatacatgctgtatccgtacagtccggaaactccagtctacttcggctgcaagttcaagccgtacgtgaaacaaggctacatgtccggcggtgccggctacgttctcagccgggaggctgtgcgtcgctttgtggtcgaagccctgcccaatccgaagctgtgcaagtcggataactcgggtgctgaggacgtggagattggcaaatgtctgcagaatgtaaacgtgctcgctggggactcgcgagactcaaacggtcggggtcgcttctttccatttgtgcccgagcaccatctgattccatcgcacacggacaagaagttctggtactggcagtatatcttctacaagacggatgagggacttgactgctgctcggacaacgccatatcgttccactacgtctcccccaatcaaatgtatgtgctggattatctgatctaccatctgagaccgtacgggatcataaacacacccgatgcgttgccgaataagctagccgtgggcgaactgatgccggagatcaaggagcaggcgacggaaagcacaagtgatggggtctccaagagatccgccgagacaaagacgcaataa

SEQ ID NO: 20244 - protein, 388 aa, DROSOPHILA
MTANSLLGRSILNEGRSNKRSFVSLIVGLIVGFCLAELFVYSTPERSEFMPYDGHRHGDVNDAHHSHDMMEMSGPEQDVGGHEHVHENSTIAERLYSEVRVLCWIMTNPSNHQKKARHVKRTWGKRCNKLIFMSSAKDDELDAVALPVGEGRNNLWGKTKEAYKYIYEHHINDADWFLKADDDTYTIVENMRYMLYPYSPETPVYFGCKFKPYVKQGYMSGGAGYVLSREAVRRFVVEALPNPKLCKSDNSGAEDVEIGKCLQNVNVLAGDSRDSNGRGRFFPFVPEHHLIPSHTDKKFWYWQYIFYKTDEGLDCCSDNAISFHYVSPNQMYVLDYLIYHLRPYGIINTPDALPNKLAVGELMPEIKEQATESTSDGVSKRSAETKTQ

SEQ ID NO: 20245 - DNA, 4112 bp, DROSOPHILA
taataaaccgaaaatgtaaaaaagccgctaacaatttcccctttgtcgctattggccgcaatatatcgtcaaggtcgtcgccgtgttaacatccaaaattgttcgggaaatactattatggagctagtggaagtggtgggtcttggattttggtttagtgcaatacaaacacaactgttgcaaccgaatgcattcgattgggcagttaggttaggcaaatcagttcgaaattggtaaatcatttagattttcaacaaccagaacacgcaagaatgttttgcaaacgataatagcgcctctttggttggttaaacctacgaaatgtgcgggtgattatgttagataattggtagagttgcagaaaaccaaggtttcgtaactttagacgtgagagcagcgaaattacttaaggcccgacttgcataaagttgccaaatttatcactaacattctctattaaaagtaaattctgcttaaaatatgcaaaatatatatactaaaaaataaatccttatctttcagttggcctacgacgagcacaaggatagcacaacaaggataaggaaatactagttaaggaatcaaataacgcacacacatttgatagaaatttagtactttaaagacaaggaagcaaaggattctctgcaatggtgttgtgaacaagtcaaaaagacggaattcttgttcaaagaagcacacacttaatggttaacaagctataaagaacgtatatagaaaatcgggaaagcaaaaaaacatagtgacacaaaagcactggagcaaagcaacattgaaactgagcagattactaaaaatttgggccatatcagagccccgccatgcacaaaagaaagaaaccctagactttagagagtgtaaagaagcagatagcaactgctatcaacactaaaccaagaaaagtgtggtaatatagctaaaactggcttaaacttgggataatcccacagagaactcaaatagacatccatctggcaacatggtgctcaatctgctgttcataaccactgtgatcaagtccacatttggcgtggtgaccacgggactctggctaattccactgatgctggccgccatcacatactatcgctatgatgccgtagatcccgagtcgaggccgctagatcaactgaatttgtatccagagtacgattttatagtggtgggcagtggttcggccggagctgtggtggccaatcgtttgagcgaggtgaggaaatggaaagtactgctgatcgaagccggtccagatgaaaacgagatctctgatgtaccatcgctggcggcctatttgcaattgagcaaactggattgggcctacaagacggaaccctcgacgaaggcgtgtttgggaatgcagaacaatcgttgcaattggccaagaggacgagtcttgggcggcagttcggtgctcaactatatgctctatgtgcgtggcaatcgccatgattacgatcactgggcatcgttgggcaatccaggctgggattacgacaatgtgttgcgttattttaagaaatcggaggataatcgtaatccctatttggccaacaacaagtatcatggtcgcggaggactgctaacggttcaggaatcaccgtggcattcacctttggttgccgcctttgtggaagccggtactcagttgggctatgataatcgtgacattaatggcgccaaacaggcgggctttatgattgcccaaggaacgatacgtcgtggttcgagatgttccaccgccaaggcatttctgcgacccatacgcatgcgaaagaatttccatctgtcgatgaactcacatgtgaccagggtcatcattgaaccgggaacgatgagggcacaggccgtggaatttgtgaaacatggcaaagtgtataggatagcggccaggagggaggttatcatctcagctggtgccatcaataccccgcagctaatgatgctctctggtttgggaccacgaaaacatctggaaaagcatggcattcgagtgttgcaagatctgcccgttggcgagaatatgcaggatcatgtgggaatgggtggactcacttttctggtcgataagcccgtggccattgtccaggatcgtttcaatcccacagccgtcacctttcagtatgtgttgcgtgaacgaggaccgatgaccacattgggtggagtcgagggtctggcctttgtgcacacaccctactcaaatcgcagtctcgattggccggatattcaatttcatatggcaccggcttccattaactcagataatggagccagagtaaagaaggtgttgggcctgaaggaatcggtgtaccaagaggtctatcatcccatagccaacaaggatagttggacgataatgccgctgctattgaggccaagatcgcggggatctgttaaattacgatcggcgaatccctttcactatcccctaatcaatgccaactactttgacgatcccttggatgccaaaactttggtggaaggagccaagatagctcttcgcgtagctgaagcccaggttttcaagcaattcggatcgagactgtggcgtaaaccgctgcccaattgcaaacagcataaattcctatccgatgcctatttggagtgccatgtgcgcaccatttcgatgaccatctaccatccatgtggcactgcgaagatgggacccgcctgggatcccgaggctgtggtggatccacgcttgagggtctatggagttcgcggtctcagggtgattgatgccagcattatgccaacgattagtagtgggaataccaatgcaccggttataatgatagctgaaaagggcgcagatctcatcaaggaagattggctaacaaatcccgagtacaaagtaaagcggcaggcaaatagacttagagatccagatcctgctagtagtaacattcagggcatcatcacattgcccaacaatatcactcaaggcgacagcagcaacatcagtgacaggagcaacatggagagcaacttcagcaacagcagtcacataaacaacatcaattttaacagcaacagcaacagcagcaacattgaaagcagcagcaacttcacactcaactatgcgaatagttagtgacttcaaaatgaagaatgtagagctccagttagctcgagattttgtgctcagggctccatagctttaaacactcacataaagtgtttacaacgagaaaacaacacaaattgtttgccattgctaaagtaacatgctgagacataaactctttgagttcgttaataactcaagtgaaaccagaatgtgatccaaaaaattcaccgaacattctttacctaaagtctacactgaaaccagaagctatcttatttatgaaaataaccataatcaaacatattatcaccgacttgaaagcgtcttgaacaaaagttatttactactgtagttcattatcattcgatggccatcttgtaatgctcataaaaaactttactgcgaaaccagaagttcttagcagctaaaactggttgcttcttccttgtgaagccatttaaaaatgcgactcataaaaggtttatatctgagaatcatactattatgtcgtctgtctttgatctagacaattggtactccaaaaaagttatttcctaaaccaacttctacaaatgataaggctagatagtaaatatctgcttgtatcatgaatataaactgaaaagtctatgtgcaaccaggcggagtttcgtaacctcgtacttcccattgaatctcatcgcatgacgtcctcaaaaactgtacacaacgatccattgctagaaggaatccagaaatcgagtcatagattaaatgcttacttaagtaattgttgtctttttttttttttgcttatgtattattttatgctaagttagcgatagataatttaatgttctttgactatttatagaaaatttccataaacatcattatttaaatgacattatatttaataaattaaatttgcataaacatgaaggcgaaatggttgttatttgttaacagccgaaaagcaggcaacacaggtgagctgagcaattttcttttgtggcaaataaatagcagaaaaagtgaatcatca

SEQ ID NO: 20246 - DNA, 2112 bp, DROSOPHILA
atggtgctcaatctgctgttcataaccactgtgatcaagtccacatttggcgtggtgaccacgggactctggctaattccactgatgctggccgccatcacatactatcgctatgatgccgtagatcccgagtcgaggccgctagatcaactgaatttgtatccagagtacgattttatagtggtgggcagtggttcggccggagctgtggtggccaatcgtttgagcgaggtgaggaaatggaaagtactgctgatcgaagccggtccagatgaaaacgagatctctgatgtaccatcgctggcggcctatttgcaattgagcaaactggattgggcctacaagacggaaccctcgacgaaggcgtgtttgggaatgcagaacaatcgttgcaattggccaagaggacgagtcttgggcggcagttcggtgctcaactatatgctctatgtgcgtggcaatcgccatgattacgatcactgggcatcgttgggcaatccaggctgggattacgacaatgtgttgcgttattttaagaaatcggaggataatcgtaatccctatttggccaacaacaagtatcatggtcgcggaggactgctaacggttcaggaatcaccgtggcattcacctttggttgccgcctttgtggaagccggtactcagttgggctatgataatcgtgacattaatggcgccaaacaggcgggctttatgattgcccaaggaacgatacgtcgtggttcgagatgttccaccgccaaggcatttctgcgacccatacgcatgcgaaagaatttccatctgtcgatgaactcacatgtgaccagggtcatcattgaaccgggaacgatgagggcacaggccgtggaatttgtgaaacatggcaaagtgtataggatagcggccaggagggaggttatcatctcagctggtgccatcaataccccgcagctaatgatgctctctggtttgggaccacgaaaacatctggaaaagcatggcattcgagtgttgcaagatctgcccgttggcgagaatatgcaggatcatgtgggaatgggtggactcacttttctggtcgataagcccgtggccattgtccaggatcgtttcaatcccacagccgtcacctttcagtatgtgttgcgtgaacgaggaccgatgaccacattgggtggagtcgagggtctggcctttgtgcacacaccctactcaaatcgcagtctcgattggccggatattcaatttcatatggcaccggcttccattaactcagataatggagccagagtaaagaaggtgttgggcctgaaggaatcggtgtaccaagaggtctatcatcccatagccaacaaggatagttggacgataatgccgctgctattgaggccaagatcgcggggatctgttaaattacgatcggcgaatccctttcactatcccctaatcaatgccaactactttgacgatcccttggatgccaaaactttggtggaaggagccaagatagctcttcgcgtagctgaagcccaggttttcaagcaattcggatcgagactgtggcgtaaaccgctgcccaattgcaaacagcataaattcctatccgatgcctatttggagtgccatgtgcgcaccatttcgatgaccatctaccatccatgtggcactgcgaagatgggacccgcctgggatcccgaggctgtggtggatccacgcttgagggtctatggagttcgcggtctcagggtgattgatgccagcattatgccaacgattagtagtgggaataccaatgcaccggttataatgatagctgaaaagggcgcagatctcatcaaggaagattggctaacaaatcccgagtacaaagtaaagcggcaggcaaatagacttagagatccagatcctgctagtagtaacattcagggcatcatcacattgcccaacaatatcactcaaggcgacagcagcaacatcagtgacaggagcaacatggagagcaacttcagcaacagcagtcacataaacaacatcaattttaacagcaacagcaacagcagcaacattgaaagcagcagcaacttcacactcaactatgcgaatagttag

SEQ ID NO: 20247 - protein, 703 aa, DROSOPHILA
MVLNLLFITTVIKSTFGVVTTGLWLIPLMLAAITYYRYDAVDPESRPLDQLNLYPEYDFIVVGSGSAGAVVANRLSEVRKWKVLLIEAGPDENEISDVPSLAAYLQLSKLDWAYKTEPSTKACLGMQNNRCNWPRGRVLGGSSVLNYMLYVRGNRHDYDHWASLGNPGWDYDNVLRYFKKSEDNRNPYLANNKYHGRGGLLTVQESPWHSPLVAAFVEAGTQLGYDNRDINGAKQAGFMIAQGTIRRGSRCSTAKAFLRPIRMRKNFHLSMNSHVTRVIIEPGTMRAQAVEFVKHGKVYRIAARREVIISAGAINTPQLMMLSGLGPRKHLEKHGIRVLQDLPVGENMQDHVGMGGLTFLVDKPVAIVQDRFNPTAVTFQYVLRERGPMTTLGGVEGLAFVHTPYSNRSLDWPDIQFHMAPASINSDNGARVKKVLGLKESVYQEVYHPIANKDSWTIMPLLLRPRSRGSVKLRSANPFHYPLINANYFDDPLDAKTLVEGAKIALRVAEAQVFKQFGSRLWRKPLPNCKQHKFLSDAYLECHVRTISMTIYHPCGTAKMGPAWDPEAVVDPRLRVYGVRGLRVIDASIMPTISSGNTNAPVIMIAEKGADLIKEDWLTNPEYKVKRQANRLRDPDPASSNIQGIITLPNNITQGDSSNISDRSNMESNFSNSSHINNINFNSNSNSSNIESSSNFTLNYANS

SEQ ID NO: 20248 - DNA, 3866 bp, DROSOPHILA
cgagccccatgcataaaaacaaacattacatgcctccgaatccattcaccatttactagtaagcaagtacaattagaagcgactactgatcgtttgcccagtgattatttggaaacaaatcaataaattaacaaataaatagtttagatgagttaattaccatttgccaattaccataaaccttttagtaatactcttgccattcttggtgtcttgagtttataatgttgggtttatttcgtaaatgaaatcctattggcatatttgcttttcaaatttacgttttccacttttgtcatggtatatttatggctatatttcatggttctatttatatcatttaaacactgccattacacttggcaaccgcaatatttcgtaaaattttccatttacatatttcttataatattattgctataccggatataacttcatacccatatggttttgcaagcaattaaagttcaagatattctgttattccccctatgaatcctataataatcagtagctctgatgtaataattataccagtcactattttatcgtcacctccaagttctaatttcgttgttattttcccttagccacaacgcatcgaaatgattattagatcagaccccgttattaagcgttttctatattcagcacacaatttagaatatacgataccccgcgaatcatttcatttgtgcattcgcactgcattttggctggaatgttaacgatcattggatcgatcgatcgatcaattgtacaattgttcttccacacatactctaagtttccactgttgttggaaaatatacaaaataagtctcgaactagacttatagttcggaccaaaagccgtaattgtcaacagtgcagggcccccatgagttttgtagttgcatttacccccagcctctaggttttagttctgctcttagaactcaacgttccagtcgatcgcggcagtcgagtgagtctggctgcaaggtgatgaagctccatgatgacttcgccacgaaatcacatcggaacccttcttgtcgtctggctactggagttctcaatggtgattagccagactgacacgggcaatgcattgatggatatgctcgagatctatcgtcgcggtcaggcgcaattggatctggagaatctggacgagggtcaggtcataacgacgaaatatgatttcatagtggttggtgccggcacagctggttgtgccctagccgcgcgactctccgagaatccccggtggcgagtgctactcctggaggccggtggtcccgagaactatgccatggacataccaattgtggcgcatctcttgcagctgggcgaaatcaactggaagtacaaaacggagccatcgaatagctattgcctggccatgaacaacaatcgctgcaattggcccaggggcaaggtgatgggtggcagctcggtgctcaactatatgatgtacaccaggggcaatcgccgcgactacgatcgctgggcacgtttgggcaatccgggctggagttacgaggaggtactaccctatttcaagaagtacgagggcagcgtagtgccggatgccgatgagaatctggtgggacgcaatgggccggtgaaggtgagctactcggagacgaggactcgcatcgcagacgcctttgtgggagccacccaagatgcaggattgccgcgaggtgactacaatggagataaacagattcgtgtgtcctatctgcaggcgaatatctacaatgagacccgttggagctccaatcgagcgtatctgtatcccattaagggaaagcgtcgaaatcttcatgtgaagaagaatgccttggttaccaagatcttgattgatccgcagacgaaatcggcatttggtataatcgtcaaaatggatggcaaaatgcaaaagattttggccagaaaagaggtcattctatcggcgggtgccatcaatacaccccagctactgatgctctccggcgtgggacccgctaaacatttgcgggagatgggcataaagccactggccgatctggccgttggctacaacctccaggatcacatagctccggctatcagcttcttgtgcaatgtgagttcgctgcaaacgagcgagatgttccgctcggaggcaatgtcagatttcctgaagggacgcggagtgctccgcataccgggtggtgtggaggccatatcattctacgccctggacgatgcacgtaatcccgatgcttgggccgatatggaactctttgtggtgggcggtggtttgcaaacgaatttggccctacgtctggcattgggcatccaatcgaatatctatgagaccatgtttggcgaactggaacgccagagtgccaatggctttttgatattcccgatgattttgcgcgccaagagtcgcggtcgcatcaagctgaagagccgaaatcccgaggagcatccacggatctatgccaactacttcgcaaatccctatgacatgaacatcacagttcgcggcatcgagcaggcagtaagtttactggatatgcccgcatttaaggcaatcggtgcacacttattagaaaagagaatacccaattgtgcgaaatataaatggaagagcagcgcctattgggcatgttatgcacgacactttaccttcaccatttaccactattcaggaaccgccaagatgggtcctcgatcggatccctcggcggtggtggatgcccgactgcgggtccatggcatcgacaaactgcgcgttgtggatgcaagcattatgccctatttgatctcgggtcatcccaatggacccgtctacctaatagctgaaaaagcagccgatatgattaaggaggatcataacttcgtatagagcaagcacactatgttttcttaagccgatgggttatcttaagatatgtatataatattattccattgagtgatttctagtgaattaaagacgatacaatacagtacaaactctgatagtttgttctatcagttcttctatgttcaaagtttttaaatatcaataaaagaaaaattcaaattaagaaaagggtaatagataaatgagaactttgttgtcaatttgtcgccattaaaaagaaattacaataacattgatttatgattctttcgatgatatttcaatttgtttgcaaattatacaaaattacacagagaaacagcaaatcaattagaaattattgctggtttgtcatcaatcttaaatgaagcctaaaagtaatgaaagattcgattatttcctgcatttaaacctaaattttacaggtgtaataggtgtacaataacaactagtctataaaaagattattttactatattttcgttggcataaataataaatatttttgataagcatgctgcttaatataaaaagctgaagtaaccgatagacatttagaactataaaattctatattatgtacataattatataagatctggtttgacatttagccagagacatcggcgacaggttcatcgaagaaccccgcccgaattcttctgctaaaaagaagaatcacgcagaatcacgatgacactatgctaattacagtagtccaaaatcaatcgatgaggatcttttaaccagcggttttctagccatgggaggccctttaatgttttgacaccacggcttccgcatcttattcacagttgctaacgatctcgtcgatctggctggcttaagtcaatgtcaaaaactacagatacattttcagtttccaattcagattcagatcgtccgagctttcaattttaaaccgatcttcgtctttgtgtttgtctgcgcagatggttgtgaacgtgtccatagtcaagtcttccgaaagatttgaaga

SEQ ID NO: 20249 - DNA, 1866 bp, DROSOPHILA
atgacttcgccacgaaatcacatcggaacccttcttgtcgtctggctactggagttctcaatggtgattagccagactgacacgggcaatgcattgatggatatgctcgagatctatcgtcgcggtcaggcgcaattggatctggagaatctggacgagggtcaggtcataacgacgaaatatgatttcatagtggttggtgccggcacagctggttgtgccctagccgcgcgactctccgagaatccccggtggcgagtgctactcctggaggccggtggtcccgagaactatgccatggacataccaattgtggcgcatctcttgcagctgggcgaaatcaactggaagtacaaaacggagccatcgaatagctattgcctggccatgaacaacaatcgctgcaattggcccaggggcaaggtgatgggtggcagctcggtgctcaactatatgatgtacaccaggggcaatcgccgcgactacgatcgctgggcacgtttgggcaatccgggctggagttacgaggaggtactaccctatttcaagaagtacgagggcagcgtagtgccggatgccgatgagaatctggtgggacgcaatgggccggtgaaggtgagctactcggagacgaggactcgcatcgcagacgcctttgtgggagccacccaagatgcaggattgccgcgaggtgactacaatggagataaacagattcgtgtgtcctatctgcaggcgaatatctacaatgagacccgttggagctccaatcgagcgtatctgtatcccattaagggaaagcgtcgaaatcttcatgtgaagaagaatgccttggttaccaagatcttgattgatccgcagacgaaatcggcatttggtataatcgtcaaaatggatggcaaaatgcaaaagattttggccagaaaagaggtcattctatcggcgggtgccatcaatacaccccagctactgatgctctccggcgtgggacccgctaaacatttgcgggagatgggcataaagccactggccgatctggccgttggctacaacctccaggatcacatagctccggctatcagcttcttgtgcaatgtgagttcgctgcaaacgagcgagatgttccgctcggaggcaatgtcagatttcctgaagggacgcggagtgctccgcataccgggtggtgtggaggccatatcattctacgccctggacgatgcacgtaatcccgatgcttgggccgatatggaactctttgtggtgggcggtggtttgcaaacgaatttggccctacgtctggcattgggcatccaatcgaatatctatgagaccatgtttggcgaactggaacgccagagtgccaatggctttttgatattcccgatgattttgcgcgccaagagtcgcggtcgcatcaagctgaagagccgaaatcccgaggagcatccacggatctatgccaactacttcgcaaatccctatgacatgaacatcacagttcgcggcatcgagcaggcagtaagtttactggatatgcccgcatttaaggcaatcggtgcacacttattagaaaagagaatacccaattgtgcgaaatataaatggaagagcagcgcctattgggcatgttatgcacgacactttaccttcaccatttaccactattcaggaaccgccaagatgggtcctcgatcggatccctcggcggtggtggatgcccgactgcgggtccatggcatcgacaaactgcgcgttgtggatgcaagcattatgccctatttgatctcgggtcatcccaatggacccgtctacctaatagctgaaaaagcagccgatatgattaaggaggatcataacttcgtatag

SEQ ID NO: 20250 - protein, 621 aa, DROSOPHILA
MTSPRNHIGTLLVVWLLEFSMVISQTDTGNALMDMLEIYRRGQAQLDLENLDEGQVITTKYDFIVVGAGTAGCALAARLSENPRWRVLLLEAGGPENYAMDIPIVAHLLQLGEINWKYKTEPSNSYCLAMNNNRCNWPRGKVMGGSSVLNYMMYTRGNRRDYDRWARLGNPGWSYEEVLPYFKKYEGSVVPDADENLVGRNGPVKVSYSETRTRIADAFVGATQDAGLPRGDYNGDKQIRVSYLQANIYNETRWSSNRAYLYPIKGKRRNLHVKKNALVTKILIDPQTKSAFGIIVKMDGKMQKILARKEVILSAGAINTPQLLMLSGVGPAKHLREMGIKPLADLAVGYNLQDHIAPAISFLCNVSSLQTSEMFRSEAMSDFLKGRGVLRIPGGVEAISFYALDDARNPDAWADMELFVVGGGLQTNLALRLALGIQSNIYETMFGELERQSANGFLIFPMILRAKSRGRIKLKSRNPEEHPRIYANYFANPYDMNITVRGIEQAVSLLDMPAFKAIGAHLLEKRIPNCAKYKWKSSAYWACYARHFTFTIYHYSGTAKMGPRSDPSAVVDARLRVHGIDKLRVVDASIMPYLISGHPNGPVYLIAEKAADMIKEDHNFV

SEQ ID NO: 20251 - DNA, 3866 bp, DROSOPHILA
agagaaacagcaaatcaattagaaattattgctggtttgtcatcaatcttaaatgaagcctaaaagtaatgaaagattcgattatttcctgcatttaaacctaaattttacaggtgtaataggtgtacaataacaactagtctataaaaagattattttactatattttcgttggcataaataataaatatttttgataagcatgctgcttaatataaaaagctgaagtaaccgatagacatttagaactataaaattctatattatgtacataattatataagatctggtttgacatttagccagagacatcggcgacaggttcatcgaagaaccccgcccgaattcttctgctaaaaagaagaatcacgcagaatcacgatgacactatgctaattacagtagtccaaaatcaatcgatgaggatcttttaaccagcggttttctagccatgggaggccctttaatgttttgacaccacggcttccgcatcttattcacagttgctaacgatctcgtcgatctggctggcttaagtcaatgtcaaaaactacagatacattttcagtttccaattcagattcagatcgtccgagctttcaattttaaaccgatcttcgtctttgtgtttgtctgcgcagatggttgtgaacgtgtccatagtcaagtcttccgaaagatttgaagattcttggcgagccgaagaaaccgaaaaacccgaaaactaaaaaccgagtgccgagagattcgcaaagcgatcgtttcgttcgccgatcgccgccgaatttaatattaaattgaacttggccaccgcatttgtcagcatttctagttacgtattcgattgggcaacacgctcgcgatcgcgtcgatcacaagaactcagaacgcgttcgtctatcatatccagctatattcatatatatatattttttttttgactgtgcaatcggtgtgaatagtgctgaagaaatcgttacaagtaactaaaggcccaataatggcaagcaaatcgctgatatttgtaggcctgtgcctggcatatatggccacatggagtcaaatttctgcccagaataacaataacgtccttttcgagacgatcaactttctgagacgcggccaggcggacgttgagctggagaactatgacaacaatgtgatactggatagcgagtatgattttatagttgtcggcgccggaacggctggttgtgccctggccgcccgactctcagagaatccgcagtggcgagtgctgctcctggaggccggtggtcccgagcgactcgtcatggatgtgccaattgtggcgcattttctgcaactgggcgagatgaactggaaatacaggacacagccatctgatcacgcctgcctggcgatgaacaacaatcggtgcaattggcccaggggcaaggtgatgggtggtagctcggtgctcaactatatgatgtacaccaggggcaatcgccgcgattacgatcgctgggaggccctgggtaacccgggttggagcttcaaggatgtgctgccgtatttcaagaaatacgagggcagcagtgtgcccgatgctgaggaggattatgttggtcgcaatggaccggtgaaggtcagctatgtgaactggcgttccaagatcgccgaagcctttgtcgatgctgcccagcaggatggtctgaagtacagggactacaatggacgcattcagaatggtgtggccttcctgcacaccaccaccaggaattccacaagatggagctccaatcgtgcctatctgtatccgctgaagggcaagcgcagcaatctgcatgtaagaaagaatgcgctggtgaccaaggtactcatcgatccgcaaaccaaaacggcctatggcattatggttcaaaccgagggacgcatgcaaaagatcctggccagaaaggaggtgattgtgtccgccggagccatcaatacgccccaactactgatgctgtctggcgtgggaccagccaaacatcttcgcgaagttggcattaagccattggctgatctggcagtgggttacaatcttcaggatcacacggcaccggcggttacgttcaccaccaatgccacctccctgaaattcgaggacttttccgatcccacactcattaatcgattcaacagaatggaaggaccatatggatctcccggtggctgtgaggccattgccttctgggatctggatcacgaacgcgatgaggacggctggccggatattgagctcttcctggtgggcggttccatgtcctccaatccggccatctcacgtgcctttggtttgaagaagtccatatacgatacactctttgccgagatcgaagacaaatcactgaatgccttcatgatcttccccatgattttgcgcccaaagagtcgcggtcgcatcatgctgaagagcagtgatcccttcaagtatcccctgatccatgccaattactttgcccatccctacgatgttgatatctcggtgcggggtctacttaaggccattagtctgatggaacaacgtggcatggagaagataaatgccaggttgtgggaaaagaagatacccacatgcaaacagcatccctacaagagttgggcctattgggcgtgctatgtgaggcactttaccttcaccatttaccattattccggcaccgccaagatgggtcccaaatccgatcgagctgcagttgtggaccatcgtctccgtgtccacggaatcaagaatctgcgagtcgcagatgccagcattatgccggaaatcatgtccggacatccgaatggacccgtcttcatgattgccgagaaggcagccgatatgattaaacaggatcatggtttcatccagtgaagccatcttagcccaaagttaattacacaatcaggtttaagccccatttacactggcctaccatcgaatcatctcgttaaatcacaccttaaatgcaatggccagtgtaaaatggggctttagttttagttaaggccttcgaaaactttttgttattatgtgtagtaattctttcttgcctgaactgattctagtttaagatttagttatataagcataaataaatgattataagttttgtatgtactatataaacaaaattcgtttactatgcaagcagaattattgaactatatgaactctatagaatgcatatttgactttgggaattttaaaatgattaactatccaactccttgaataccagaaaaaataacaatagttataggcccaaaaaattcgtactgcctaaaccatttgactttgacattgaattttattggacttctgtctttggcattgtctcatttatatcaatagggattttcaactctggcacttttcatgctaatcaatttgtggcttcataatcaaaatctgtgaaatacatgaagttgtccgcttgtttgacgattttttgttttgatttattacacgcctttgtttttgagtttctctcgatctttttattgttgcggaaatgattttttttttattcatcactctcgttttttttgcgttcgttttttatcttgtctaacgaacttagccggtgtgaataatttgttaggtgttttgttcaagcaattttcggtgctgagtctttggattgatcttggtataattcgcatcgatttgaccttagaattatttatgtatgtagagtgggtataaatcagtcgaaaattgagaataattgctttggtataagtatatctttcaatatccccaagggtaggctatattaaaattctattcaaatcgaaatgaaacgaaaagctttgagctcagcttaaagctcttggattttatatttttcgaagaatttcaaagccggctt

SEQ ID NO: 20252 - DNA, 1866 bp, DROSOPHILA
atggcaagcaaatcgctgatatttgtaggcctgtgcctggcatatatggccacatggagtcaaatttctgcccagaataacaataacgtccttttcgagacgatcaactttctgagacgcggccaggcggacgttgagctggagaactatgacaacaatgtgatactggatagcgagtatgattttatagttgtcggcgccggaacggctggttgtgccctggccgcccgactctcagagaatccgcagtggcgagtgctgctcctggaggccggtggtcccgagcgactcgtcatggatgtgccaattgtggcgcattttctgcaactgggcgagatgaactggaaatacaggacacagccatctgatcacgcctgcctggcgatgaacaacaatcggtgcaattggcccaggggcaaggtgatgggtggtagctcggtgctcaactatatgatgtacaccaggggcaatcgccgcgattacgatcgctgggaggccctgggtaacccgggttggagcttcaaggatgtgctgccgtatttcaagaaatacgagggcagcagtgtgcccgatgctgaggaggattatgttggtcgcaatggaccggtgaaggtcagctatgtgaactggcgttccaagatcgccgaagcctttgtcgatgctgcccagcaggatggtctgaagtacagggactacaatggacgcattcagaatggtgtggccttcctgcacaccaccaccaggaattccacaagatggagctccaatcgtgcctatctgtatccgctgaagggcaagcgcagcaatctgcatgtaagaaagaatgcgctggtgaccaaggtactcatcgatccgcaaaccaaaacggcctatggcattatggttcaaaccgagggacgcatgcaaaagatcctggccagaaaggaggtgattgtgtccgccggagccatcaatacgccccaactactgatgctgtctggcgtgggaccagccaaacatcttcgcgaagttggcattaagccattggctgatctggcagtgggttacaatcttcaggatcacacggcaccggcggttacgttcaccaccaatgccacctccctgaaattcgaggacttttccgatcccacactcattaatcgattcaacagaatggaaggaccatatggatctcccggtggctgtgaggccattgccttctgggatctggatcacgaacgcgatgaggacggctggccggatattgagctcttcctggtgggcggttccatgtcctccaatccggccatctcacgtgcctttggtttgaagaagtccatatacgatacactctttgccgagatcgaagacaaatcactgaatgccttcatgatcttccccatgattttgcgcccaaagagtcgcggtcgcatcatgctgaagagcagtgatcccttcaagtatcccctgatccatgccaattactttgcccatccctacgatgttgatatctcggtgcggggtctacttaaggccattagtctgatggaacaacgtggcatggagaagataaatgccaggttgtgggaaaagaagatacccacatgcaaacagcatccctacaagagttgggcctattgggcgtgctatgtgaggcactttaccttcaccatttaccattattccggcaccgccaagatgggtcccaaatccgatcgagctgcagttgtggaccatcgtctccgtgtccacggaatcaagaatctgcgagtcgcagatgccagcattatgccggaaatcatgtccggacatccgaatggacccgtcttcatgattgccgagaaggcagccgatatgattaaacaggatcatggtttcatccagtga

SEQ ID NO: 20253 - protein, 621 aa, DROSOPHILA
MASKSLIFVGLCLAYMATWSQISAQNNNNVLFETINFLRRGQADVELENYDNNVILDSEYDFIVVGAGTAGCALAARLSENPQWRVLLLEAGGPERLVMDVPIVAHFLQLGEMNWKYRTQPSDHACLAMNNNRCNWPRGKVMGGSSVLNYMMYTRGNRRDYDRWEALGNPGWSFKDVLPYFKKYEGSSVPDAEEDYVGRNGPVKVSYVNWRSKIAEAFVDAAQQDGLKYRDYNGRIQNGVAFLHTTTRNSTRWSSNRAYLYPLKGKRSNLHVRKNALVTKVLIDPQTKTAYGIMVQTEGRMQKILARKEVIVSAGAINTPQLLMLSGVGPAKHLREVGIKPLADLAVGYNLQDHTAPAVTFTTNATSLKFEDFSDPTLINRFNRMEGPYGSPGGCEAIAFWDLDHERDEDGWPDIELFLVGGSMSSNPAISRAFGLKKSIYDTLFAEIEDKSLNAFMIFPMILRPKSRGRIMLKSSDPFKYPLIHANYFAHPYDVDISVRGLLKAISLMEQRGMEKINARLWEKKIPTCKQHPYKSWAYWACYVRHFTFTIYHYSGTAKMGPKSDRAAVVDHRLRVHGIKNLRVADASIMPEIMSGHPNGPVFMIAEKAADMIKQDHGFIQ

SEQ ID NO: 20254 - DNA, 3794 bp, DROSOPHILA
agggcatccaatgacttttattgtgggattggatgaactgcatccatatgctggggttgataccaactgcactgagccaccccttttatacatttttttatttttggctagacctaaagtcgtttaatcgtttttggttttgttttgttttggttttttcttgattataatactctatggggtggcttgaaatatatattaaccctcgagtgcccgagccgctggtgcttcaatcttcaaagatttaactgacagtccggcataaaaaataaaaatataaacaaagccagcacaagatgcccatccaaatgccattgaaccgagctcagatgcagaagaaacacagagagaaaactaatgtatataatatatgtatttaaaatattgcaaaaatcattaattttaagaaaaactaattacaaattgctgaagaaattaaccatttaccatgggtgtctttatcaaatcaaaacttaaatgatctaaatttttgttttctgcattagaaaagagacagaggaacagcaaataaaagagaggcaagaccgtagagatgagcaagcagaatgcgcaaattagcaagtggcaataaaaattctgagacaatctcagcctgttttggccctacaaacctggccaccaagtcaaccaactcatctcaacagtggaggaaaaaaagaagacgtagtgatgcggagaaaggcggcgcgaaagagaggggggtatagagatcagtgagggagaaccaaaccggcaagataatccacagtggagcaagttccatttgaaataaaataataaaagtttcaattaatgttcactaactaactttccacgcccataaataaaaagcgcaataatagtaaaatataaaataaatcacatatctagatttttttgagacttttaaaactcgttccacagtgcgttggcagacgtagaggtccaatatcacggaaagctcggtagccacagagttcagttaccggccatcgcaaccatggagaagctgctgctgacccagcttctgtttctgctcctgatcccactgatccactcccaaaggagctcccaactggacgaactgcggcgactgggattgggaaatgtcgtcaatgtgccattcttcagcgatggtgagggtttattcaaatcatggaaatattcaagtacctatatgtgctccaatataataagcgtatttatgccagagagttccatgcttttagtactggaaaatttgtaatcgatttaacacatatattttaaaatctccttgcagttccccaaagaaactatgacttcataatagttggaggcggagctgctggctgtacattggccgctcgtctctcggagaatcccaattggagtgtgttccttatcgaagccggaggagtggagaacatagtgcatcaggtgccattactggcggcccatttgcagtcgactgcctccaattggggctacaactcgacgccacaacgccatgcctgtcgtggaatgcccgataacaagtgtgccctgccgaggggcaaagttctgggtggcactagctcgatcaattacatgatctacaatcggggcaatcgtagggattttgatgcctgggcggcagctggaaatcccggctggagttacgacgaggtgttgccctactttctgcgaagtgagcatgcacagcttcagggattggagcactcgccatatcacaatcacagtggtcccttgagtgtggaggatgtgcgacaccggacgcgacttgcacacgcctacattagagctgcccaggaggcgggtcatccgagaacggactacaatggtgaatcccagctgggcgtttcctatgtgcaggccaccacactgaagggcaggaggcacagtgcctttcgtgcctatattgagcccataagatctaggcgtcataatctgcacattctaacactggctagagtcacccgagttctgatagatgcagccaccaagtccgcctatggagtggagttgacccatcagggcagaagctttaaggtgaaagcccgcaaggaaatcattctatcggcgggtgccttcaactctccacagttgctgatgctgtcggggattgggccagaagataacctcaaggccattggaatacccctgatcaaggcactgccagtgggtaagagaatgttcgatcacatgtgccactttggacccacttttgtgaccaacacaacgggccagactctatttgccgctcaattgggcgcaccggtggccaaggagtttctactgggccgggcagacacctttctgtccagtatcggtggcgtagagacgctcaccttcatcaaggtgccgtcgggcaagagtccggccacccaacccgatgtggaactcatccaagtggccggcagcctggctagcgatgatggcactgccctggccaaaggagccaactttaagcccgagatctacgagaaaatgtacaagaatctgacgttgaggcagcaggatcactttagcttcctcatcatgcacttcaagcccgcctccgtgggtcgcctctggctgcacaatcgcaatccactcgagtggccacgcatcgatcccaagtacttttcggctccgtcggatgtggagaacttgctggagggcattaaggaggcactcagaatctccaagatgccggccatgcaggcgattggaaccagattgttggacaagccggtgccaggttgtgagaactacgaattcgcctcggatgattattggcggtgctccatacgcacgctatcctacacactgcaccaccaggtggccacctgtcgcatgggcgccgaaagtgatcccaccaccgtggtcaatcatcagctaaaggtgcatggagtgaggaaacttcgggtggtggacaccagtatcataccgtttccacccaccgctcacacaaatgcagcggcatttatgattggggaaaaggcggctgatatgatacgatccgaatggagttgattaactccagatgaagatcaccaaatcagcgatttatgtaaaggggttaataaaatgcgagaggaaagtttgaaagaaagcaaacgggtaaaatcgtcacacgttaaaagcattcgacaattctttaataatttaaaagattgtgttccatacataattttaaatcagtaagaaaaaaaaaatcacattttcattggattttaaagggtatcatatatcattattattttcaacattttgaaaatctttaattcaaattcataaaattaataacatttttttttttataataaatgccatcgaaaatctttataattgacttttaactcaattgccacccgttttcgttgagtgtagcgccaaacggggtcttcagaacggttcgggtcaatccaatttggaccacgtcatgacctagcttaataagttcccaccgatccgttccggtctcgaactgaaccgaatccgaatcgggccaaacgaggcatcccaaaaacgggtttacgcactccaagttcaatggctcgtcagtctggccgacaaaaaaataccaatagagcgccgggattgggtatgcctcatcgatgatgtatgtacatatgtatgtatatacgatattgttgttattttacatattaacttgaagtgcatttaggggcccaacgctgggagaacacgcgccaaagttaaatgaacccgcaaatggtagacggcacttaaaaagtgagaatcttgtcattctccattcgcatttggtcaaaccaggaaatgtggctatcattttctggataccctat

SEQ ID NO: 20255 - DNA, 1851 bp, DROSOPHILA
atggagaagctgctgctgacccagcttctgtttctgctcctgatcccactgatccactcccaaaggagctcccaactggacgaactgcggcgactgggattgggaaatgtcgtcaatgtgccattcttcagcgatgttccccaaagaaactatgacttcataatagttggaggcggagctgctggctgtacattggccgctcgtctctcggagaatcccaattggagtgtgttccttatcgaagccggaggagtggagaacatagtgcatcaggtgccattactggcggcccatttgcagtcgactgcctccaattggggctacaactcgacgccacaacgccatgcctgtcgtggaatgcccgataacaagtgtgccctgccgaggggcaaagttctgggtggcactagctcgatcaattacatgatctacaatcggggcaatcgtagggattttgatgcctgggcggcagctggaaatcccggctggagttacgacgaggtgttgccctactttctgcgaagtgagcatgcacagcttcagggattggagcactcgccatatcacaatcacagtggtcccttgagtgtggaggatgtgcgacaccggacgcgacttgcacacgcctacattagagctgcccaggaggcgggtcatccgagaacggactacaatggtgaatcccagctgggcgtttcctatgtgcaggccaccacactgaagggcaggaggcacagtgcctttcgtgcctatattgagcccataagatctaggcgtcataatctgcacattctaacactggctagagtcacccgagttctgatagatgcagccaccaagtccgcctatggagtggagttgacccatcagggcagaagctttaaggtgaaagcccgcaaggaaatcattctatcggcgggtgccttcaactctccacagttgctgatgctgtcggggattgggccagaagataacctcaaggccattggaatacccctgatcaaggcactgccagtgggtaagagaatgttcgatcacatgtgccactttggacccacttttgtgaccaacacaacgggccagactctatttgccgctcaattgggcgcaccggtggccaaggagtttctactgggccgggcagacacctttctgtccagtatcggtggcgtagagacgctcaccttcatcaaggtgccgtcgggcaagagtccggccacccaacccgatgtggaactcatccaagtggccggcagcctggctagcgatgatggcactgccctggccaaaggagccaactttaagcccgagatctacgagaaaatgtacaagaatctgacgttgaggcagcaggatcactttagcttcctcatcatgcacttcaagcccgcctccgtgggtcgcctctggctgcacaatcgcaatccactcgagtggccacgcatcgatcccaagtacttttcggctccgtcggatgtggagaacttgctggagggcattaaggaggcactcagaatctccaagatgccggccatgcaggcgattggaaccagattgttggacaagccggtgccaggttgtgagaactacgaattcgcctcggatgattattggcggtgctccatacgcacgctatcctacacactgcaccaccaggtggccacctgtcgcatgggcgccgaaagtgatcccaccaccgtggtcaatcatcagctaaaggtgcatggagtgaggaaacttcgggtggtggacaccagtatcataccgtttccacccaccgctcacacaaatgcagcggcatttatgattggggaaaaggcggctgatatgatacgatccgaatggagttga

SEQ ID NO: 20256 - protein, 616 aa, DROSOPHILA
MEKLLLTQLLFLLLIPLIHSQRSSQLDELRRLGLGNVVNVPFFSDVPQRNYDFIIVGGGAAGCTLAARLSENPNWSVFLIEAGGVENIVHQVPLLAAHLQSTASNWGYNSTPQRHACRGMPDNKCALPRGKVLGGTSSINYMIYNRGNRRDFDAWAAAGNPGWSYDEVLPYFLRSEHAQLQGLEHSPYHNHSGPLSVEDVRHRTRLAHAYIRAAQEAGHPRTDYNGESQLGVSYVQATTLKGRRHSAFRAYIEPIRSRRHNLHILTLARVTRVLIDAATKSAYGVELTHQGRSFKVKARKEIILSAGAFNSPQLLMLSGIGPEDNLKAIGIPLIKALPVGKRMFDHMCHFGPTFVTNTTGQTLFAAQLGAPVAKEFLLGRADTFLSSIGGVETLTFIKVPSGKSPATQPDVELIQVAGSLASDDGTALAKGANFKPEIYEKMYKNLTLRQQDHFSFLIMHFKPASVGRLWLHNRNPLEWPRIDPKYFSAPSDVENLLEGIKEALRISKMPAMQAIGTRLLDKPVPGCENYEFASDDYWRCSIRTLSYTLHHQVATCRMGAESDPTTVVNHQLKVHGVRKLRVVDTSIIPFPPTAHTNAAAFMIGEKAADMIRSEWS

SEQ ID NO: 20257 - DNA, 3721 bp, DROSOPHILA
gaggctgcgttatgcggagcagcattatcagcagtcgagaacatatgagtcgggttatcatcacgggtacgacataatctacgggtatggacccaccggttccacattaatggttaatatcagaagaagaatcgattactacgtcatcgctcaagtcgagtggaattaatgaatgaatctcgccatgacctcatacatacacatgattcacgagccggtcggtcggtcatttgctctccgagcacttttatttcgcctgcatccgatcgcattagatcgaaatagccagcaaatgcgtgatctcatgaggtgctctttacacgactcgaggggagaacacggatttgggtactccaagtgattcaaggcagttaggtagaaatatgcaaatctggtgaccttaggctctatttcagtccaaatcggcaagactcgggtatctgccatatatccgttctgtctgctgattagaatgttactgtttattgaattgtttggaaattcgaccgcaatgacttgacggatttggtgggcttccccagccgaagaacaagaatggtttctacgaatgagaggtagaagtacaactgtgctttgcagaacttcatatcatagttgaaaaaaaaaaacaagagggcattttttaataagctcttttcatgtcgattttgcattattcacccatttcaaatatatttcgttttaatttgtgagcgaagttaaatgagtattaaatacatattgtattattgcgaacaagctaataataatctgtcttagaaagtgaaacaaaataatatatctttttgcgagtcttaaacactaaacatatttctataatttgatagattgcagacaatttcgagacttattggtttttgttttaaaatttgaattcaaaataacatccactatgttcccaagtccaccgttccgctgtggaacatgtggatgtcgttgcgatttatatcagaaacggtcacacgtagaaaagaagaagaagaagcaagtacgtggtgctagaagtcagaccgcaacgactgcaatattgcagataaacaataattttggccacacgtcttccagcgtttggactcaacgtaacatgtacctggcgtgtcaagtattcaaaattcgcgtgaaacacaaaggaacctaaagcattggccatgggcacggaagcagaacaaccgagtccacctgctcagcagcaagatcaagagaatccgcctctctgtaaggcacaaaatccgaagcctgcccgcctctatcgctttgtactgatcttcgtcgctggcagcctggcggcctggacgtttcatgccctaagctcaacgaatctggtctggaaactgcggcagctccatcatctgccgaccgcccactacttgcagacgcgtgacgagttcgcactgtactccgtggaggagctaaatgccttcaaagaattctacgacaagagcgtcagcgacagtgtcggcgccagctacacggaggcggagcagacgaacatcaaggaggcgctgggggcactgcgaatggcccaggacttgtacctggcggggaaggatgacaaggcggcgcgtctattcgaacatgctctcgctctagcgccccgacacccggaagtcctactgcgctacggcgagttccttgagcacaaccagcgcaacattgtgctggcggatcagtactactttcaggctctgaccatcagcccgagcaactccgaggcactagccaaccgtcagcgcacggcagacgtggtgcagagtctggacgaacgccgcctggaatcgctggactccaaacgagacgccctctccgccattcacgagtccaacggagccctgcgacgggcaaagaaagaagcctacttccagcacatttaccactcagtaggcattgagggcaacaccatgacgctggcacagacgaggtctatcctagagacccgcatggccgtagacggcaaatccattgacgagcacaacgagatcttgggcatggatctggctatgaagtacataaacgctagtctggtgcaaaagtaagttgaaattggatatagctaggcagtatgaaacaatctatctgaattgttcacagaatcgatatcactattaaggacatcctcgagctgcatcgcagagttctggggcatgtggacccaattgaagggggcgagttccgacgtaaccaggtgtatgttggaggtcacataccgccaggtcccggcgatctcgcgctgctaatgcagcgtttcgaacggtggctaaactcggagcacagtagcacactgcatcctgtcaagtgagtattaaacagctggcccagaaggaataatccttaagcttactacctactttcagctatgcagcccttgcacactacaagttggtccatattcacccattcgtcgatggaaatggacgcacctcacgtctgctgatgaacacgctgttgatgcgagcaggctacccaccagtgataattccaaagcaacagcgtagcaagtactatcatttcctcaagttagccaacgagggcgatattcgcccctttgtgcggttcatcgctgactgcacggagaagacgctagacctttatctgtgggccacaagcgatctgccgcaacagatccctatgctcatccagacggaaagcgaggccggtgagcgtctggcgcaaatgcagtctcccaacgtggcacaaaggtcatcaatattagaattctacgaatccggatctggagatctaccgtgacccatctagatgcattgatattagacaattcgttaatttattatttatatgtttgtgctatattctgtaaattattgtaaacttcgaattacctacatcagtagatggctttagtgaagaaaaataacgatgtaattctgtgatcatatttaagctaaaagacaaccaaaaaatgtacataatgcacaatccaactaacgtgtcctaatatttagtacgatttttatagaattacatatcctataaaacacatacgtttatgagtatttatatataatattatattagactatgctaagggtttgattactcgaaatgggctctactttttatcgcagaaaatgtttatggcgacgctgctagacaacgcatttctatttcaggcgtacacgcttattttcgattagaaaattccggctatcaataatattatcagcttatcatatgccaatttaattagattattaaatggtttcacgtcatcgacgcgacgcctttaagatcacgtcgtggcacataactaagcatttaaacaacgaccaacattttcctacctttagctatttttaacaatccattataacaggccaaaatactttttaacaaaagtcaaagcgattaagagtcagtttaagtaccgagtatatttctttgcaaaaccgtaatgggtagagcgtgtaggtagagctgtgtgcgtaacaaatatcatactgtgatttatcagaataactttgaaaacttaacattaataatgcacttgtccgaatgtgaatgcttctttctgtgagtgttcacacatgaacacgaatatatttaaagacttacaattttgggctccgttcatatcttatgtaaatgaatcgagagcgataaattatatttaggattttgttatctaaggcgacatgggtgcattgctcaaaaacatgtaatttaagtgcacactacatgagtc

SEQ ID NO: 20258 - DNA, 1612 bp, DROSOPHILA
aagaagcaagtacgtggtgctagaagtcagaccgcaacgactgcaatattgcagataaacaataattttggccacacgtcttccagcgtttggactcaacgtaacatgtacctggcgtgtcaagtattcaaaattcgcgtgaaacacaaaggaacctaaagcattggccatgggcacggaagcagaacaaccgagtccacctgctcagcagcaagatcaagagaatccgcctctctgtaaggcacaaaatccgaagcctgcccgcctctatcgctttgtactgatcttcgtcgctggcagcctggcggcctggacgtttcatgccctaagctcaacgaatctggtctggaaactgcggcagctccatcatctgccgaccgcccactacttgcagacgcgtgacgagttcgcactgtactccgtggaggagctaaatgccttcaaagaattctacgacaagagcgtcagcgacagtgtcggcgccagctacacggaggcggagcagacgaacatcaaggaggcgctgggggcactgcgaatggcccaggacttgtacctggcggggaaggatgacaaggcggcgcgtctattcgaacatgctctcgctctagcgccccgacacccggaagtcctactgcgctacggcgagttccttgagcacaaccagcgcaacattgtgctggcggatcagtactactttcaggctctgaccatcagcccgagcaactccgaggcactagccaaccgtcagcgcacggcagacgtggtgcagagtctggacgaacgccgcctggaatcgctggactccaaacgagacgccctctccgccattcacgagtccaacggagccctgcgacgggcaaagaaagaagcctacttccagcacatttaccactcaacgaggtctatcctagagacccgcatggccgtagacggcaaatccattgacgagcacaacgagatcttgggcatggatctggctatgaagtacataaacgctagtctggtgcaaaaaatcgatatcactattaaggacatcctcgagctgcatcgcagagttctggggcatgtggacccaattgaagggggcgagttccgacgtaaccaggtgtatgttggaggtcacataccgccaggtcccggcgatctcgcgctgctaatgcagcgtttcgaacggtggctaaactcggagcacagtagcacactgcatcctgtcaactatgcagcccttgcacactacaagttggtccatattcacccattcgtcgatggaaatggacgcacctcacgtctgctgatgaacacgctgttgatgcgagcaggctacccaccagtgataattccaaagcaacagcgtagcaagtactatcatttcctcaagttagccaacgagggcgatattcgcccctttgtgcggttcatcgctgactgcacggagaagacgctagacctttatctgtgggccacaagcgatctgccgcaacagatccctatgctcatccagacggaaagcgaggccggtgagcgtctggcgcaaatgcagtctcccaacgtggcacaaaggtcatcaatattagaattctacgaatccggatctggagatctaccgtga

SEQ ID NO: 20259 - protein, 480 aa, DROSOPHILA
MGTEAEQPSPPAQQQDQENPPLCKAQNPKPARLYRFVLIFVAGSLAAWTFHALSSTNLVWKLRQLHHLPTAHYLQTRDEFALYSVEELNAFKEFYDKSVSDSVGASYTEAEQTNIKEALGALRMAQDLYLAGKDDKAARLFEHALALAPRHPEVLLRYGEFLEHNQRNIVLADQYYFQALTISPSNSEALANRQRTADVVQSLDERRLESLDSKRDALSAIHESNGALRRAKKEAYFQHIYHSTRSILETRMAVDGKSIDEHNEILGMDLAMKYINASLVQKIDITIKDILELHRRVLGHVDPIEGGEFRRNQVYVGGHIPPGPGDLALLMQRFERWLNSEHSSTLHPVNYAALAHYKLVHIHPFVDGNGRTSRLLMNTLLMRAGYPPVIIPKQQRSKYYHFLKLANEGDIRPFVRFIADCTEKTLDLYLWATSDLPQQIPMLIQTESEAGERLAQMQSPNVAQRSSILEFYESGSGDLP

SEQ ID NO: 20260 - DNA, 3554 bp, DROSOPHILA
tatttatgtcacataagtatggcatacatgaatttatttatttatttctgatcacaacgcgttgacgtcgataagactaatattaagatcattttataagggaaaaaacagggcttatctctgttggcatcattaggcgggcggtaattaggtaaggccctgataaggtaccaaaaactatgcgtaatcatttgagattgctgagtaattaaaactattatacataaggtacttgtcagaactaagttaacagacgatgaaatattaataactgtggtaaactgtgttttatttaaaaatgcaagttatatatattagaattatataaattatttgtattcttaatcagatctacaaaaaaggataccaaaataagcagataatttttaagatttttatttttacttcaaaataaatctacgaatttgccaccctagaaaaagagaccgctcctggtctaaatttttgcttgttaaccacgataagcaaatctttttccgcaaagcccagtaattgaagggaatgatccagagtcgctggtcgctaaatatcgatcaaacatcggctgtcacttggttggccatcgatctgagtctgccaattgaatcttgtgaatagcttagttatacactcggccaatatcaacaatcgtgttggattgttgatacaatctcgcctctcacaaatactccgttgaacttataagatcgcaaggagggggaggcgtgaatacatgccgcttccattcgctcagactaatttgataatcgcgcaatcagacagtgtacaacaaacctggctggcaatcagacgttgtcgcagaaaaactatttcacagtcacagcgaatttaaagccgtcaggatgcagccgttaacggaatatcactttgaaggtgctccgtcaggccattaaacaaattttatataaaaagaaaaaacttttatctccagatagtaatctatatctgttttccatttctatttgcagaaacccgcaaaatgcacggcgtgaaaagggtgctggttttctgcctgatgattgtgatactgccggccattcttatcattatgccgctgcatttgcgaaagacggtgtttgccgacgtcatctatcccatggcggagtccgatatcattgagattcgggcaggaatctcgtcgatcttttgctcgaaacacacactgcgtatgaactccaatttcaacgcttttcaactacgtaataagccggaaattgcgacgaatcgcaagcacattaggctgaagaagtcgatgacattgccggatgatacgcttgaatactggggcttcttcttgctgaaaggtgccaaggtgcgagtgaaattctgctcccgctacgatggatcccgcatcctgatcatccatggtcacagggagcttaatctttgcggtctgaccgatcacaataagaataagttgggcgccaattatgccaaaggtcacgaacaggtgcaggtgttcttcgaagacaatgtggagatcacggaagagaagggcaaccaggatgtgctaatggagcacgagaaccacggcggagaggatttgactgaggatattccacagccgcaggtgaacatacctgtcaagcaaaacaattctatacagcctaagttaattaggaaaaaactgaaaaagggcacaattcatcatggcgaacatgatatgcatgctataacagatttgcaaggatcacaccatacggaacacatattgaatcaccatgatcacagctctaattctccagcacatcatcacaatagtactgcccatcatcgggagcacagttcgaatatcacaaacgaagaaactagtcgtaatcacatacgaaatgaagatgaagatccagatcagaattcaagtaagacccattatagtgcggaaagtccgcctcaccgggaacgtctcaaaagacacaatagggtagcccataggaatcagaagagacaggatctttacgatacgctttataaaagatcaaagagggagaatgtctacgatagaaagacgatccatggaggaaatgctataaattttacggaaacggacgagtcgaattcggtgtccagctttgagacaggactatttcagtgtttcaatggaatgatcctgctgcaggagttcttcaggccaaaaaatgaatgctcaaatccgcacataatggacacttcgcccaacaagagttccatggtggtgcacaacgtcatcgaggatgggtactactattatatattctacagcgacaatgatcacgttcaaaacgagatccacgccatattcgatatttacaagccgacgtatcagtactcaaacatgagcgagtcacaaagctgtctgaataccacaaattgcacattcaacatcagtttcctttcggatgagattgtggtggtggaggttccaacacgggatggtatcgagcacgaggaggacgatataaccaatctgatctccacctgtcatccgcgcagcgagatatacgccatctttcccattacggtgctggtgctgatcctttgctgctccttcctgtagtcctcctgatccaatattattaatatactattgtgatatttatggtgaggtaactaccgggtgatatactcgcttgtgagtgtgttaacgttatggccggccccaaaacgagagcttttaaaatagccatagaatattccatatcggttatacacacacggaatgaacagtctgaacaaatcgttatcaatattcgtagattttatgctagactagaatgtagcctaagacgcaagcattttttggtctacaaatgaaaatgggaaaatagtaagataaaatatgtaaattgtatatcgtgtacaaataaatgtagataccaagtaattttaagatgaaattgtagtacttatcaattaattcaattattctcattttataaacgactttgatctttttgtttacctgaacacattttaaagacaattcttatgtagtcatttgaagaggattagttttaatgcttttgttgactttgtataagtgatttgaattttaaggaaattttcattagttttttaataaaaataaaattgattgtaatcaagcgttgtaatttttcattttatactcaatgtctacattttaacgttgccgcaaaatattttccactggcttcagttttaggagagaaaaaaaattttgttgattctagttattttagattaatttgcacaccactcaaagctaatttgccgatcatttgtgtgagtcttttcctaatttggccacgggagtaatgcaaatatttacataaaattcatgtacacatacatgcctggaagaaatgaaataacattttcattaaaaatgaataaatttactgtctagtcttttagttcatacactcaattgagcagcgtaaacaaagtgccttggattatccgattaacatagttgcattagattaagttataaaagaaaataataaaatagtaaaaacagtattcagtaaaaaaaaaattatttttaaagaagggaaaaaaaatgaaaaaaaaac

SEQ ID NO: 20261 - DNA, 1554 bp, DROSOPHILA
atgcacggcgtgaaaagggtgctggttttctgcctgatgattgtgatactgccggccattcttatcattatgccgctgcatttgcgaaagacggtgtttgccgacgtcatctatcccatggcggagtccgatatcattgagattcgggcaggaatctcgtcgatcttttgctcgaaacacacactgcgtatgaactccaatttcaacgcttttcaactacgtaataagccggaaattgcgacgaatcgcaagcacattaggctgaagaagtcgatgacattgccggatgatacgcttgaatactggggcttcttcttgctgaaaggtgccaaggtgcgagtgaaattctgctcccgctacgatggatcccgcatcctgatcatccatggtcacagggagcttaatctttgcggtctgaccgatcacaataagaataagttgggcgccaattatgccaaaggtcacgaacaggtgcaggtgttcttcgaagacaatgtggagatcacggaagagaagggcaaccaggatgtgctaatggagcacgagaaccacggcggagaggatttgactgaggatattccacagccgcaggtgaacatacctgtcaagcaaaacaattctatacagcctaagttaattaggaaaaaactgaaaaagggcacaattcatcatggcgaacatgatatgcatgctataacagatttgcaaggatcacaccatacggaacacatattgaatcaccatgatcacagctctaattctccagcacatcatcacaatagtactgcccatcatcgggagcacagttcgaatatcacaaacgaagaaactagtcgtaatcacatacgaaatgaagatgaagatccagatcagaattcaagtaagacccattatagtgcggaaagtccgcctcaccgggaacgtctcaaaagacacaatagggtagcccataggaatcagaagagacaggatctttacgatacgctttataaaagatcaaagagggagaatgtctacgatagaaagacgatccatggaggaaatgctataaattttacggaaacggacgagtcgaattcggtgtccagctttgagacaggactatttcagtgtttcaatggaatgatcctgctgcaggagttcttcaggccaaaaaatgaatgctcaaatccgcacataatggacacttcgcccaacaagagttccatggtggtgcacaacgtcatcgaggatgggtactactattatatattctacagcgacaatgatcacgttcaaaacgagatccacgccatattcgatatttacaagccgacgtatcagtactcaaacatgagcgagtcacaaagctgtctgaataccacaaattgcacattcaacatcagtttcctttcggatgagattgtggtggtggaggttccaacacgggatggtatcgagcacgaggaggacgatataaccaatctgatctccacctgtcatccgcgcagcgagatatacgccatctttcccattacggtgctggtgctgatcctttgctgctccttcctgtag

SEQ ID NO: 20262 - protein, 517 aa, DROSOPHILA
MHGVKRVLVFCLMIVILPAILIIMPLHLRKTVFADVIYPMAESDIIEIRAGISSIFCSKHTLRMNSNFNAFQLRNKPEIATNRKHIRLKKSMTLPDDTLEYWGFFLLKGAKVRVKFCSRYDGSRILIIHGHRELNLCGLTDHNKNKLGANYAKGHEQVQVFFEDNVEITEEKGNQDVLMEHENHGGEDLTEDIPQPQVNIPVKQNNSIQPKLIRKKLKKGTIHHGEHDMHAITDLQGSHHTEHILNHHDHSSNSPAHHHNSTAHHREHSSNITNEETSRNHIRNEDEDPDQNSSKTHYSAESPPHRERLKRHNRVAHRNQKRQDLYDTLYKRSKRENVYDRKTIHGGNAINFTETDESNSVSSFETGLFQCFNGMILLQEFFRPKNECSNPHIMDTSPNKSSMVVHNVIEDGYYYYIFYSDNDHVQNEIHAIFDIYKPTYQYSNMSESQSCLNTTNCTFNISFLSDEIVVVEVPTRDGIEHEEDDITNLISTCHPRSEIYAIFPITVLVLILCCSFL

SEQ ID NO: 20263 - DNA, 4037 bp, DROSOPHILA
ctaaattatgaatatttgaaaaaacttttaagtaatattatcatataaaataatacatttaatgaccttattgtagcccatcatttcgtaccatcccggagactttaggaactcgaataccatgggcatcatgcggcgaagattggtccttgagacggtatctataccgtacataataacactggcctttttaactggcttcacattctgtggtggatccttgtattgcacaaacacgaaggcatctctttgaaggactctcatttcgtcagctgtcctgcactccaccaacatcccttcgacatccaagggcaccaaatgattctgactgatttttgtttttacacctttcctgtatttaacgaaacaaaattgtatagcaaccgcatctcatgtaaagcactcacattacccgtcgtaatgctccgctgattgaccataaataattttctgataaaaacaagcaaagtcattcgtttttgactcggagagctcatgtagtacttcctcatttgtatggagcacatattgattcaatattttatcgtagtgtacagaaataagatcactttcatttgtgcacggtataaatgcctttgggtgattgattttcaaaaactccgcattaaagggattcacataacgcattttacactttccggattcgacataaaatagtttttccacttcctgagaatcccgtgcactaaagttttcatcgactcttgaggaattcatgctccacaagcatattaaggttacagccaaaaaactcacaataagtcttttaaatgagtatgaaatagaccgggccattgtaagtatttcagtcaactaatattttaatatacactcaaaaactggctaggctaccgtaaagaaattgatttcacggttagttttcgttttttatcctatttaaatcaacttggaaggaaaacgttaaaaccaactggcatgcaaattatgtgtgaaataattagttcagttagcagttagaatgaaaacttcgaagacgctgattttcattatagccatatttctaataagccatttgtctctgagtaagaagagaaactcgcaatttaatcaagtccagcatgagcactatatcaagacatcagagtgccatataccatatatcaataaaccattggaaaatgaaaaaggaaacataaaaaaacaacacacaatttgttccaaagatgaaagtttgataaaccttcgtttcgacgagaaatcccatcaatatttattgtatgtaaatgatcatgtggcccagctaaaactaagatctatgaaaaagaaatctcccaacctgattggatacaattgcagttatcgtgagctcaaaaggttaaatcgcgactatatcgttgatgcacctgttgtgtatgtatgctatttaacagatcgaagtcttaaatttgaagatcaatttttatacagccttggcgaggaagttaaattttggaatggctatattgttcccccttctgtggaggggatgcgtgcaacttgccgaaatgaactggcagaggatctacaatcagatacttttgtcttagtgcaacctcctaagacatatgcaccacttatttcttggcaccgcataccgaatgttttattgattggattcgatggcatttcccagatcaactttcgtcgcaactttccccttgtattcaatcaattaaaaatgcaggactggttcagaatggacggatacacaggaattggtgagaacacccagtccaatttaatggcttcactgactggctacagtcctcacactttgatgaatctcaaatgcgattcgagtgtgattggttgccttaaaactgttccgctgatatggaagcatttcaaaaagaagggttttataacagcctatggcgagggaatttccaatttgtttgattcggaaaagtatgggatttttgaaggtaccattgacttttatgctcgtcataagaatcttcaaagttgcattgataggcgatttaatatcaagcataactacgactattgtgaggaatttttaaaacgacatgctaacaccaaccgtccttttttcggggttttctttggaaacggaataaccaatagatcttatgataatgccagaatacaaactgaactgttggataaagtaaagaaattcaagaaaatgggtattctcactcagtcaattgtcgtcctattcagctatcctgtgtcatccgtaaaagaaaagaaaacgaacttttctcaagaagatttaccaattttgtatatttggctaccaccttggtttaaagcattccgtcctgaaatagttcaagcattaaggatcaatagtaaacgtttgacttcaccatacgatcttcatcttacactgcaacacctcttggaactgggagaacgttggcctcgagcggtggacaagctggtggattgccccacttgtcaaaccctttttgctcctgttcccgaaaatcgaacctgttcagatgctggcataggagaatcccaatgtccatgtgatagctacaagctgcttagctccaatcagatgaaacaattgtctgtgggaaagcaaattgtgcgcagtataaatgaattccttaaccatcacaacttgcatgagttgtgccataatcttacactgaaatcagtcaaaatggtgttgcaacgaaaggatagaaaattatctagtggcagcacctatagagcatatttcagtgccaacccaaataatgcagaattttccacaactatccgctacgctaataatcgccaagaactggaatatataaatgtggagtccataaaccgattgaataactatcaaaatgactcgagttgcatgcgaagattgcgaggcagaaagttttgtatatgcaagagccaaatactagaaaatcacagcacttcagaggtcacaaaattaataccgaataaaaataaaatagatgataaattatatgaattaccagacatgcgagaaaacgaccaaaacattgaaacattgaacattgaagttatttcggtgtaactaatgataaatttagttatctaactatatacttttgggttataatccaagtgatttgaacaatataagcttaaagcactaggtgccatccatatatcaacattattaaaaccagggttatctcaattttaccttctcaggtaaaccttgctaaaagcaatcacagatagtgacacaatcagacccataagttactgagttatccattttaccattatccggacagctcccagtcactcttgttctcgactggaatgggacaatttcattgtttaaaaatttaattgttatctacttcagcgtgcatacgtatgtacaagccaatgcacaatattcacaatatgtttctactttgacttatatacaatacattgacctataaaatgagaataatttcttaaatctacaaccaatgtaacacctagaagcaaataatgtcaaacccatattgaattcagcctgcatttacgttgcaaaactttccacccttacaataaaataattgacagtagataagattaacagtgctgtaaatccctaatttatttgatatctagaactctcaagtcgcttatactaagcgggatgcgtcaagaaataattttatctttgtttgcatgtaggtgaaaaatgacaggtgtcacacaacactgaagaactttgtcgtcggaccccggaaaataaatcttatatcttatatctttatacaatgctattagctatgccattagtttgcaaagcggaaatgaaagcacttatctaattcttgggactgcggaagttgtgttgggtcccatattatatatccaatcaatatgtcgaatcgtcagataaattgatacttgtgcccaggttgaaagccagaacttctgcctcatgattggccgcttatcatttgaaaggctatgttttgtctacttattaacattgtttactaattcattatgataatgggccgtcggcgactatcagtatcagttcagatgaggacaggcactcc

SEQ ID NO: 20264 - DNA, 2037 bp, DROSOPHILA
atgaaaacttcgaagacgctgattttcattatagccatatttctaataagccatttgtctctgagtaagaagagaaactcgcaatttaatcaagtccagcatgagcactatatcaagacatcagagtgccatataccatatatcaataaaccattggaaaatgaaaaaggaaacataaaaaaacaacacacaatttgttccaaagatgaaagtttgataaaccttcgtttcgacgagaaatcccatcaatatttattgtatgtaaatgatcatgtggcccagctaaaactaagatctatgaaaaagaaatctcccaacctgattggatacaattgcagttatcgtgagctcaaaaggttaaatcgcgactatatcgttgatgcacctgttgtgtatgtatgctatttaacagatcgaagtcttaaatttgaagatcaatttttatacagccttggcgaggaagttaaattttggaatggctatattgttcccccttctgtggaggggatgcgtgcaacttgccgaaatgaactggcagaggatctacaatcagatacttttgtcttagtgcaacctcctaagacatatgcaccacttatttcttggcaccgcataccgaatgttttattgattggattcgatggcatttcccagatcaactttcgtcgcaactttccccttgtattcaatcaattaaaaatgcaggactggttcagaatggacggatacacaggaattggtgagaacacccagtccaatttaatggcttcactgactggctacagtcctcacactttgatgaatctcaaatgcgattcgagtgtgattggttgccttaaaactgttccgctgatatggaagcatttcaaaaagaagggttttataacagcctatggcgagggaatttccaatttgtttgattcggaaaagtatgggatttttgaaggtaccattgacttttatgctcgtcataagaatcttcaaagttgcattgataggcgatttaatatcaagcataactacgactattgtgaggaatttttaaaacgacatgctaacaccaaccgtccttttttcggggttttctttggaaacggaataaccaatagatcttatgataatgccagaatacaaactgaactgttggataaagtaaagaaattcaagaaaatgggtattctcactcagtcaattgtcgtcctattcagctatcctgtgtcatccgtaaaagaaaagaaaacgaacttttctcaagaagatttaccaattttgtatatttggctaccaccttggtttaaagcattccgtcctgaaatagttcaagcattaaggatcaatagtaaacgtttgacttcaccatacgatcttcatcttacactgcaacacctcttggaactgggagaacgttggcctcgagcggtggacaagctggtggattgccccacttgtcaaaccctttttgctcctgttcccgaaaatcgaacctgttcagatgctggcataggagaatcccaatgtccatgtgatagctacaagctgcttagctccaatcagatgaaacaattgtctgtgggaaagcaaattgtgcgcagtataaatgaattccttaaccatcacaacttgcatgagttgtgccataatcttacactgaaatcagtcaaaatggtgttgcaacgaaaggatagaaaattatctagtggcagcacctatagagcatatttcagtgccaacccaaataatgcagaattttccacaactatccgctacgctaataatcgccaagaactggaatatataaatgtggagtccataaaccgattgaataactatcaaaatgactcgagttgcatgcgaagattgcgaggcagaaagttttgtatatgcaagagccaaatactagaaaatcacagcacttcagaggtcacaaaattaataccgaataaaaataaaatagatgataaattatatgaattaccagacatgcgagaaaacgaccaaaacattgaaacattgaacattgaagttatttcggtgtaa

SEQ ID NO: 20265 - protein, 678 aa, DROSOPHILA
MKTSKTLIFIIAIFLISHLSLSKKRNSQFNQVQHEHYIKTSECHIPYINKPLENEKGNIKKQHTICSKDESLINLRFDEKSHQYLLYVNDHVAQLKLRSMKKKSPNLIGYNCSYRELKRLNRDYIVDAPVVYVCYLTDRSLKFEDQFLYSLGEEVKFWNGYIVPPSVEGMRATCRNELAEDLQSDTFVLVQPPKTYAPLISWHRIPNVLLIGFDGISQINFRRNFPLVFNQLKMQDWFRMDGYTGIGENTQSNLMASLTGYSPHTLMNLKCDSSVIGCLKTVPLIWKHFKKKGFITAYGEGISNLFDSEKYGIFEGTIDFYARHKNLQSCIDRRFNIKHNYDYCEEFLKRHANTNRPFFGVFFGNGITNRSYDNARIQTELLDKVKKFKKMGILTQSIVVLFSYPVSSVKEKKTNFSQEDLPILYIWLPPWFKAFRPEIVQALRINSKRLTSPYDLHLTLQHLLELGERWPRAVDKLVDCPTCQTLFAPVPENRTCSDAGIGESQCPCDSYKLLSSNQMKQLSVGKQIVRSINEFLNHHNLHELCHNLTLKSVKMVLQRKDRKLSSGSTYRAYFSANPNNAEFSTTIRYANNRQELEYINVESINRLNNYQNDSSCMRRLRGRKFCICKSQILENHSTSEVTKLIPNKNKIDDKLYELPDMRENDQNIETLNIEVISV

SEQ ID NO: 20266 - DNA, 4292 bp, DROSOPHILA
gtccaaggttaattttatttatctgcagcttggatttgaataaatgaagcaactgtgtccgagcggaaacaacgatacacaacgaccctttgcgagtcgcagtgaattagtggctatgccatcgcataatgcacaatttaaacttaaattgatgggtatgtgtaaacaggcagtgggacacgcctataaggccgcccactccacacgacgaaatggagaggggaaaatgcaatgtacacaccttcatcaccagctcaaaaggatatttgtagacgcgaacgggtgactggaatttttgcaccatcttgctgcctttcaatcgtccgttccgtgttttttatttcaaattttcgttgcactgattgtggagttcgcactgtttaaaaaatcaattttcactctgcgcttttccgttgcagtataatgagcgcgcgggggcggggaaggtgaccaaacttgggcactggaataccgagctgggtttgtttttttgctcgtgacagttcacgccactgctatttatttcactgagttgtgtctggtatccgttggctcctagcgtaggagttctagagaaccgcctggccgtggaaaacagagaaagcctttctccgagtttgattaacagacgccaatggtgtgaccgcttttcgctaggtggcattcgccctggaaaaatatccgatgaataccgaagctggtttactgtatctagggattacaatgcacttgaaatatgccgttcacacagggccgcttgagagagctgatgcgaagcgtacacaccgagtgtattatatgcaaaaacttgacaaatttaaatcaaacaagccccataaaaacgaaaatgaattgaggatgaaagctaaagaacagtggaataattttgaatacctatgcatgcgacatctctcggtaagtcaatgaaatttgaatcttttttaaagcgacacctgtcgtaatttgtatgcattatcagttgcgttactgcagttgtatgggacttaaattgtatctttgttaaatttattagatataaacaataaataatatcgcgaaaataccgttaagcgataggtgaccgtcataggagtggcaacactggctgcactgcctctgcggagcggataaaacaaatcaaaaatcaatagccgggggatcgagtacccactgcaggatgagcatcgacgacgtcatctatgtgatctgcctgctgggctgcatcggagccggcagctatgtgaagaagatcgcggacgagggccagcgcaagctggtgtccactgggctaggcgttcttgtggttgtcattgtctcggggctccacagtctgcactgctttgtttccctggcactgggcacggccgccgtgcttctcgtgcacccgaggttagttggtgatcctgaacctgtggaaaattaccaataaccacactgctccctcttccagcaagggtcacctggtcacgtttgcggtcatgtttggctacctggtgttcttccgcattttcgacttctacttcggcattcccggccacacgaacatgatacaaatgatactaacactaaaggtgggttgcataaccattcattgccattacttagctcgtaatccttgcatcggcaggtttcgggcattgccttcgagaagactgccgcctggaagcgactgcaagcgcacgacgagcaaaagaagaacgaccagcgggatgtgcaccaggagagtccaatcgagatcaccgactacgatgtggaattgcagagcctgagtgccgctgagatcctgcactacagcttcaactacatcggagttcttacaggtgaagattggaccagattcaacctagtttcctatccacaagcactaaaaatgtagtcacaatacaaccagataccaaagtccaattcaattgctgattgtaaaacattacacacacatgcttataatcgatttcaaccgcatcaatataatcatcagtatcaagtagataataatttgtaaatctgcatttaaaacgaaaccactcatgtccattgattgcaggtccctattatcggtatcgcacatacagggactactttgagatgcctttcaagacctacgctccaactgttgaagccaccctggagaagctgaagtacgccgtcttctactgcgcattatacctggcaaccaactacatgtggccactggatgtgagtgcttgagcacaccgcaaaacattactaaattgaatacatttcagtatgcgttgagtgatgagttcttcaacgatcgctcctttgtgtaccgtttgctgtacgtgtggcccacgttcttcacattccgcgctcgcatctacaccggactcaccctcagcgaatgtgtctgcacaatggccggcttcggagcctatccggatgaatccgatcccaacaatggcgagggccctcggaaacgctatcagcacctaaagcgcgacgccgataagcacacctacaactttacaacgatcgtgaacaccagggttctggaggtggaaagatgctggaccttccgcgagggcatgaagcactggaatgtgtgcgtccagtattggttggctgtcaatgtgtacaaactcttccccagcaaaaagtacaggtgcgtttgaatacaagtatgttctatgaaactaaatagttcgattactccacatcgaagttcaaatgttaacttgtttcatagaatcgtagtttttgttgttttactgcttgtattactctcgtattactcttgtcgttgttgttctttccctttgctactgatcgcagggttggcaggtattcctagtagttacctaaactataagcttgacttatgttgcccctactaattagcatttgtgatcttcctaggactggcgccactttgctgtgctctgcctactggcacggattccggccgggacactacttctgcatcatgggcgctcccttctacgtctccctggaggacatgtgggataagctggtgcgcaagagtgccaccggcaccagccgcagggtaatcgatgtcatcttctggatctttaagtggttcgccttcagctacttgggcgaggccttcctgctctcctcctttggcaacatctggcggttctatagctctgtctatcatattggctacatcagttgggcggccatgactgcgttaggcttttacctcaccagccagagaaaagcggccgaacgtagaaagaagcgcgcggcagagaaagcagctggtggcgacggaatcgccgccgcaatagagaaggagaaggcgcagtagagtgtccagtttgttgctaccaaatgggtagtttccattcaaaacacaacttcctttaagttttccaatagatattctattagggggaaaccgaaaatttcttccttgaaattgtatattatgatgatcaaacgaatttcttcttagagatgttcttctctacataagtcaccattttaattatgtacaaagtggtcttgttacgccttctacccgcttccatccgcacttcttctggggaaggtgatgatattgatatggataaaatctaaaattagatgctaaaaagttactaaagaaattttattatagatatacatatattttaaccaaagcctgtgaaattggagtcaaaagttatagaaatataaaatcccaatatgatcattcaattgaaaactataatataaaaggaaatacactaaatatccctttttgtacgtttactttttttattcgtggcaacggagcttgcaatgtgtacagagaaattcgagatttacacaaaataatttttgcaaaatagaatacttgaaattcgagtgaaaatttaaatttaacaatgtgtgttgtgtacaaaatattggtgcgttgaaatcctctggagatttaaaaactcaattagggtaaaatgttttttaaatgcctattacgattgaaactaactatttccataaaaactaattgatatttttaaatcttaaggggaccagaccaatatttaaatcatttagggagccttttgtttatgtttgtttgtatggttaatattcgataccagctcgaatttgatctaaattcaatgcgtttcgatttcagttgtgttgtcttgagctaacaaatcagtgtcctcagatgtgtgggtagcatggcaagaggtttcctgttgctgatgcgaatatagatgcggatgctgatgctgtggtttgaatcgggtggatatcacgccgaggatggttcatcggtgaccagggacaggcggcgtttaacatcctgcgtt

SEQ ID NO: 20267 - DNA, 1647 bp, DROSOPHILA
ggacttaaattgtatctttgttaaatttattagatataaacaataaataatatcgcgaaaataccgttaagcgataggtgaccgtcataggagtggcaacactggctgcactgcctctgcggagcggataaaacaaatcaaaaatcaatagccgggggatcgagtacccactgcaggatgagcatcgacgacgtcatctatgtgatctgcctgctgggctgcatcggagccggcagctatgtgaagaagatcgcggacgagggccagcgcaagctggtgtccactgggctaggcgttcttgtggttgtcattgtctcggggctccacagtctgcactgctttgtttccctggcactgggcacggccgccgtgcttctcgtgcacccgagcaagggtcacctggtcacgtttgcggtcatgtttggctacctggtgttcttccgcattttcgacttctacttcggcattcccggccacacgaacatgatacaaatgatactaacactaaaggtttcgggcattgccttcgagaagactgccgcctggaagcgactgcaagcgcacgacgagcaaaagaagaacgaccagcgggatgtgcaccaggagagtccaatcgagatcaccgactacgatgtggaattgcagagcctgagtgccgctgagatcctgcactacagcttcaactacatcggagttcttacaggtccctattatcggtatcgcacatacagggactactttgagatgcctttcaagacctacgctccaactgttgaagccaccctggagaagctgaagtacgccgtcttctactgcgcattatacctggcaaccaactacatgtggccactggattatgcgttgagtgatgagttcttcaacgatcgctcctttgtgtaccgtttgctgtacgtgtggcccacgttcttcacattccgcgctcgcatctacaccggactcaccctcagcgaatgtgtctgcacaatggccggcttcggagcctatccggatgaatccgatcccaacaatggcgagggccctcggaaacgctatcagcacctaaagcgcgacgccgataagcacacctacaactttacaacgatcgtgaacaccagggttctggaggtggaaagatgctggaccttccgcgagggcatgaagcactggaatgtgtgcgtccagtattggttggctgtcaatgtgtacaaactcttccccagcaaaaagtacaggactggcgccactttgctgtgctctgcctactggcacggattccggccgggacactacttctgcatcatgggcgctcccttctacgtctccctggaggacatgtgggataagctggtgcgcaagagtgccaccggcaccagccgcagggtaatcgatgtcatcttctggatctttaagtggttcgccttcagctacttgggcgaggccttcctgctctcctcctttggcaacatctggcggttctatagctctgtctatcatattggctacatcagttgggcggccatgactgcgttaggcttttacctcaccagccagagaaaagcggccgaacgtagaaagaagcgcgcggcagagaaagcagctggtggcgacggaatcgccgccgcaatagagaaggagaaggcgcagtag

SEQ ID NO: 20268 - protein, 489 aa, DROSOPHILA
MSIDDVIYVICLLGCIGAGSYVKKIADEGQRKLVSTGLGVLVVVIVSGLHSLHCFVSLALGTAAVLLVHPSKGHLVTFAVMFGYLVFFRIFDFYFGIPGHTNMIQMILTLKVSGIAFEKTAAWKRLQAHDEQKKNDQRDVHQESPIEITDYDVELQSLSAAEILHYSFNYIGVLTGPYYRYRTYRDYFEMPFKTYAPTVEATLEKLKYAVFYCALYLATNYMWPLDYALSDEFFNDRSFVYRLLYVWPTFFTFRARIYTGLTLSECVCTMAGFGAYPDESDPNNGEGPRKRYQHLKRDADKHTYNFTTIVNTRVLEVERCWTFREGMKHWNVCVQYWLAVNVYKLFPSKKYRTGATLLCSAYWHGFRPGHYFCIMGAPFYVSLEDMWDKLVRKSATGTSRRVIDVIFWIFKWFAFSYLGEAFLLSSFGNIWRFYSSVYHIGYISWAAMTALGFYLTSQRKAAERRKKRAAEKAAGGDGIAAAIEKEKAQ

SEQ ID NO: 20269 - DNA, 3885 bp, DROSOPHILA
cgggggactatttacttaggcctctgcgtaggccatttactttaagatgcgattctcatgtcacctatttaaaccgaagatatttccaaataaaatcagtttcttacaaaaactcaacgagtaaagtcttcttatttgggattttacagtgagtctacaatttggcgcgcttaaggtaatccttgtaggtaacatcacgccaccaatgaggacgctcgtagacacctggagtggagacaagcgtgcgctgcagatgctggtagacctgcgaaaggatagaatctttagtaagagtagcagttgcttatggtagaccacttacgtttccatcgctcatgcccagaggagagtttagaataaagtctgtgggagcaatggcatccaccagagcaatggcttcgttcttcagcaggggaagcagagccagaatgccctgttcgtacagctccagttggttagagttttcgcggaagtaaccaccgcggtagaaagcagcggagtactttgtgaccaagtgggcgccatagaaggagagcacctgctgcagtaccttcttctcagcagagtcgggcagaccaattacaaacttataaaacacgtagtagatggtgcgctaaaagaatattaaacttggttattttactatttagttggggtttagagggttggcatctcacctcgccgtagataatggagagcttctgggcggcaaagacctggatgttgttcctcgtctcaaaggcatcctttccttcgcgctgctgttcctcaactcgtttcaccgtcgtatccagttgccagacggtaagccagttgagggcattaagtagatctatagaagtgcaataaaattgcgttattcctatcttatatttggataactaagaaatactcactgagcggatccaaaacttcggcaggagttcgctcctgacccttgctttgcagaattgtgtccatatccttcaggaaggagactgtctccaatggggaaactgccacgaagtcggcattgttgcgttgcagactgatcaaccaattggacgcttgctggatgagcgtgttgttctcgccctcataggtgcagttggcatcgttgtcgttgcgaagttcgcccaagccagaagatttaagatagccatgaccgccacaggcctcgcggcattcctgagattaaaacaatataaccgataagtaaaagtggttatatacatatataaagcattcatacctggatgccatccctggcagcccaagtggcaactggtttgagtgccgatgagatcgcatggatctccatgcccgcttgcgacgtgtcctcgccagtgaagcccttcatggtcaaatccacgttctctttgcctatccagagtgtggccacccgcaaggcgattgtggtggccaagtggggaattagtcggtattgctgtgactgatactcgatcacgggccactccgccgggctgttggtagggccaaactggcgtctgctggccgcatagcgagtggcaattgtcacagccttgctcaaggccacatacgtgatagcagtgatattgacgcgacccacggagagggcacccaaggaggcgccaaggcgcttacgctcgtccttaattttactggtgtagtttccctgcgcatcgatgtcaccggtcttggacagcagatttgccttagggatacgatactggttgaacatcacaaatctgcaatgccaaacaaatcgaaattatttctgttgctgttgattagttttatcaactgatagaagaaagtacttgcccgttatcaatgccattgagaccgatcttttcgcccatatcgccgacggttacgccggggaatggaagcaatgtacgctcgtcccgaatgggaacaaggaaggcctgcaggccctggtgcttgtcatccggcacgtacagctgggcgtagacgattgcgtgcgtgcaagtcttgcctagattaccgacccaacacttggccgcctcgaagtctggcgtgtggatgataaactcctgccttttcacatcgtaggtggcacgggtgcgcatgccgagcgcgttggtgccgtgagaaatctcagtgagagcgtaggcgcccaaaatgcggttgtccgcgatcttggccacgtacttgcccaggcggccagatccgttggagaccagcgtgctggggaacatgccagttgaaaggccgaacttgaccgaagtgctgaaatcgtagctaaagatggcctgtccgaaagcaagcagaagatgtggggttccaagatactgaaagaaagacaggagatttaggcagccacactttcaggagtacgcaacgcatcctacctcgttgacgccgtagaactgttgctcccacagaagatgctgccgcttgttggccatttcgcgggtgcgttccaaatcggatcctggctcccgctggtagtcggggtgctgttccatccattgccacaccttgtgctaaagacggagtgacatgtaaacgaattactcaagtgtgcagataagaaacgggcgacgattagaccgggcggttggcggcctgcagctccgacaaaagctatcgaggcagtctgcacttcgaccccgctgaccatgtacatatgtaacaaactggaaatggtaacgaaccttcagccgtatgtgatcctcgccctcgagcaccacgttcatgcgcttgtagcagaagctagcccgctcacggtactcttccaaaggtccgctacggaagtcgggaaagatccgtttgtcatcgtagatgttggctgcagccttctcctcccggcggccgctgtaatagtcgcccagtgcggttagtaatgagttcagaccgttttggtcaccaccatcgccatcgcctactccgctcgccattgcccagagaactggctcttgttggaatgttggattggtggacgttgtggtcgtcagtcgaggcgatggggctgtggggcaggggtacttactttgtgctcaatgcaaccatgttggagttcgattctagcgactggtctggctgcttcgaatgctaggcgcgaaatgcttgaaagtccaggcactcgtaactattattggtaaaatagccaatgtccaatggccagcggcgataagaaggaatccgcttatccgcacttcatggccaagtagccttttagtggtttgcatccgccgcggataagatacgggccctaggagaatgcgggattagggcggcccgtgcaggtggtggtgggtgctgcctgcgaaattcgaatcttttagcggccacaaacattgctttaatttcctatcagccatcagccaacaacaagcgcgataaacaaacaattttaacccagtttttcaccattgaagataacatagtttgacgtgacttaagccatgagaaagaacggtgttatataaatacaaaatgtgaagttttttaaattctgttaattattatataatataattatttaattattatacataatatacataaatttcatgtttaattttctttaatatcacaattcaatgttttcacaaaatgttttagcgggggcgttgccagaccttctcaaggtagccagggctggaatagtaggtctggcgcgtaatttgaatattctttctatcagaaacgagtcatttgctggtctaattttatctattttgttatataaaaacattacaatatatataaaaacattacaatccacatttaaaatatgaaaagagcatccatatccataccatacaattttcatggattctaaatttgattttaattaaaactgttgaatagtttatttttttcaagagcccacaataaaatgcgaatatgtacatgtaattgatctaatagcatttatttgattacgttcttaat

SEQ ID NO: 20270 - DNA, 2070 bp, DROSOPHILA
atggcgagcggagtaggcgatggcgatggtggtgaccaaaacggtctgaactcattactaaccgcactgggcgactattacagcggccgccgggaggagaaggctgcagccaacatctacgatgacaaacggatctttcccgacttccgtagcggacctttggaagagtaccgtgagcgggctagcttctgctacaagcgcatgaacgtggtgctcgagggcgaggatcacatacggctgaagcacaaggtgtggcaatggatggaacagcaccccgactaccagcgggagccaggatccgatttggaacgcacccgcgaaatggccaacaagcggcagcatcttctgtgggagcaacagttctacggcgtcaacgagtatcttggaaccccacatcttctgcttgctttcggacaggccatctttagctacgatttcagcacttcggtcaagttcggcctttcaactggcatgttccccagcacgctggtctccaacggatctggccgcctgggcaagtacgtggccaagatcgcggacaaccgcattttgggcgcctacgctctcactgagatttctcacggcaccaacgcgctcggcatgcgcacccgtgccacctacgatgtgaaaaggcaggagtttatcatccacacgccagacttcgaggcggccaagtgttgggtcggtaatctaggcaagacttgcacgcacgcaatcgtctacgcccagctgtacgtgccggatgacaagcaccagggcctgcaggccttccttgttcccattcgggacgagcgtacattgcttccattccccggcgtaaccgtcggcgatatgggcgaaaagatcggtctcaatggcattgataacgggcaagcaaatctgctgtccaagaccggtgacatcgatgcgcagggaaactacaccagtaaaattaaggacgagcgtaagcgccttggcgcctccttgggtgccctctccgtgggtcgcgtcaatatcactgctatcacgtatgtggccttgagcaaggctgtgacaattgccactcgctatgcggccagcagacgccagtttggccctaccaacagcccggcggagtggcccgtgatcgagtatcagtcacagcaataccgactaattccccacttggccaccacaatcgccttgcgggtggccacactctggataggcaaagagaacgtggatttgaccatgaagggcttcactggcgaggacacgtcgcaagcgggcatggagatccatgcgatctcatcggcactcaaaccagttgccacttgggctgccagggatggcatccaggaatgccgcgaggcctgtggcggtcatggctatcttaaatcttctggcttgggcgaacttcgcaacgacaacgatgccaactgcacctatgagggcgagaacaacacgctcatccagcaagcgtccaattggttgatcagtctgcaacgcaacaatgccgacttcgtggcagtttccccattggagacagtctccttcctgaaggatatggacacaattctgcaaagcaagggtcaggagcgaactcctgccgaagttttggatccgctcaatctacttaatgccctcaactggcttaccgtctggcaactggatacgacggtgaaacgagttgaggaacagcagcgcgaaggaaaggatgcctttgagacgaggaacaacatccaggtctttgccgcccagaagctctccattatctacggcgaggtgctctccttctatggcgcccacttggtcacaaagtactccgctgctttctaccgcggtggttacttccgcgaaaactctaaccaactggagctgtacgaacagggcattctggctctgcttcccctgctgaagaacgaagccattgctctggtggatgccattgctcccacagactttattctaaactctcctctgggcatgagcgatggaaacgtctaccagcatctgcagcgcacgcttgtctccactccaggtgtctacgagcgtcctcattggtggcgtgatgttacctacaaggattaccttaagcgcgccaaattgtag

SEQ ID NO: 20271 - protein, 689 aa, DROSOPHILA
MASGVGDGDGGDQNGLNSLLTALGDYYSGRREEKAAANIYDDKRIFPDFRSGPLEEYRERASFCYKRMNVVLEGEDHIRLKHKVWQWMEQHPDYQREPGSDLERTREMANKRQHLLWEQQFYGVNEYLGTPHLLLAFGQAIFSYDFSTSVKFGLSTGMFPSTLVSNGSGRLGKYVAKIADNRILGAYALTEISHGTNALGMRTRATYDVKRQEFIIHTPDFEAAKCWVGNLGKTCTHAIVYAQLYVPDDKHQGLQAFLVPIRDERTLLPFPGVTVGDMGEKIGLNGIDNGQANLLSKTGDIDAQGNYTSKIKDERKRLGASLGALSVGRVNITAITYVALSKAVTIATRYAASRRQFGPTNSPAEWPVIEYQSQQYRLIPHLATTIALRVATLWIGKENVDLTMKGFTGEDTSQAGMEIHAISSALKPVATWAARDGIQECREACGGHGYLKSSGLGELRNDNDANCTYEGENNTLIQQASNWLISLQRNNADFVAVSPLETVSFLKDMDTILQSKGQERTPAEVLDPLNLLNALNWLTVWQLDTTVKRVEEQQREGKDAFETRNNIQVFAAQKLSIIYGEVLSFYGAHLVTKYSAAFYRGGYFRENSNQLELYEQGILALLPLLKNEAIALVDAIAPTDFILNSPLGMSDGNVYQHLQRTLVSTPGVYERPHWWRDVTYKDYLKRAKL

SEQ ID NO: 20272 - DNA, 13075 bp, DROSOPHILA
ttctcgcaaagagtcgattttctgggctactggtgctgctccaccgatggatgtctataaatgttttcatgcctaattgatttaacgtctcgggcacagccgaatatagacatcgatcaaatggcagccagcgtccaaatattccacgctgcactcgttaaagtctaaaggctaattacgaattttttttttgtttttgcaaatatgaatttgtgcataatattttaatgaatttaacggattgccgcatacaaatcgcaattaatctggcagtgaaagaccgttgtcagcagtacttgttcggcatcgcctgctggtcatcgtcatctcataatattttcaagtgcgtgggcaacttgtgggaaacttgtgctgaacattgattgattttcacgccagcttcggctttgcttatttttagcggatattttcagcgaacttgggaaatgtgtattttaaacgatttggccgaggagccaagccattggcattgggtctctttgcctctcgtggatgtggatgtactgttggacattttcccctccattggctgtgtgcacgagcacccattttcctatttcccattttccatttaccattttccacattacccaaagccggcccactgacatgcaacgcttggggcggatttcaaggtgacctgctcccgcttacactgcggcaaacgggtggtggccttctggaaaatataataactatatttcgatttgttttactattaataatgttatatctacacagaaagaaaaagagagaaacatttaaactaaattaaattagaatatatgtaattttcgaagtgcaatgtgcaatgttcatagcgaaagttatagatttttattcatagtgtatttacactatactccatatgggaaataatttaatctaaccttttgggttttcctgtttgagctgtacagtgacgaacatttaatgtgagaatattacttaatacataaatgcttattaaatctaatacgttgcttctcttgcagcccctgatcttggcggccccaatccctttggcaggcatcggaaggagccgctcggcagcggcagctgcggcggcgccgcatggatcatgccgtgaaggcgacgcgcggccgcccgttgaatacgctgcgcttcgagaacgatgagctggaatgcctctaccagcggtatacgctcaagctgcagcgcttctcggtgctgggcgtggtggctctggtcttcgtcctctgcggcgtgatggcggccctttcgctgaccttcaacaacgcggccacctttcacgtaagtagctatgcaatttgggccaaatggtgtcgataagtatgcagcgaatatgtaatcaatatcaacatcccataatctatctatcaaaagtatcctaaactagccatttaagaaataggtagtgtgaaatgcaactggtactatcctaaacatatttagaaagtattgagtattaaagtagtcattatatggaacctgggtttcctagacaatatcacttataatttcatcatatttctttccatcctcaaaagaacatcttcaatgcgatcgtttgtggactgtttgccgtggtgctggtgctgctgcagtgttccgtgatcaaggaccaccacctgcccacattgtgctacggaatcctgctattcacggccagcatctgtgtggtgtcgatgcccacattgggcagcgtgttcccggtggacaccaaggaggtgatggccgagggcgtctggcagatcgtgttcgtggtcttcctcgcttacgccatgatgccgctgcagatttgggaggcggtggcctttggcatcgccctgccctcggtgcacataagtctaacggtctataagattttcacggatgcgctgcgctacctggagtataatcaactgattgcgaacattgtcatctttattggtgtaaatgtggccggtctcgtggtgaacatcatgatggagcgcgcacagcgtcgcacatttctcgatacacgcaactgcatcgcatcccgtctggagatccaggatgagaacgagaaactggaacgtctgttgctatcggtgctgccgcagcacgtggccatgcagatgaagaacgacatcctgtcgccggtggctgggcaatttcatcgcatctacattcagaagcacgagaatgtgagcatccttttcgcggacattgtcggattcacggtgctctcctcgcagtgtagtgcccaggagctggtccgcctgctcaacgagctctttggccgcttcgatcagctggcacacgtaagttgaagaatattacataatgccattggtagacttaattgcaaaattttcccctgcactttgctcccaggataatcactgtttgcgtatcaagatcctgggcgactgttactattgtgtctccggattgccagaacctcgcaaggatcacgccaaatgcgccgtggaaatgggactcgatatgatagatgccattgcgtaagtatcatctgcgtctttttaatcgacagggattttgaaaactgagtcattttataccataattgataaataaaccgaaataatgccgtcgtcactgataggaaatcacttacgtcaatagttttaaaacccatttgatgtacatatttatcacacgctttattcatgacaaaaacaatttttgcaccatttgataatcaagttgattggattgcaagaattgtgtattccaagcctaatggtttgttatgtcatttgttttaagcctgttggtcatgctataattaattaatgcactttcacattactgctgcgttgcactttaattgtaatctcatgagcgcttcctcctcgttttttagcaccgtggtggaggccaccgacgtcatcctgaacatgcgcgtgggcatccacacgggccgtgtgctctgcggggtcttgggccttcgcaagtggcagttcgacgtgtggtcaaacgatgtgaccctggccaatcacatggagtccggcggggaaccgggtcgggtgcacgtaacccgcgccaccctggactccttgtccggcgaatacgaggtggaggctggccacggcgacgaacggtcctcgtatctgcgcgaccatggtgtggacacgttcttcatcgttccgccgccacatcgacgcaaggtgagcaacatctttgtttatacttatgtgcttgatttcttaagggttctgcttttgttacctatttgttctgatcttttcgtgaattcgcctaatctgttcgtatcttctgcagccactgatgctcaacacactgggcgttcgctcggcgatcggcagtcgacggaagttgtcgttcagaaacgtgtccaatgtggtcatgcagctgctgcacacgatcaagttctcggaaccggtgccgttctccaatatagccaccggatcgttcccctcagcggccagcgccttgggtggcggagtttcagtcggcggtggtggaggaggaggaggaggaggcgtggcacggggtagcacctgcgaggcgaactctggaaacgttcaggtgtcggagaagggatcgcgcaaggtaagtggtgttgtttatctaaagttcagcatcccaatctgagaagccgagtcgggagtttcaaggtgggaggagttggaaagttggaagttggaagttgaaagttgaaagttgaaagttgcgtgttcctgtagctcggttctgttctatttcttttgtcgtagctccagaattctctgcatgtccggttggtttttgagggattaagtttccggatcccggataccgaattcccgttaacgggtggtgtggcttggtgtgcttttaattttccgtactagtatcttgtatccgtagcccagggatgcacaatgattcgttagatagatatcgggtagcatcaagacggcgagaatccttttcatttcttgctttgatttgtttcctttcgttttctttcaggatgcggtaagtttgcctcacccatgtctaagtatttctatatccaccagttgaaagcccgataaccagtaaccattatgcctcagttgcgcttattcccctggcccccttttttttttttttttttaatttctcgatcggttatcgttttccgtatttgatgggctcttttcgtttcgtagtcgcattgtacaaaaatgtatctattcctatatattaaataagattgtatttttagcttagcaagatcagcaattgtaattcgtaatgctgtctcaactaacaattgtagtataacggctcgtttgcgtcgatgttgtgtgtagtttgattgtagaaaaaaaatatatatatatttatgtatatatctgcgcctcggacttgtaaattgatctaaattgttgtcatcggaaacaaaatggacacacttacattttacatattagtaatttatatattaattaaaattgcattgaactttacagaatattagcactaacataagtaatcggttaaatcgatcaattcgctggcgataatttggaaagtagtttcgtccttgacgacgatatattttataggtggttcagttccgctagtgataagactgtattttatactaaaatactactccatactcactcgttatgtacatatattattgctacttaaatgcagccagctattctttagtttcgtttcgattatttcgattattacaattttgatttccacttgatgcgcctcttctctccactttctatcgttatcgttttgattcgtaccctaactaaacttaccgttctactatgattaattctatctctcgctactgtttaatttacgcctagtgataagaaacacacacacacacacaaaacaataactttgttcaaatgtaaatataagaacttaccatgacaactgtgtatactacttctccgatccaggtgatacgtctgcaaaagatcttgcatgcaacaccgccaccgcacggcatgggctatggcagcgtcgtcggcagcggcggcggtgtggacagcggtatttccggtggtggtggctgtgtttccggtggtattgccggtgggggcggtgttcaagtgaccgtaggcacaaatcccaactctacagcgagtacgattagtcgcattcataggcacaatcacaaaaacaataaagtgagcagagcagcagccaaaaaaactatacaaaataaaaacattctatactttcgttcaatcgttcaaaatcgttccttcgttcgttcgttcgttcaaaaaaggtcccttttgccaaaaaaaaaatgagttttcatcgatgttttgttcaattcatagcaattacattatgatgtgtggtatatatttgagagctcatatcctttaaagggacctttcgtttgtgtttcgtccatttacattcgttcaataattgtgttaagtgtaactacttcataagtgtgctttgttcattcgttatgtgtgtttcgttggcattcttcgagttttgttactgggagggcttccaaacaaaatttcgtcaagccctatttgcttgttaaagctgcaagacactggaccaaaaaattttaaaaacaacaaatatatgtaatcaggtttcaggttagcaaatgattaaaagagtcgaaatattgcatgaactttaatgattagtaatgtagattataaagcatacgttttagggaattacacaagtaatttctatcaggaaaaatatttagttttctttaattattttataaattatcaatgcaaaataaaattcactttgaatgtttaattaaaacgttacatttactattataattatttttttattataaaatataatggtactttgtctatgaagtatttttgaactgaaaattaagattgcaaggtttcatttttggttcagtgtcatccaagagcttgccaaccgccaactgcccattatcattgaccattctcgtctcacggattgcatgatccgagtccaaccgcgagtcttgaccagcatcagcatgcatattaccatgtcccagctctgctcgccgcctttcagttaccatgttagcatgtagtgagtcgtggccacatactctagtctaaagcacacacgtagagcttttcaatcaataaacttaattcttgaatcttcaactcaaccagccagttcaagtgccaagtgccagagacatccagcaaaatgaagaactcgtccgggaaccacaaccacaactaacgaatctgtctttctacttcttgctccctcttgcatggctttccattccgcaaatcgtaaatcacaatggcaaccgcaaccgcaaccgcatccgttaccgcagtcccagtcgaaggtggcggacaaattcaagaggccattccggaagcggcactcggtggccgcccaccatcagccaacgaatcgggtgaatcgattcctttcccaggcgatcaatgcccggtcggtggactgcgacaaatcggagcatgtggatcgattgaccctgcgattccgacagagcgacatggaacgcgagtatcacaaggatttcgatctgggcttcactacggccatgggttgctccctgctgttgctcatcctcggtgcagcgctccaggtgactgctctgccgcgcactctcatcctgctgctgctctttctctttgccttcatttgggtgagcgccattctgatgctcctgctcgccgtgcgtctcaaatggatcatctgggatatttcggagagcttttcgctgcgcatggccatcacgattttcacggtcatactcatctattccgtgggacaagtgaatgtggtatgtacagataaatacaatgtatatgtaagtatacaatccaacactttccatttcccttagtttacgtgcgtttcggatcatccatgctcgggcaatgggacgacctccttccagaacgactctcatcgcaagtgctcgctgccgcagtacgtgtccctatcggctgcctttgcctttctatctgtatcggtattcctgaggtgagtgcatcactatcacatcacaaaacgatgctaatgggaaaccttgattgtccacaggctgcccatcatattcaaatcgctcctagttctgggcatgggcaccatctatggccttttcatagagctatcgcatcagaatatctttgagtgctacgacaaccgggtcaagtaggtcaacgctaattttggtcgtcgcactaatccactaatcgaacgacctcgtttctcctttgctttgcagcgcctcgattccacttcacttgatctcgctggcccgcattgccatcttcatgattgccattttggtgcatggacgcctggtggagggcactgcccggctggacttcctctggcagctgcaggcgtcgcaggagaagaaggagatggatgtgctacaggagtccaataagcgcattctacacaatttgctgcccgctcatgtggctgcacattttctcgatgcgcaatttcgcaacaacatggtgagaatcccattgacccaatgataaatttagaaagattattgtgacctaaaagaaagtgaaatagaacactggtatggtatcattaaagttgttgacttacctgagaactttttcttttttcgttgtgcaggaactctaccaccagagctatgccaaagtgggcgtcatctttgcaagcgtaccgaacttcaacgagttttacacggaaatggatggctccgatcagggtcttgagtgcctccgtctgctcaacgagattattgcggactttgatgagctgctcaaggaggatcgtttccgcggcatcgacaagatcaagaccgttggtagcacttatatggctgtcgtgggactcatacccgagtacaaaatccagcctaacgatccgaactcagtgcggcgccacatgacagcgctcattgagtatgtcaaggccatgaggcactcactccaagagataaacagtcactcgtacaataacttcatgctgcgcgtgggtgcgtagaaacattgtggaatataatttgaatataaattcataactaattcaattaataatcctttttaggcatcaacattggacccgttgtggcgggcgtaattggagctcgaaagccacaatatgacatttggggcaatacggtgaacgtggccagtcgcatggactccaccggagttcccggctactcgcaagtaactcaagaggtggtcgacagcctggtggggtcgcactttgaattccggtaagtgtgttataattaatttttaaaattgcaatataaaatgattcaattgcacattgcagctgtcgtggcaccattaaggtgaagggcaaaggcgacatggtcacatatttcttgtgtgacagcggcaacaaatcgctgaacggagaagtgcgcaacgccatgtccctgccacagagtctccatgcgccggattactatatgaaggtgtcgcagtttccggagaatcgcgtcaataccgacacctatagcaaaaaggagaatggacatctgtacgctggcaacggcgtcgaggagcagcagttgttgctgcagcatcagcacaaacagcacgatccgctaccgcttcctgctcctccgcctccggttcaccatcatttgcatcagcagcaacagcagcgtttgaacagcaagctgcaaaagcaaccgatcttcatggccaacggtggtctgcccaatatccgggagaatggcaatggtcacaatggagagcatcagcagcagcagcagcagcagcagcaacatcagcagcagcaacagcagcagcagcagcacggtggctttatggtggcaacgacgacaccgccggctgcagtggcggttcccctccagccccagcaccatcaactccagttccagcacccgcaccagcatccactcccgtcagcagtgtcggttccagtgcagcaccagatcctactccaccaccagctccagctccagcaccagcccgttccttcggtaatgttgcgcgagtttaatattattgagaatccgacttccggtggccggcatcagcagatggagcagctgccgccgcatcacggcagcctcgacctatcgggaatgggaatgggtgtgggggctggcgtgctcggcagcgactgcttcatgatgccacggcgagatcgcgaacgcacatatgtgccgcccttaaaccagcatggccatcatccaccgcatcacctccattcgaatctgaatctgaatcagagccagcacccgccatcgttcaccagcctgggctatggccaatgccgggagagcgagccgctattgcatgccagcagcgtcgcgccggtagccaaggtgagtgaagacgctgaacacctgctctggagcaaggagatcctcctctgaacagccagcaccgccttgtcccagcctccaagtgcctcagaaactgacctgtaaaaaccagataaccggattaccaagacccatatccatcccattcgtaactaatgtccaagaaccacaatagatttgtatgtatttgtgagaagtagggaaagggattataaagataataataataataataacaatagcttaaccaagtttatattagcatttaatgtaaaaagcgcacttttctaaatgaatttacatcgttattattaccatctgaatagacagataaattgttaagttttaaagatatattaatttaattaatgagccatatgcttatacaccattttgttgatctcaaattaaaagtatagtttttgaagataacttagttaagcttttaaatgaatcatttatagtgactatatagttggtgtgataaaggaattccttgaatacgttatgactttttttaatccatttacatgccagtctatttgtgaagcttgccgaccacttgccccgaatatccactccttatatttatatctgtgtgtaccatgtgtctaactctctatgtccactctttgcatgaccgcgcacatctatctttctctctcgcttgctcatctccgactaaccacgcccccagatcatgcccatgcagcatgcgccaaagtacgagccaccacgttacacttctccccacaccatgttgtcgcaacagcaccagcagcagcagcagcagcagcatcagcatcagcagccgcaatcgcaatctgcccaggatcagcagacacatcccgcccaggacccacatcctttgcagcggcagtacgccatgtattcgcagcagccgcagctgccgccgaagccagtgctgagaacgtacatgaagccgttgccgaagctgccgacggatctggaggagagccgcgacatgtcctcgacggatgatctgagctcacgaccacactcgccctcgatgagcagctcggatgagagctactcgaagaccacagagggcgaaggtgaaggcgatgaggactcgccgcgcatggtcaatggtggccacctgcatcatcgcaatggctaccacctgcccgccggtggtctggtcaacccattgcaatggctctacccctgcgacattcaggtggatcccacctctccggtcgtcgacatggcccacctgcatgactttgagctaagctccaccaccgagagccagggccatcacactaacagcaacacgacgagcaacacacaacacaagggcgacagctgcaacagcttcgactttcagaaggcagcagttggaacggcagcgggtgcggcaatcgcgaccaagtcgcccttcgagcgtgaactgcaacgtctgcttaacgaatcctcgcgagctcgttgcctggcgactgcgacaacgacggctggagccatctctaccacagatcagacggccagcaatggaagccgtgagttgagctactccctcagcaatgggaagctgagctctgcgaatggacatggcgttggaggatccggatccggatccggatcgggatcaggttcaggttcggcggtgggcaatggcagcggtggcagcggcagcagcaatggcaatctcagcggcggcagcggcagcaactcgaacagtggcaacaacaacagcagtcaccacaagacggagcagcagcagaatatggatcacgagcatctggccggtggcaaattgctgggcagtaatagcttcatgatcgccaaacatccggtgggcttggaagccatcaaggagataacgcgcaacaagaatccctcggagtccagccaaatgtgagtagaccatgaccagtgatgggaagaagcttggtaggacatatttacttagttgtttatccctcaattcgataaaaaaaaaaatcaaaaattccacaaggaaagtgcttttgaagggggattactttacctttgaccttttacctttatatgacttacatatacaatatttgatagtctacctatgttattaatcccatcactgaccatgacgacagcttccattccatgacatatggtgtaggttcgccgctttcattaccggtatgggggttggctttatattaattttaattttaaatcctttaaatgatatatgcatatctgaaaaccttatccaatcgagcgaatgtgtgactcttgcaggcaaacctcggacacggagtcctgcgagattctgcacgagaaccgcaaccagatgcatgtgctggccatgctggagatgcatacggccaaggagctgaatggcagccatgcgcatcacggtcagcatcaccagcagccacagaggacgcatcgccagcgaccgcgctccaaggagctgcagtacagccacgagagtctggacggactggatggagcggtgcagtcgcagtcgcagcagcgacaccaacgctatcatcaccaccatcaccaccaacagaggcagcagcaacagcagcgctacaaccatgtgcaggagcaggaggagcgtgacgacaccgaggacaacctggccgatgaggagtttgaggacgacgaagtgggtcgtgatgtgcgacagaagcgcctacaaaagtccgagctcaatcacaaacgatcggaggttgcaacagaggcaggcaatcaccacgacgacgaggtggaggaggaggacgacgatgacgacgaagaggaggaccaccggaatggcgggcgggaggcggcaccgctgactaacggcagcatgcgcggcctggaggccaatgtgataaacgacgagctgaagtatggagcaacccatctcaatcaccagtccatggactccaatccgttggagagccaatcggagtggtcggatgacgattgtcgtgaggaagcaacaggtgagaactgagatctctaccattttctctaaccataactaatgctttgttttatttttttttttcagggggagccgagtccacgggctacattacggatgagcccggactggagaacatctcgttgctgaacgaagctggtctcaccgatgccgagggcgctctctcggatgtcaactcgctgtataacgcgccggacgtggacgacacttcggtgtccagccgggccagctcccgcctgcttagcctggactcgctgagcggcctctacgactgcgatctggactccaagcacgagctggccatcgtcaatgcctcgcacaagatctccagtaaatttgggcagcctctatcaccggcacagcagcaacatcaacaacagcagcaacagcaacagcagcaacagcagcaacaccaccaacagcagctgcagcagaatccgcagcacactcaagcccaatcgcatttggctccggttcagtttcagtccgccgaggagttgagagagtaaagattgaaagttcgtgtgaagcaggtggagcgttaaacactcaaacgttgttattgctatatgcaaatggtgtctaataatttacaataaaccaacctaaactatagtaaactaaatctagaataggtgacagatatgcatatatcgaaatatatatatatatatatatatttatgtatgtatagaagcagaggcacttaaagctgctctaaggcacccctagatgtaagcccgtttactttactgtggctagatcatgcctagcaggtattaactcatatatatatatatatatatatagtatat

SEQ ID NO: 20273 - DNA, 7005 bp, DROSOPHILA
gttgcttctcttgcagcccctgatcttggcggccccaatccctttggcaggcatcggaaggagccgctcggcagcggcagctgcggcggcgccgcatggatcatgccgtgaaggcgacgcgcggccgcccgttgaatacgctgcgcttcgagaacgatgagctggaatgcctctaccagcggtatacgctcaagctgcagcgcttctcggtgctgggcgtggtggctctggtcttcgtcctctgcggcgtgatggcggccctttcgctgaccttcaacaacgcggccacctttcacaacatcttcaatgcgatcgtttgtggactgtttgccgtggtgctggtgctgctgcagtgttccgtgatcaaggaccaccacctgcccacattgtgctacggaatcctgctattcacggccagcatctgtgtggtgtcgatgcccacattgggcagcgtgttcccggtggacaccaaggaggtgatggccgagggcgtctggcagatcgtgttcgtggtcttcctcgcttacgccatgatgccgctgcagatttgggaggcggtggcctttggcatcgccctgccctcggtgcacataagtctaacggtctataagattttcacggatgcgctgcgctacctggagtataatcaactgattgcgaacattgtcatctttattggtgtaaatgtggccggtctcgtggtgaacatcatgatggagcgcgcacagcgtcgcacatttctcgatacacgcaactgcatcgcatcccgtctggagatccaggatgagaacgagaaactggaacgtctgttgctatcggtgctgccgcagcacgtggccatgcagatgaagaacgacatcctgtcgccggtggctgggcaatttcatcgcatctacattcagaagcacgagaatgtgagcatccttttcgcggacattgtcggattcacggtgctctcctcgcagtgtagtgcccaggagctggtccgcctgctcaacgagctctttggccgcttcgatcagctggcacacgataatcactgtttgcgtatcaagatcctgggcgactgttactattgtgtctccggattgccagaacctcgcaaggatcacgccaaatgcgccgtggaaatgggactcgatatgatagatgccattgccaccgtggtggaggccaccgacgtcatcctgaacatgcgcgtgggcatccacacgggccgtgtgctctgcggggtcttgggccttcgcaagtggcagttcgacgtgtggtcaaacgatgtgaccctggccaatcacatggagtccggcggggaaccgggtcgggtgcacgtaacccgcgccaccctggactccttgtccggcgaatacgaggtggaggctggccacggcgacgaacggtcctcgtatctgcgcgaccatggtgtggacacgttcttcatcgttccgccgccacatcgacgcaagccactgatgctcaacacactgggcgttcgctcggcgatcggcagtcgacggaagttgtcgttcagaaacgtgtccaatgtggtcatgcagctgctgcacacgatcaagttctcggaaccggtgccgttctccaatatagccaccggatcgttcccctcagcggccagcgccttgggtggcggagtttcagtcggcggtggtggaggaggaggaggaggaggcgtggcacggggtagcacctgcgaggcgaactctggaaacgttcaggtgtcggagaagggatcgcgcaaggtgatacgtctgcaaaagatcttgcatgcaacaccgccaccgcacggcatgggctatggcagcgtcgtcggcagcggcggcggtgtggacagcggtatttccggtggtggtggctgtgtttccggtggtattgccggtgggggcggtgttcaagtgaccgtaggcacaaatcccaactctacagcgagtacgattagtcgcattcataggcacaatcacaaaaacaataaatcccagtcgaaggtggcggacaaattcaagaggccattccggaagcggcactcggtggccgcccaccatcagccaacgaatcgggtgaatcgattcctttcccaggcgatcaatgcccggtcggtggactgcgacaaatcggagcatgtggatcgattgaccctgcgattccgacagagcgacatggaacgcgagtatcacaaggatttcgatctgggcttcactacggccatgggttgctccctgctgttgctcatcctcggtgcagcgctccaggtgactgctctgccgcgcactctcatcctgctgctgctctttctctttgccttcatttgggtgagcgccattctgatgctcctgctcgccgtgcgtctcaaatggatcatctgggatatttcggagagcttttcgctgcgcatggccatcacgattttcacggtcatactcatctattccgtgggacaagtgaatgtgtttacgtgcgtttcggatcatccatgctcgggcaatgggacgacctccttccagaacgactctcatcgcaagtgctcgctgccgcagtacgtgtccctatcggctgcctttgcctttctatctgtatcggtattcctgaggctgcccatcatattcaaatcgctcctagttctgggcatgggcaccatctatggccttttcatagagctatcgcatcagaatatctttgagtgctacgacaaccgggtcaacgcctcgattccacttcacttgatctcgctggcccgcattgccatcttcatgattgccattttggtgcatggacgcctggtggagggcactgcccggctggacttcctctggcagctgcaggcgtcgcaggagaagaaggagatggatgtgctacaggagtccaataagcgcattctacacaatttgctgcccgctcatgtggctgcacattttctcgatgcgcaatttcgcaacaacatggaactctaccaccagagctatgccaaagtgggcgtcatctttgcaagcgtaccgaacttcaacgagttttacacggaaatggatggctccgatcagggtcttgagtgcctccgtctgctcaacgagattattgcggactttgatgagctgctcaaggaggatcgtttccgcggcatcgacaagatcaagaccgttggtagcacttatatggctgtcgtgggactcatacccgagtacaaaatccagcctaacgatccgaactcagtgcggcgccacatgacagcgctcattgagtatgtcaaggccatgaggcactcactccaagagataaacagtcactcgtacaataacttcatgctgcgcgtgggcatcaacattggacccgttgtggcgggcgtaattggagctcgaaagccacaatatgacatttggggcaatacggtgaacgtggccagtcgcatggactccaccggagttcccggctactcgcaagtaactcaagaggtggtcgacagcctggtggggtcgcactttgaattccgctgtcgtggcaccattaaggtgaagggcaaaggcgacatggtcacatatttcttgtgtgacagcggcaacaaatcgctgaacggagaagtgcgcaacgccatgtccctgccacagagtctccatgcgccggattactatatgaaggtgtcgcagtttccggagaatcgcgtcaataccgacacctatagcaaaaaggagaatggacatctgtacgctggcaacggcgtcgaggagcagcagttgttgctgcagcatcagcacaaacagcacgatccgctaccgcttcctgctcctccgcctccggttcaccatcatttgcatcagcagcaacagcagcgtttgaacagcaagctgcaaaagcaaccgatcttcatggccaacggtggtctgcccaatatccgggagaatggcaatggtcacaatggagagcatcagcagcagcagcagcagcagcagcaacatcagcagcagcaacagcagcagcagcagcacggtggctttatggtggcaacgacgacaccgccggctgcagtggcggttcccctccagccccagcaccatcaactccagttccagcacccgcaccagcatccactcccgtcagcagtgtcggttccagtgcagcaccagatcctactccaccaccagctccagctccagcaccagcccgttccttcggtaatgttgcgcgagtttaatattattgagaatccgacttccggtggccggcatcagcagatggagcagctgccgccgcatcacggcagcctcgacctatcgggaatgggaatgggtgtgggggctggcgtgctcggcagcgactgcttcatgatgccacggcgagatcgcgaacgcacatatgtgccgcccttaaaccagcatggccatcatccaccgcatcacctccattcgaatctgaatctgaatcagagccagcacccgccatcgttcaccagcctgggctatggccaatgccgggagagcgagccgctattgcatgccagcagcgtcgcgccggtagccaagatcatgcccatgcagcatgcgccaaagtacgagccaccacgttacacttctccccacaccatgttgtcgcaacagcaccagcagcagcagcagcagcagcatcagcatcagcagccgcaatcgcaatctgcccaggatcagcagacacatcccgcccaggacccacatcctttgcagcggcagtacgccatgtattcgcagcagccgcagctgccgccgaagccagtgctgagaacgtacatgaagccgttgccgaagctgccgacggatctggaggagagccgcgacatgtcctcgacggatgatctgagctcacgaccacactcgccctcgatgagcagctcggatgagagctactcgaagaccacagagggcgaaggtgaaggcgatgaggactcgccgcgcatggtcaatggtggccacctgcatcatcgcaatggctaccacctgcccgccggtggtctggtcaacccattgcaatggctctacccctgcgacattcaggtggatcccacctctccggtcgtcgacatggcccacctgcatgactttgagctaagctccaccaccgagagccagggccatcacactaacagcaacacgacgagcaacacacaacacaagggcgacagctgcaacagcttcgactttcagaaggcagcagttggaacggcagcgggtgcggcaatcgcgaccaagtcgcccttcgagcgtgaactgcaacgtctgcttaacgaatcctcgcgagctcgttgcctggcgactgcgacaacgacggctggagccatctctaccacagatcagacggccagcaatggaagccgtgagttgagctactccctcagcaatgggaagctgagctctgcgaatggacatggcgttggaggatccggatccggatccggatcgggatcaggttcaggttcggcggtgggcaatggcagcggtggcagcggcagcagcaatggcaatctcagcggcggcagcggcagcaactcgaacagtggcaacaacaacagcagtcaccacaagacggagcagcagcagaatatggatcacgagcatctggccggtggcaaattgctgggcagtaatagcttcatgatcgccaaacatccggtgggcttggaagccatcaaggagataacgcgcaacaagaatccctcggagtccagccaaatgcaaacctcggacacggagtcctgcgagattctgcacgagaaccgcaaccagatgcatgtgctggccatgctggagatgcatacggccaaggagctgaatggcagccatgcgcatcacggtcagcatcaccagcagccacagaggacgcatcgccagcgaccgcgctccaaggagctgcagtacagccacgagagtctggacggactggatggagcggtgcagtcgcagtcgcagcagcgacaccaacgctatcatcaccaccatcaccaccaacagaggcagcagcaacagcagcgctacaaccatgtgcaggagcaggaggagcgtgacgacaccgaggacaacctggccgatgaggagtttgaggacgacgaagtgggtcgtgatgtgcgacagaagcgcctacaaaagtccgagctcaatcacaaacgatcggaggttgcaacagaggcaggcaatcaccacgacgacgaggtggaggaggaggacgacgatgacgacgaagaggaggaccaccggaatggcgggcgggaggcggcaccgctgactaacggcagcatgcgcggcctggaggccaatgtgataaacgacgagctgaagtatggagcaacccatctcaatcaccagtccatggactccaatccgttggagagccaatcggagtggtcggatgacgattgtcgtgaggaagcaacagggggagccgagtccacgggctacattacggatgagcccggactggagaacatctcgttgctgaacgaagctggtctcaccgatgccgagggcgctctctcggatgtcaactcgctgtataacgcgccggacgtggacgacacttcggtgtccagccgggccagctcccgcctgcttagcctggactcgctgagcggcctctacgactgcgatctggactccaagcacgagctggccatcgtcaatgcctcgcacaagatctccagtaaatttgggcagcctctatcaccggcacagcagcaacatcaacaacagcagcaacagcaacagcagcaacagcagcaacaccaccaacagcagctgcagcagaatccgcagcacactcaagcccaatcgcatttggctccggttcagtttcagtccgccgaggagttgagagagtaaagattgaaagttcgtgtgaagcaggtggagcgttaaacactcaaacgttgttattgctatatgcaaatggtgtctaataatttacaataaaccaacctaaactatagtaaactaaatctagaataggtgacagatatgcatatatcgaaatatatatatatat

SEQ ID NO: 20274 - protein, 2248 aa, DROSOPHILA
MDHAVKATRGRPLNTLRFENDELECLYQRYTLKLQRFSVLGVVALVFVLCGVMAALSLTFNNAATFHNIFNAIVCGLFAVVLVLLQCSVIKDHHLPTLCYGILLFTASICVVSMPTLGSVFPVDTKEVMAEGVWQIVFVVFLAYAMMPLQIWEAVAFGIALPSVHISLTVYKIFTDALRYLEYNQLIANIVIFIGVNVAGLVVNIMMERAQRRTFLDTRNCIASRLEIQDENEKLERLLLSVLPQHVAMQMKNDILSPVAGQFHRIYIQKHENVSILFADIVGFTVLSSQCSAQELVRLLNELFGRFDQLAHDNHCLRIKILGDCYYCVSGLPEPRKDHAKCAVEMGLDMIDAIATVVEATDVILNMRVGIHTGRVLCGVLGLRKWQFDVWSNDVTLANHMESGGEPGRVHVTRATLDSLSGEYEVEAGHGDERSSYLRDHGVDTFFIVPPPHRRKPLMLNTLGVRSAIGSRRKLSFRNVSNVVMQLLHTIKFSEPVPFSNIATGSFPSAASALGGGVSVGGGGGGGGGGVARGSTCEANSGNVQVSEKGSRKVIRLQKILHATPPPHGMGYGSVVGSGGGVDSGISGGGGCVSGGIAGGGGVQVTVGTNPNSTASTISRIHRHNHKNNKSQSKVADKFKRPFRKRHSVAAHHQPTNRVNRFLSQAINARSVDCDKSEHVDRLTLRFRQSDMEREYHKDFDLGFTTAMGCSLLLLILGAALQVTALPRTLILLLLFLFAFIWVSAILMLLLAVRLKWIIWDISESFSLRMAITIFTVILIYSVGQVNVFTCVSDHPCSGNGTTSFQNDSHRKCSLPQYVSLSAAFAFLSVSVFLRLPIIFKSLLVLGMGTIYGLFIELSHQNIFECYDNRVNASIPLHLISLARIAIFMIAILVHGRLVEGTARLDFLWQLQASQEKKEMDVLQESNKRILHNLLPAHVAAHFLDAQFRNNMELYHQSYAKVGVIFASVPNFNEFYTEMDGSDQGLECLRLLNEIIADFDELLKEDRFRGIDKIKTVGSTYMAVVGLIPEYKIQPNDPNSVRRHMTALIEYVKAMRHSLQEINSHSYNNFMLRVGINIGPVVAGVIGARKPQYDIWGNTVNVASRMDSTGVPGYSQVTQEVVDSLVGSHFEFRCRGTIKVKGKGDMVTYFLCDSGNKSLNGEVRNAMSLPQSLHAPDYYMKVSQFPENRVNTDTYSKKENGHLYAGNGVEEQQLLLQHQHKQHDPLPLPAPPPPVHHHLHQQQQQRLNSKLQKQPIFMANGGLPNIRENGNGHNGEHQQQQQQQQQHQQQQQQQQQHGGFMVATTTPPAAVAVPLQPQHHQLQFQHPHQHPLPSAVSVPVQHQILLHHQLQLQHQPVPSVMLREFNIIENPTSGGRHQQMEQLPPHHGSLDLSGMGMGVGAGVLGSDCFMMPRRDRERTYVPPLNQHGHHPPHHLHSNLNLNQSQHPPSFTSLGYGQCRESEPLLHASSVAPVAKIMPMQHAPKYEPPRYTSPHTMLSQQHQQQQQQQHQHQQPQSQSAQDQQTHPAQDPHPLQRQYAMYSQQPQLPPKPVLRTYMKPLPKLPTDLEESRDMSSTDDLSSRPHSPSMSSSDESYSKTTEGEGEGDEDSPRMVNGGHLHHRNGYHLPAGGLVNPLQWLYPCDIQVDPTSPVVDMAHLHDFELSSTTESQGHHTNSNTTSNTQHKGDSCNSFDFQKAAVGTAAGAAIATKSPFERELQRLLNESSRARCLATATTTAGAISTTDQTASNGSRELSYSLSNGKLSSANGHGVGGSGSGSGSGSGSGSAVGNGSGGSGSSNGNLSGGSGSNSNSGNNNSSHHKTEQQQNMDHEHLAGGKLLGSNSFMIAKHPVGLEAIKEITRNKNPSESSQMQTSDTESCEILHENRNQMHVLAMLEMHTAKELNGSHAHHGQHHQQPQRTHRQRPRSKELQYSHESLDGLDGAVQSQSQQRHQRYHHHHHHQQRQQQQQRYNHVQEQEERDDTEDNLADEEFEDDEVGRDVRQKRLQKSELNHKRSEVATEAGNHHDDEVEEEDDDDDEEEDHRNGGREAAPLTNGSMRGLEANVINDELKYGATHLNHQSMDSNPLESQSEWSDDDCREEATGGAESTGYITDEPGLENISLLNEAGLTDAEGALSDVNSLYNAPDVDDTSVSSRASSRLLSLDSLSGLYDCDLDSKHELAIVNASHKISSKFGQPLSPAQQQHQQQQQQQQQQQQQHHQQQLQQNPQHTQAQSHLAPVQFQSAEELRE

SEQ ID NO: 20275 - DNA, 8054 bp, DROSOPHILA
aacttacacacttagttaacatgcactcatttttccttcgttattggcttgtcagtttattcttacaatacacgtcagattatttataaaactaaattgtaaacatccgcatagtaattcgtttttaatacaataaataataaccaaaaaaacacactgaagttgccttttttgattttaaaaacactttggagattgattgatattagcaattaagggcgtacaaatgacggggtaattagtgtgcaatcaaaaacgttctgcattcgaatgtttaaaatacaattttacatttataattataatctgacgtctagctataacctacgtgtgtatttcgagttcaaatcttacatttcactcttttgtataagttctggctaaaatccttgcaataagccatttcggcaatttgtttattaaactaattaggtaacacgtagttattgattacaatttcaattttttctattttcgtttcagtggctgcgcaatcgcaataagttccttaattgttgctaaaaaatgttccattagaaaaagctataaaaattacgtcgcttttacatatatatgtacgcattaaaacttcatttatagagctgcttacgaaaaattcaaattgacgattcaaataaaacgttgcgtgatattttggtgttgctcatttaaaccgctgatatttctaattttcttaagattatcaataatatgaatgcttgtatatattgaatgaatataataaatttaaaaggaaataaatggcctatttgagctaaatacaatttaaaatcaaactaacattctgctaaacaactaaagacaactaaaacacaagatattaccactttcggtcttaaaagaatacgtccggcgtttcaaatagattcaggctcttctccatcagggtgcccgtgagaatgtccgccgctatgggctcctccaatgccggggatctccattcggcgccgttcgttccgccatccccggctttctcatatcatcgactctgcaccgagctggccgccgacgagttcgatgagaatgccgactgcaggctggtcatcgaacccttgtagttggccgagctgagcacctcgtagaagacgtttaactgggcacccgatggactaaaccagtgcataagatagctgtcgttgtgatgcatcacgtgcgacccctggacgctctccttgtgccggcaaatcagcgttggctcctcacggaaataattgacgccctcgacgaagtcctgcagatcaaagtacgagacggcggaatctgtgggcgaagggcatttaattatatgtaagctgtcaagctaatcaagttaattaattaaaaggttcaaagtacaaaaagctttataaaataaggttcaactttttcgtattttactacattatcaaaacacatatgaaaagcaatccctatcaataaaccggaaccaaaatgcgcgcgttatcaatttaatagagccctagcaacagataccttggaaatttatataaataaatatatacacaaattaacatacgttttaatacttaattgtaatagtaaactattcaatttaagccaaacgttattaatttgtttttaagttgcctgacaacaaattttcttttcttttcgaaagggtgtaagagtttccactttccgcatttttcgctttttatcgtggctttgtgtttttataaaagtgctaagtaaacaaaaacaacttctaatgaggcaacaacatcgtgatattcgcacctttgaaaccaaaaccagttctcagaacaaaagaaaaacaaaaagcaacatgaaaaccttttgtaagtgcattattaactcaccattcttttccggaagctcctgggtgacccggtagagcgtaaagtgcagatcgttgcgcatcacatcgaagtcccaggtgagcacactcttgggatcctcgttccggatgagcagctcgtgcgcgaatccggccttgagatccacactcttgtacagattgcgatgatcgtgttgctggttggcagacaggcgcttgcctggaaccaaagcctgtgccgcggcagtggtgggcagctcggcggtcacttcgtcgtcgtgatcctccagcgaattcatcttgtacaacgtcttaggcaccagtccgccctcgtgaatcatggtctttgtggaaagaggacaatacgttagagcagtttctggtgggcaggctccgtggctgttggcttggactgagcacatgtatgacagccgccgggtgaacagagagattaagtgacgtggacatggacgctggggcacaatggaggaaatattacagcaggaatgtcatggctaagctgcgcacatgggcttgacacagtttgcaacagaaccgcacagcgaacaaagtgtgagaaacaaaaacgaggaagtaagacaaaggcggacgagtacagtacaatttgtcgttgtggatggtgacaaacgaaatcgagagcaggagcaaaagaacaagagagtaggatgcttacacaatcgcatttggttaaataacaatggctaaagtatttctgactgacttgctccacatgcgagactagctggttctctgtctgagcagccccagcgagccggaatcaaggccgaaaccagagggatagagagttaacgcacatatacaataataacataatatagtaagtacgttgctacagatgcagcagtaatgggctcccaaccgaagacgcgctaccggaagtcgtggctgccgccttgcttgcttaccttgcacggtccgcccaggaagtcaggcacaatctcctcgtcgagatactgggccaggccatccttcatgtgcgcacagtcggggccgtagaacaggaacttggatcgggtgtgctcatctgcaggatttcaaagcgttgttaacaggcaattccatatgacggcttgttcagactcaccaataaaagcactaacgattgtccatgcaatgggaaacactctgggcgctcgcaccactaggacacggcccatggtctctgggtaattgcgctccacagtctcgatgatgttgagcagggctttgatgccgggacgccagaggtggcgcatagaaagaccctccagatcgacaagcagtgaccagttgagaactggcttctccaggcgttcggcggattcattgatcttctgaatgccttcctcgcagatgtgcaaagcctatagacagacagcatattgtttaaaatgtaatctcagcgataagttctccgccggcttgcttaccaatcgcagtagtccatccattcccagtgactttagcaggcccttgacgtccatgtgtcccaggcgcagaatgtaaacgggtcgaccgtccttgtccaaatgatgccagccgcccggaaagtgttccactaccacggctggcttggagtactccgccaacagtgcgtcgatgcgatgttcccgacgccagcgaagcgagtcgcagagcatggcgtaggcctggctaacgtgccagtccctggctgctaagaaacgcaggatggtctgataactgggcacacgctccaagtcatcgacaccatccagcatttttcgcagctccagcagcttggactcctgcatgggcgacagctggcccaggctgcgtgcgataaagtcgccgtccagcaagatgctatgctgctgatccgaagcctgatcgagggttggcgatttggttgcatcactgggcgatgtccaacgctccacatgcgtgatgccttcctcgcgcagctgcccgataaagaactcaatgatttctttgcccttcagcgtcgtctgggtgtactgcttcatgcccatcttttccatcgagtgctcgaagccgaagaagttcttaatgtccagcgtggccgactggtcaaagcacgtccattcggagttgtccggatgggcgtagtagcgacaccgctcgaagatttcgatgcgcgacgagaagctctcgttgaccgcctcgatgctcagcgtgcggttggccaggtccaggaagttgtgctgcaggaagtacacatggtccacgccaataagctttttgaagatgtacggcgcgtcgaccgccagcttgcagcgtcggctcgtgtttcgcttggccccgtcctccagggactcgtccttaatgacctcacagtccaggacgatgggcatctgcgggcatgtgggaaaccgccgctcataggcctgcagtagcaacgaggataataagttagatgtatgttgaatatgtatatttaaggactctctttgatagctaagtatttagtgaattcaaattgctagcaacagttttggtaagtgtatgtatttattttctatattccggttccctgccaagcgaccttgaacgctggccaatttataacttggccctgcagccatctatgtacatgcaccccatcccgccccgttttgctcatcctccgtcacagattgcagccaacgtctcagaagcctttaacaatttcgaaggtctatttttggccaatcgtgcctgggttttcgatgaaaaaggtcaaattattagggcggttgcgaaatgttgtttcctatattttatataaatctataatatacatatttctatactaaatagataattatttaatagcaaaaaagaagcatcgcatatttgcaagtacaaaactttttgattaaagtcaacagcgcgtatgagtgatggatttttaactcaattcgcagacgcacatttattttgattatttatttgggtatggcgtaaatacgcaaaagcgcaatatttaagcaggtgagagcagtgcctgaaaatgttgtttacttgtgttttcttccatatataataaatgcaaattccgaaattgctaaatatatttagcaaaaaaaattacatttacttataaacaaaacttagaatagctccattcatgcatgctaaataccgctgatcaacacgactatattatataggacccaaatcaatgatcggtcaaaagtagaaaattatcgctgtatcaaaaatttgcgcagttgaaaagcttttcatttagaatacaacctaatcgctgcaaaaattggttgctgattgaacaaatcaatacaattgaaataatatactcaaacgtgttcttttgcatataatatttcgctattttcatgaaattgttgggtttaaaaatgtaaaattcttaagacagtggaaaaatacgttcttattgctcaagatctattcttattcttgttgcgtttgaactccataccttgtttgcaagcaataaacaatgaaaatcaaaaatagattttccatatcgataattgtgcaatccaaatcataattctatctagtggttgcgagtccttgttactagtgcaaaggtcataaatcgctgtgtggatattcatgatgatattcatgtggatattcacacgttgaataattcagtgtgcggtgggagccatccaacacgtggcgactcctcacctcacatggacatgtcttacaatatccatatttttcccagacccagctagcaaactgtgtagttggcactggtgtccttaattattcagataggctttcttaattgtcctggcgggcggtaatggtctaaaatgctggaactttgcctgcatctttggggacatgcgagtggacaggtgtcctatcgtgcggctcataaatgttgcttaaatttaaattacccctgtcggtgacgtacgtagaataaatgtttgacctttgacatttgagacttttgagtttctgtcacgaaaagcgctttcttacttctgtctacaagggaaaacatacataaacactcaaagtatcgaataaccataataggcttttcattttaggtgatttgtgtttggactacacttttagtctaatatatgactgtatagttattttaagtacaaaaaacggcacttgaagtgatttctgttgcttaaataaacttttgaagtaaaaaacagttcgttttcttatcagtcagtgaaaaggcaaaaaataaaatgatttgcaaaggaaacagaggtaggagggaggaaaagcttcaataaaaaagacaaccattttttatcttataaatttataaccccaatttcgataatttacgataaatgttaatacattcaaaaaggcgcattatgtaaattaacagcattaaaaaaagaacaaatttctatggcataaatgagactaaaacgcaaagctggacgcaaacaatcagtagattaataaaaataaatgaaaaattcacaaacaagtcgtttcaaccaaaccgccccctcccaccgacaaactatttacacacgcacacacacgcacacgtacatgcagtgtgtattattcaattggataaagaatctatctctatctcgctcttcgagcgcaactgcgaaagagagagcatgttgggcggggggaggaattgctgtccaaggttaattttatttatctgcagcttggatttgaataaatgaagcaactgtgtccgagcggaaacaacgatacacaacgaccctttgcgagtcgcagtgaattagtggctatgccatcgcataatgcacaatttaaacttaaattgatgggtatgtgtaaacaggcagtgggacacgcctataaggccgcccactccacacgacgaaatggagaggggaaaatgcaatgtacacaccttcatcaccagctcaaaaggatatttgtagacgcgaacgggtgactggaatttttgcaccatcttgctgcctttcaatcgtccgttccgtgttttttatttcaaattttcgttgcactgattgtggagttcgcactgtttaaaaaatcaattttcactctgcgcttttccgttgcagtataatgagcgcgcgggggcggggaaggtgaccaaacttgggcactggaataccgagctgggtttgtttttttgctcgtgacagttcacgccactgctatttatttcactgagttgtgtctggtatccgttggctcctagcgtaggagttctagagaaccgcctggccgtggaaaacagagaaagcctttctccgagtttgattaacagacgccaatggtgtgaccgcttttcgctaggtggcattcgccctggaaaaatatccgatgaataccgaagctggtttactgtatctagggattacaatgcacttgaaatatgccgttcacacagggccgcttgagagagctgatgcgaagcgtacacaccgagtgtattatatgcaaaaacttgacaaatttaaatcaaacaagccccataaaaacgaaaatgaattgaggatgaaagctaaagaacagtggaataattttgaatacctatgcatgcgacatctctcggtaagtcaatgaaatttgaatcttttttaaagcgacacctgtcgtaatttgtatgcattatcagttgcgttactgcagttgtatgggacttaaattgtatctttgttaaatttattagatataaacaataaataatatcgcgaaaataccgttaagcgataggtgaccgtcataggagtggcaacactggctgcactgcctctgcggagcggataaaacaaatcaaaaatcaatagccgggggatcgagtacccactgcaggatgagcatcgacgacgtcatctatgtgatctgcctgctgggctgcatcggagccggcagctatgtgaagaagatcgcggacgagggccagcgcaagctggtgtccactgggctaggcgttcttgtggttgtcattgtctcggggctccacagtctgcactgctttgtttccctggcactgggcacggccgccgtgcttctcgtgcacccgaggttagttggtgatcctgaacctgtggaaaattaccaataaccacactgctccctcttccagcaagggtcacctggtcacgtttgcggtcatgtttggctacctggtgttcttccgcattttcgacttctacttcggcattcccggccacacgaacatgatacaaatgatactaacactaaaggtgggttgcataaccattcattgccattacttagctcgtaa

SEQ ID NO: 20276 - DNA, 2288 bp, DROSOPHILA
gagaaaggctttctctgttttccacggccaggcggttctctagaactcctacgctaggagccaacggataccagacacaactcagtgaaataaatagcagtggcgtgaactgtcacgagcaaaaaaacaaacccagctcggtattccagtgcccaagtttggtcaccttccccgcccccgcgcgctcattatactgcaacggaaaagcgcagagtgaaaattgattttttaaacagtgcgaactccacaatcagtgcaacgaaaatttgaaataaaaaacacggaacggacgattgaaaggcagcaagatggtgcaaaaattccagtcacccgttcgcgtctacaaatatccttttgagctggtgatgaaggcctatgagcggcggtttcccacatgcccgcagatgcccatcgtcctggactgtgaggtcattaaggacgagtccctggaggacggggccaagcgaaacacgagccgacgctgcaagctggcggtcgacgcgccgtacatcttcaaaaagcttattggcgtggaccatgtgtacttcctgcagcacaacttcctggacctggccaaccgcacgctgagcatcgaggcggtcaacgagagcttctcgtcgcgcatcgaaatcttcgagcggtgtcgctactacgcccatccggacaactccgaatggacgtgctttgaccagtcggccacgctggacattaagaacttcttcggcttcgagcactcgatggaaaagatgggcatgaagcagtacacccagacgacgctgaagggcaaagaaatcattgagttctttatcgggcagctgcgcgaggaaggcatcacgcatgtggagcgttggacatcgcccagtgatgcaaccaaatcgccaaccctcgatcaggcttcggatcagcagcatagcatcttgctggacggcgactttatcgcacgcagcctgggccagctgtcgcccatgcaggagtccaagctgctggagctgcgaaaaatgctggatggtgtcgatgacttggagcgtgtgcccagttatcagaccatcctgcgtttcttagcagccagggactggcacgttagccaggcctacgccatgctctgcgactcgcttcgctggcgtcgggaacatcgcatcgacgcactgttggcggagtactccaagccagccgtggtagtggaacactttccgggcggctggcatcatttggacaaggacggtcgacccgtttacattctgcgcctgggacacatggacgtcaagggcctgctaaagtcactgggaatggatggactactgcgattggctttgcacatctgcgaggaaggcattcagaagatcaatgaatccgccgaacgcctggagaagccagttctcaactggtcactgcttgtcgatctggagggtctttctatgcgccacctctggcgtcccggcatcaaagccctgctcaacatcatcgagactgtggagcgcaattacccagagaccatgggccgtgtcctagtggtgcgagcgcccagagtgtttcccattgcatggacaatcgttagtgcttttattgatgagcacacccgatccaagttcctgttctacggccccgactgtgcgcacatgaaggatggcctggcccagtatctcgacgaggagattgtgcctgacttcctgggcggaccgtgcaagaccatgattcacgagggcggactggtgcctaagacgttgtacaagatgaattcgctggaggatcacgacgacgaagtgaccgccgagctgcccaccactgccgcggcacaggctttggttccaggcaagcgcctgtctgccaaccagcaacacgatcatcgcaatctgtacaagagtgtggatctcaaggccggattcgcgcacgagctgctcatccggaacgaggatcccaagagtgtgctcacctgggacttcgatgtgatgcgcaacgatctgcactttacgctctaccgggtcacccaggagcttccggaaaagaatgattccgccgtctcgtactttgatctgcaggacttcgtcgagggcgtcaattatttccgtgaggagccaacgctgatttgccggcacaaggagagcgtccaggggtcgcacgtgatgcatcacaacgacagctatcttatgcactggtttagtccatcgggtgcccagttaaacgtcttctacgaggtgctcagctcggccaactacaagggttcgatgaccagcctgcagtcggcattctcatcgaactcgtcggcggccagctcggtgcagagtcgatga

SEQ ID NO: 20277 - protein, 659 aa, DROSOPHILA
MVQKFQSPVRVYKYPFELVMKAYERRFPTCPQMPIVLDCEVIKDESLEDGAKRNTSRRCKLAVDAPYIFKKLIGVDHVYFLQHNFLDLANRTLSIEAVNESFSSRIEIFERCRYYAHPDNSEWTCFDQSATLDIKNFFGFEHSMEKMGMKQYTQTTLKGKEIIEFFIGQLREEGITHVERWTSPSDATKSPTLDQASDQQHSILLDGDFIARSLGQLSPMQESKLLELRKMLDGVDDLERVPSYQTILRFLAARDWHVSQAYAMLCDSLRWRREHRIDALLAEYSKPAVVVEHFPGGWHHLDKDGRPVYILRLGHMDVKGLLKSLGMDGLLRLALHICEEGIQKINESAERLEKPVLNWSLLVDLEGLSMRHLWRPGIKALLNIIETVERNYPETMGRVLVVRAPRVFPIAWTIVSAFIDEHTRSKFLFYGPDCAHMKDGLAQYLDEEIVPDFLGGPCKTMIHEGGLVPKTLYKMNSLEDHDDEVTAELPTTAAAQALVPGKRLSANQQHDHRNLYKSVDLKAGFAHELLIRNEDPKSVLTWDFDVMRNDLHFTLYRVTQELPEKNDSAVSYFDLQDFVEGVNYFREEPTLICRHKESVQGSHVMHHNDSYLMHWFSPSGAQLNVFYEVLSSANYKGSMTSLQSAFSSNSSAASSVQSR

SEQ ID NO: 20278 - DNA, 3102 bp, DROSOPHILA
cgtacttgaaagtgaaacaacacacaccagccgaacgaaggagatcgcagctcgaaatcgtcaattgaattaaagagctacgacaatctaaatccgcgttccactcgcgcacccggattccgcagactcgtccggcgcgagtttcgacttccaactggcaacggaagttagccacttgttgctccgagccactctgtcggagcttttatccgctccggagcttaaagctctccagcggagcggttacaacaagattcagatgcgaagtcgggggatttatgcactcgggttcataattatggtaatccttgtggacatgtgtccttgttttcataatcagtacacctataagcattaaagtggtaactttaagcaaaaactttctaatttgcatagaaatattctgattctatatattgacaggatacacatctttcaggccaaaaatatggttagcattttgcttatcgcagatatagaatacatcagtttgattaaacagcattatactcgatccgcgatgatcattaacaccctccaatttatggcagcaagcctctggttataaatcataatcgccatagtttaaatcagtgaccagttattataggtgcattatacttttaacctattgatctttaaaatcatgttaatccattattataggatcaaaaatgcagtagaaagccttaggtaaaagtcgttgtggtttttgtatactgataataatatggtcataaatcaaacagctaattgcattgtgcaatttatacaggtatatttgtgaagtaataccgcctgcggttgttgctaaaagattcagagacgaaacttaaggattaatagcgctatatattctgtttatataggtgtgagtctctgggcagcgtgcaggtatgtctggtcttaaatcaaatcacagctaaatgcatgggcaacgttatagctaattgcattgtcaaagtcatagcattccgtcctgtctatggcgcaatctcgcctagaccttctcgatctgaacgaatctctcgcgctgatactggtcactgtagccggcgatgaacttgagccggccctcgtacttcagattcataatggtcttcaccatcggcgggtggtcgttgcccagttccagccagagcttgccaccgggacgcaggtgccgacaagccaagtcgaaaaccagtcgagccaccctcaatccatcggacccaccgtccagggcattaaggttctcatacctggggatataagatagttagtgcactgcatccatctggtataacatcacttacaccacgacttcgggatgcagaaactgaaactcctcagttttcacatacggaggattggagatgatcaaatcgtacttcttgtccttcagcgcctccggcaggtacttgtcctcctccatggtgtggttgtgtacctcaaatcgattcagcagccccagcattttggcattctccgcagccagaacggttgccgccttgctacgctcaatggcagtggccaccacctgcggcagactgtgtagcatggacaaggacatggcgcccgagccgcagcccacctccaaaagatcgacgtgctttgcgttcttgtgatcatcgatcaccaggcgcataaactcctccgtttcggggcgtggaatgaagaccgacggcgatgtcttcagcgtaatgtccatgaagtcccactcgccaatgatgtgctgcaacggcatgcgggcacaacgggcctccaggaagcgctcgaaatccgccagctggccgggatttagctgcagctggtcaaatgagtcaggaaccgaactctacggaacgtaaacatggttagtgatgttgatagccagcttttctcacagatacttacaaacttctgcttcaggacatgcgacacgatgcatttcacgttgaacttcctgtcctcgacgccggcggccttgagcttttcctcccactgtccaatttccagggccttggtcacgggaatgtgggtgccagctggggcatttgtgccatagttgacctgcttaagcagccgcgaggtcgggcccattgaccgtgtcagttgtctgagcattatttcacttattatctaattgctattgattaacaacaaaattttgacgacccactgcctgcagttcgttccagcgtgaccgtttctcgaccgttacaataaaccagtggtcgatatttgaaaagtgttcacgcttcaagtgttaccgtagagcggaatagtgtgacttaattttcgagttcttggcggaaaatttaaacatgcaacataattaggttgttccaattaaatggaaaagcaatatcaagtgttcacgcactgattgcagtcggccctttttgtttattgttgcggaaataggtctattaagcataacaatatgaaaagggggagttataatggtgaattataataatatatgtatgtatgtacatgaataaaataactgtaagagaaagtagcaaagctcgttaagctttttaatactttttttaagaatattcctgactagcttggtctagtttaatgtaagtccctagtctgaaacgtaggaaaatagctaaactactactggtccatcaataatcaatgcaaattagaactggtttgaagcatatgagctctgacgtctatataatatgtaaattttataagaaaccaagagcattacataatcagatagatagttaatatattctgagatattctggatacaaaaataatgacttcttagcaaaagaacttccaactaaatgggtttacatagttaaggtaactcttttctttagaactcaagttggcacgaaaacaagaggtttgtttgcccagcaattgcttttatatgattagtccatccaacaagacatttccctgatatctatttaacaaccttgtaaatagagaatggcgcttgttcaaatatgggattggtctagagtatttctgcaaaagatccattgcttgaccaagaagtgaaaattcaatcgcttggccgtactaataatttttgtattttacaacatattaaaatattcatatcattacatgttctatatattgtatatattcacattacga

SEQ ID NO: 20279 - DNA, 989 bp, DROSOPHILA
agataataagtgaaataatgctcagacaactgacacggtcaatgggcccgacctcgcggctgcttaagcaggtcaactatggcacaaatgccccagctggcacccacattcccgtgaccaaggccctggaaattggacagtgggaggaaaagctcaaggccgccggcgtcgaggacaggaagttcaacgtgaaatgcatcgtgtcgcatgtcctgaagcagaagtttagttcggttcctgactcatttgaccagctgcagctaaatcccggccagctggcggatttcgagcgcttcctggaggcccgttgtgcccgcatgccgttgcagcacatcattggcgagtgggacttcatggacattacgctgaagacatcgccgtcggtcttcattccacgccccgaaacggaggagtttatgcgcctggtgatcgatgatcacaagaacgcaaagcacgtcgatcttttggaggtgggctgcggctcgggcgccatgtccttgtccatgctacacagtctgccgcaggtggtggccactgccattgagcgtagcaaggcggcaaccgttctggctgcggagaatgccaaaatgctggggctgctgaatcgatttgaggtacacaaccacaccatggaggaggacaagtacctgccggaggcgctgaaggacaagaagtacgatttgatcatctccaatcctccgtatgtgaaaactgaggagtttcagtttctgcatcccgaagtcgtggtgtatgagaaccttaatgccctggacggtgggtccgatggattgagggtggctcgactggttttcgacttggcttgtcggcacctgcgtcccggtggcaagctctggctggaactgggcaacgaccacccgccgatggtgaagaccattatgaatctgaagtacgagggccggctcaagttcatcgccggctacagtgaccagtatcagcgcgagagattcgttcagatcgagaaggtctag

SEQ ID NO: 20280 - protein, 323 aa, DROSOPHILA
MLRQLTRSMGPTSRLLKQVNYGTNAPAGTHIPVTKALEIGQWEEKLKAAGVEDRKFNVKCIVSHVLKQKFSSVPDSFDQLQLNPGQLADFERFLEARCARMPLQHIIGEWDFMDITLKTSPSVFIPRPETEEFMRLVIDDHKNAKHVDLLEVGCGSGAMSLSMLHSLPQVVATAIERSKAATVLAAENAKMLGLLNRFEVHNHTMEEDKYLPEALKDKKYDLIISNPPYVKTEEFQFLHPEVVVYENLNALDGGSDGLRVARLVFDLACRHLRPGGKLWLELGNDHPPMVKTIMNLKYEGRLKFIAGYSDQYQRERFVQIEKV

SEQ ID NO: 20281 - DNA, 4457 bp, DROSOPHILA
caatgtgccaggcgccgtgcccacaattagtcaccacgtgagcatgatgaacggtcatctgaaaaatcgcggaagcgccgtggggagtggaaaaccccacggtcagatgatgaacggacatgttcccggcagacccggaaccggacccgttggccaacctgcacccgtcgatttccggcacatgctggaggaggccgagcgatatccggtcgactcatatatgtagatgtaggcttaaaggaatccgtagtgcagacggatattcaagttttatatagttttctaatcaacctatactaagcgtactgttaatgctgatttgttgaattatcgatagtagttcgggggaccaatgcgtaagttagtccgtctagattaagagttagaagaattcaattcaatactttatttcactagacgagtaccgatttagaataagagtgcgttaggggtagactttagaatgtacgattttaataaaatcacaagagttgaaagttgctcaagaaatttattataatccgctactttcttcgaaaaaagatctgggggacaattgaccttaaccgattgcggtgttgcattaaatgttgcgtatcttggttaacaacgttgacttcaacagagccaatctggtggatgggatttccttgcctttccggactattgtgattgcgccattccaaaaattataatctttcttatcttcatcaaagtctccagtatcaaattcgacataaaatttgataaaagtatttcaactaaatacttttctgacgaatgattgatgttattagtcaactgataccaaaagtttggttaacgaattctctggaatttatatagcacttcattctcctaagctgtcggttggcccttaaaattttttataacttgttcatctggcttgggaatgctgctagcaaaggaatgcagttgaaaacttatgtaaggagttttaaactaaacttaaactttattttgtacataagagacttaatcagtggaggtcactaaagcaaatacaatatagttttgcaagcttatcatcgatgcatgtggagtcttccttgtatgaattcgttctgctgattttctccacatttacttgagcattttgggtggaattatggtataccactgtggcctggaagtcagcactattctgcttcactttaaacttaatacgataaaccgctgtttccgattccatcagtgtttggtgccaatcgatgttaagaccggtttttatctcagtcttatgcacataatttagcgtcagattgctgcaaagactggttaagttcttttgaacgaaatactcgttcattcgatcgatcacactgtgggcaataggagtcgtccaatcttgtcccgagataatcttgtagggttcgcaggtgcaccagtgctcctcaatgccggcttccgaacacgttcgaccctccggcaggggatagaatagcgactgacaggtggggcaatcgaaggacttgggtaactctcgaccatctggggtgcctccaatctctatgatatgtttcagcgtattgtgaagatcaaagttggaactaagcctgtgctgattcaactccagtgcccttacataagatggatatgtttcacgaaaccacgggggcagatatataaacatcatgggcagccgctcctccagaaagccctccttcagataggtcaaatcgccaaatctggttccgtggtcggcgaaaaatatcattatcatttcttcgaattgcccatccgcatgcatatcgatcaaatctcccagcaccttttcctgcattgctgatggcataaagggatcatcgtgactgaagtgattcgaccaaaacattccccaaattggtcgatcgtgaacaaaacgcttcgtgaactgtaggccatagtcgtagatataacgattcgctatccggcgacccaaacagtatcgcatgtagtcatgttccggcaatcggtacacatccatttcggactccagtgctctaagcaatgggcgaaagtaatagtccatcggctttttggaaaagccgggctttaggtagttgaaatgattcgagttactctcgtcctccgcgtatcctgtcaaatagctggcattcttgaaatacttccatatcattggcatctcgtccaggcagccctgtttatccgtatcgcagacattttccttagccgtactagctgaatatccactgagaatagcgagtatgttggggaatgagttgtcggcaacctgaaaaaatatttttttaactattaatgacaccatatttcaattgtaactataaaatcttgtatttttttaaagtattcttgtcttacatatgtatatttatattttcagatggttatgatgtttcagatagttactcaacacgtctcttatctaaataattatttatcttatctgatgatcaaagatatttactctcgatgggcggccgttgtcgcatggctgccgtaaaaatggtcaatatttaacaatataaacagttgtacttgtggttgctttattaagttttagcgatataagcatgcatttaaataatgagaatggccgttattgcttctaacaaataatattaagtaatatttaaaaaagatatatataatatacttatattcctaccttattgtatccttgcatctcgtaccatcctgggccctgtagaaagttaaaaaccttgggcatagtgcgtcttaagtttattcgggaaagagagtcgataccgtacattatcacgcttggcttccgagctgccctgggtcttatggagtccttgggcaacggccgatgctggatgaaggcgaaggcgtccttctgaaggacaactatcggatcatcagccgtctggcactcgacgatcattccctccacatgaactggcacctcgtaaccactcgtgaaatattttttggccttgagactgcgaaatatttgttgatgaatgactaatgtttttcaagcagaaaaggggggttaccacttgtcttacttgtcgtaggtatctgcaatctttccatatttgatttcgcggtaaaagcaattatagtccttgtctgtgaaattaagcaatttttgagcgacttcatcgtcgatgtgcagaatatgccgtttgataatttcattgtatgttgttgatatgagatcggtctcattcgagcaggtgattagtgtttgcggtttgtacaactccatggcttcgtcgttgaaaggatccacatagggtatatggcacttggatgttttcacaaagaatttctgcggttcagcctttaccgaaactcgagaaaatcgcgtagtaggcggatataaatcatgatttgtattcgaagaagtattcgatgaatatattagaaaaagcacgatggtcaaaaagcagcacagggcgagaaacttgtagagcgaatagctggaacaaattctcaactccatggtgttccttcgaccacattaacgacgctactgagacgaagtggaagagaataccactaaataagaatagcccgggctttgttatcatttcttatgaatgaaccacgtagttattctcgtaaatttgttcccgagcccactctcgaacttcttcacccatcggctgtcaaaaactggaatgtcaagcagcacgagcagtgatagagggcaggttcgggaattttgggcaaacaccacgtagaagtgcagtgcagttcgatgagttcagtcaattctttttgtagaaaaaaaaaaaaacaatgtttaaagttagattagctttaagttctaatcctttatgagctgctcgctaaagcgaacgtacgtttttaggtctataaacctgttgacggaagtcattatcttacaagtatttgcaacacaattgaaatagcttccgcaaatatacttcaaagtttatagtttagtaaattagtaaaaagaaactgcaagttgaaatatatatatatatatatattacatacaaatattactggacaattcatgtgctttcattgtttcttaactttgataggcatatgcagaataacttttgaatattatcgtctaaacagctcgcatccggtctgtatatattaattcggctgattagttccacattgatctgaagctcttcggtttttctgtcgtagagaacggtggcaaagaactcagccaaattctgatgaacctggaatttggtatgataatgtcgcaatccctttcccagacttacgtgttcgtcgctctctgttattcttacttcggtgatgttgactaacttcagggtgagactgctacatagattctgtaggttatgatattgaaggaattggttaatgcgatcgaccaccagttcggccatgcgccacgtcccgtggtcctcctggacttcctcgtagttgtggcaggtacagtaagcctccggtatggcagcctctgagcagcttcgactttctgg

SEQ ID NO: 20282 - DNA, 1992 bp, DROSOPHILA
atggagttgagaatttgttccagctattcgctctacaagtttctcgccctgtgctgctttttgaccatcgtgctttttctaatatattcatcgaatacttcttcgaatacaaatcatgatttatatccgcctactacgcgattttctcgagtttcggtaaaggctgaaccgcagaaattctttgtgaaaacatccaagtgccatataccctatgtggatcctttcaacgacgaagccatggagttgtacaaaccgcaaacactaatcacctgctcgaatgagaccgatctcatatcaacaacatacaatgaaattatcaaacggcatattctgcacatcgacgatgaagtcgctcaaaaattgcttaatttcacagacaaggactataattgcttttaccgcgaaatcaaatatggaaagattgcagatacctacgacaatctcaaggccaaaaaatatttcacgagtggttacgaggtgccagttcatgtggagggaatgatcgtcgagtgccagacggctgatgatccgatagttgtccttcagaaggacgccttcgccttcatccagcatcggccgttgcccaaggactccataagacccagggcagctcggaagccaagcgtgataatgtacggtatcgactctctttcccgaataaacttaagacgcactatgcccaaggtttttaactttctacagggcccaggatggtacgagatgcaaggatacaataaggttgccgacaactcattccccaacatactcgctattctcagtggatattcagctagtacggctaaggaaaatgtctgcgatacggataaacagggctgcctggacgagatgccaatgatatggaagtatttcaagaatgccagctatttgacaggatacgcggaggacgagagtaactcgaatcatttcaactacctaaagcccggcttttccaaaaagccgatggactattactttcgcccattgcttagagcactggagtccgaaatggatgtgtaccgattgccggaacatgactacatgcgatactgtttgggtcgccggatagcgaatcgttatatctacgactatggcctacagttcacgaagcgttttgttcacgatcgaccaatttggggaatgttttggtcgaatcacttcagtcacgatgatccctttatgccatcagcaatgcaggaaaaggtgctgggagatttgatcgatatgcatgcggatgggcaattcgaagaaatgataatgatatttttcgccgaccacggaaccagatttggcgatttgacctatctgaaggagggctttctggaggagcggctgcccatgatgtttatatatctgcccccgtggtttcgtgaaacatatccatcttatgtaagggcactggagttgaatcagcacaggcttagttccaactttgatcttcacaatacgctgaaacatatcatagagattggaggcaccccagatggtcgagagttacccaagtccttcgattgccccacctgtcagtcgctattctatcccctgccggagggtcgaacgtgttcggaagccggcattgaggagcactggtgcacctgcgaaccctacaagattatctcgggacaagattggacgactcctattgcccacagtgtgatcgatcgaatgaacgagtatttcgttcaaaagaacttaaccagtctttgcagcaatctgacgctaaattatgtgcataagactgagataaaaaccggtcttaacatcgattggcaccaaacactgatggaatcggaaacagcggtttatcgtattaagtttaaagtgaagcagaatagtgctgacttccaggccacagtggtataccataattccacccaaaatgctcaagtaaatgtggagaaaatcagcagaacgaattcatacaaggaagactccacatgcatcgatgataagcttgcaaaactatattgtatttgctttagtgacctccactga

SEQ ID NO: 20283 - protein, 663 aa, DROSOPHILA
MELRICSSYSLYKFLALCCFLTIVLFLIYSSNTSSNTNHDLYPPTTRFSRVSVKAEPQKFFVKTSKCHIPYVDPFNDEAMELYKPQTLITCSNETDLISTTYNEIIKRHILHIDDEVAQKLLNFTDKDYNCFYREIKYGKIADTYDNLKAKKYFTSGYEVPVHVEGMIVECQTADDPIVVLQKDAFAFIQHRPLPKDSIRPRAARKPSVIMYGIDSLSRINLRRTMPKVFNFLQGPGWYEMQGYNKVADNSFPNILAILSGYSASTAKENVCDTDKQGCLDEMPMIWKYFKNASYLTGYAEDESNSNHFNYLKPGFSKKPMDYYFRPLLRALESEMDVYRLPEHDYMRYCLGRRIANRYIYDYGLQFTKRFVHDRPIWGMFWSNHFSHDDPFMPSAMQEKVLGDLIDMHADGQFEEMIMIFFADHGTRFGDLTYLKEGFLEERLPMMFIYLPPWFRETYPSYVRALELNQHRLSSNFDLHNTLKHIIEIGGTPDGRELPKSFDCPTCQSLFYPLPEGRTCSEAGIEEHWCTCEPYKIISGQDWTTPIAHSVIDRMNEYFVQKNLTSLCSNLTLNYVHKTEIKTGLNIDWHQTLMESETAVYRIKFKVKQNSADFQATVVYHNSTQNAQVNVEKISRTNSYKEDSTCIDDKLAKLYCICFSDLH

SEQ ID NO: 20284 - DNA, 7316 bp, DROSOPHILA
tgtcagttgtctgagcattatttcacttattatctaattgctattgattaacaacaaaattttgacgacccactgcctgcagttcgttccagcgtgaccgtttctcgaccgttacaataaaccagtggtcgatatttgaaaagtgttcacgcttcaagtgttaccgtagagcggaatagtgtgacttaattttcgagttcttggcggaaaatttaaacatgcaacataattaggttgttccaattaaatggaaaagcaatatcaagtgttcacgcactgattgcagtcggccctttttgtttattgttgcggaaataggtctattaagcataacaatatgaaaagggggagttataatggtgaattataataatatatgtatgtatgtacatgaataaaataactgtaagagaaagtagcaaagctcgttaagctttttaatactttttttaagaatattcctgactagcttggtctagtttaatgtaagtccctagtctgaaacgtaggaaaatagctaaactactactggtccatcaataatcaatgcaaattagaactggtttgaagcatatgagctctgacgtctatataatatgtaaattttataagaaaccaagagcattacataatcagatagatagttaatatattctgagatattctggatacaaaaataatgacttcttagcaaaagaacttccaactaaatgggtttacatagttaaggtaactcttttctttagaactcaagttggcacgaaaacaagaggtttgtttgcccagcaattgcttttatatgattagtccatccaacaagacatttccctgatatctatttaacaaccttgtaaatagagaatggcgcttgttcaaatatgggattggtctagagtatttctgcaaaagatccattgcttgaccaagaagtgaaaattcaatcgcttggccgtactaataatttttgtattttacaacatattaaaatattcatatcattacatgttctatatattgtatatattcacattacgattgcacaattatttcaaaaacgaaaaataaatcaacggacacaataggtaacaaatttttacaagtctcctttaagtactgaaatcaatggaatttccgtgcactaactacagtttggggaatcataaagttcatcaacggtatacgaaagatttacaaataatcgaaacgactactatccgtccatcagtctatgcgtccatgcagatcccctacatcttaaaggtgtccgtgcaagggatcgcggctgtcccgcaggtagacgggactggtgaacgacttgccctccacatgcgaggcgagattctcgccggcgtaggtgacgaagggcgagatctcgcagacttcgccatgcacaatgccaccggcgccttcgatatacttcttgtgcaggcgatggaggtccgagcgggcagtactggggcaatccttgccagctgcatcggagttctttagcgcgctgaactcttcgtcgcgtggcacttccatggccacgaacttctgggcgaactcgaagacgtcaaagacaaacttctctatcttgatgccgttcggcttgtcgggcgttagacgcttgccggcgttgtccacgaagggaatcttcttcttggccacgtgcagcttcagctcctgctcgtatgtgctgccaatcttctgcaggaagttcgagctgaagaagtgattgcaaatgttgccagcactgaaggtcagcctgccgtctgaattgcgcatctcggctgttttggccgagatttcgctgtactccaccacctggtatttgccatcgacaatggccaccacgcccacagcctcgttgggagctgccttctccaccaccttagcggcgcagtcggccttctcctgcacgcagtagccgataaaaacgggatcggccaccttgatcaggatgttgtccacgctatgggcatgcagatataagacaccacgcttctgcatatcgtccagaatcccctggcgcttcatagcccgatagattcctccgttgccgtccggcgcacgcgccacccgatgcttttcgtccagaatgatgcgtccatcgtattcaaagcacggcagtgatccctgctcgaacaacagtacgttctccgccttcaggccaaagaagttattggccacaaagtagtcgtatgtgggttgcaccgtgtgctccgacgtcatgatgtaccaagtgatgtgtccacgttttccattcgcctcttgggcgagctcctccagcttcaggattcgctcggcctgaatgcggaacagggtctttcgagactgcagtcccacatcgtacattcccttgggatgatcgaagccaagtcgtgtgcctgcaaagagaaaggacaacattacgaaggtttccaccaatacagttccccaatataataattattgcagtatgtatatagataacaattcctgaatgtattaatcacttgttaacgacaagaactgctgcattttttatatctcacccggctgaccttaaaaacaagtttattttcgaccatcgtttcgctctttaggttgtcttttgtctgcgccttttttaacatatatgtatataagatacaagctggcttgtttaaggtcagttccactaccggtttcaaaatgatctgactacatttaatctacggcttatcggtacagcaaacggaacctccactcctgaccagaaattctcagaaatcagaaaccgttatctaggttcactacttatgactcttctcgaatttgaacgtgcaagaaataatgctatgagcaatcggtgttcaactccgtttcttggtttctcaaaagacaattacgtgattggactccagcgtttgcccaagaaactggtaaggaaatgtcaaatgccgcccacatttcaatgtttcgattcgaaagagcactggccccgcctgaaatcaaaatgagaaaggcaagtctggggctgtaagaatgccttccacattgctgctggcctggcgtgtttcttagttttatacgctttttgtcttgcaaacggaattacaattgcaattattacaatgcagctgcatgagtgggcagctgattgggattgcgtgtatttgtgagcacttttatatcgagttaattagcttttataaagcacacacactctgcgaatgctcaagtttctgttttagttcggcttacactatgttttttgctcgcaaaggcgcaatttttttttttgatgggtagccgattggggcatgataaaaatatctcaacttgtacggtatctaaggaagtatctttcagagatacaagcaaatgtgaactctgaaacgaacgaactatgagtgcaatggaaaatttctttacttgtagcctttgatttgtatatattttgatttttaaactgactaccatatcgtgctcgcgcattggaaacgttaaaaaccattatggtaagtctcaaaacgaaaatcgttcattttcgaataacctaatcgtttttgctatcaatgattgacgacttaaaatccattgctatctgaagtttatataaacgccatacaacactaccaactggacccacaaaggtctgtcccacttccagtgcgtcaaattgctccataatcacactattgacttaaatatgctaccaactaaacacaggtgtactatttccctagctattattctgttttttctgttaaattagagaaactccagctcaccttgtccgcctgccataagcagcacagcgacatgtccgttgctgatctggaggagaccctcgtctcggtaggcgtccaatttctccagcggcgccctggcaatggagattagcttgccctcgggcagcggctgcaggcgatcgtccagcttgatgccattctcgttcattgagaccgtggcgcggtcgaaatacagcttgatctcgtccagattcagctcctcgatgtcccgcaccaggtcgatgcgttcgtcattcgttagttccggccagaacttgagcaggtgctcctggcccacctgggcgagtcgcgagtgcagcgacaggtagtccgtcattgttggcgaagttttggctgcgtttggtgattttgatgtggcaccgccagctgcaagaatccagagacaagatatttgactaacaaattataaacaatagagacaaaatattattacgcggtatcctacttaatacgttatattcttcaccataattttggaacattttaaatgcgaacacacagttaaaaacaaggttttatctttagagatcacattggaatcatatattaattgctgctatctgtttgttaattcagctaatggaacgggctctcccgaaggtgtgtatttacgtttctctccgctggctgactgattatttggcgaatgcggtaaaaagacagtggtcgggttgtccgggctttgttgcgttccgctatacgtggtaaccaaagcgcaactgagcgccaagcgatcgccctcagtggtttttcttgctcaaagtggagccgtcagacaaccaccatcgccttcgcctccatctggttgtgtctctgtgggaacgcctgaatatctgaatggcagtagctcgtgtgcaggttatattggtatctggtatttgggcgcgaatgtgtgcgaacgtgtgtctcttaacgtatttgcagccgcgttttaacatggccacgccagttgttttggccataccctgtaaaaacctgaagggcgggatcgcgatcatggcggaaaatgtgcccaatcaatcacagtctctttttggtattagatactacattgtttaattataatctgtttcagaaagcgaaagagaaacatattccttataggtgaaacgtaaaagttataattataatttaacagctttgcttcgtatttctacatatgtagatataaatatttgtatgtatgtacatctgttaagtgatcttaatgagctcaaccttgtttttattaaaattgaataagaggaatgcgggaattcccaacgacttaagacttaagaacatgtaacttgtgagtgagggtatcaattagtcgtgtctgcggtcggctctcttgattacacggctgatacggctactgggactgcagcaatttcaatcggattttcgctgcttggccaattcgccaagcagcagcgtgttgcaaatgcaaagcgaaatatcagaaaccgaaatcgaattcgaaaccaaatggccctgaacacgggctttagttttagtgaaagtaagaggtgccacagtccaagaaacgccagccacaaggaaactcctaagggcgacacatatttatatatagttcatacagttcagttcctgataaacgggttacaaactagttgagtgggttatcgggatttgttggaaaggttatggcattaaggcgagccaagaactgacaaaaacatggcaaaactaagtcggtgctcagccggtttattcggttttaatacccattaacttaagcgcaatggtttatattaaatattatggaatggaaaagtaagcgcaataataaggtatcaacaagaataacagtaattgaaaaatatcaccattatatgcatctttataagataagataagatgtcatataaataaaaatgtataaatgtataacaaatcaatatatatctatatcgatttaaggaaaacggggtaaaaaatacatttaaggagtgataagagggtattttacattcgctacactgaccattattgttgtttttgccacgaagcaaaacacttgtctgcatgtatgagtgcgcataaaaaaaaagataaagctgcagcaacaaaaacactccccgcacacacacacacacacacaagtacccaaaaacggaacaaaacagcgatagcaagtaagttgtttacatacacccactgctgtgtgtgtgtgtgtgattgtgggctttccgcttttttcttatcgcagctctgggctccaactattgcgctaccattatcagtttgctttttcgagtgggtttttaccaactaaccattgcggtggcgcctcacatgagtctgctggtgatgcgaactgaagttgctgcgacccattttgtctgggaacaccctgtattacttttggctccacttcactccgtgcgaattgtttatgcagtgactgtgcctcgtccgtcgaggattctatggcatcgtgctagtcctgacgaggtttaattcacactgcgtgcggctgttgattacatgggcaaacggaaaatgcacaatccgaatgaaacagtctcccaagaactgggcggagaatcgatatcgattacaagcgaatccagctggccgccagtgtgaccgttgaggggtgggcgtactacgctgggccatcgaaaaaataccaagtgcataattcgaaaaatattaaaaattaaatacaaaaacatacaaagaattattattaaaactttatttttcgaaatttttgaatttttaaatctattttataatgtcagactttattttaccatttttcgttaaaattactatagttaaaaatttgttaatctggcattaattgacgttaattaaacattctgaatgaatgtttgttcggtaaaatggcttaatctttatatatacgcgtataatgaatgtacatttcttaagaaaaaatctttgcttagaagtggatagtaaaatattgcaaacacatatattagcaatttaaaaattttttttaaaagtagtaaaggcatgaatggcatatgaacgaccccactgcaattgttagtaattcgcatacgttttcagcattcataagcttttcgagtcagaaacaacgacattttcggagttttaaatatatttacagttattaactaaataaagcatcattttcaattacatgtaaggactacaacagaaagtatgcatctatgtaagggctctagtattttcataacgcccggaaggtattggtttaggctgatctcatattactccgccgctcctagcagcatggccggcggtgtgcgcagcaagcaagcgtaagtctacaggacactacgaaacacacgaacggtaattacaaaatgggaacactgatggggggtacgtacttgatgcagaatcatacaaaacatgggcgtaaatcattagatcattcgtttaaatatcaaaaattcattaatatatgcatagaatcactgtctaggccatcgaagacgtggttggtacgtcgtccaggttaataagggtcgcctcgacacctccgctggaggaggattcagcaccttgacccggaacattaccctcctt

SEQ ID NO: 20285 - DNA, 2032 bp, DROSOPHILA
atcgattctccgcccagttcttgggagactgtttcattcggattgtgcattttccgtttgcccatgtaatcaacagccgcacgcagtgtgaattaaacctcgtcaggactagcacgatgccatagaatcctcgacggacgaggcacagtcactgcataaacaattcgcacggagtgaagtggagccaaaagtaatacagggtgttcccagacaaaatgggtcgcagcaacttcagttcgcatcaccagcagactcatgtgaggcgccaccgcaatgctggcggtgccacatcaaaatcaccaaacgcagccaaaacttcgccaacaatgacggactacctgtcgctgcactcgcgactcgcccaggtgggccaggagcacctgctcaagttctggccggaactaacgaatgacgaacgcatcgacctggtgcgggacatcgaggagctgaatctggacgagatcaagctgtatttcgaccgcgccacggtctcaatgaacgagaatggcatcaagctggacgatcgcctgcagccgctgcccgagggcaagctaatctccattgccagggcgccgctggagaaattggacgcctaccgagacgagggtctcctccagatcagcaacggacatgtcgctgtgctgcttatggcaggcggacaaggcacacgacttggcttcgatcatcccaagggaatgtacgatgtgggactgcagtctcgaaagaccctgttccgcattcaggccgagcgaatcctgaagctggaggagctcgcccaagaggcgaatggaaaacgtggacacatcacttggtacatcatgacgtcggagcacacggtgcaacccacatacgactactttgtggccaataacttctttggcctgaaggcggagaacgtactgttgttcgagcagggatcactgccgtgctttgaatacgatggacgcatcattctggacgaaaagcatcgggtggcgcgtgcgccggacggcaacggaggaatctatcgggctatgaagcgccaggggattctggacgatatgcagaagcgtggtgtcttatatctgcatgcccatagcgtggacaacatcctgatcaaggtggccgatcccgtttttatcggctactgcgtgcaggagaaggccgactgcgccgctaaggtggtggagaaggcagctcccaacgaggctgtgggcgtggtggccattgtcgatggcaaataccaggtggtggagtacagcgaaatctcggccaaaacagccgagatgcgcaattcagacggcaggctgaccttcagtgctggcaacatttgcaatcacttcttcagctcgaacttcctgcagaagattggcagcacatacgagcaggagctgaagctgcacgtggccaagaagaagattcccttcgtggacaacgccggcaagcgtctaacgcccgacaagccgaacggcatcaagatagagaagtttgtctttgacgtcttcgagttcgcccagaagttcgtggccatggaagtgccacgcgacgaagagttcagcgcgctaaagaactccgatgcagctggcaaggattgccccagtactgcccgctcggacctccatcgcctgcacaagaagtatatcgaaggcgccggtggcattgtgcatggcgaagtctgcgagatctcgcccttcgtcacctacgccggcgagaatctcgcctcgcatgtggagggcaagtcgttcaccagtcccgtctacctgcgggacagccgcgatcccttgcacggacacctttaagatgtaggggatctgcatggacgcatagactgatggacggatagtagtcgtttcgattatttgtaaatctttcgtataccgttgatgaactttatgattccccaaactgtagttagtgcacggaaattccattgatttcagtacttaaaggagacttgtaaaaatttgttacctattgtgtccgttgatttatttttcgtttttgaaataattgtgcaatcgtaatgtgaatatatacaatatatagaacatgt

SEQ ID NO: 20286 - protein, 520 aa, DROSOPHILA
MGRSNFSSHHQQTHVRRHRNAGGATSKSPNAAKTSPTMTDYLSLHSRLAQVGQEHLLKFWPELTNDERIDLVRDIEELNLDEIKLYFDRATVSMNENGIKLDDRLQPLPEGKLISIARAPLEKLDAYRDEGLLQISNGHVAVLLMAGGQGTRLGFDHPKGMYDVGLQSRKTLFRIQAERILKLEELAQEANGKRGHITWYIMTSEHTVQPTYDYFVANNFFGLKAENVLLFEQGSLPCFEYDGRIILDEKHRVARAPDGNGGIYRAMKRQGILDDMQKRGVLYLHAHSVDNILIKVADPVFIGYCVQEKADCAAKVVEKAAPNEAVGVVAIVDGKYQVVEYSEISAKTAEMRNSDGRLTFSAGNICNHFFSSNFLQKIGSTYEQELKLHVAKKKIPFVDNAGKRLTPDKPNGIKIEKFVFDVFEFAQKFVAMEVPRDEEFSALKNSDAAGKDCPSTARSDLHRLHKKYIEGAGGIVHGEVCEISPFVTYAGENLASHVEGKSFTSPVYLRDSRDPLHGHL

SEQ ID NO: 20287 - DNA, 4129 bp, DROSOPHILA
tcctgacgaggtttaattcacactgcgtgcggctgttgattacatgggcaaacggaaaatgcacaatccgaatgaaacagtctcccaagaactgggcggagaatcgatatcgattacaagcgaatccagctggccgccagtgtgaccgttgaggggtgggcgtactacgctgggccatcgaaaaaataccaagtgcataattcgaaaaatattaaaaattaaatacaaaaacatacaaagaattattattaaaactttatttttcgaaatttttgaatttttaaatctattttataatgtcagactttattttaccatttttcgttaaaattactatagttaaaaatttgttaatctggcattaattgacgttaattaaacattctgaatgaatgtttgttcggtaaaatggcttaatctttatatatacgcgtataatgaatgtacatttcttaagaaaaaatctttgcttagaagtggatagtaaaatattgcaaacacatatattagcaatttaaaaattttttttaaaagtagtaaaggcatgaatggcatatgaacgaccccactgcaattgttagtaattcgcatacgttttcagcattcataagcttttcgagtcagaaacaacgacattttcggagttttaaatatatttacagttattaactaaataaagcatcattttcaattacatgtaaggactacaacagaaagtatgcatctatgtaagggctctagtattttcataacgcccggaaggtattggtttaggctgatctcatattactccgccgctcctagcagcatggccggcggtgtgcgcagcaagcaagcgtaagtctacaggacactacgaaacacacgaacggtaattacaaaatgggaacactgatggggggtacgtacttgatgcagaatcatacaaaacatgggcgtaaatcattagatcattcgtttaaatatcaaaaattcattaatatatgcatagaatcactgtctaggccatcgaagacgtggttggtacgtcgtccaggttaataagggtcgcctcgacacctccgctggaggaggattcagcaccttgacccggaacattaccctccttgggcggtggcgccggcattggtattgcaatcgggctcatggtgctgatcatgcgcggctccgcccgcgacgttgtgatgggcagctggctggcgctgccggtggacttcaggaagtcgggctgcggcatctgagcaggaccgggcccatgactgtgtcccgctccatgactatgactatggcccgctccatggctgtgactgtggccagtgccgtgactgtgatgcttttgctgctggtgcggcgcgtgctggtgatgatgatgttgcagctgctgctgctgcgggaacgacttgggcagctgggcgtggcggctggagtccgtggcctttaggcgctcacttagcgccttcaaggcaatttgtctaggatcgaagaaaaaaaatcacaatgtaaacattataattatttaggctaatgcaaaaactcttatctaatgagcaattattagcctgttgtgattaaatgtttagtggctctttagataagcgtacttaaattgatatcgagacaatccagttaaactgctagcttacttaccgccttctctcaatgtcatgcggatccactcccggcatttgcaccgataccgacgtcaggctggccgtagatatcgtccgcagcggcgtgggcgtcttgaccacgcccgcccgcaaacagcaattgtaaatgggattaaccaatacgctgataaacggctgtgatacgtttgggaagaagctgacgaacgtgaagctctccgagctgtcgccacgcccattgggatggtgttgatagaagcggagatagatccaagaaaccagcgatccggaggcgaacatagccggataagtgccatctagcaggccaatggcccacagtatgatggccatgatgagcaccgtgaggggaacgttcctgagtagtaaagagtacatttgtatattcaagtggcggctatgattcaggatttactttgagaaatacaatatagtatcttaaacaatggtgtgtttgttattatttacaaagtatcatttcatagaattctcgagggtatttacttgcgcgttagtaaaccaatatttattgaactttgacccaaagttaaagggctgatgagccagtaaattctattcaatttattgagcttgcgcccatttaaatctaggggcagagtatgaaaaattaccgctctttgattctgtgaatgtatctttttaggtttaaagccatatttggaaataatcgagagatttctaagactaaactttctaaagcgagctcttagctaccgtgtgactctgaaatggaaacatatcaatcaattatctcacctattggtcagacgtccgtagcgcgtcttgaagatcaggtgatcgggcattatctggcgtacggctacgcagatgccagccacgtatccggccaggccgtgaatgtgcacctcgaagagaatggtcgggttcttggtgaccatgtagtagaacaaatagtagacagtggtcagcagcgagacgccaaagttgctcagcgcgaagaacttgaacatctccagctggccccagagcggttccagcatcttgccgcacaggccgacggtgaccacgtcgacggccacctcccaccagtgcagctcgatgaagcagaacgtgaaggcggtccatatccagaacttgccattgggcaggatgtaaccgggagtgacgctgagcagcaggatggccgtctccgagaaggatagcaggtagccgaacgtggtcaccacgcagatgagcgttatgaccggcgaggtgttgtgcagcagagcattgagctgttgccagatgtacggccagtttctggccagttgagctgacatggcaccgatcgcttctcctggtgttcgcacgcgtttttcgttggcctcgcagctcctgggcggcggactggaaccgggtggtcttgaatgcgctgcggtgcttgtctgcctcgcaactcaacacgttcgaggggccttaaagtggttcatttgctaatatttacgaatttgcttcacaattacaataacaagactgtcatcgaagtggaaaggcgtagctatcgtttatcgattgtttcgctacaacgtgaccagaccgttacccagtataaatccttttaatttggccacaccagtaattggtaattgtacttttgaactaatggcgccattttgtaagctaagcttaaacatttacttgtaaaaaaatgttgtatcaataatattgctgttttcttccgcagacccaaaagtaatacaaacaacgtgtttatttaaaaaagttatctaatttacgttttattatgacaatttgtatgcatgtgttcgtttgatgtacatcttcgctttaataatttcaatgtctccatttcacgttgtatttaaagtataattcaattgatttaatattaaaacaagtaattgcattgaaattcaatcaattcgcagaaatattgaactcaagcaatgtagtctcacatttgaatacaactaaaaactattcaaaataaagggtctctcatccgcttttatgtacgcttctattggttgggaagatgaaaaatagcagccaaaggccttacaatttacgcttactgtggttgttttgacagacgacgaaaaaaacaaagcaggttattaagtttgttttaatgggagcgagcgtatgggaagtatgatgaagtattagttgttgctgattggatcgcaggtgatcttcttgactgcttagaacagcagcgtgcccatgccgcccatttcggactgctccttaacgaaaatctcaaagtattggtagatgatggtcacagccaacaggatacccgtaccggagccgatggcccccaggaagtcggccatcacagacagagctccgatgcagagaccaccgaaagcagccgccgttgggatgtagcggttgagctcgtggatcatcgagttctcgcgatggccacgcatcaccatgtgctgctccttcagctgcttggcaacctgcaagaggaaagtcaaaaaggatcggta

SEQ ID NO: 20288 - DNA, 1535 bp, DROSOPHILA
taattgtgaagcaaattcgtaaatattagcaaatgaaccactttaaggcccctcgaacgtgttgagttgcgaggcagacaagcaccgcagcgcattcaagaccacccggttccagtccgccgcccaggagctgcgaggccaacgaaaaacgcgtgcgaacaccaggagaagcgatcggtgccatgtcagctcaactggccagaaactggccgtacatctggcaacagctcaatgctctgctgcacaacacctcgccggtcataacgctcatctgcgtggtgaccacgttcggctacctgctatccttctcggagacggccatcctgctgctcagcgtcactcccggttacatcctgcccaatggcaagttctggatatggaccgccttcacgttctgcttcatcgagctgcactggtgggaggtggccgtcgacgtggtcaccgtcggcctgtgcggcaagatgctggaaccgctctggggccagctggagatgttcaagttcttcgcgctgagcaactttggcgtctcgctgctgaccactgtctactatttgttctactacatggtcaccaagaacccgaccattctcttcgaggtgcacattcacggcctggccggatacgtggctggcatctgcgtagccgtacgccagataatgcccgatcacctgatcttcaagacgcgctacggacgtctgaccaataggaacgttcccctcacggtgctcatcatggccatcatactgtgggccattggcctgctagatggcacttatccggctatgttcgcctccggatcgctggtttcttggatctatctccgcttctatcaacaccatcccaatgggcgtggcgacagctcggagagcttcacgttcgtcagcttcttcccaaacgtatcacagccgtttatcagcgtattggttaatcccatttacaattgctgtttgcgggcgggcgtggtcaagacgcccacgccgctgcggacgatatctacggccagcctgacgtcggtatcggtgcaaatgccgggagtggatccgcatgacattgagagaaggcgacaaattgccttgaaggcgctaagtgagcgcctaaaggccacggactccagccgccacgcccagctgcccaagtcgttcccgcagcagcagcagctgcaacatcatcatcaccagcacgcgccgcaccagcagcaaaagcatcacagtcacggcactggccacagtcacagccatggagcgggccatagtcatagtcatggagcgggacacagtcatgggcccggtcctgctcagatgccgcagcccgacttcctgaagtccaccggcagcgccagccagctgcccatcacaacgtcgcgggcggagccgcgcatgatcagcaccatgagcccgattgcaataccaatgccggcgccaccgcccaaggagggtaatgttccgggtcaaggtgctgaatcctcctccagcggaggtgtcgaggcgacccttattaacctggacgacgtaccaaccacgtcttcgatggcctag

SEQ ID NO: 20289 - protein, 450 aa, DROSOPHILA
MSAQLARNWPYIWQQLNALLHNTSPVITLICVVTTFGYLLSFSETAILLLSVTPGYILPNGKFWIWTAFTFCFIELHWWEVAVDVVTVGLCGKMLEPLWGQLEMFKFFALSNFGVSLLTTVYYLFYYMVTKNPTILFEVHIHGLAGYVAGICVAVRQIMPDHLIFKTRYGRLTNRNVPLTVLIMAIILWAIGLLDGTYPAMFASGSLVSWIYLRFYQHHPNGRGDSSESFTFVSFFPNVSQPFISVLVNPIYNCCLRAGVVKTPTPLRTISTASLTSVSVQMPGVDPHDIERRRQIALKALSERLKATDSSRHAQLPKSFPQQQQLQHHHHQHAPHQQQKHHSHGTGHSHSHGAGHSHSHGAGHSHGPGPAQMPQPDFLKSTGSASQLPITTSRAEPRMISTMSPIAIPMPAPPPKEGNVPGQGAESSSSGGVEATLINLDDVPTTSSMA

SEQ ID NO: 20290 - DNA, 8154 bp, DROSOPHILA
tcgaacattacatggtacagcagcaattgggataactagctacactttgattacatctaattacggttttatacacaccttgcgctccggttttgcgatttccggcagtatactgcagaacggtttgataacttccaggaacttgactgcaaatagtgaattaaggcaaccgaattagttacgtttctcaggccatttttaattaattgcgattttcggacacaacgagcggcgcacgccgaatcttttttgtatacgtaagcaatgagcgacaagggtgcgagcggcattgcaagggcggcacttcacacaaaaaccgctgcactccccgattttggggaagatgtctggcgatgacggttacttacttcccattttgccggacttgtgttgctagtctgggcactgagtgggtggcttggttattgcactttctacgcgaacagtagaaagtctcacttttcactgcacagcgaacgcctcaaatttcaaaaaccgaatgaacgaagcgaacgaattgacgacgtcgacgtgtcattcagtgtggccgttggtgaaacgtcaaaataaaccgtcgtgtcacttggcgacgaccggtcacactggcactgttaagcattaaaatttgaagttgagccatgggaaaatctatatttttgggctgtactgcaaagctgcctaaagattatgttccgataattaaatacataaactagcaagaagatctaacaattatatttttggtggaattcacgttacctatccagagggttatttatggtttcttttttgtctaagatgggccaacatatttagcttttgacatgtacacatttggtttcaggcattatagggttaataaaaaggagtttcgatatttagttgtgtgtccatcgctggcaccggctggcacctagcgaccgatactatcgtggcagccagcgatgttttagcagctccaagactctccaatttgacaattctgaggcatgagtacaaacaaacactcacgcagtgcactctgttggcgagcgtaataaatatgtgggaaaattcccacatatatacagtattcagtgctagtgccgagaactcgcaacgaacccggtcgcgtcgttcacatatgtgtgaaaaagtagctgacaacaacggtggcaagtccaaatgcgaagaaaagccagtaaatcgcgcggcgagtaaagtgaataaattcggtgcagaccattgccgtttcggggcgaataatgtctgcgtctgtgatatgcgtcgatttgagctcggagtctgatgaggaggtaatatcccgatttcccagcggactcgtcagtgcgtgtgtgtgtgaaaaagtacagttggttttaaataggctcgctgcatgagtatgtgtgcgtgttacacatagtgtggaattaaatttttttcgcgctgcttttttattgagaacgagcagacacgaacgtgcagtgccccactcatacagttgcaaaacggtgacagtgctgccagaccgagcgattggagacctggcgagtcttgcagttgcactggcgaatatcggactttaattacgttaggcgtggaaatgagcgagtgagagggtgcggtgagtctccgctcctggagagtgtttggttaagacgcaattcgcctggtaaagtttggaaagtcgtctccgctgatacggcactaaatcaaattaactctccaaagcgcgcgcacgcaactctccaaagctctcgcacacaccgacgaacgcacacctatacactgacgcttttcgtttgtttatattttcattcaaatttaaaatacatctgagagcgaccaacaggtcgcctgcagtttggaactattataaatgttgctaattataaaacgcgcttcaaagacgatgcacttgtgataaaaacaacaaacattatgtatacttataagtaaactttggtcttattgtcagaggcagtgtagtctcatcttattaccaattgaacataacttgtaatataagtttcaaattatatttgcagtcgccggccaaacgacgacgactcgaggatccgctgcgactactaacgccatccggtaggcaaagttttcctgccaaacttctgaacataccaaaggcctccctgggatccgcgatggtagtgcctgttgcggaaacaggacctgcaagggagactccggtcatagtggatccactccggtccatgcacatccccagtggaatcaccatcactaagcaccagaagaacgtcctcgccacaaacggaaacatgaacctttctctggcagagagcaacaacaacaacaacactaccagcttgaacaaaaatgtgaccccgaagcagatcaatgttggcaccggccagaaagtggcctggtcggtgagcagcaaggcgcccagtccgaatgccgtgataaccaccgtgcccagccaccaggtgagggtgacgccgtttaatccgattcgactcgcacccgggtcaaaaataataccggcttcgaatgcgatgcctgcaaagattcaacccattcttgggatgggtcagcctcagcaacaggcacaagcccagcaaccgaaggccatcatagtgggttttccgaagcccaatactgcagtggctcaaatggcgcaacaccaaaaacctctaacgcttcaaatacaccagaaattaattgcaggacagcagcagcatatagcttctattagccaattgcagcaggtatcgttgcagcagcaacagccacttagacccgtgagcattcaattgcagcagcaacagaaccaacggaatggctcattgcctggaaagcaacagaagccactggaatgcccagtgcctgcgcagcaagagaagctaccacgtgggccgttgcctacgaagccagccgagccactgagtggcccattgcctacggagccagacgagccactgggtggcccattgcctacgcggccaaaaccaccggtgagatcactacaacagccagttaacaagaatacggcgattggagtacagatacagcaatcacaggagccactgggtggcacattacctacgcgccagaaaccacttggaggtcaattgctaacgcagcaaaaaccaccggtgggatcgatacaacagtctgttaaacagaatacggggattggagtacagattcagcaaataccaaaggttgtcgtgggacaacagccacagaaggtgtacctgaataaactacaacaggagcaacagaagatttttctggggcacctgcaacagcagcaacagaagacgttcctagggcaactgcaacaggaacagcagaagatcctggggcaactacagcagcagaaacaacaacaacagcagcaacagaaaaagatcctggggcaatcacaacagcaaaaggtgccgttggggcaaccgcaacctcagcagaaactaccgcagcaactgaacaattcactggtgcaactacaacagcaacatcaacaaagaacatcagtggggcaactccaacaacagcagccacatcaatcacagcagaaaaattcaatggtgcacgtaaaacagcaaccacaacagcaaaagaagatttcagtggggcaattccagcagcaaccacaacagcaacagaagacttcagtggcgcagctgcaacagcaaccacaacagcaacagaagatttcagtggggcaacttcaacagcaatcacagcagcaacagaagccttcagtggggcagctgcaacagcaatcacagcagcaacagacgcctttagtggggcagctgcaacggcaaactcaacagcaacagaagacttcagcggggcaattccaacagcaaccacaacagcaacagaagatttcagcggggcaactccaagagcattcacaacaacaacagaagactttagcggggcaactccaacagcaagcacaacagcagctaaatacttccgcggggcagctccaacagcagcaaaaaccaccaaaagcgtccttagcgcaacaggcagcagctcaaaagcaaggagcgggcctaggacaacagcaacaatttcaatcccagccccagcagagaacaagtgctggacttcttcaacagcaacagatgccacagaagaaaatcgtgatgcaaccgcagcttccgaaaacatcggtggtcctgccgcgcccacaacagctcccgaaaaatcctttgctggtggcccaacagcaatcaccaaagacaccactggtaaactccgtaatgggcccacagtttccatcacagcaaccatcgcttcccgttgtcaatcaaattacgcacaaatcgatgactattcagagacttcccatgttgcagacggtgcaaaaaattctgccaaaacagatagctccgcagcagacgccaccacccgctcatatagtacaaaagcaaacaatgccaaacgcggccatgcaaaatcctccgttcgcgcaccgtccaccgatagtgcgacccatgacggtagccaagatctcgccggtgcctacaaacaacaaagtctgcatcccgatgaagccgcagatggctagttatgtcagtcccacagacccaacaatgactgcagcccgtactttgccctttagaagctcacagcgcaagacatctgaagcaccaatgacttcgacgcatgtccagggattcactgcgagtgccacacctccacagcgtcttctggccactccaccgcattgtgccgcggccttgaatgagccgctattgctaaacttgccgcccaccactagcattacgccgcaactgacgcctacgacaactccaccgcccgctggaccatcggcagcagttcagcaacagcagctggccaaggcggcagccattaaattgaattccttgcccgaagcgagcatttctccagtgaacaggtctccaactgcaagcgccaagcgcatccagccgattaccgtgctcaagaaatccgacgaggaatggcaaaggcatctcgagcaacagcagcaaaagaagcacgtacaattgcagtcgtcctcgatgaccacaattgttctagtcgaatcaccgcccactactccgcccacggataagccggagccggagcgcgggccaatgaccgtggaaaaatcgtcgatcaaaccgatggcaacagataaacaatccagggcaataaaaaggcctgcagtgatgatttccacgaaaaaatccggtttagttgtcacagaaatagtggatttagatgaaataccggatatcccgccagaaaagcgcgggaaagaatgttttcctccaattaagaatgcagccaaggcagcaccatcagtgaatgccccttttacaactgagtacgcggcacttcttcgtctttgccgcgaggtggacaaatcgactcacatggaacgccttgtaaagggagaattgacccagtattactacagtgcgcccgaaagcttcgtgatgtcatgtggctttcgcaacctggttacaatggctatggcgaggatccgaagcgaatcgtacctggtgtacgtgcacctaaagtacgtgttagatgagttagcatcgcggaggctgaccaaaatgtttcccacagtacgagcaattccgccagctagccagttcccacttccaccagctagccagttcccacttccacccacattgaccacacccaagcagccagcgatagtaaaagcgccggggcagcagactgtgatggcgggaagagagcaggatgatgaagtagaagaggtgacattggtgaatgtcgggaccgtttcttgcgaagaaaggcgtagggatgagcggatacgccacttttatcgcacgctgcatgctattactaagcgaataaagatgttggaggaagctgaagtggacttgaacgacgaggactccagttatcttcagttggagcgcttcaaaaagcgtgcctgccaaatctatgaaaaaatctgtgatctaaagggcgagagcaagagtgtccgtagacagctaaagaagcccatacacttcaaggattcggactatccacacttcaataactcgctctcggcttttgtgaacaggatgcaagattttcccgattaccacgatgtgcttcaaatactggaaaagtgcaacaaggaaaaggaacttggactagccaagtacgagatgaagagaatcggtacgtcatggtcttcaagtatcaaaatcaatattgagcacacattttattgttttgcagcctacgatgcctttaacaaagtcggtcgaatgctgcaatcgcgccgaaagaatgatctttacgaaactgtcacacattacacggcaaatggcaaagatccagcgtccagtgatcccgagctgctagccaagctcaaggaaaacaacaaaaagcaaaccaaaataagtgatatcttagaaaagtgagctcaaatcgagaatttcagaactgcgctgttcaaaagagttttcacttgttatttatcggaaatatctagaacagcgcagtgctctgaacttaaaacagagttccaatctaatatttggattatttattctaggtatgccctcgagcaagatctcaatgcggaggagcgtcaggaggcgcggcttaaggagaaaaagttgaagcaggttaaagcggacgaggaggccgccaagctggctgctttggcggaagacgacgacaagccctgtacaagtgctcaggcagcagctaaggcggccgctctcgccgctttaaaaaggggtccagcagctcgtggaaatgtgattcgaaaaaagcgtgccgctaatggacggattttcaaaatcgccgatgacggagatgactcggaggaggaatcggactcggaggacgacgatgttgaggaatttgtcaataactttcaagccaacagtgatgtgagtgatgccgactccgaagtggaagcagtaacatcaccaaagagagatgctttgccgctcgccgaggaggaggatgtgatagatataacgagagacgagactggcaaaaagaatgacgaaggcacgcccaacggcaggcttaagattatgtccgtctctagtctgaacgccaattttgtccatgggcaggatctgcatagaaagcccaatcccatgccgtctgctaagccagtcattgctgaccagattatcatttccgatgaggagtcatagaaagagttatatccgaagccctaattaagttatttattcaatatgttcagtttcttcctgaatacgttcggtacatttttcaactccccttgctaacacaaatgttgtaaggtcgactatttatttttgaatgtcaatccttaaatttaaattttaagtttatgcagaaaagtttatataattcaagcattgattgagttgacaattttcatatttgttttttgctttttttatagacatagacacgtgaagaactttttcatataaaaatgtcttacattcaaaaataactgccgcccttacatttttgtggttgctaatcgtggttacaaattcccctacgcctatttattgtaaagcctcctacctttgggtacaagccagaaaactacggtagtgtatatacggaatactactagtctaagttagtcgtataaaataaacagaacggtgagaaacgatgacgcaaagcgaaactgcgcctagtttattcaatttcaatgttgcgcagaaagcgggatacatccgaatcgtcgatggccgtctcctcgatgatgtcgaagtggtcgtaccctttgaagagcgtaaagctcgccttgtagcccttctttctcagcacatcagcgtagtggcgactttgctcgatgaaggtggtgctgtcatgctcggcggccaccacgtagatcttggtggagttccaaacggtaacatcggtgtattcccacagcatgggcgacacggactcgatattccgctcgttgaggcccagaatatttttgggattaaccgattccaagttagagagctccctcagatcgtaaacgccgcagaggaagatcaaagcccacaccatcttgctccgctgggctgtaatcacatttgggcgcatgagtatctgggccagcaagtgggcaccagccgagtgtccggcgaaggtgagcgacgacactttggtcatttcggtgtagtcaaagatccagttgaggaaatgggtgaactg

SEQ ID NO: 20291 - DNA, 4642 bp, DROSOPHILA
caaacactcacgcagtgcactctgttggcgagcgtaataaatatgtgggaaaattcccacatatatacagtattcagtgctagtgccgagaactcgcaacgaacccggtcgcgtcgttcacatatgtgtgaaaaagtagctgacaacaacggtggcaagtccaaatgcgaagaaaagccagtaaatcgcgcggcgagtaaagtgaataaattcggtgcagaccattgccgtttcggggcgaataatgtctgcgtctgtgatatgcgtcgatttgagctcggagtctgatgaggagtcgccggccaaacgacgacgactcgaggatccgctgcgactactaacgccatccggtaggcaaagttttcctgccaaacttctgaacataccaaaggcctccctgggatccgcgatggtagtgcctgttgcggaaacaggacctgcaagggagactccggtcatagtggatccactccggtccatgcacatccccagtggaatcaccatcactaagcaccagaagaacgtcctcgccacaaacggaaacatgaacctttctctggcagagagcaacaacaacaacaacactaccagcttgaacaaaaatgtgaccccgaagcagatcaatgttggcaccggccagaaagtggcctggtcggtgagcagcaaggcgcccagtccgaatgccgtgataaccaccgtgcccagccaccaggtgagggtgacgccgtttaatccgattcgactcgcacccgggtcaaaaataataccggcttcgaatgcgatgcctgcaaagattcaacccattcttgggatgggtcagcctcagcaacaggcacaagcccagcaaccgaaggccatcatagtgggttttccgaagcccaatactgcagtggctcaaatggcgcaacaccaaaaacctctaacgcttcaaatacaccagaaattaattgcaggacagcagcagcatatagcttctattagccaattgcagcaggtatcgttgcagcagcaacagccacttagacccgtgagcattcaattgcagcagcaacagaaccaacggaatggctcattgcctggaaagcaacagaagccactggaatgcccagtgcctgcgcagcaagagaagctaccacgtgggccgttgcctacgaagccagccgagccactgagtggcccattgcctacggagccagacgagccactgggtggcccattgcctacgcggccaaaaccaccggtgagatcactacaacagccagttaacaagaatacggcgattggagtacagatacagcaatcacaggagccactgggtggcacattacctacgcgccagaaaccacttggaggtcaattgctaacgcagcaaaaaccaccggtgggatcgatacaacagtctgttaaacagaatacggggattggagtacagattcagcaaataccaaaggttgtcgtgggacaacagccacagaagaagatttcagcggggcaactccaagagcattcacaacaacaacagaagactttagcggggcaactccaacagcaagcacaacagcagctaaatacttccgcggggcagctccaacagcagcaaaaaccaccaaaagcgtccttagcgcaacaggcagcagctcaaaagcaaggagcgggcctaggacaacagcaacaatttcaatcccagccccagcagagaacaagtgctggacttcttcaacagcaacagatgccacagaagaaaatcgtgatgcaaccgcagcttccgaaaacatcggtggtcctgccgcgcccacaacagctcccgaaaaatcctttgctggtggcccaacagcaatcaccaaagacaccactggtaaactccgtaatgggcccacagtttccatcacagcaaccatcgcttcccgttgtcaatcaaattacgcacaaatcgatgactattcagagacttcccatgttgcagacggtgcaaaaaattctgccaaaacagatagctccgcagcagacgccaccacccgctcatatagtacaaaagcaaacaatgccaaacgcggccatgcaaaatcctccgttcgcgcaccgtccaccgatagtgcgacccatgacggtagccaagatctcgccggtgcctacaaacaacaaagtctgcatcccgatgaagccgcagatggctagttatgtcagtcccacagacccaacaatgactgcagcccgtactttgccctttagaagctcacagcgcaagacatctgaagcaccaatgacttcgacgcatgtccagggattcactgcgagtgccacacctccacagcgtcttctggccactccaccgcattgtgccgcggccttgaatgagccgctattgctaaacttgccgcccaccactagcattacgccgcaactgacgcctacgacaactccaccgcccgctggaccatcggcagcagttcagcaacagcagctggccaaggcggcagccattaaattgaattccttgcccgaagcgagcatttctccagtgaacaggtctccaactgcaagcgccaagcgcatccagccgattaccgtgctcaagaaatccgacgaggaatggcaaaggcatctcgagcaacagcagcaaaagaagcacgtacaattgcagtcgtcctcgatgaccacaattgttctagtcgaatcaccgcccactactccgcccacggataagccggagccggagcgcgggccaatgaccgtggaaaaatcgtcgatcaaaccgatggcaacagataaacaatccagggcaataaaaaggcctgcagtgatgatttccacgaaaaaatccggtttagttgtcacagaaatagtggatttagatgaaataccggatatcccgccagaaaagcgcgggaaagaatgttttcctccaattaagaatgcagccaaggcagcaccatcagtgaatgccccttttacaactgagtacgcggcacttcttcgtctttgccgcgaggtggacaaatcgactcacatggaacgccttgtaaagggagaattgacccagtattactacagtgcgcccgaaagcttcgtgatgtcatgtggctttcgcaacctggttacaatggctatggcgaggatccgaagcgaatcgtacctggtgtacgtgcacctaaagtacgtgttagatgagttagcatcgcggaggctgaccaaaatgtttcccacagtacgagcaattccgccagctagccagttcccacttccaccagctagccagttcccacttccacccacattgaccacacccaagcagccagcgatagtaaaagcgccggggcagcagactgtgatggcgggaagagagcaggatgatgaagtagaagaggtgacattggtgaatgtcgggaccgtttcttgcgaagaaaggcgtagggatgagcggatacgccacttttatcgcacgctgcatgctattactaagcgaataaagatgttggaggaagctgaagtggacttgaacgacgaggactccagttatcttcagttggagcgcttcaaaaagcgtgcctgccaaatctatgaaaaaatctgtgatctaaagggcgagagcaagagtgtccgtagacagctaaagaagcccatacacttcaaggattcggactatccacacttcaataactcgctctcggcttttgtgaacaggatgcaagattttcccgattaccacgatgtgcttcaaatactggaaaagtgcaacaaggaaaaggaacttggactagccaagtacgagatgaagagaatcggtacgtcatggtcttcaagtatcaaaatcaatattgagcacacattttattgttttgcagcctacgatgcctttaacaaagtcggtcgaatgctgcaatcgcgccgaaagaatgatctttacgaaactgtcacacattacacggcaaatggcaaagatccagcgtccagtgatcccgagctgctagccaagctcaaggaaaacaacaaaaagcaaaccaaaataagtgatatcttagaaaagtatgccctcgagcaagatctcaatgcggaggagcgtcaggaggcgcggcttaaggagaaaaagttgaagcaggttaaagcggacgaggaggccgccaagctggctgctttggcggaagacgacgacaagccctgtacaagtgctcaggcagcagctaaggcggccgctctcgccgctttaaaaaggggtccagcagctcgtggaaatgtgattcgaaaaaagcgtgccgctaatggacggattttcaaaatcgccgatgacggagatgactcggaggaggaatcggactcggaggacgacgatgttgaggaatttgtcaataactttcaagccaacagtgatgtgagtgatgccgactccgaagtggaagcagtaacatcaccaaagagagatgctttgccgctcgccgaggaggaggatgtgatagatataacgagagacgagactggcaaaaagaatgacgaaggcacgcccaacggcaggcttaagattatgtccgtctctagtctgaacgccaattttgtccatgggcaggatctgcatagaaagcccaatcccatgccgtctgctaagccagtcattgctgaccagattatcatttccgatgaggagtcatag

SEQ ID NO: 20292 - protein, 1465 aa, DROSOPHILA
MSASVICVDLSSESDEESPAKRRRLEDPLRLLTPSGRQSFPAKLLNIPKASLGSAMVVPVAETGPARETPVIVDPLRSMHIPSGITITKHQKNVLATNGNMNLSLAESNNNNNTTSLNKNVTPKQINVGTGQKVAWSVSSKAPSPNAVITTVPSHQVRVTPFNPIRLAPGSKIIPASNAMPAKIQPILGMGQPQQQAQAQQPKAIIVGFPKPNTAVAQMAQHQKPLTLQIHQKLIAGQQQHIASISQLQQVSLQQQQPLRPVSIQLQQQQNQRNGSLPGKQQKPLECPVPAQQEKLPRGPLPTKPAEPLSGPLPTEPDEPLGGPLPTRPKPPVRSLQQPVNKNTAIGVQIQQSQEPLGGTLPTRQKPLGGQLLTQQKPPVGSIQQSVKQNTGIGVQIQQIPKVVVGQQPQKKISAGQLQEHSQQQQKTLAGQLQQQAQQQLNTSAGQLQQQQKPPKASLAQQAAAQKQGAGLGQQQQFQSQPQQRTSAGLLQQQQMPQKKIVMQPQLPKTSVVLPRPQQLPKNPLLVAQQQSPKTPLVNSVMGPQFPSQQPSLPVVNQITHKSMTIQRLPMLQTVQKILPKQIAPQQTPPPAHIVQKQTMPNAAMQNPPFAHRPPIVRPMTVAKISPVPTNNKVCIPMKPQMASYVSPTDPTMTAARTLPFRSSQRKTSEAPMTSTHVQGFTASATPPQRLLATPPHCAAALNEPLLLNLPPTTSITPQLTPTTTPPPAGPSAAVQQQQLAKAAAIKLNSLPEASISPVNRSPTASAKRIQPITVLKKSDEEWQRHLEQQQQKKHVQLQSSSMTTIVLVESPPTTPPTDKPEPERGPMTVEKSSIKPMATDKQSRAIKRPAVMISTKKSGLVVTEIVDLDEIPDIPPEKRGKECFPPIKNAAKAAPSVNAPFTTEYAALLRLCREVDKSTHMERLVKGELTQYYYSAPESFVMSCGFRNLVTMAMARIRSESYLVYVHLKYVLDELASRRLTKMFPTVRAIPPASQFPLPPASQFPLPPTLTTPKQPAIVKAPGQQTVMAGREQDDEVEEVTLVNVGTVSCEERRRDERIRHFYRTLHAITKRIKMLEEAEVDLNDEDSSYLQLERFKKRACQIYEKICDLKGESKSVRRQLKKPIHFKDSDYPHFNNSLSAFVNRMQDFPDYHDVLQILEKCNKEKELGLAKYEMKRIGTSWSSSIKINIEHTFYCFAAYDAFNKVGRMLQSRRKNDLYETVTHYTANGKDPASSDPELLAKLKENNKKQTKISDILEKYALEQDLNAEERQEARLKEKKLKQVKADEEAAKLAALAEDDDKPCTSAQAAAKAAALAALKRGPAARGNVIRKKRAANGRIFKIADDGDDSEEESDSEDDDVEEFVNNFQANSDVSDADSEVEAVTSPKRDALPLAEEEDVIDITRDETGKKNDEGTPNGRLKIMSVSSLNANFVHGQDLHRKPNPMPSAKPVIADQIIISDEES

SEQ ID NO: 20293 - DNA, 2959 bp, DROSOPHILA
tccattcaagttaactaaatatatgtacatagatctgaattcacagaaaaatagttctctaagccataaattcctatctgtgtttcattagaacgttgaaatttctctttatttaacgggtatctgatagtcgagatcatatagcgttctttcttgcttcgatatcgatcaggtgattcaacctattggggtaggtcgttttctcgtgcagacttttctgactggtaattggattgttatcaaaactgattgagtttcaatttatggagcacttccttagttgcaggtacccgtgcataagtttactgtcagcttcaagcttggtgatagataagcttaattagtattaaaaatatggccccgtttaaataaaaccaccgtatttattacgttttattagtttgttttcattctttatcaaaactcagataaacaaaggtacaagaaatcaaaaaaaaagaaacaaatataattaaataacgatatcagtttccttacatgtatacttgcacaattcattgtggtagtatggtcaaatcaaataaataaataaataaaaacagatacatatcgcgaattggaatattacagattaaaatgggctcttcctatatttgaggtatgagttatttatgtttttatcttatcaggtcatatactacaattcctagaagaagatttcttacatccaagacgagccttcatctgaaatcgtttatcttaacttttttaaatagacaagagataagagcttagctgtttcgcttaagtccccgtcttactcattaattggtatgttacaattaatttatattatatttttagaatttatcccgtatttgtattttaaaactaataggaatgttacagatatgctgcataactttataaacagtttcgaatcacatacgattctcctattatctcagtgctttagttaatctttgataataaggtccaccctacccttctattgatttgattatatatacatatatttaaataattgaaccgatcgtagcatctatttattgcctcaatagaagaggttgtttacgttgtactcctccttggcgctgcacagatacttgtacttgggattggtaccggtggtacacttgctggccgccttggagcaggaactgtacatcttgatgcccagaacattggtggccgcatagttacaggccagcaggaaggccttgtacgattggccggacacggagtacgtggccgcggcacaacccacttccgtattccgatcggcaacgagcaccgtgaaatgtccaatggccggaccattgtagttcgacggataggcatcgatgtaggcctgtttggtgtacaccgcctcatcgtaccacatatcgacgccccattctagatagtgtgtaacatttagcggattgtagtagcccatccaggccagattctggccagaccagtcgaaagcatccgtattgtggcagccgtcgtgtttcatttgacaacttttcacgttcaaactggccaagtaagccagttcatcgttccacttgatcgtggccattcgacaggcggcactcagattggcattcagtccgccggcgatgtggttgcgatactcgttcgtcctggccaccagtgcatccttctcagcgctggagagggtcaacagggtggcgtcactgggacagcttgaggcccaggcctacgaaagaaaaacataagttagccaagcgaaacattgtacatgtaagtctatattcccgagggaatagttctaatcccggattagaaccccttcctatgctaaggattatagccatgattactcactccattattgtcgcatcccagattcttggtgcttccgcagctctttttgcaataatcggtggcggaggcgatgccaaatgccagagataggctaaatatgatcacgaagttgcgcatttctattcccagacctgattgctagcgattcccacagggcaactggcttttatggcaatcggtgtagagcagttctggcttctcttttttttttttatcaacatttgattaaatatttaccgccagagtgtctcatttgtaccagccgagtctgccgccccctcttcccttttttttttgtttttgtttttgtttttgtttcaagggacgttgctcaaatgtgtaataacaccacccacttatggcacccgtctccgccacccgcaaaagacgtcattcgatcgttgcggtgaaaacaacatgtctgcgggaagcacctgagagttcttcgccatggagccgagtgtcactgattgttttcacaagagcacaagatgttatgacagaaatgttaatgagtaattaaaaaaaaaaaatcagataaaacagaaacagacgtttctttgtatttaatctgaatgattatttcaaaacaactctaaaaaaaaattggcattcattgagctgtggaaaatcccatcgacttaatgactgagaatgtatgccggatatataaagtcgtgatttcctcacctcagttaggtatatctaaacatgttttcttttactaattccaatattagcttgcatgcttcatgatagttcgttcatacggacatccaaacggacataaggacaaaagaaacgacacagctagtgacgaatatatatccattatagagtcactttcaacttgtaacgttatagcaaagtgcttctcaaattggctcaaatgcaaataaagttataaggaataatattgtaaaacactttcaaccaccatgcattttttctaccactggcttggctatcaatataaatacggtacagtgagtacacatacagaaagtccggcgcacgtgtcgctatgaccctcttcgccaaaccaaatgttagcccaactgcaacatagacaaaagccattagatcaagagcgaaacccactagccaagacaaagatatttacccagctgccaggaacacc

SEQ ID NO: 20294 - DNA, 831 bp, DROSOPHILA
tagcaatcaggtctgggaatagaaatgcgcaacttcgtgatcatatttagcctatctctggcatttggcatcgcctccgccaccgattattgcaaaaagagctgcggaagcaccaagaatctgggatgcgacaataatggagcctgggcctcaagctgtcccagtgacgccaccctgttgaccctctccagcgctgagaaggatgcactggtggccaggacgaacgagtatcgcaaccacatcgccggcggactgaatgccaatctgagtgccgcctgtcgaatggccacgatcaagtggaacgatgaactggcttacttggccagtttgaacgtgaaaagttgtcaaatgaaacacgacggctgccacaatacggatgctttcgactggtctggccagaatctggcctggatgggctactacaatccgctaaatgttacacactatctagaatggggcgtcgatatgtggtacgatgaggcggtgtacaccaaacaggcctacatcgatgcctatccgtcgaactacaatggtccggccattggacatttcacggtgctcgttgccgatcggaatacggaagtgggttgtgccgcggccacgtactccgtgtccggccaatcgtacaaggccttcctgctggcctgtaactatgcggccaccaatgttctgggcatcaagatgtacagttcctgctccaaggcggccagcaagtgtaccaccggtaccaatcccaagtacaagtatctgtgcagcgccaaggaggagtacaacgtaaacaacctcttctattgaggcaataaatagatgctacgatcggttcaattattt

SEQ ID NO: 20295 - protein, 256 aa, DROSOPHILA
MRNFVIIFSLSLAFGIASATDYCKKSCGSTKNLGCDNNGAWASSCPSDATLLTLSSAEKDALVARTNEYRNHIAGGLNANLSAACRMATIKWNDELAYLASLNVKSCQMKHDGCHNTDAFDWSGQNLAWMGYYNPLNVTHYLEWGVDMWYDEAVYTKQAYIDAYPSNYNGPAIGHFTVLVADRNTEVGCAAATYSVSGQSYKAFLLACNYAATNVLGIKMYSSCSKAASKCTTGTNPKYKYLCSAKEEYNVNNLFY

SEQ ID NO: 20296 - DNA, 4811 bp, DROSOPHILA
agccgaacgtggtcaccacgcagatgagcgttatgaccggcgaggtgttgtgcagcagagcattgagctgttgccagatgtacggccagtttctggccagttgagctgacatggcaccgatcgcttctcctggtgttcgcacgcgtttttcgttggcctcgcagctcctgggcggcggactggaaccgggtggtcttgaatgcgctgcggtgcttgtctgcctcgcaactcaacacgttcgaggggccttaaagtggttcatttgctaatatttacgaatttgcttcacaattacaataacaagactgtcatcgaagtggaaaggcgtagctatcgtttatcgattgtttcgctacaacgtgaccagaccgttacccagtataaatccttttaatttggccacaccagtaattggtaattgtacttttgaactaatggcgccattttgtaagctaagcttaaacatttacttgtaaaaaaatgttgtatcaataatattgctgttttcttccgcagacccaaaagtaatacaaacaacgtgtttatttaaaaaagttatctaatttacgttttattatgacaatttgtatgcatgtgttcgtttgatgtacatcttcgctttaataatttcaatgtctccatttcacgttgtatttaaagtataattcaattgatttaatattaaaacaagtaattgcattgaaattcaatcaattcgcagaaatattgaactcaagcaatgtagtctcacatttgaatacaactaaaaactattcaaaataaagggtctctcatccgcttttatgtacgcttctattggttgggaagatgaaaaatagcagccaaaggccttacaatttacgcttactgtggttgttttgacagacgacgaaaaaaacaaagcaggttattaagtttgttttaatgggagcgagcgtatgggaagtatgatgaagtattagttgttgctgattggatcgcaggtgatcttcttgactgcttagaacagcagcgtgcccatgccgcccatttcggactgctccttaacgaaaatctcaaagtattggtagatgatggtcacagccaacaggatacccgtaccggagccgatggcccccaggaagtcggccatcacagacagagctccgatgcagagaccaccgaaagcagccgccgttgggatgtagcggttgagctcgtggatcatcgagttctcgcgatggccacgcatcaccatgtgctgctccttcagctgcttggcaacctgcaagaggaaagtcaaaaaggatcggtaagcaatgattgctgattgaggttaactattgtagcacacttacatccttggctgagctgccggacacatcgatccaggtcttggagaagaaggcgcacgagcccaacatgaagacaatgtagagcaacgcgtgaatggggtcggtcaggatgtggcccacgctctctgggggcgaaagatagtagcacagaccaccgatgggataggagcgagccgggccgccgcctccaacatcagcccacacacccagaaggttaatgaagaagttgccctggaacttgacagccagcatctgggagatgacgtacaagttggacacgagcgcagactgcaggatgatgggaatgttggaggtgtagaacagcttgatgggatagctgctgtactggccgcggtaacgggcgctcttgatgggtaggtccacgcggaagccttggaagtatatgaccacggcgaacaccagcacggtggccagcaggttcatcagattgggcaggttctggcgatagaaggcctcgcgcagagcgcgcaccttatcgttcctggtggccatcagatggaacagggcaatcacagcgccctcgaactcggtaccgcgtcccgtcgtcacggtggtggggctgaatgccttccacacaatcgtctcgcaaatgttggtggcaatgaacagggaaattcccgatcccagtccatagcccttctgcaggagctcgtccagcagcagcacaatcaaaccagcggcgaacagctggatgatgatcagcaggcagacaccggcgccgatctccgacggatcgccgtacatgccagtcatcacatagacgatggcctgaccaatggtgatcaccatgccgaagagcttctgagcaccgttgaacagagcacgatccttgggcgtatcaccgacctcaatgatctttgctccggccagcagctgcataatgaggccagaggtcacgatgggcgagatacccagctccatgagcgtaccacggttggaggccaggatcacacggatccagtagaagggatccgccgagtctgagctcatgataccgaaaagcgggatctggcagcacaccaggaagatgaacagggtgatcgcagtccatagcactttctccctgaattggatctgtaaataaaaagaaccaacaattgcgaatgagtcatattgcagtgtaaaaaagtgtggagatatataaacaatgcatagaagtaaaggaatctttgatatttccaaacatataaaaatactacattattattattttattttaaataaacggcttaagatcaagcccgctttacccttgaaactaagctgcacaaataatgctaccgctatgttgacctacatggccgctttcccatgtgtgtacgtgtgtcaattgtttaaacaaaatctggtaaacttcatttggccgtagtcgtcgtcatcgctcatcacctgcgagcaacaaaaacaaacgaagctgacgtcgacagcgcttcgtgcgagccgaagtttgacatttccatttccacgtagcgtttgtttgtcagtggcgagagagtggtgtgtgtctgtgtgcgtgtgtgagtgttaaatgagagtatggcaacaagtagccaggtgataagaaaactagcagcagcagtgaggtggaaatactgagatttatgaatgaaaaggcccacgaaacatataaaaactcaaaaatatgtgcacttcaagtggtgtacgatatagtaataaataaaactaaagttgggcataattattttcatgaattaaatggacacaaaaggcgtgttttcctatttcgacacataaaaaactcagtttgttctatatcagggtggttcggctgccgtttgcccactaccaaatgaagagcaaactgtttgcgtggcgatgttcacttttttgacaagtgaaagcaaccacaaaacgcgtgggctggcaacactggcagagagcaaagcgagattcgctcggaaaaacacacgtataagacgagaaaagccgcaaattgttgggaaaattcgaacattacatggtacagcagcaattgggataactagctacactttgattacatctaattacggttttatacacaccttgcgctccggttttgcgatttccggcagtatactgcagaacggtttgataacttccaggaacttgactgcaaatagtgaattaaggcaaccgaattagttacgtttctcaggccatttttaattaattgcgattttcggacacaacgagcggcgcacgccgaatcttttttgtatacgtaagcaatgagcgacaagggtgcgagcggcattgcaagggcggcacttcacacaaaaaccgctgcactccccgattttggggaagatgtctggcgatgacggttacttacttcccattttgccggacttgtgttgctagtctgggcactgagtgggtggcttggttattgcactttctacgcgaacagtagaaagtctcacttttcactgcacagcgaacgcctcaaatttcaaaaaccgaatgaacgaagcgaacgaattgacgacgtcgacgtgtcattcagtgtggccgttggtgaaacgtcaaaataaaccgtcgtgtcacttggcgacgaccggtcacactggcactgttaagcattaaaatttgaagttgagccatgggaaaatctatatttttgggctgtactgcaaagctgcctaaagattatgttccgataattaaatacataaactagcaagaagatctaacaattatatttttggtggaattcacgttacctatccagagggttatttatggtttcttttttgtctaagatgggccaacatatttagcttttgacatgtacacatttggtttcaggcattatagggttaataaaaaggagtttcgatatttagttgtgtgtccatcgctggcaccggctggcacctagcgaccgatactatcgtggcagccagcgatgttttagcagctccaagactctccaatttgacaattctgaggcatgagtacaaacaaacactcacgcagtgcactctgttggcgagcgtaataaatatgtgggaaaattcccacatatatacagtattcagtgctagtgccgagaactcgcaacgaacccggtcgcgtcgttcacatatgtgtgaaaaagtagctgacaacaacggtggcaagtccaaatgcgaagaaaagccagtaaatcgcgcggcgagtaaagtgaataaattcggtgcagaccattgccgtttcggggcgaataatgtctgcgtctgtgatatgcgtcgatttgagctcggagtctgatgaggaggtaatatcccgatttcccagcggactcgtcagtgcgtgtgtgtgtgaaaaagtacagttggttttaaataggctcgctgcatgagtatgtgtgcgtgttacacatagtgtggaattaaatttttttcgcgctgcttttttattgagaacgagcagacacgaacgtgcagtgccccactcatacagttgcaaaac

SEQ ID NO: 20297 - DNA, 1545 bp, DROSOPHILA
aaatttgaggcgttcgctgtgcagtgaaaagtgagactttctactgttcgcgtagaaagtgcaataaccaagccacccactcagtgcccagactagcaacacaagtccggcaaaatgggaatcaagttcctggaagttatcaaaccgttctgcagtatactgccggaaatcgcaaaaccggagcgcaagatccaattcagggagaaagtgctatggactgcgatcaccctgttcatcttcctggtgtgctgccagatcccgcttttcggtatcatgagctcagactcggcggatcccttctactggatccgtgtgatcctggcctccaaccgtggtacgctcatggagctgggtatctcgcccatcgtgacctctggcctcattatgcagctgctggccggagcaaagatcattgaggtcggtgatacgcccaaggatcgtgctctgttcaacggtgctcagaagctcttcggcatggtgatcaccattggtcaggccatcgtctatgtgatgactggcatgtacggcgatccgtcggagatcggcgccggtgtctgcctgctgatcatcatccagctgttcgccgctggtttgattgtgctgctgctggacgagctcctgcagaagggctatggactgggatcgggaatttccctgttcattgccaccaacatttgcgagacgattgtgtggaaggcattcagccccaccaccgtgacgacgggacgcggtaccgagttcgagggcgctgtgattgccctgttccatctgatggccaccaggaacgataaggtgcgcgctctgcgcgaggccttctatcgccagaacctgcccaatctgatgaacctgctggccaccgtgctggtgttcgccgtggtcatatacttccaaggcttccgcgtggacctacccatcaagagcgcccgttaccgcggccagtacagcagctatcccatcaagctgttctacacctccaacattcccatcatcctgcagtctgcgctcgtgtccaacttgtacgtcatctcccagatgctggctgtcaagttccagggcaacttcttcattaaccttctgggtgtgtgggctgatgttggaggcggcggcccggctcgctcctatcccatcggtggtctgtgctactatctttcgcccccagagagcgtgggccacatcctgaccgaccccattcacgcgttgctctacattgtcttcatgttgggctcgtgcgccttcttctccaagacctggatcgatgtgtccggcagctcagccaaggatgttgccaagcagctgaaggagcagcacatggtgatgcgtggccatcgcgagaactcgatgatccacgagctcaaccgctacatcccaacggcggctgctttcggtggtctctgcatcggagctctgtctgtgatggccgacttcctgggggccatcggctccggtacgggtatcctgttggctgtgaccatcatctaccaatactttgagattttcgttaaggagcagtccgaaatgggcggcatgggcacgctgctgttctaa

SEQ ID NO: 20298 - protein, 423 aa, DROSOPHILA
MSSDSADPFYWIRVILASNRGTLMELGISPIVTSGLIMQLLAGAKIIEVGDTPKDRALFNGAQKLFGMVITIGQAIVYVMTGMYGDPSEIGAGVCLLIIIQLFAAGLIVLLLDELLQKGYGLGSGISLFIATNICETIVWKAFSPTTVTTGRGTEFEGAVIALFHLMATRNDKVRALREAFYRQNLPNLMNLLATVLVFAVVIYFQGFRVDLPIKSARYRGQYSSYPIKLFYTSNIPIILQSALVSNLYVISQMLAVKFQGNFFINLLGVWADVGGGGPARSYPIGGLCYYLSPPESVGHILTDPIHALLYIVFMLGSCAFFSKTWIDVSGSSAKDVAKQLKEQHMVMRGHRENSMIHELNRYIPTAAAFGGLCIGALSVMADFLGAIGSGTGILLAVTIIYQYFEIFVKEQSEMGGMGTLLF

SEQ ID NO: 20299 - DNA, 3091 bp, DROSOPHILA
ttttttggttcccctaccgttttttcgttgggttgttcggtcgcagaatcagccaagatagcatatcggtttgaattatttactgcagagttttcattgccgttgttggttcgattgattttgggttgattacctgccttattgttttgagggctgagctttctttgatttggatgtagcgatcccatgccagtctgcacagtcgaaatcggacttctgcttttgttttgattcttctttacgtgcattattgttgttgcaaacggtcagtgctgctgaattatttacagctggcacagcgataattagttgggccgctgacgaagttgatgttgtggcagttgccaggaggtcactgcactcgttattgcagtgttacagttacccgggacggtcgtttggcgctgcgagaggagcggggtaggagaggcggtctcttcgctccacgacttgtgagcccgaagcaggcagagagggagagcaagaacgcggtctgtcgttcgctgagggcaaaagtttcgagttagttgaaggtgagggtgctcgatcaccgatttgcggtgagacgaaagaaaagtatgcattgttgcgttgtaaagagagccggcgctcgtcttgttcacattgtcgctgagaacgtatgtcgttttgattcattgttctaagtccacatataacaattaccagaacaatatggaataattatttattttagtaaataattactatagtcaataattgttagttgtgcaaactgcactttacactttgtgtttaactttcactatactgttgtagtttttagaacttgctattcgtagcttgaaagaaacacgtctccacccgaagactgtggaatgccgaattttttttctggacttaatgttttaaaatttttcgtacttgcatctaataaaacaactaagatagccaaattgatattacgatattgtgaacataccacccacctgaattataattgaaaacatttttctcgaatataatcttttgaaatagcttttaattgtgcactttgaatttgctagatttaccagctgttcacgtcgtaccactcggatgttgagcagaggttaccaaactcgccattggtgcccgatccgcagccctgtgctccccagtcacagctggagtagatctggcgtccgatcatattggtggtagcatagttgcaggccaccagcacttggttccatccatcgcgattgtaccgagcagcagcacatcccaagcgggtgttcctctccgacatcatcacggtgaagtggccaatggcacttggggattaggtgggagttaaaattattaatacttaattaaatcgatcagacagcatgtcacatttgtttcacaattcgatcattaagtttcttaataataatcactaaacacttatacaaaatgaatatgaaagaccactagttcttacgttctttttgatatttcacagaaaaaaaaataatggtaataaaggtatttcctatagcgttaggccaaatctaaccaaagacaaacttacggtccgttatatccggatgggtatccgccggcaataataccggcgttggagttgtgcacctcatcgaaccacatctgcacgctgttgtccaggatgtagcccatgtcgggcaggtcgccggagtaggcctgccatgccagattctggccggagtacttgaaggcgtcggtgttgtggcagctatcgtgcaccatgttgcactggcgcacattcagggaggccagataggccagctcatcgtcccactccatggtggccatacggcaggcggcattgtgattggaatcgtagccaccggcaatgtagttcctcttgtcgttgtgcgagtggacaaagacccacttgtagtcatcgttgatgtcgatcagctcggcatcgccgggacagctactgtcccaccagttgctatgcccacaggcgatgtgggagccaccgttgcagatgtccgacgaacaatagtcggtggcctgggccagggccaaggaaacgatcaggatggcaagcagagcgagtttcatattgcctttgttgcgattaacacccaaaggcgatctattgcttggatcgtctggcaatgtgtttataaggggctgattggagcattgttgattggaagaaattaatcgagtgcaaatataaatcattccaatggcctaatctaatcgccactcctatatttacgacggactaactcttggtgtatttagttctgggaactaactatatagatgtgggaaatgaaagaaataaaatatatgtattttgtacatattcaatccatattcagtccattcaagttaactaaatatatgtacatagatctgaattcacagaaaaatagttctctaagccataaattcctatctgtgtttcattagaacgttgaaatttctctttatttaacgggtatctgatagtcgagatcatatagcgttctttcttgcttcgatatcgatcaggtgattcaacctattggggtaggtcgttttctcgtgcagacttttctgactggtaattggattgttatcaaaactgattgagtttcaatttatggagcacttccttagttgcaggtacccgtgcataagtttactgtcagcttcaagcttggtgatagataagcttaattagtattaaaaatatggccccgtttaaataaaaccaccgtatttattacgttttattagtttgttttcattctttatcaaaactcagataaacaaaggtacaagaaatcaaaaaaaaagaaacaaatataattaaataacgatatcagtttccttacatgtatacttgcacaattcattgtggtagtatggtcaaatcaaataaataaataaataaaaacagatacatatcgcgaattggaatattacagattaaaatgggctcttcctatatttgaggtatgagttatttatgtttttatcttatcaggtcatatactacaattcctagaagaagatttcttacatccaagacgagccttcatctgaaatcgtttatcttaacttttttaaatagacaagagataagagcttagctgtttcgctt

SEQ ID NO: 20300 - DNA, 849 bp, DROSOPHILA
agatcgcctttgggtgttaatcgcaacaaaggcaatatgaaactcgctctgcttgccatcctgatcgtttccttggccctggcccaggccaccgactattgttcgtcggacatctgcaacggtggctcccacatcgcctgtgggcatagcaactggtgggacagtagctgtcccggcgatgccgagctgatcgacatcaacgatgactacaagtgggtctttgtccactcgcacaacgacaagaggaactacattgccggtggctacgattccaatcacaatgccgcctgccgtatggccaccatggagtgggacgatgagctggcctatctggcctccctgaatgtgcgccagtgcaacatggtgcacgatagctgccacaacaccgacgccttcaagtactccggccagaatctggcatggcaggcctactccggcgacctgcccgacatgggctacatcctggacaacagcgtgcagatgtggttcgatgaggtgcacaactccaacgccggtattattgccggcggatacccatccggatataacggacctgccattggccacttcaccgtgatgatgtcggagaggaacacccgcttgggatgtgctgctgctcggtacaatcgcgatggatggaaccaagtgctggtggcctgcaactatgctaccaccaatatgatcggacgccagatctactccagctgtgactggggagcacagggctgcggatcgggcaccaatggcgagtttggtaacctctgctcaacatccgagtggtacgacgtgaacagctggtaaatctagcaaattcaaagtgcacaattaaaagctatttcaaaagattat

SEQ ID NO: 20301 - protein, 254 aa, DROSOPHILA
MKLALLAILIVSLALAQATDYCSSDICNGGSHIACGHSNWWDSSCPGDAELIDINDDYKWVFVHSHNDKRNYIAGGYDSNHNAACRMATMEWDDELAYLASLNVRQCNMVHDSCHNTDAFKYSGQNLAWQAYSGDLPDMGYILDNSVQMWFDEVHNSNAGIIAGGYPSGYNGPAIGHFTVMMSERNTRLGCAAARYNRDGWNQVLVACNYATTNMIGRQIYSSCDWGAQGCGSGTNGEFGNLCSTSEWYDVNSW

SEQ ID NO: 20302 - DNA, 4596 bp, DROSOPHILA
tgcccaacggtataatttgtatcggaacttggactcttttggcctccatggctgccaggtccttggacatgttcgttgaccaccgaagctagtacacataaatcctgaaactagcgtcacgcacaaaaacaaaaagaatagcgatacaaatggggaaatccccgagacgaaaagggatagcaacaataacaaaacatgtcaattaaataaaactgcaggaaaatcaataaaaatgtcacaaggactgaactggttccgcgggtgggcagacgtaaaatttctatggggaaatttagaggggtatgtgtacggtattgaatgctatggaatcgccatgctgcagctgattttccatgaatgaattcagcggtgacgccattctatactaaacacggttgccatacaattaaataattgttaaacatgttttaatgatgggctttgcgatttgtttcgatccctagctcccttccacccatcgagtgcgtgtggtttctgtcactaatttcctactcctggcaaattgcttccggcctcggtgaaggctggctaatggctaatgccaacttggcacgttatgtctgcccttgcctttttccggtccccggtttccttgcgctaacttgccaacacatccggtttccggtttgaaaaatttctgcgcttttgccgaagtcaactgttgcttctccatgggttttaaaaacacttaactaatgagatacagtccattaaattgcctgtaaaaatcggagaattggtatattattgctttctattgaatatttaatttaaattccgtattttagaccgattacattttattgtaaatttaaaataatttatttaaatataattagatgccagcgcggcacaagataccggcgaaccaggcaacgattggaatcttacacggaatcgaaatggccaaaatgctggcgatttggaggccgctgcggcggcaggacgattgggttctaccaatgtcggcgctatcgatatgcaaaatgctggaaaaatcaaattcgatccgcccaaagtgccagtgatatttgttttaggcggccccggtagtggcaaggtcacccattgcgataccttcatgcaggagcgacgcggtgtaacgcacatcaatatgatggatctcctccagcaatatgcaatgggcaatggtaagatatctgtggtaaatgaagacagaaggtatatacaagtatgctattgaggagagacagctgttgttgcaatataaactactttataatatagtgctgcatacttttagacactttcgacgtaatccgttgccaattgtctattaaatgatttgcccacagacatgcaagacttttcacaactgtcgtcgaaaacagtcactgaggtgctgatgttggaaatgaaaatggctccagctgccaaagcatacctgatatcgggatatccacgctccatgcgcgacgttgtcgagtattctgaaaaggtaattttccacgcaaccgactatttttcgctgtcttccccaccagctcacccaattattgtgaagccattttgattgccgcactctttatttgcccagtaaattgctgctgaactatttcaactaattaactggcaaatgagtcggcgacagtgtgtttatttggccataattcccatggatttacggtgactcctatattatatatgcaagtgctaattggacagactgggtgcaaacggcacttggggagtttcaagcacatggcgttaactatggtatatagacctacatattgcataagtaggacataacaatttggagtcataaataaaaattaatcttctttgattggttttttttttctacttcctttcagattcaagtcgtgaatggcgtgattcttatatcctggcgccaatcggttctacaaaagcaaatcgattatggggccaaattaggtcatgtagtactctccttagccaaaatggaattagaaaatttctttaaaaatgtgatgccagtcgccgattatttcgatcagagcgacatgttgttggccgtaagtattttgtgcattgcaataatgatcatatcaataatatatgttaattgctttctttttattttacaggtaaatggcgaacgtgcgcccacagaggtatacaaagactttcgcaccgccgtcctcgatatactgagcaccctcgagaaccaagaggccgttatgaatggagttacaggtatgggcagagggatacatgatatacccggcagtatagttagcgtagacaccgcaccaagtcaagcccaacaagggactcaaattgcagaagacaacgacgttaccaatgcctcggaaactgcgggaacagttttggccagagatttggcgatcgaacggatggatggtgggccaaatggagccgtgacagctctgaaaacgggcaccaccagtgcggacgatgacagcggtgttgtggtcactcagcagccaaagttgcgccaggctgctggaccagacgaatccggatcggatttgccacctattatatgggtgatcggcggtccgggcagcaacaaggccacactctgcctcaaggctgtgggactaaatcctggctgggctcacatcaggtatgttgcattggatgtgctcattatataattttgcttaaactggcatactactttttaagtgtcggtcgtcttttgcgcaatatcacggactctgcaccacgtgccaatacggaaagcttcgccgtcaaggaagccttggccgctggggatatggccccagaaaagtcgctgaatcagctgctggaaaccaatctgcgccagttacgggatagaactggaattatcgtagatggttatcccagaaacctgcagcaagtcaagtactttgagaacaaggtaatctatatgatggctaaatcccaatttaaaagtaactttaatttactcccttttttttattgcttagtataaacaacgaccgcctattatcctgctggattgctcaaaacttcagttgggccgaggacgtatagatgatacggtttcctcctttcgccgtcgcttggaactctttcgtgagcaaactctgcccatgctcaagattctggataccagtaatcgtttgcagattgtaagtaaccaaagaacattccgaaaataataaatgatttttatacaatatatataaatatattgacaggttgatggagacacggatagtccatcagtgcagcgcgaattcgagcgtctcatccggaatcacatccagcgtttgttgaacaaaaccgatgatatagacgactcagccaacttgggtaatcaaatgatgcggaacgagcaaacggatgccattctacacgatctggagaccaatgtgccaggcgccgtgcccacaattagtcaccacgtgagcatgatgaacggtcatctgaaaaatcgcggaagcgccgtggggagtggaaaaccccacggtcagatgatgaacggacatgttcccggcagacccggaaccggacccgttggccaacctgcacccgtcgatttccggcacatgctggaggaggccgagcgatatccggtcgactcatatatgtagatgtaggcttaaaggaatccgtagtgcagacggatattcaagttttatatagttttctaatcaacctatactaagcgtactgttaatgctgatttgttgaattatcgatagtagttcgggggaccaatgcgtaagttagtccgtctagattaagagttagaagaattcaattcaatactttatttcactagacgagtaccgatttagaataagagtgcgttaggggtagactttagaatgtacgattttaataaaatcacaagagttgaaagttgctcaagaaatttattataatccgctactttcttcgaaaaaagatctgggggacaattgaccttaaccgattgcggtgttgcattaaatgttgcgtatcttggttaacaacgttgacttcaacagagccaatctggtggatgggatttccttgcctttccggactattgtgattgcgccattccaaaaattataatctttcttatcttcatcaaagtctccagtatcaaattcgacataaaatttgataaaagtatttcaactaaatacttttctgacgaatgattgatgttattagtcaactgataccaaaagtttggttaacgaattctctggaatttatatagcacttcattctcctaagctgtcggttggcccttaaaattttttataacttgttcatctggcttgggaatgctgctagcaaaggaatgcagttgaaaacttatgtaaggagttttaaactaaacttaaactttattttgtacataagagacttaatcagtggaggtcactaaagcaaatacaatatagttttgcaagcttatcatcgatgcatgtggagtcttccttgtatgaattcgttctgctgattttctccacatttacttgagcattttgggtggaattatggtataccactgtggcctggaagtcagcactattctgcttcactttaaacttaatacgataaaccgctgtttccgattccatcagtgtttggtgc

SEQ ID NO: 20303 - DNA, 1689 bp, DROSOPHILA
atgcaaaatgctggaaaaatcaaattcgatccgcccaaagtgccagtgatatttgttttaggcggccccggtagtggcaaggtcacccattgcgataccttcatgcaggagcgacgcggtgtaacgcacatcaatatgatggatctcctccagcaatatgcaatgggcaatgacatgcaagacttttcacaactgtcgtcgaaaacagtcactgaggtgctgatgttggaaatgaaaatggctccagctgccaaagcatacctgatatcgggatatccacgctccatgcgcgacgttgtcgagtattctgaaaagattcaagtcgtgaatggcgtgattcttatatcctggcgccaatcggttctacaaaagcaaatcgattatggggccaaattaggtcatgtagtactctccttagccaaaatggaattagaaaatttctttaaaaatgtgatgccagtcgccgattatttcgatcagagcgacatgttgttggccgtaaatggcgaacgtgcgcccacagaggtatacaaagactttcgcaccgccgtcctcgatatactgagcaccctcgagaaccaagaggccgttatgaatggagttacagaagacaacgacgttaccaatgcctcggaaactgcgggaacagttttggccagagatttggcgatcgaacggatggatggtgggccaaatggagccgtgacagctctgaaaacgggcaccaccagtgcggacgatgacagcggtgttgtggtcactcagcagccaaagttgcgccaggctgctggaccagacgaatccggatcggatttgccacctattatatgggtgatcggcggtccgggcagcaacaaggccacactctgcctcaaggctgtgggactaaatcctggctgggctcacatcagtgtcggtcgtcttttgcgcaatatcacggactctgcaccacgtgccaatacggaaagcttcgccgtcaaggaagccttggccgctggggatatggccccagaaaagtcgctgaatcagctgctggaaaccaatctgcgccagttacgggatagaactggaattatcgtagatggttatcccagaaacctgcagcaagtcaagtactttgagaacaagtataaacaacgaccgcctattatcctgctggattgctcaaaacttcagttgggccgaggacgtatagatgatacggtttcctcctttcgccgtcgcttggaactctttcgtgagcaaactctgcccatgctcaagattctggataccagtaatcgtttgcagattgttgatggagacacggatagtccatcagtgcagcgcgaattcgagcgtctcatccggaatcacatccagcgtttgttgaacaaaaccgatgatatagacgactcagccaacttgggtaatcaaatgatgcggaacgagcaaacggatgccattctacacgatctggagaccaatgtgccaggcgccgtgcccacaattagtcaccacgtgagcatgatgaacggtcatctgaaaaatcgcggaagcgccgtggggagtggaaaaccccacggtcagatgatgaacggacatgttcccggcagacccggaaccggacccgttggccaacctgcacccgtcgatttccggcacatgctggaggaggccgagcgatatccggtcgactcatatatgtag

SEQ ID NO: 20304 - protein, 562 aa, DROSOPHILA
MQNAGKIKFDPPKVPVIFVLGGPGSGKVTHCDTFMQERRGVTHINMMDLLQQYAMGNDMQDFSQLSSKTVTEVLMLEMKMAPAAKAYLISGYPRSMRDVVEYSEKIQVVNGVILISWRQSVLQKQIDYGAKLGHVVLSLAKMELENFFKNVMPVADYFDQSDMLLAVNGERAPTEVYKDFRTAVLDILSTLENQEAVMNGVTEDNDVTNASETAGTVLARDLAIERMDGGPNGAVTALKTGTTSADDDSGVVVTQQPKLRQAAGPDESGSDLPPIIWVIGGPGSNKATLCLKAVGLNPGWAHISVGRLLRNITDSAPRANTESFAVKEALAAGDMAPEKSLNQLLETNLRQLRDRTGIIVDGYPRNLQQVKYFENKYKQRPPIILLDCSKLQLGRGRIDDTVSSFRRRLELFREQTLPMLKILDTSNRLQIVDGDTDSPSVQREFERLIRNHIQRLLNKTDDIDDSANLGNQMMRNEQTDAILHDLETNVPGAVPTISHHVSMMNGHLKNRGSAVGSGKPHGQMMNGHVPGRPGTGPVGQPAPVDFRHMLEEAERYPVDSYM

SEQ ID NO: 20305 - DNA, 2955 bp, DROSOPHILA
gctttggcggaagacgacgacaagccctgtacaagtgctcaggcagcagctaaggcggccgctctcgccgctttaaaaaggggtccagcagctcgtggaaatgtgattcgaaaaaagcgtgccgctaatggacggattttcaaaatcgccgatgacggagatgactcggaggaggaatcggactcggaggacgacgatgttgaggaatttgtcaataactttcaagccaacagtgatgtgagtgatgccgactccgaagtggaagcagtaacatcaccaaagagagatgctttgccgctcgccgaggaggaggatgtgatagatataacgagagacgagactggcaaaaagaatgacgaaggcacgcccaacggcaggcttaagattatgtccgtctctagtctgaacgccaattttgtccatgggcaggatctgcatagaaagcccaatcccatgccgtctgctaagccagtcattgctgaccagattatcatttccgatgaggagtcatagaaagagttatatccgaagccctaattaagttatttattcaatatgttcagtttcttcctgaatacgttcggtacatttttcaactccccttgctaacacaaatgttgtaaggtcgactatttatttttgaatgtcaatccttaaatttaaattttaagtttatgcagaaaagtttatataattcaagcattgattgagttgacaattttcatatttgttttttgctttttttatagacatagacacgtgaagaactttttcatataaaaatgtcttacattcaaaaataactgccgcccttacatttttgtggttgctaatcgtggttacaaattcccctacgcctatttattgtaaagcctcctacctttgggtacaagccagaaaactacggtagtgtatatacggaatactactagtctaagttagtcgtataaaataaacagaacggtgagaaacgatgacgcaaagcgaaactgcgcctagtttattcaatttcaatgttgcgcagaaagcgggatacatccgaatcgtcgatggccgtctcctcgatgatgtcgaagtggtcgtaccctttgaagagcgtaaagctcgccttgtagcccttctttctcagcacatcagcgtagtggcgactttgctcgatgaaggtggtgctgtcatgctcggcggccaccacgtagatcttggtggagttccaaacggtaacatcggtgtattcccacagcatgggcgacacggactcgatattccgctcgttgaggcccagaatatttttgggattaaccgattccaagttagagagctccctcagatcgtaaacgccgcagaggaagatcaaagcccacaccatcttgctccgctgggctgtaatcacatttgggcgcatgagtatctgggccagcaagtgggcaccagccgagtgtccggcgaaggtgagcgacgacactttggtcatttcggtgtagtcaaagatccagttgaggaaatgggtgaactgggtcatcagctgctcgagggtgacctgcgggcacaggttgtagtccatgacggccactcggtatccacgccgcaccaggggacccacaatcgagcaggacatgctcatgtccatctcctgccagtagccgccgtgcacgaagacgaaaagcggcgcctggttggtggtcttttcgctgtagaacacatccaccaactgacgaccttctccgtagcgcaagtggtccacagtgatgccctgcttctcagtcagttccctgccatctggaattttacgtttaaatggggctccgccgtcgggaataccagttcttacgctgcttggtcacccgaacaaagtgctctagcacggccaaattcggttccggctgatcctgaaacctggtcgtatgatagctgggaaaatagtcccggtcaaggtctttgcacctcggattgtacattccagataagagacagtaagtcactgggacttcaaacacagattagaaaggcaaagtagcaagtgcttgggctatgtggtctaaatgttgttactgcgctttgcggtctattgtaatgcaatactagagcttagcttgaaacaattcaagtctaaccggattgccaaagttgagcagaaccgttagcttttaacgtataactaagctttcgtactaattaccggatctggaattgttgcaggagatggtgttttgcaacactaatcccagggtctaaatgattaagtgaacttatttttagagatttcaaatcagttatcaagattaaatcttaagaacaaaaccttacatttttgcaattttactacgtttttactatataaaaagggatgtaaaaaattcttgaggctaaaaaagagtttaaaaataaaaaaactattgaaaaacaacatttttagcaaaaaagagcgttgccagatgcaatatgtgaaattatatgcaatggtcactctgtgacaactcgacgataacaacgtatctggtatcgatgtacgataggcaccgataagtttacacaaataagccaactcagccgaaaagaattcggtttttccatctaattcaataatatttacgaaaatgagccgacagcagaatgaggaggacaccaactcggtgctattcgatgcccgcaacgagtactacatcggtaacttcatgggctcgatcaacttcgtgctgccggagcagggtaccgcgggtccggagctcctgtcctacatgtacctatcttacttggccatcgattccgggcgcatcgtggcctcggacatcaaggagggaaactccacgccactgcaggccttgcgtctggtgcacgaagcctttgagcagccttcgaggacggaggagctgctggagaaactcacggacaaggtggccggagaggaggatgagaccaacatctggcaccttgcaaccgccatcgtctactgccacg

SEQ ID NO: 20306 - DNA, 903 bp, DROSOPHILA
atgtacaatccgaggtgcaaagaccttgaccgggactattttcccagctatcatacgaccaggtttcaggatcagccggaaccgaatttggccgtgctagagcactttgttcgggtgaccaagcagcatggcagggaactgactgagaagcagggcatcactgtggaccacttgcgctacggagaaggtcgtcagttggtggatgtgttctacagcgaaaagaccaccaaccaggcgccgcttttcgtcttcgtgcacggcggctactggcaggagatggacatgagcatgtcctgctcgattgtgggtcccctggtgcggcgtggataccgagtggccgtcatggactacaacctgtgcccgcaggtcaccctcgagcagctgatgacccagttcacccatttcctcaactggatctttgactacaccgaaatgaccaaagtgtcgtcgctcaccttcgccggacactcggctggtgcccacttgctggcccagatactcatgcgcccaaatgtgattacagcccagcggagcaagatggtgtgggctttgatcttcctctgcggcgtttacgatctgagggagctctctaacttggaatcggttaatcccaaaaatattctgggcctcaacgagcggaatatcgagtccgtgtcgcccatgctgtgggaatacaccgatgttaccgtttggaactccaccaagatctacgtggtggccgccgagcatgacagcaccaccttcatcgagcaaagtcgccactacgctgatgtgctgagaaagaagggctacaaggcgagctttacgctcttcaaagggtacgaccacttcgacatcatcgaggagacggccatcgacgattcggatgtatcccgctttctgcgcaacattgaaattgaataa

SEQ ID NO: 20307 - protein, 300 aa, DROSOPHILA
MYNPRCKDLDRDYFPSYHTTRFQDQPEPNLAVLEHFVRVTKQHGRELTEKQGITVDHLRYGEGRQLVDVFYSEKTTNQAPLFVFVHGGYWQEMDMSMSCSIVGPLVRRGYRVAVMDYNLCPQVTLEQLMTQFTHFLNWIFDYTEMTKVSSLTFAGHSAGAHLLAQILMRPNVITAQRSKMVWALIFLCGVYDLRELSNLESVNPKNILGLNERNIESVSPMLWEYTDVTVWNSTKIYVVAAEHDSTTFIEQSRHYADVLRKKGYKASFTLFKGYDHFDIIEETAIDDSDVSRFLRNIEIE

SEQ ID NO: 20308 - DNA, 3062 bp, DROSOPHILA
atcagctgctcgagggtgacctgcgggcacaggttgtagtccatgacggccactcggtatccacgccgcaccaggggacccacaatcgagcaggacatgctcatgtccatctcctgccagtagccgccgtgcacgaagacgaaaagcggcgcctggttggtggtcttttcgctgtagaacacatccaccaactgacgaccttctccgtagcgcaagtggtccacagtgatgccctgcttctcagtcagttccctgccatctggaattttacgtttaaatggggctccgccgtcgggaataccagttcttacgctgcttggtcacccgaacaaagtgctctagcacggccaaattcggttccggctgatcctgaaacctggtcgtatgatagctgggaaaatagtcccggtcaaggtctttgcacctcggattgtacattccagataagagacagtaagtcactgggacttcaaacacagattagaaaggcaaagtagcaagtgcttgggctatgtggtctaaatgttgttactgcgctttgcggtctattgtaatgcaatactagagcttagcttgaaacaattcaagtctaaccggattgccaaagttgagcagaaccgttagcttttaacgtataactaagctttcgtactaattaccggatctggaattgttgcaggagatggtgttttgcaacactaatcccagggtctaaatgattaagtgaacttatttttagagatttcaaatcagttatcaagattaaatcttaagaacaaaaccttacatttttgcaattttactacgtttttactatataaaaagggatgtaaaaaattcttgaggctaaaaaagagtttaaaaataaaaaaactattgaaaaacaacatttttagcaaaaaagagcgttgccagatgcaatatgtgaaattatatgcaatggtcactctgtgacaactcgacgataacaacgtatctggtatcgatgtacgataggcaccgataagtttacacaaataagccaactcagccgaaaagaattcggtttttccatctaattcaataatatttacgaaaatgagccgacagcagaatgaggaggacaccaactcggtgctattcgatgcccgcaacgagtactacatcggtaacttcatgggctcgatcaacttcgtgctgccggagcagggtaccgcgggtccggagctcctgtcctacatgtacctatcttacttggccatcgattccgggcgcatcgtggcctcggacatcaaggagggaaactccacgccactgcaggccttgcgtctggtgcacgaagcctttgagcagccttcgaggacggaggagctgctggagaaactcacggacaaggtggccggagaggaggatgagaccaacatctggcaccttgcaaccgccatcgtctactgccacgacgggcagttcgagaacgcactgaagatcctgcacggctccaccaatctggagtcgatggctctgtcggtccagtgcctgctgcgtctgcagcgcgtggacctggccaagcagctggtggccaagatgcaggagatcagcgacgatgctacgctgactcagctcgctcaggcgtgggtggccctcgcccagggaacggaacagatgcaggacgcctttcacatctaccaggagttctgtgaaaagttcaagccaactccggcgctgctgaacggccaagcggtcgttcatttgggtctggagcggtacgaggaggcagattccgttctgcgtgaatctctgctgaagaagcacaacgactacgacacgctgatcaatctgatggttcatgcccatcttacgggcaagccgacagaggcgatcacccggaatctagaacagctgaggcagttctatcccaagagcgactttgtcaccgatctagacaagaagtcagcggagttcgaccgcctgtgcctgcagtacgacgtcgagggcggtgaaaaactgctcgccgtctagatataagaaaaaattccaaatatccaaattaacaaaaccttttgttcatgtattaaactacaataaaaatttattagaaatgtattgaggtagcggagagcagattaatagctgtaaagataatacaaagtattagggtggattttttatgtttgactgctgtgctgggtactcacttctgtttgaagccatatttcttgcgttcgtagaacaggtcagtcttggagctgcctagatttacaatcttggggcatccgtcgcgctataagaaccaaaatggacaataataccacagaatgcaccagaatgcatgacttgcgaactcacgtccttttcctgaatggtgcaggacttgcagtagtaggcatccgacactccgggtcctccacagatgacgcacctgccctggtaggatccgtagttgcactcgtcgcagatccgcaccagtgtgcatggccgcacgtaggagtcgcagatcacacactttccatcgtctttttcacacaggcgtccaatggctgccgcatgagatggcgagagatttcgaattattggattgtctgggattttcaacgggtttttttgagaactcacccacgccgggctgcttgcggcagaaaatcaaatccggatgatgtttggccatgatttaatattagttttcagtcagcaaatataaaaacagttgctgaaaaagcggcgacttctttatagtgtgacctttacacactctcgctttcagggttgccaagtggtcagcattatcatgtagggcattcattaaactctatgatggcttgaataaagaaaaaattaatttttttttaaaaatattatttaccacatttgataatacaatatagatacaaataatattttttaacaattaactgaaattaaataactttcaaaagcaactggcagccctacaccatgcagtttggccattcacagcgactagtaaacaacaacagctgttcgcattctcgaattttattttctgtattcgcattaagctttggtccaaaatattgcaaaaacactcccacgatgcaacagatcag

SEQ ID NO: 20309 - DNA, 1062 bp, DROSOPHILA
cgataagtttacacaaataagccaactcagccgaaaagaattcggtttttccatctaattcaataatatttacgaaaatgagccgacagcagaatgaggaggacaccaactcggtgctattcgatgcccgcaacgagtactacatcggtaacttcatgggctcgatcaacttcgtgctgccggagcagggtaccgcgggtccggagctcctgtcctacatgtacctatcttacttggccatcgattccgggcgcatcgtggcctcggacatcaaggagggaaactccacgccactgcaggccttgcgtctggtgcacgaagcctttgagcagccttcgaggacggaggagctgctggagaaactcacggacaaggtggccggagaggaggatgagaccaacatctggcaccttgcaaccgccatcgtctactgccacgacgggcagttcgagaacgcactgaagatcctgcacggctccaccaatctggagtcgatggctctgtcggtccagtgcctgctgcgtctgcagcgcgtggacctggccaagcagctggtggccaagatgcaggagatcagcgacgatgctacgctgactcagctcgctcaggcgtgggtggccctcgcccagggaacggaacagatgcaggacgcctttcacatctaccaggagttctgtgaaaagttcaagccaactccggcgctgctgaacggccaagcggtcgttcatttgggtctggagcggtacgaggaggcagattccgttctgcgtgaatctctgctgaagaagcacaacgactacgacacgctgatcaatctgatggttcatgcccatcttacgggcaagccgacagaggcgatcacccggaatctagaacagctgaggcagttctatcccaagagcgactttgtcaccgatctagacaagaagtcagcggagttcgaccgcctgtgcctgcagtacgacgtcgagggcggtgaaaaactgctcgccgtctagatataagaaaaaattccaaatatccaaattaacaaaaccttttgttcatgtattaaactacaat

SEQ ID NO: 20310 - protein, 306 aa, DROSOPHILA
MSRQQNEEDTNSVLFDARNEYYIGNFMGSINFVLPEQGTAGPELLSYMYLSYLAIDSGRIVASDIKEGNSTPLQALRLVHEAFEQPSRTEELLEKLTDKVAGEEDETNIWHLATAIVYCHDGQFENALKILHGSTNLESMALSVQCLLRLQRVDLAKQLVAKMQEISDDATLTQLAQAWVALAQGTEQMQDAFHIYQEFCEKFKPTPALLNGQAVVHLGLERYEEADSVLRESLLKKHNDYDTLINLMVHAHLTGKPTEAITRNLEQLRQFYPKSDFVTDLDKKSAEFDRLCLQYDVEGGEKLLAV

SEQ ID NO: 20311 - DNA, 3810 bp, DROSOPHILA
aaattccaaatatccaaattaacaaaaccttttgttcatgtattaaactacaataaaaatttattagaaatgtattgaggtagcggagagcagattaatagctgtaaagataatacaaagtattagggtggattttttatgtttgactgctgtgctgggtactcacttctgtttgaagccatatttcttgcgttcgtagaacaggtcagtcttggagctgcctagatttacaatcttggggcatccgtcgcgctataagaaccaaaatggacaataataccacagaatgcaccagaatgcatgacttgcgaactcacgtccttttcctgaatggtgcaggacttgcagtagtaggcatccgacactccgggtcctccacagatgacgcacctgccctggtaggatccgtagttgcactcgtcgcagatccgcaccagtgtgcatggccgcacgtaggagtcgcagatcacacactttccatcgtctttttcacacaggcgtccaatggctgccgcatgagatggcgagagatttcgaattattggattgtctgggattttcaacgggtttttttgagaactcacccacgccgggctgcttgcggcagaaaatcaaatccggatgatgtttggccatgatttaatattagttttcagtcagcaaatataaaaacagttgctgaaaaagcggcgacttctttatagtgtgacctttacacactctcgctttcagggttgccaagtggtcagcattatcatgtagggcattcattaaactctatgatggcttgaataaagaaaaaattaatttttttttaaaaatattatttaccacatttgataatacaatatagatacaaataatattttttaacaattaactgaaattaaataactttcaaaagcaactggcagccctacaccatgcagtttggccattcacagcgactagtaaacaacaacagctgttcgcattctcgaattttattttctgtattcgcattaagctttggtccaaaatattgcaaaaacactcccacgatgcaacagatcagctaggtagttgtgtggtacttagggcagcaagcaggacttgagaaaggacaccagcaaaatgtcgcagacagcatccacaacgcaaagtgtaaccgctgcaccggcgggtggcagcagacgcaatgaagtgggcggcgtgggcgtcatcgggaccaccatgtcggctagatatggagaaacagaatgggaggctcgggaggtgcgtatcggagtgtgatgctttatatcatttcccataaactcccattttctattcagtcccagcggcagagggaactgcacgaagctcgagcacgggcggcgcagatggagaaaaccatgaagtggtggtaagtggagcagctcgtcgtgctcaaaactatctgctaatccaaacatcaaccattcccaggtccgactgcactgccaactggcgggagaagtggagtaaggtaatttggttgccatggctttaaagttgggtcaatatcgccggtatccaataacaaaacttttcacttttcgcaggtccgcaacgagcggaataaggccagagaggagtccaagcagctgagcctcaaactggacggcgtcatgaaggaggcccactcgctgaagcgggagaagaacgatctcgagttgcagatcacgcagctaaagaaggagatggagaaagtgcacacgctgatgatgaagcacgccggtcagttccatcgagccgacaccagcgaggatgcggaggccaacggacgggatgccaactgctcgccggatatctcctcggatggcttaaagaatatcaatagcgaggacggcttggttaccaagctgcccaatgatgtcaaggatctagacattgaggagttcgctatgaagggggctatgcccaaacatctgaccgagttggacgaagcggcggctgccgaggagaagcgcctgattcagcaattgtcaaaggatgactttgacgaagactacttgctgcaaaagatatccatgctgcaattgcgcctcgacgaggctcagaaaactcttcaagcggaaagggagtgagtaatctctattccaataataatactttaattatttctattattttcgcagcgaaaagctggagctgcacaagagcattgagaaactgacgctggagatccaggacgtgcgcggacgtcaagaggagatgcgctcggccaagcaggaggcagtgcgtgaactattaactcttcaagaacaacatcgtgctgagatgcgtatcgtgaataactcgctgcaggaggagattgctgcccgtgagaatctcgagcgccggtaagcaaatacgcattctgtactttgacaagagtgtaactatcgattcattgcagcctcacggagcttcgcactgaactggagcaccttcaggcggagaacgcctccgaatggggcaagcgcgagcgactggagtccgagaaattggccatggagcgtgacaacaagaaactgcgcgcagaactgcgagattatcaggaacgttcggaccgtaagtgccgacccatgcaagctaatgacgtggagctgcgagcattgcagcaggaactttcggagcgcaacaaggagatcagcgaggtgaagatgtcgcacgccaagctaaagaagttgctggccgaaacaaacacagagctgggacacgccgtgcggcgagccgagcagtatgaggcggaggtgagtaaatccacatccaaaaatcttatcagatgatatatggatcagattacgcgtatcagcttatcagcctaggaaaacttaaagatgtaacagccttcctcgccgaaccgaattcggtttgattaacatttattcacattgacacttcgacataaaacaaattggtaaatgcagtactttatgattttcgaaacaagtacattagttagcaaatgccgccagtccggtgatggctcggcccaggatcaacgcgtgtatatcgtgcgtgccctcataggtgttaactgactccaggttgattacatggcggatcacatgatattcgtcgctgattccgtttgcacccagcatgtccctcatttggcgcgctatatcaagcgatttgccagtattgtttcgctttagaagggaaatcatgtcgggcgtgtgcagcttctgatccttgaggcgacccacatgcaggcaagcctgcagacccaacgcaatctctgtgatggcatcggccagcttcttttggatcaactgatttgcagccaaaggacgaccgaattgtttgcgatccagtgtatactggcgagcaatctccacgcaggtttcagctgctcccagggctccccacgcgattccatagcgagcgttgttcagacagctgaagggtccactaaagccggccacattgggtagcaactgctcctctggcacacggacctcgtccatcaggatcatacccgtgggcgaagcacgcagagagaacttgccctcgatctttggcgtctccaaacccttgccggatatcttgcgatccaccaggaagccgcgtaccttgccatcctcgcattttgcccatacgactatgacgtctgcgatgggcgcactagtaatccacgtcttagatccgttcaggatgtatgtcttgcttttgctatcgtacttggcacgggtctccatgccagcggggtcactaccgtggttgggttcagttaggccaaaggcacctgaataaatatgtaaagaaattgagattcgtttaaagagaacacatataaactacgggactttatataattcactc

SEQ ID NO: 20312 - DNA, 1454 bp, DROSOPHILA
attaagctttggtccaaaatattgcaaaaacactcccacgatgcaacagatcagctaggtagttgtgtggtacttagggcagcaagcaggacttgagaaaggacaccagcaaaatgtcgcagacagcatccacaacgcaaagtgtaaccgctgcaccggcgggtggcagcagacgcaatgaagtgggcggcgtgggcgtcatcgggaccaccatgtcggctagatatggagaaacagaatgggaggctcgggagtcccagcggcagagggaactgcacgaagctcgagcacgggcggcgcagatggagaaaaccatgaagtggtggtccgactgcactgccaactggcgggagaagtggagtaaggtccgcaacgagcggaataaggccagagaggagtccaagcagctgagcctcaaactggacggcgtcatgaaggaggcccactcgctgaagcgggagaagaacgatctcgagttgcagatcacgcagctaaagaaggagatggagaaagtgcacacgctgatgatgaagcacgccggtcagttccatcgagccgacaccagcgaggatgcggaggccaacggacgggatgccaactgctcgccggatatctcctcggatggcttaaagaatatcaatagcgaggacggcttggttaccaagctgcccaatgatgtcaaggatctagacattgaggagttcgctatgaagggggctatgcccaaacatctgaccgagttggacgaagcggcggctgccgaggagaagcgcctgattcagcaattgtcaaaggatgactttgacgaagactacttgctgcaaaagatatccatgctgcaattgcgcctcgacgaggctcagaaaactcttcaagcggaaagggacgaaaagctggagctgcacaagagcattgagaaactgacgctggagatccaggacgtgcgcggacgtcaagaggagatgcgctcggccaagcaggaggcagtgcgtgaactattaactcttcaagaacaacatcgtgctgagatgcgtatcgtgaataactcgctgcaggaggagattgctgcccgtgagaatctcgagcgccgcctcacggagcttcgcactgaactggagcaccttcaggcggagaacgcctccgaatggggcaagcgcgagcgactggagtccgagaaattggccatggagcgtgacaacaagaaactgcgcgcagaactgcgagattatcaggaacgttcggaccgtaagtgccgacccatgcaagctaatgacgtggagctgcgagcattgcagcaggaactttcggagcgcaacaaggagatcagcgaggtgaagatgtcgcacgccaagctaaagaagttgctggccgaaacaaacacagagctgggacacgccgtgcggcgagccgagcagtatgaggcggagattacgcgtatcagcttatcagcctag

SEQ ID NO: 20313 - protein, 446 aa, DROSOPHILA
MSQTASTTQSVTAAPAGGSRRNEVGGVGVIGTTMSARYGETEWEARESQRQRELHEARARAAQMEKTMKWWSDCTANWREKWSKVRNERNKAREESKQLSLKLDGVMKEAHSLKREKNDLELQITQLKKEMEKVHTLMMKHAGQFHRADTSEDAEANGRDANCSPDISSDGLKNINSEDGLVTKLPNDVKDLDIEEFAMKGAMPKHLTELDEAAAAEEKRLIQQLSKDDFDEDYLLQKISMLQLRLDEAQKTLQAERDEKLELHKSIEKLTLEIQDVRGRQEEMRSAKQEAVRELLTLQEQHRAEMRIVNNSLQEEIAARENLERRLTELRTELEHLQAENASEWGKRERLESEKLAMERDNKKLRAELRDYQERSDRKCRPMQANDVELRALQQELSERNKEISEVKMSHAKLKKLLAETNTELGHAVRRAEQYEAEITRISLSA

SEQ ID NO: 20314 - DNA, 5352 bp, DROSOPHILA
ctctcgaattgcttcaagttcagccagaaattgaaactgcagtggagcttgttggctagcccaacagcagggtatcaataatagtaaataaagtagaatcgtatggacgttatttattctctgttgaaaattccataaaaccagaaattgattacccactactaagaatctacaaatacatcacaaatggccacttcccattaaaatttcaagtattttcagtgactgcacgtgaatccggctaatgatatctactaatatagataaatatagcacacatgctgcaattaaatatgaattttttgcttatcaaataaacagagcttaatttcctactaattagctattttgaagtgcatggtggtagtcggctctccgatggattagataagacctatcgctctgcaaaaaaaaatgtaggtcagctggaatttcgagcatccaatttcagattttggagctttcgggtgttacccgttgctaatgggtagatcttaattggacgacctccatggcttcaagttcagtgctggtcaatcgtggcatatgtgagtgctgtcaataataccactgatacttttttaatgccgctcgttaaacggttcccaccgacccagagggcggtacttgctatttgacactctttcggctggcgagtgctccatattatattaaattgaatttggtggcgatgtctcgctataaagcatgatacgcccgtagtcgatgtgtccaattcccgttaggcaaccaaacgactggaatcgagcgatccaccaattctcgatcgggctgcgaatcgatccgattacgatccaaaccgaaccgattcggcgacattcagttcgccgttcgaagagctcgagtgcgcgtgtcaactggatcagctccccccccaatagctccccacaatcccatccctctgtacctttaaaggcactcatatatgtatatatatataactttattttttcaagatcacggcagagagcagggcaccgctcctccttgctcacacctacaactacactcgcctttaactctctcaatctctccagttcggtgctcgtgtcggtcgtaaacataactcaaaaagcgctgctgaagtcagtagccggctaaacgcgactcggatcggaagtctccgctcctggcaatcagaaaatcccctccacgcgataagggtgtacataaaaaaaaaaaaataaataaaacaagttaaataaatatataagaaaatcacataagaaatgcaacttttcgacgacttttgcaaaagcttcaacaaggaattgcaaagggcgaatttcggctttgcgtacaatcgagttcatttattctacagatctcaggtgaggacagtttcacgtaatagtcgtccaaacacagccgtcttctttatcggtgctgttacaactcaggtggtggtatcatacgtgccaatgcaaatagcagtagcgaaaaataagtacatatatacatagtagtcactgtcattagtgttccgtgcaaaaacttcgtgtgagatcacagaggcacgtgtttcttaaatatgaaaagccaaggggctagttgttcgttcgcaaatgtcgaagtcaatgcatttgaaatggtattcccacaataattggcctgtacaaacgacgtcgcactacgacccaggctatcagcaaattaactagataagtgcaataaaaaacatgataagcaaaacacccgaaaaataaagggtttttaaagagtaaaccattaaaattcctatcataacaatttaacgaagctccgcgcattaagccaaaatataacctgagtaccccagggcattctatatctgccatccattagaaatacacttaaaaggtaaaactggcttgtataccaaatgttcattagagtgtgctcaacaaaaaaaaaaaagcgaagttcacagagaacataaaatgttatggtgagaacacattgtacacgcaggcattgttaattaattcgtatttaattagcacagctaaactaaaagctgggctctattcaaagttgtattgctctaaacaaatatcacgaatagaacaaactaaagtgtaacccaaatggatatgaaactatgtttttaaccaactgttcatgaatgaaggcaaaccatcaaaaaccatcagttaagtgtaaaagaatcttttatcactatatatttgtacactcatgagcaaatataaaagttatatggacaaagatatctacaagaccatgatgatgataccaagttagataagaattatgaaattttgagctccctttttcgacaattcattctgagtataatccggcaagaaaataccaatcggctacattaatgtttttgtgtcaacattatgagtcattttaaaatcaccaaaataaattcccttaaaaaagccaagtactgaaaacccctgatagttattggagctcttccataacactgattacacatttctcacgaatgaaatactaatcaaatcaaaacaggaaccagacaatagttttggcgctcgccataaatattcttgctagaccttatcagacagccaacaacaagccataaacatccatgaaggatcgcgttatctaacgaatcaatgtttttatttccgcaatatttaagttctaaacaaataaatttgaataatactacgcacgcaacaaaactaaaagctgtgatgcgacgaaggtgatatcagttagacaggccctaattcggactacgtcattgctagtgataagcgcttagcatgtttgttaacgcgggcaaaggtgtggaatattttaattaaaatattacatgattattaatcgatgatcatgtaagggtcagactggtgcacgcgataaggaattcgctatcaatcgctgtcacagcaacaatgtaacaatgaattattgcccatatataatatatttttaatttaatcaattgtattacattaattattaaatagctaaaactatataattctcgtattgcagtggcaaaaagatgagatcaacacaatatacttgctctaccgatggatttgggcactgtttttcctgggcgtgtacatcatgtgcgttatcgttcagttttgcgatggaaagttcttcatctacatgaccaactggggattcgggctctgtacgatcaccatgctgatttccgccgtacaagtcacctgctggcacttcgatgtgaggagcacccggagcctggtacaggagtccggtcacaaggcggagacgtcgaggggcctgaaaatctactggtggctctacaatatgacactgtcgctggctctgatcatatcaacagtatactgggtgttcctccatggaaaaatgagtgagtattgccgtatctgcgttcattatttacattgctttaaatgacagtggtgggtgtgcaagctattacataccttacgatatctatgtgcaatagagagaaagagggcatattttataacatatttaatgaatttcctttcgttacagacaagcccatgcgattccctgccatcagcattatcacccacggcatgaattctgtgatgatgctaatcgatttcctggtcattgcatttccgcttaggatacttcacatggtgtacggaatgagtctggcgatattcttctttttattcacgctgatctaccatttatgcgggggaacagatgagtgagtacttgaaatcttacccgtataccttgcaatttagagctaatcaccttcacaattctccttcagatttggcaatcactacgtgtatcccattctggattggaacaatcccaaccgctgtatggtgacctttgtgggcatcttcctgctcattatgtgctactgggtgctgctctttggactctacaagttgaagagaatgttcaatagggcattcagtgtggtttggtctcctcatgctgtgggtctgatatgagggagttaatacaacaaaaagtcattgaatatcacctcatgggcacccgcacgtataccatgttcttatatgcattgccagcattatgtaactcccattaacaaatccatccaaaaacgacactgaaaagggagtcgcacacttgcatgcatttatttatatctagtatttcatattgtaagttttaatcatttggttccttaacattgaattggtttagttaggttaattcttatacattatgttgttattacatatttggtttaaatagtataaatatgaaatttgttgaaaatactctacccaagggttagataaaaagaataatggaattgtattaaaatatatcacgaatatcaaaagtggaaagaaacgaaataaagaaaatgtggcgttattgaatttaattgtggaaatcgaatattttattattatagacatgaacaggataatttttataaaagtaatatctaaatttattttcgctgttcgttttttaaacaattatataagtaattgaaactcattatatttcattcaaaattaaaacaattgtagataacattttaattgttctgcatttcgagcaagcttatctctagtctttggaagcaatttgtaaataatttttcaaaatgttttttttttaataccctttcatattttatcagcaccgtagagatcattaaaacatttactgtgaagtggaacaggttgaatgacactaaagatttcggtaaccggaatacttactttttcgcttacttttctaacccaaatctcgaagacttttgttattcttcaataaaatgcttactaagcttttttcgttgtaatgctgcaattaggttacaaatccagttttaagaaagtgctaagatctttctaaatattacgaaacaattaagacattaacaaaaacgagctcttttcttctcttttataccaagctgtacccgcaggtaaaatgtacttttatgtggctgcaaacatttgccaaataaaagcacacacaaatgcacataatttaggtgagcgagtaattaagcccaaagtggacaaaagaggagggcaaaaacggagccaaaaagcatccatcgttttttatggctacttggtcgttcgttctgtcaatacaatacccaaacactgtaaaaaccaattggaagttttttattgaaaacattaataaagtcattaatattgttgttgttatagattccagagacattaaatagtaaatagtattttaaagttaacaaacacatatttatgttacaaaatccctgaattgttttctctgtacagcttctctctttctctcttggctctgccgtaaaatacatgtgcgagcacacctgcctgcgtcgacgtcaccgtcggctgcgcagtcgccgccgcgtct

SEQ ID NO: 20315 - DNA, 1483 bp, DROSOPHILA
gctcctccttgctcacacctacaactacactcgcctttaactctctcaatctctccagttcggtgctcgtgtcggtcgtaaacataactcaaaaagcgctgctgaagtcagtagccggctaaacgcgactcggatcggaagtctccgctcctggcaatcagaaaatcccctccacgcgataagggtgtacataaaaaaaaaaaaataaataaaacaagttaaataaatatataagaaaatcacataagaaatgcaacttttcgacgacttttgcaaaagcttcaacaaggaattgcaaagggcgaatttcggctttgcgtacaatcgagttcatttattctacagatctcagtggcaaaaagatgagatcaacacaatatacttgctctaccgatggatttgggcactgtttttcctgggcgtgtacatcatgtgcgttatcgttcagttttgcgatggaaagttcttcatctacatgaccaactggggattcgggctctgtacgatcaccatgctgatttccgccgtacaagtcacctgctggcacttcgatgtgaggagcacccggagcctggtacaggagtccggtcacaaggcggagacgtcgaggggcctgaaaatctactggtggctctacaatatgacactgtcgctggctctgatcatatcaacagtatactgggtgttcctccatggaaaaatgaacaagcccatgcgattccctgccatcagcattatcacccacggcatgaattctgtgatgatgctaatcgatttcctggtcattgcatttccgcttaggatacttcacatggtgtacggaatgagtctggcgatattcttctttttattcacgctgatctaccatttatgcgggggaacagatgaatttggcaatcactacgtgtatcccattctggattggaacaatcccaaccgctgtatggtgacctttgtgggcatcttcctgctcattatgtgctactgggtgctgctctttggactctacaagttgaagagaatgttcaatagggcattcagtgtggtttggtctcctcatgctgtgggtctgatatgagggagttaatacaacaaaaagtcattgaatatcacctcatgggcacccgcacgtataccatgttcttatatgcattgccagcattatgtaactcccattaacaaatccatccaaaaacgacactgaaaagggagtcgcacacttgcatgcatttatttatatctagtatttcatattgtaagttttaatcatttggttccttaacattgaattggtttagttaggttaattcttatacattatgttgttattacatatttggtttaaatagtataaatatgaaatttgttgaaaatactctacccaagggttagataaaaagaataatggaattgtattaaaatatatcacgaatatcaaaagtggaaagaaacgaaataaagaaaatgtggcgttattgaattt

SEQ ID NO: 20316 - protein, 275 aa, DROSOPHILA
MQLFDDFCKSFNKELQRANFGFAYNRVHLFYRSQWQKDEINTIYLLYRWIWALFFLGVYIMCVIVQFCDGKFFIYMTNWGFGLCTITMLISAVQVTCWHFDVRSTRSLVQESGHKAETSRGLKIYWWLYNMTLSLALIISTVYWVFLHGKMNKPMRFPAISIITHGMNSVMMLIDFLVIAFPLRILHMVYGMSLAIFFFLFTLIYHLCGGTDEFGNHYVYPILDWNNPNRCMVTFVGIFLLIMCYWVLLFGLYKLKRMFNRAFSVVWSPHAVGLI

SEQ ID NO: 20317 - DNA, 3538 bp, DROSOPHILA
ggttaccaagctgcccaatgatgtcaaggatctagacattgaggagttcgctatgaagggggctatgcccaaacatctgaccgagttggacgaagcggcggctgccgaggagaagcgcctgattcagcaattgtcaaaggatgactttgacgaagactacttgctgcaaaagatatccatgctgcaattgcgcctcgacgaggctcagaaaactcttcaagcggaaagggagtgagtaatctctattccaataataatactttaattatttctattattttcgcagcgaaaagctggagctgcacaagagcattgagaaactgacgctggagatccaggacgtgcgcggacgtcaagaggagatgcgctcggccaagcaggaggcagtgcgtgaactattaactcttcaagaacaacatcgtgctgagatgcgtatcgtgaataactcgctgcaggaggagattgctgcccgtgagaatctcgagcgccggtaagcaaatacgcattctgtactttgacaagagtgtaactatcgattcattgcagcctcacggagcttcgcactgaactggagcaccttcaggcggagaacgcctccgaatggggcaagcgcgagcgactggagtccgagaaattggccatggagcgtgacaacaagaaactgcgcgcagaactgcgagattatcaggaacgttcggaccgtaagtgccgacccatgcaagctaatgacgtggagctgcgagcattgcagcaggaactttcggagcgcaacaaggagatcagcgaggtgaagatgtcgcacgccaagctaaagaagttgctggccgaaacaaacacagagctgggacacgccgtgcggcgagccgagcagtatgaggcggaggtgagtaaatccacatccaaaaatcttatcagatgatatatggatcagattacgcgtatcagcttatcagcctaggaaaacttaaagatgtaacagccttcctcgccgaaccgaattcggtttgattaacatttattcacattgacacttcgacataaaacaaattggtaaatgcagtactttatgattttcgaaacaagtacattagttagcaaatgccgccagtccggtgatggctcggcccaggatcaacgcgtgtatatcgtgcgtgccctcataggtgttaactgactccaggttgattacatggcggatcacatgatattcgtcgctgattccgtttgcacccagcatgtccctcatttggcgcgctatatcaagcgatttgccagtattgtttcgctttagaagggaaatcatgtcgggcgtgtgcagcttctgatccttgaggcgacccacatgcaggcaagcctgcagacccaacgcaatctctgtgatggcatcggccagcttcttttggatcaactgatttgcagccaaaggacgaccgaattgtttgcgatccagtgtatactggcgagcaatctccacgcaggtttcagctgctcccagggctccccacgcgattccatagcgagcgttgttcagacagctgaagggtccactaaagccggccacattgggtagcaactgctcctctggcacacggacctcgtccatcaggatcatacccgtgggcgaagcacgcagagagaacttgccctcgatctttggcgtctccaaacccttgccggatatcttgcgatccaccaggaagccgcgtaccttgccatcctcgcattttgcccatacgactatgacgtctgcgatgggcgcactagtaatccacgtcttagatccgttcaggatgtatgtcttgcttttgctatcgtacttggcacgggtctccatgccagcggggtcactaccgtggttgggttcagttaggccaaaggcacctgaataaatatgtaaagaaattgagattcgtttaaagagaacacatataaactacgggactttatataattcactcaatatttcattaaaatatgattttattcatttggcactcaccaatcagcttgccctccgccatgctgggcaaatagcgttgcttctgctcctcggatccaaagtcgtagatggcgcccatggccagcgagctctggacactgacagcagaccgataagcggagtccacgcgctccacctcgcgggtgagcaagccgtaggcaacgctagagactccggcgcagccgtatcccttaatggtgcagccgaggacacccagactgccgatctcctccataattttcttgtcgaacgtctccaggcgattggccatcttgacgcgcggctgcagctcggcctgacagtatccacggaacgcatcccgaatggccacctcttcctcggtcaattggctctccaaattcagcggatcctgccagttgaatttgggagctgcggctttggagctcgtgctggccaagcggcgggcacacggtcgcagtttgctgattacactttgcgcaatcataattccgattcggttctgtcttttctgttggaagtgatcagccggttctccacggaacagctgctcgattcgacgttcggcgagagactgaagaaagcttaaatctacagcgagagcttttggctgcccgctcttcgcgcgctctcttcgctcttcttcgccaactttgtttacctcgctttaatattgttgttatgcccgatcttaatctgcgggttctaaatttttcgcactatcgcgcttatatttcacttgacgatagaaaccaagagtgaagcgagtgtggaaggaaatatttttccattttaagcgttatcaccacttggcgggggtcgtctgcttatcagttgtgtttgaagactggaaggcacgcccccttgctctttgtgcttcgagttttgggtacagatgcatcttatgcgttcagaacaaatatgtaatataccaatctgaatccacatatgtagctacatcactacttttctctattttcctgcaggtgaagcgtctgcgtcagcgtgtggaggagctgaagcgggagttagctggtgctgaggacgaactggattcggccgttaaccaagtgcgccgcttgcagcgttccaacgatgagctggtgggtcagacggaaggattacaggtgcagattcagcacctccagaataggtaagatcagttcgaaagaaacatttagatttgcataccgctaagtctgtggactaactctaataaccactaacttttcaactggtgctggcttgactaataacctaactcctaacccacgcttaacccaacgaaaaagacgtgctcccagtccccagctgcggggcatgggcggggtgcaattgaggaataagattgccgtggagctgcccaacgactgtctgccgaatatcaatgatcttcgccagatctttgatgactcgcaggcaggtttgaggagctcccacaatggcagcgatgccgctatgcatcatgctgcttccgtaaagagatctagtcacacggaacgaacgctcctgcagcagcagcagagtagtgctgcggcatctgcagcggcggcggcagcg

SEQ ID NO: 20318 - DNA, 1420 bp, DROSOPHILA
tcgaatcgagcagctgttccgtggagaaccggctgatcacttccaacagaaaagacagaaccgaatcggaattatgattgcgcaaagtgtaatcagcaaactgcgaccgtgtgcccgccgcttggccagcacgagctccaaagccgcagctcccaaattcaactggcaggatccgctgaatttggagagccaattgaccgaggaagaggtggccattcgggatgcgttccgtggatactgtcaggccgagctgcagccgcgcgtcaagatggccaatcgcctggagacgttcgacaagaaaattatggaggagatcggcagtctgggtgtcctcggctgcaccattaagggatacggctgcgccggagtctctagcgttgcctacggcttgctcacccgcgaggtggagcgcgtggactccgcttatcggtctgctgtcagtgtccagagctcgctggccatgggcgccatctacgactttggatccgaggagcagaagcaacgctatttgcccagcatggcggagggcaagctgattggtgcctttggcctaactgaacccaaccacggtagtgaccccgctggcatggagacccgtgccaagtacgatagcaaaagcaagacatacatcctgaacggatctaagacgtggattactagtgcgcccatcgcagacgtcatagtcgtatgggcaaaatgcgaggatggcaaggtacgcggcttcctggtggatcgcaagatatccggcaagggtttggagacgccaaagatcgagggcaagttctctctgcgtgcttcgcccacgggtatgatcctgatggacgaggtccgtgtgccagaggagcagttgctacccaatgtggccggctttagtggacccttcagctgtctgaacaacgctcgctatggaatcgcgtggggagccctgggagcagctgaaacctgcgtggagattgctcgccagtatacactggatcgcaaacaattcggtcgtcctttggctgcaaatcagttgatccaaaagaagctggccgatgccatcacagagattgcgttgggtctgcaggcttgcctgcatgtgggtcgcctcaaggatcagaagctgcacacgcccgacatgatttcccttctaaagcgaaacaatactggcaaatcgcttgatatagcgcgccaaatgagggacatgctgggtgcaaacggaatcagcgacgaatatcatgtgatccgccatgtaatcaacctggagtcagttaacacctatgagggcacgcacgatatacacgcgttgatcctgggccgagccatcaccggactggcggcatttgctaactaatgtacttgtttcgaaaatcataaagtactgcatttaccaatttgttttatgtcgaagtgtcaatgtgaataaatgttaatcaaaccg

SEQ ID NO: 20319 - protein, 419 aa, DROSOPHILA
MIAQSVISKLRPCARRLASTSSKAAAPKFNWQDPLNLESQLTEEEVAIRDAFRGYCQAELQPRVKMANRLETFDKKIMEEIGSLGVLGCTIKGYGCAGVSSVAYGLLTREVERVDSAYRSAVSVQSSLAMGAIYDFGSEEQKQRYLPSMAEGKLIGAFGLTEPNHGSDPAGMETRAKYDSKSKTYILNGSKTWITSAPIADVIVVWAKCEDGKVRGFLVDRKISGKGLETPKIEGKFSLRASPTGMILMDEVRVPEEQLLPNVAGFSGPFSCLNNARYGIAWGALGAAETCVEIARQYTLDRKQFGRPLAANQLIQKKLADAITEIALGLQACLHVGRLKDQKLHTPDMISLLKRNNTGKSLDIARQMRDMLGANGISDEYHVIRHVINLESVNTYEGTHDIHALILGRAITGLAAFAN

SEQ ID NO: 20320 - DNA, 2474 bp, DROSOPHILA
ttcgtgctgccggagcagggtaccgcgggtccggagctcctgtcctacatgtacctatcttacttggccatcgattccgggcgcatcgtggcctcggacatcaaggagggaaactccacgccactgcaggccttgcgtctggtgcacgaagcctttgagcagccttcgaggacggaggagctgctggagaaactcacggacaaggtggccggagaggaggatgagaccaacatctggcaccttgcaaccgccatcgtctactgccacgacgggcagttcgagaacgcactgaagatcctgcacggctccaccaatctggagtcgatggctctgtcggtccagtgcctgctgcgtctgcagcgcgtggacctggccaagcagctggtggccaagatgcaggagatcagcgacgatgctacgctgactcagctcgctcaggcgtgggtggccctcgcccagggaacggaacagatgcaggacgcctttcacatctaccaggagttctgtgaaaagttcaagccaactccggcgctgctgaacggccaagcggtcgttcatttgggtctggagcggtacgaggaggcagattccgttctgcgtgaatctctgctgaagaagcacaacgactacgacacgctgatcaatctgatggttcatgcccatcttacgggcaagccgacagaggcgatcacccggaatctagaacagctgaggcagttctatcccaagagcgactttgtcaccgatctagacaagaagtcagcggagttcgaccgcctgtgcctgcagtacgacgtcgagggcggtgaaaaactgctcgccgtctagatataagaaaaaattccaaatatccaaattaacaaaaccttttgttcatgtattaaactacaataaaaatttattagaaatgtattgaggtagcggagagcagattaatagctgtaaagataatacaaagtattagggtggattttttatgtttgactgctgtgctgggtactcacttctgtttgaagccatatttcttgcgttcgtagaacaggtcagtcttggagctgcctagatttacaatcttggggcatccgtcgcgctataagaaccaaaatggacaataataccacagaatgcaccagaatgcatgacttgcgaactcacgtccttttcctgaatggtgcaggacttgcagtagtaggcatccgacactccgggtcctccacagatgacgcacctgccctggtaggatccgtagttgcactcgtcgcagatccgcaccagtgtgcatggccgcacgtaggagtcgcagatcacacactttccatcgtctttttcacacaggcgtccaatggctgccgcatgagatggcgagagatttcgaattattggattgtctgggattttcaacgggtttttttgagaactcacccacgccgggctgcttgcggcagaaaatcaaatccggatgatgtttggccatgatttaatattagttttcagtcagcaaatataaaaacagttgctgaaaaagcggcgacttctttatagtgtgacctttacacactctcgctttcagggttgccaagtggtcagcattatcatgtagggcattcattaaactctatgatggcttgaataaagaaaaaattaatttttttttaaaaatattatttaccacatttgataatacaatatagatacaaataatattttttaacaattaactgaaattaaataactttcaaaagcaactggcagccctacaccatgcagtttggccattcacagcgactagtaaacaacaacagctgttcgcattctcgaattttattttctgtattcgcattaagctttggtccaaaatattgcaaaaacactcccacgatgcaacagatcagctaggtagttgtgtggtacttagggcagcaagcaggacttgagaaaggacaccagcaaaatgtcgcagacagcatccacaacgcaaagtgtaaccgctgcaccggcgggtggcagcagacgcaatgaagtgggcggcgtgggcgtcatcgggaccaccatgtcggctagatatggagaaacagaatgggaggctcgggaggtgcgtatcggagtgtgatgctttatatcatttcccataaactcccattttctattcagtcccagcggcagagggaactgcacgaagctcgagcacgggcggcgcagatggagaaaaccatgaagtggtggtaagtggagcagctcgtcgtgctcaaaactatctgctaatccaaacatcaaccattcccaggtccgactgcactgccaactggcgggagaagtggagtaaggtaatttggttgccatggctttaaagttgggtcaatatcgccggtatccaataacaaaacttttcacttttcgcaggtccgcaacgagcggaataaggccagagaggagtccaagcagctgagcctcaaactggacggcgtcatgaagga

SEQ ID NO: 20321 - DNA, 333 bp, DROSOPHILA
atggccaaacatcatccggatttgattttctgccgcaagcagcccggcgtggccattggacgcctgtgtgaaaaagacgatggaaagtgtgtgatctgcgactcctacgtgcggccatgcacactggtgcggatctgcgacgagtgcaactacggatcctaccagggcaggtgcgtcatctgtggaggacccggagtgtcggatgcctactactgcaagtcctgcaccattcaggaaaaggaccgcgacggatgccccaagattgtaaatctaggcagctccaagactgacctgttctacgaacgcaagaaatatggcttcaaacagaagtga

SEQ ID NO: 20322 - protein, 110 aa, DROSOPHILA
MAKHHPDLIFCRKQPGVAIGRLCEKDDGKCVICDSYVRPCTLVRICDECNYGSYQGRCVICGGPGVSDAYYCKSCTIQEKDRDGCPKIVNLGSSKTDLFYERKKYGFKQK

SEQ ID NO: 20323 - DNA, 3680 bp, DROSOPHILA
gaattctaatggagttgtcgccagtcccgttccccagctccagattaacatttgcaaccctgctgcactccaccgaccacgtccttactttctgtattttaactttgtgtcccgatatgtttgtccaatagattgagctggctgcctggctggctggccaggagcagaatgtccttgggggttactcgccccgaaggtaacataatttcgcatcgatatttccccttttgccgggaatgttttcccttttttttcttgggggagttgattgacttcagcctaggtaggatgtgtcccgttaaaatctgctggccgggatattccgcacagcagaagtttaggtaaaagagcctccgagggtcaggtaagatccctcgagtattgtcataagccctctcaataatattggccaataaaaccaagcctaatcctatagttttcccagaggtgtgttgtcgataaaaatagtgggactaccacattttagaagtgtttagacgtgattatgataggaaataataactaattaaaaaacgcattataacatgcgactctcaagtcaacataaaatgtagaatttcataatattgagttatttttgtttaaatattgtatttgtataaattaaggcaggtatgtacctgcatcaagcccaccgaaaatgtttatgttgtgactctccttccattaccaataaataaacaaaaattgtgaactgaaatcggttctttgtttatagaatattcctagagctgaattatttattccaaactactaacatgcccttggtattgagcagcgttcttttggattttaaaccctgtttatacaaatattttaaattgttttcttctttttttctgcaattttgcattttacatttaatatctattcaaaagtgcaggtgctaaaatattttttaatttcacttatatccagttactcccattcagatgaatcgcaattaatatattaaatagaaaatggtttgctgactcacctttgcactcattggcttccttggcggtggctctggcccatggacgatcgaagtggaatggcttgcagcgttcgcaatcccttccagcggtattgtggctgcactcgcagttcagctgcccactggcgtccgtggaacacttggaggcgtgtccattgcacttgcaccgtccgcccaccgaaaagtcagagatggcatagtgcaatccactgccggatgttgccacatccccaccgagattcgcctcaatattattgccagcgggtccattggccaggggcacactgtacttgccgctggccaaatccgttgctcctccggcttccaatgagagcagggcctgcggatcggggcgttgaaggcgatggaacaccacccggatatcggtggccgtcacccagtcctgcagcaccggcgatgagtccagatcccgtgacgatgggcgtccctccagtgtgctgaaggcaattctggagaccagtggcctggtgacatcgctgcagcgggcctcgtgctcattgtggcgtccagtggattggcgggcgggacgtccgaaaagccggcggcactgggagctaaagaactggaatggctgccaactgagcccgtgatcggtgctcttgtagatcaccatcgaatcgggacgcggagcatgcgggcacagctgtaggatcacataggtcagctcgaacttcttgcccagcgagagggtcaaggttacgttgtccccacttccggtcaccggctcactgcgccagcaggtcacattattcgagttattcaaatcggtcagcgagcgggctggaaagctgcgcaacggatccgtcatgtcgcaggtgtggcaggagcgctcgtgatcctggtactcgcaatatcgctgcgcacccgacgatccgcacgtggaactggccaccactggagcatcgtaggcggcgttcacaaagtccggaatgcaggcgcgtggctcgtgcgctttattgtagcacggatcctccggcggcgcctgttgcgaaaacatcttgaagtacacgtcattggagatgcactggatggggctgaacctggtggttcccagcagcaggagcaagattccacggatcatgtttgcaattttagtggcttgcttaactcgccagtattgtattgttggtttttttttaatcactcaaaacaaaacgaaatcttcagttttttttagtttaaaaaaaaacgcactggataatgtaagattacgtagtttcaaaattataaatttaaaactgttctgtagttttggaaatcactaattttttggtatttaattgtcttggcaaatcacaaataaaaataccttgcaattttcaaaaccgttcaaaaattttagaatttgaacaagaactccaaattctgtgattttcaatagtttgaaaagtcaccagagtcgcactaaacaaaaaattcgtcaatcgcgccaatagttttgaagttaacagacttgaacactcaaaaaaattcgaaatcgccgctttggcagctgtttgcgcaggcgtttttgaagcgcgcgtcgcgtctcaaaactccagccactcgaattcgcaaatcgcaaatctccaatacaaaatctcaaatcgcgtcgttcaaatcgccgttcgttcggcggcgttcggttcgtaacgtcaagtcgggctgaaaaaggaatgctaatatcttgcccattgctgtttgccccgatgaatacgaacagttgactccccactgaaatgttcagagtagtgcattccgtgggcggtcatatttggcacgcatagcgagtgcagcctgtgtcgcagggttggagaaatgtatcgaagatgtgtgtgcggagaggaagaggcgcgattccgataccgataacgatgagcagtccgatggcgatgacgctactgcccggcgccttataaatacgcagagccgcagggcgacgctttcattctctcgcagtgtttaaagtgacatgaaagtgacgacattggcgcactgtagcaagtcatgtatcagcatgtccaaccaaacaacacaaatcatattcacgccaatggtgagttatcgttatcgttcgctagttccgttagggttttttttttctgttaaatattttgtttaatttgttttttttattttttttgtttgcgccaattagtgatgattactcgcattatgtccatttccaagccatctcgtggctttctgcggtgctaagtgagcgggcaaacaattgctcgagttgcagcatgtgatggcaggtgtgcgtgcttttttcgcgtttctgttccgcttttctacaaactttttttttcgtgtgaatttttgtgtgtgacgcgcatgcgcatgtgcaaaaataaaagaagaacggtaaattactgaccggctaacggttacccctgtgtctgtgtgtgtgcgtttgtgtgtgtgtgtgtgtgtgtgtgtgtgagggcgtgaatgcgctggtatgtggctgattgcagcagaacagctgttctaatcaacccaaaaccgaaagccaagttcaaaaaagttgcagcattaacattgcatttgcagcacatccgcccaaaaatagatttttccttttcccccaatttttcttttggaaaaatcattaaaagacccgaaaatttcactttgaagaataagttctttgataagaaagaccaatggacac

SEQ ID NO: 20324 - DNA, 3247 bp, DROSOPHILA
cagcccgacttgacgttacgaaccgaacgccgccgaacgaacggcgatttgaacgacgcgatttgagattttgtattggagatttgcgatttgcgaattcgagtggctggagttttgagacgcgacgcgcgcttcaaaaacgcctgcgcaaacagctgccaaagcggcgatttcgaatttttttgagtgttcaagtctgttaacttcaaaactattggcgcgattgacgaattttttgtttagtgcgactctggtgacttttcaaactattgaaaatcacagaatttggagttcttgttcaaattctaaaatttttgaacggttttgaaaattgcaaggtatttttatttgtgatttgccaagacaattaaataccaaaaaattagtgatttccaaaactacagaacagttttaaatttataattttgaaactacgtaatcttacattatccagtgcgtttttttttaaactaaaaaaaactgaagatttcgttttgttttgagtgattaaaaaaaaaccaacaatacaatactggcgagttaagcaagccactaaaattgcaaacatgatccgtggaatcttgctcctgctgctgggaaccaccaggttcagccccatccagtgcatctccaatgacgtgtacttcaagatgttttcgcaacaggcgccgccggaggatccgtgctacaataaagcgcacgagccacgcgcctgcattccggactttgtgaacgccgcctacgatgctccagtggtggccagttccacgtgcggatcgtcgggtgcgcagcgatattgcgagtaccaggatcacgagcgctcctgccacacctgcgacatgacggatccgttgcgcagctttccagcccgctcgctgaccgatttgaataactcgaataatgtgacctgctggcgcagtgagccggtgaccggaagtggggacaacgtaaccttgaccctctcgctgggcaagaagttcgagctgacctatgtgatcctacagctgtgcccgcatgctccgcgtcccgattcgatggtgatctacaagagcaccgatcacgggctcagttggcagccattccagttctttagctcccagtgccgccggcttttcggacgtcccgcccgccaatccactggacgccacaatgagcacgaggcccgctgcagcgatgtcaccaggccactggtctccagaattgccttcagcacactggagggacgcccatcgtcacgggatctggactcatcgccggtgctgcaggactgggtgacggccaccgatatccgggtggtgttccatcgccttcaacgccccgatccgcaggccctgctctcattggaagccggaggagcaacggatttggccagcggcaagtacagtgtgcccctggccaatggacccgctggcaataatattgaggcgaatctcggtggggatgtggcaacatccggcagtggattgcactatgccatctctgacttttcggtgggcggacggtgcaagtgcaatggacacgcctccaagtgttccacggacgccagtgggcagctgaactgcgagtgcagccacaataccgctggaagggattgcgaacgctgcaagccattccacttcgatcgtccatgggccagagccaccgccaaggaagccaatgagtgcaaagagtgcaactgcaacaagcacgcccgtcagtgccgcttcaatatggaaatctttcggctttcgcagggcgtctccggcggagtctgccagaattgtcgccactcgactacgggccggaattgtcaccagtgcaaggagggattctatcgggacgccaccaaaccactcacccatcgcaaggtttgcaaagcctgcgattgccatccgatcgggtcatctggcaagatctgcaacagcaccagcggtcaatgtccctgcaaggacggggtcaccggactgacctgcaaccgctgcgctcgaggttaccagcaaagtcgctcccacatcgccccctgcataaaacaaccaccgcgtatgatcaacatgctggacacccagaataccgctcccgagccggatgagcccgaatcctctccaggatctggtggcgaccgcaacggcgccgccggaatggccgcccagtctcagtactatcgcaccgagggcggcaggggtaaaatgcggcaaatgcagagtcagcaccaaaaggctaaacctaaacaagttctgcaaaagagactacgcaataatggccaaagtaattggtcgcgatacgagcagcgaggcggtcagcagggaagttcaacggcgcgcaatggatcccgacgtggcggactacgaaatggatcaggtgcagccgggatcggcccgatctccgatcacgggggtgtacgagtttcaggcggcggactatcccaatcccaatcccaatcccagaggcagcgaaatggagcgcttcgatctgcagatccaggccgtcttcaagcgcagcaggccaggcgaaagcagcggcgcggggaacgtgtacggaatgccgaatacaaccctaaaacgcggtcctatgacctggatcataccgactaaggacctggagtgccgctgccccaggatcagagtaaacagatcctatttgatcttgggtcgggactcggaggcgccacccggttacctgggcatcggaccgcactcgatcgtaatcgaatggaaggaggactggtatcgacgcatgaagcgcttccaacggagagcgcgtacttgcgcgtaatcctccagccaataacaataccacatcctgtgtgtagtctcaagattctagagctaagaaattattaacagctgaaaacaatcaaatcgtgtcattgtctcttaaacacaatttttttgttttttttttttttaatgtcatattaaccgattttgtagcagttaaaatcaaactagctgtatttaatttatttaattaacttcaatcgttacaaagcaatcggtaattgataatttgaaatcaaacgcacgaaaatatctatacatgtaatctacgtaatctatatatatacgacttgtattattcgctaaattaggattcctgtcagcccagtttaagcatttgtgaacaatttacgtactagggccgtctcgaaatcaaacagagcgccagtaagcaataatttatgtgtaagaagcactttgatgcatgcatgactcgcaaaaatagtaattaataaatattgtacagagcagagcacaacaaaaaggaatgc

SEQ ID NO: 20325 - protein, 667 aa, DROSOPHILA
MIRGILLLLLGTTRFSPIQCISNDVYFKMFSQQAPPEDPCYNKAHEPRACIPDFVNAAYDAPVVASSTCGSSGAQRYCEYQDHERSCHTCDMTDPLRSFPARSLTDLNNSNNVTCWRSEPVTGSGDNVTLTLSLGKKFELTYVILQLCPHAPRPDSMVIYKSTDHGLSWQPFQFFSSQCRRLFGRPARQSTGRHNEHEARCSDVTRPLVSRIAFSTLEGRPSSRDLDSSPVLQDWVTATDIRVVFHRLQRPDPQALLSLEAGGATDLASGKYSVPLANGPAGNNIEANLGGDVATSGSGLHYAISDFSVGGRCKCNGHASKCSTDASGQLNCECSHNTAGRDCERCKPFHFDRPWARATAKEANECKECNCNKHARQCRFNMEIFRLSQGVSGGVCQNCRHSTTGRNCHQCKEGFYRDATKPLTHRKVCKACDCHPIGSSGKICNSTSGQCPCKDGVTGLTCNRCARGYQQSRSHIAPCIKQPPRMINMLDTQNTAPEPDEPESSPGSGGDRNGAAGMAAQSQYYRTEGGRGKMRQMQSQHQKAKPKQVLQKRLRNNGQSNWSRYEQRGGQQGSSTARNGSRRGGLRNGSGAAGIGPISDHGGVRVSGGGLSQSQSQSQRQRNGALRSADPGRLQAQQARRKQRRGERVRNAEYNPKTRSYDLDHTD

SEQ ID NO: 20326 - DNA, 3208 bp, DROSOPHILA
aagacatttgagagacattaatggtattaaccttaagtattaattcgcaagtactttaaagttggttggacaacagtcccaaatataatgcgcattcctagtttatatttgggccttttaccaaccggtgccccagttttttttataagcataactattgcagaacgattgttcatgaacaaatacttacttataaactaagatattcttaatttcgcgactaattccaatcatcagatcaccagttagccactttcataacttcaatattccaagtaatttaaggataacgtttgaaactcatctagctggccatattcttatgagcttaacccgcagctaagacggttgttaggaggatttctccttcacatccttgcatcctcatcggaaacccttgcctttactaaaaatgaacagacttaataacagatataccgacatatatacgtattgaagcataatacaggttcgatgtttgcggaatagcatttagtgccagaaatctaaagaaattgtatgagatttaggaaagcattgatagaaatgctgctatttattaatcgacattattggaaattatacaagtaattctcactacatatttcgatatttttgcagttgcctagtccgaaattcttttagtttttcaaaagtctatcgatattcagcggcatagttgatcttttacaaaaaaatatatatacacattaaacaaatcggaactcaaaatatttacgtattataacatagcaatattagtattttagttattgataaataacaatttattaactattaaaattatatataaaatacaaatgatatgccaataaaggtagcatgttacaagataaacccttcttgcaaatcctgtcctgctttttgatcgtcttcgtggaagcacagtaccttctgtcagatcttcaaacttcaatcgttcagacattatacaaaattggaagagtgggaaaattggaataaacttaaaatttcagtcatggtttcactttcgcgtacttcaaaattaaccgtcgcttgcgtgggcgtctatacgacctacgtactcttcatattcttccttttgcccatgctgatgccggatccggtgacactgcaacgttcactggtctcctacagcaccagccacttgggcgacatcagaaacctcactctggatgccggcggccagccaatccgctcaatgctggtcacattccggggatcgggtgccctcaccctgctggacaacctggcccatcagccgggctgctatcagcactacgctccactgatcgcctacgagagccgttccattgccgcgaaggagcaccatcgcgccttggatgaactggcggcgctgtacaactgcgactacaacaagtctgcggaaatgatccaatggggaatgcgatcgccggtctttcggcgcttctatggcgcacaggccaagatctgtcgctcttacagccaggaggcgtgctgggatcccgagaccatggccgccgtctgcaagctgtacccattcatcaacatggcggtgtacaacttgcggctgaatcttttggcttcccttctggaacgcaaagagtgagtggagtggtggcagctattgaaaattaatcgttttacttaaaattccacatttctagcctaaatctgaacatcatgctgcttgttcgcgatcctcggggcaccatatattcccgaatgaataacaagtggtgttcggatgagagggattgcgaggcacaggaactttgcggcgacatggtcagtgattatcaaatggtcgagaccctcacccaagcctatccacagcgttttaggtaaggttttgtgtaactcttatatatctctttatttatatgcctatttcacagcattatacgttatgaggacttgttcctacagcccgatgagagtatcaaacaagtattcgacttttacggattgcccttggaacgaaacaggaccaggattcagaaaatgcatccgcgcagtggctacttttttcagtcctcccgctggaaggagctttccagccagtccgccttcgagtggataagcgaaatgatggtggacgatattggggctgtacaggacgtgtgcggtcaggcaatggatttgtgggggtatcgctccattcaggacttcaatcacttttccccggaatctttccagccaattatggacaaagcctattaatttctgggcaaatgttaggggtgtagtgggccaggggtttgatatgaaagctttatttaaggtatatttcgaggggttaaatatgtaaatttgatctatgctcatcagaacttttaaatgcttttaaaaaaatgtttttgaatctgaattaaaactctccgaattggttcgagtctgtgctacatggccagccaggtttcacaccaaatgtagtgactagtacactgtgacttcatggaatatttaggatatagttgttatacgcgacttcactgctcgccgcggcatctttccacctgcccgcaacggtcactttgttgttgtcaatcgtttcgttcgcatcgcgtcgcggaaaatcgagatataaatacggaaaacaaagatataactccgacgcggcgacttccgcagcaagcaactgcaatgcgctcgagttgagggcgcgccgataattatgtgcgtgtgggagcgagtgcgagtatagcacacaagtgatcaccaccagcaattagcaagtgaccaaccgaccgaccaatgagcacgggcattggcagcagcagcagcagcacggaggagcagcagcacctggaactgagcgcggacttggaggcgtgctccctgcttggcccgcaggacccgtcgaacgtcgataccggcaggacacgcgctaagcagcgactcagcttgaacggaaagcggcgccgcagccggatgtcgcgcagggccaatctgatcggcatctgcggcgtgagcagcctgtgcatcctgctgctgatcgccaccacccagcaccgtccgctgaccacgccgtttaatcagtcggctgggcgggatcagggcgcgtccgtagatggcggtccatccaattcgctggcgcgcagcgccttctacgatcgcttccagcagcaattgcagcagcagcagcagtcgtcgcagacggccgtctacaatctgacagctactatagtggatgtcctgtcggctcaacggtcgcgcatcc

SEQ ID NO: 20327 - DNA, 1092 bp, DROSOPHILA
atggtttcactttcgcgtacttcaaaattaaccgtcgcttgcgtgggcgtctatacgacctacgtactcttcatattcttccttttgcccatgctgatgccggatccggtgacactgcaacgttcactggtctcctacagcaccagccacttgggcgacatcagaaacctcactctggatgccggcggccagccaatccgctcaatgctggtcacattccggggatcgggtgccctcaccctgctggacaacctggcccatcagccgggctgctatcagcactacgctccactgatcgcctacgagagccgttccattgccgcgaaggagcaccatcgcgccttggatgaactggcggcgctgtacaactgcgactacaacaagtctgcggaaatgatccaatggggaatgcgatcgccggtctttcggcgcttctatggcgcacaggccaagatctgtcgctcttacagccaggaggcgtgctgggatcccgagaccatggccgccgtctgcaagctgtacccattcatcaacatggcggtgtacaacttgcggctgaatcttttggcttcccttctggaacgcaaagacctaaatctgaacatcatgctgcttgttcgcgatcctcggggcaccatatattcccgaatgaataacaagtggtgttcggatgagagggattgcgaggcacaggaactttgcggcgacatggtcagtgattatcaaatggtcgagaccctcacccaagcctatccacagcgttttagcattatacgttatgaggacttgttcctacagcccgatgagagtatcaaacaagtattcgacttttacggattgcccttggaacgaaacaggaccaggattcagaaaatgcatccgcgcagtggctacttttttcagtcctcccgctggaaggagctttccagccagtccgccttcgagtggataagcgaaatgatggtggacgatattggggctgtacaggacgtgtgcggtcaggcaatggatttgtgggggtatcgctccattcaggacttcaatcacttttccccggaatctttccagccaattatggacaaagcctattaa

SEQ ID NO: 20328 - protein, 363 aa, DROSOPHILA
MVSLSRTSKLTVACVGVYTTYVLFIFFLLPMLMPDPVTLQRSLVSYSTSHLGDIRNLTLDAGGQPIRSMLVTFRGSGALTLLDNLAHQPGCYQHYAPLIAYESRSIAAKEHHRALDELAALYNCDYNKSAEMIQWGMRSPVFRRFYGAQAKICRSYSQEACWDPETMAAVCKLYPFINMAVYNLRLNLLASLLERKDLNLNIMLLVRDPRGTIYSRMNNKWCSDERDCEAQELCGDMVSDYQMVETLTQAYPQRFSIIRYEDLFLQPDESIKQVFDFYGLPLERNRTRIQKMHPRSGYFFQSSRWKELSSQSAFEWISEMMVDDIGAVQDVCGQAMDLWGYRSIQDFNHFSPESFQPIMDKAY

SEQ ID NO: 20329 - DNA, 3159 bp, DROSOPHILA
aacatggcggtgtacaacttgcggctgaatcttttggcttcccttctggaacgcaaagagtgagtggagtggtggcagctattgaaaattaatcgttttacttaaaattccacatttctagcctaaatctgaacatcatgctgcttgttcgcgatcctcggggcaccatatattcccgaatgaataacaagtggtgttcggatgagagggattgcgaggcacaggaactttgcggcgacatggtcagtgattatcaaatggtcgagaccctcacccaagcctatccacagcgttttaggtaaggttttgtgtaactcttatatatctctttatttatatgcctatttcacagcattatacgttatgaggacttgttcctacagcccgatgagagtatcaaacaagtattcgacttttacggattgcccttggaacgaaacaggaccaggattcagaaaatgcatccgcgcagtggctacttttttcagtcctcccgctggaaggagctttccagccagtccgccttcgagtggataagcgaaatgatggtggacgatattggggctgtacaggacgtgtgcggtcaggcaatggatttgtgggggtatcgctccattcaggacttcaatcacttttccccggaatctttccagccaattatggacaaagcctattaatttctgggcaaatgttaggggtgtagtgggccaggggtttgatatgaaagctttatttaaggtatatttcgaggggttaaatatgtaaatttgatctatgctcatcagaacttttaaatgcttttaaaaaaatgtttttgaatctgaattaaaactctccgaattggttcgagtctgtgctacatggccagccaggtttcacaccaaatgtagtgactagtacactgtgacttcatggaatatttaggatatagttgttatacgcgacttcactgctcgccgcggcatctttccacctgcccgcaacggtcactttgttgttgtcaatcgtttcgttcgcatcgcgtcgcggaaaatcgagatataaatacggaaaacaaagatataactccgacgcggcgacttccgcagcaagcaactgcaatgcgctcgagttgagggcgcgccgataattatgtgcgtgtgggagcgagtgcgagtatagcacacaagtgatcaccaccagcaattagcaagtgaccaaccgaccgaccaatgagcacgggcattggcagcagcagcagcagcacggaggagcagcagcacctggaactgagcgcggacttggaggcgtgctccctgcttggcccgcaggacccgtcgaacgtcgataccggcaggacacgcgctaagcagcgactcagcttgaacggaaagcggcgccgcagccggatgtcgcgcagggccaatctgatcggcatctgcggcgtgagcagcctgtgcatcctgctgctgatcgccaccacccagcaccgtccgctgaccacgccgtttaatcagtcggctgggcgggatcagggcgcgtccgtagatggcggtccatccaattcgctggcgcgcagcgccttctacgatcgcttccagcagcaattgcagcagcagcagcagtcgtcgcagacggccgtctacaatctgacagctactatagtggatgtcctgtcggctcaacggtcgcgcatcctggccgaaatggagaacttcgagtatccgcgcggcggcgccgagcgtctgacggacatgacgccggagacgaacggcaccccggtgcgcagtgtggtggtcacctcatggcgctccggctccaccttcctgggtgacattctcaactcgataccgggcaacttctatcactatgagccgctgctcgacttcggcatcaagcagatccgcgatcctgacgatcaggagctggccgtgcagaacctgaagaacctgctcaactgcgactacgccgacatgatcgactatctgaacttcggcaagacgcacacctatctgttcgagcacaacacccgactgtgggacgtctgccgggagttcccgcgcttctgctggcgtccagccttcctcacgcgcttctgccgcctcttccccatccagagcatgaagaccgtccgcctgcgactcgcccaggccgaaaagctgctcgaggaccaaaggtgagtgggcccagacatccgggtagaaagtgaaagccaactggcatgcgatatgcaacgcatctcaggcggattgtttattcggggaccctggagtgtgatgtcttaggagaaagctctttactgcattgactcgtgccgaattatttgaagtctttaaacatgccacatgattacctacttacccggaagcgtgaatactaattaactatctaataatcgagggaatcaacttttgtcttagtctttagtccttcttttgcgtgtcacatcagtttcaataaacgtagtgacttcattatgaaattatagatttatcagtttgcaacatacagcagcaagtctttatcgttattgctttgttaaattccccatccagactaagtcagtatttcattcaatagcatcagcagtttctttgcatcccatttttatctttcgaggcaggccaaggccctcattggtgataagtttcgaaaggcaaatgcttatagtattttcttagttttgccagttaaatttcctcggccagtcaacttatgcgtcttatctaattgcttatgtattgtatatgaaaatgttgtttattttaaattgaaagtcttcgtctttagtcttagtttataaagaaatatacaaacagcaatcaatcttgtataaaaaaaggttcaattggcattttggccattagtttcattaatgcttacttttcaacaatagactttaaattgtctgtacttttttattataaattttcaactgctatcacgttatcgttctggtttgttaccctaattacttattgggctttccgaaattttcaaacacgatagtgatatgatactgggataggctatgaaggtttgttcagagttatttagcgattaaaaactagttctaaatttcggtatacttttttcttgaacttacgaatttgaaagaacaattaaaataattttacagaagcccaatactatttgtcagctatgaacactcatttataa

SEQ ID NO: 20330 - DNA, 1159 bp, DROSOPHILA
tcaatcgtttcgttcgcatcgcgtcgcggaaaatcgagatataaatacggaaaacaaagatataactccgacgcggcgacttccgcagcaagcaactgcaatgcgctcgagttgagggcgcgccgataattatgtgcgtgtgggagcgagtgcgagtatagcacacaagtgatcaccaccagcaattagcaagtgaccaaccgaccgaccaatgagcacgggcattggcagcagcagcagcagcacggaggagcagcagcacctggaactgagcgcggacttggaggcgtgctccctgcttggcccgcaggacccgtcgaacgtcgataccggcaggacacgcgctaagcagcgactcagcttgaacggaaagcggcgccgcagccggatgtcgcgcagggccaatctgatcggcatctgcggcgtgagcagcctgtgcatcctgctgctgatcgccaccacccagcaccgtccgctgaccacgccgtttaatcagtcggctgggcgggatcagggcgcgtccgtagatggcggtccatccaattcgctggcgcgcagcgccttctacgatcgcttccagcagcaattgcagcagcagcagcagtcgtcgcagacggccgtctacaatctgacagctactatagtggatgtcctgtcggctcaacggtcgcgcatcctggccgaaatggagaacttcgagtatccgcgcggcggcgccgagcgtctgacggacatgacgccggagacgaacggcaccccggtgcgcagtgtggtggtcacctcatggcgctccggctccaccttcctgggtgacattctcaactcgataccgggcaacttctatcactatgagccgctgctcgacttcggcatcaagcagatccgcgatcctgacgatcaggagctggccgtgcagaacctgaagaacctgctcaactgcgactacgccgacatgatcgactatctgaacttcggcaagacgcacacctatctgttcgagcacaacacccgactgtgggacgtctgccgggagttcccgcgcttctgctggcgtccagccttcctcacgcgcttctgccgcctcttccccatccagagcatgaagaccgtccgcctgcgactcgcccaggccgaaaagctgctcgaggaccaaaggtga

SEQ ID NO: 20331 - protein, 315 aa, DROSOPHILA
MSTGIGSSSSSTEEQQHLELSADLEACSLLGPQDPSNVDTGRTRAKQRLSLNGKRRRSRMSRRANLIGICGVSSLCILLLIATTQHRPLTTPFNQSAGRDQGASVDGGPSNSLARSAFYDRFQQQLQQQQQSSQTAVYNLTATIVDVLSAQRSRILAEMENFEYPRGGAERLTDMTPETNGTPVRSVVVTSWRSGSTFLGDILNSIPGNFYHYEPLLDFGIKQIRDPDDQELAVQNLKNLLNCDYADMIDYLNFGKTHTYLFEHNTRLWDVCREFPRFCWRPAFLTRFCRLFPIQSMKTVRLRLAQAEKLLEDQR

SEQ ID NO: 20332 - DNA, 8970 bp, DROSOPHILA
gcacactcggttgtctcactcgcttttcattttaatagtattaaagtatcgtattttatatgatttatatccatagatttatgcattcggttttcatttcaagttctccctagctcgtatgaaaaatgtttaccggggactgttggctgggaatcgagggtatgcagctggtcgagagacatggttgggggggttgtgtgagagcgcgaaagaagaccttagatttgagtttagctaaaacgtagaagccatcaaacgatggccaactactcattacgctatcgttaggaaaatgctgataatgacaataaatataccggattcccgggatcagaatgagtaatcctagtgcagtcgatggaatatggataatggcaaacatcgaacggagaatgagagaggcacctacttatagactggctggcaatggaaaacggaatctgaatatgaacacctaccacatctgatacttcagttttggatatatcgttcggagttcaacccactcgacttcatatgtgtataaaaattcacgattcttcttccatttgggcttcgtccctccaccaccacatatataaaaatagagcatcgtggatctccaaatagtttacgtatataaatatatatgttgagagatatttatttatactggttgctactctccatctctgcccttcttctcctctcagttcccttcgcatccctccttcctttccggtcaaatcgaaatcttctctcactcacttcactctttctatataaaacctgcgtgtggatttatgtacgagtatacataaactgtatcggttgtgtaaatattgctatacaaaaaaatcgttccaaaaaatgcctgcgttgctttgcgttgttgttctcggttgttaatctgttaatttttcgattttcggttggtttggttgcatttgcagttcttttcgcttacaatttaggttgccgaatacatgttcttatttttttttgttttattcttttttttatgatttttttgtttttgtaaatttcgttcaaagctgaggactgaattcttaactattgattggggcgttttatagttttgtgttttccttttatttttatcgtataaaccaaaaagttttaaatataataatgcagaaatttataatttttttgtagttgggtagttatttgcgttttttgacattttttttttctttcaagcatatgcatttttactcgatccatttcctctgctacacacaaaaaaccgcaaattctttcttggccgttggtttttcttttcccataaatttaaatattaataattactttttatgtgttattagttcatttacggttcgctcttatcaaatttgttgctgctgttgttgttgtagttgtagttgttggtgtgtgtgtgttgttgttgttgtggttgatgggggtgtttgtgttgatctattctcctagtacccgcaagtaatcagataatctccaagtttctctaccacggaagcggcctgctggggctgaacgggatcctcgtagatggaaacgatcacggctgcaaaagatgaaagaacaaaaatgtattaggaattgtgacatcagttattgagatgtaaacagatattgctggggaagtcttacatatggatattaatattcgtagaaaaaggaaaatatacctctcccatctgccttcctatatacctatctacattatctacactatccgttggtaaacattttcatcgccattgtcacatcagacatttattacatttcgcagcggtccgtccgcttgacaaagctctcgaaagcgaggagaaagccaccgtcagcggcggagaaataagaactaaccgttgctttacaacagcagtagccagcagcagcagcatctctacggccagctggaaattatgaataaagctatcaataaagagcgagccagtccgccgcaattccaggtgaaaactggacggacgactggacaactcgagagcaaacgagaacggacccgattgacaggtctcgagttgagtggctaggctaatgcattaatcaaatgagcagccaactctgatggacacccaattgtttgtgtgtcgagttgggacgccagctcagcagccgaatcgaatcatatcgcccgggggtcaataaacctggttcgtatccacgagccatactagccgatgagccagaagagcgccacatttgcaccaccacctccggtgacatgtcggcggctatcaacagtttgcgggagagcccacaagtcaatattgaattcaataggtgataacgccagtctatttacatgccaattatgaccgtaacaataaccaacttgttaataacgctagtttccgacagctttgtatgttttatatacatatataaaagatttatatatatatatatagggcttggcagcgtttaatggttcaaattccaatgaattccagtattcatttagtgttatagcaaattaatgaatatgtatctatggtttgaaaaaataactttgttagctaaatcaattcaacttagctacctgctgaaaccatattttaaacagcagcagtgcagcagtatataatgtgaaattgtaagctttgcattcttcccagacaaacagtttttcgagcatgaaaaaaaaacaaaacaaggtcttatcgagagttgttttgctcaaaagtgactatttgatgacacatttaaggcgactagtcaacgctccagcaaatctggctggtgggtcactcgggtggtaattcgagtagggcgcatgttgcagtgtaccaatgcaacaatgtggcagtgcgaacgaagaatccgatcagctgaaaggcgcctttggaacaagaggcacaagacagtagtacttgggccgcctgctgaccaggtccaaagcggaccagggaatgagccaaggagcggcgagctgacaacaaacagcatttgccatttgtggccaatttttctatttttactccactgtctcggcgtttggctgcacagcacacactcacacgcaccgtgcaacacatttgcacttgaaatggattatggcaataaccttgagcttgtggatgcagcggtgggcggcgggtggcggccgtactggtgggctggccgccttgtccgtgttgacgtgaaaatttgtgtgagtgtgtgtgtgccagtgcgcaacagttgccgcaaaaactgtacaaatatggaagcgcggctggcgcgtcagcaaataaactggtcgtcgtcgtagacgtaaacagcaaaaacaaaaaccaatttggccgagagagcgcgaatggggttttcaaacatttggccatctcgagaggctgaaaaacgaaaaaaaaaaaaaaaacaatgaggcatcactgctcgttgaccccgtaaatggagcaaggcatcaacagcagcagcgaccgtaaaatcgtaatgataactctcattttccttgaattcttcgcgctaaatgtcacagatctgaaagctgagaaagatcttaagtaggtttttccaaactcactcaaaaaaccaacgggcgagaattcgctcaatagaactttcgaatttatttaacggccttactacttatctatcttcttttggtgtgttgggctttggattaaattcttttcaccagcgataagtcacataagtctgtgagaacgagtggcattaaacattttgtagaatgtcttttccccgtttgctttggctccggttataaaaaaaaaaacatctgataatggttatcggggtggggcagacaacgcatcgataacagcggaaccactttgcagaaatttccacgctcaaactagaatttttagtttccataaaactggatggcaaaattttactactttcggtatgcataatttgcgggattttaatgtttctttttttttacatatttaaactaattttctgcaggcaagtgacgaaatcttataacaacttaaaccacaataaaatcaaatatcaaccaaaaagcatcaagtttctagaattaatatacacttttaaaatccatatattaagtatgtcgttctctgttttcttttttttgctcaaaatggattaggatatcttcaggaaatacattttgtacttaaaacggcaaacagattagtaatgtcgaaactgtgagtaacctgatcaaatttgggaaacacattcccagaaccaatgaatcacaacacatttttggcaaaacaaaaattattaaacaattactgagcaatcggattaaaccttctgtatgtgattttagtttcgttcttaacgcaataaataaaccagaatattaatgaatattaatttcttaatgaaatatatagcaagctaaccaattggtgctaactgaacaacagtaaaaaagtcgaaggtgataagcggaaaactttctgacttggaaaatttatcgcagagtggcggaggattacatgagtagacctacttatttgaatgccaactcaccttgtgttgtcttcatgcagtgcactccgctccggccgagcttggcgcgcaccacgcggtctgtgccggaaaggtaaatgtaccgctggccggcgagtgtcacgccgttgctggtgagaccgtcctgctggtcaaagccgctgatcagtttggagagctcctcttttgtcacctgcaagatggtaaggaaagtttggagttagtgcccgctgattgtggatagttgttttgtagtaataaggtggactagtggtcatgttggtctttagttaaccatatgcattagaaatcaaatgaactcagacatactgtcatcaaatctttagtaaacccattgtatgaatcagaaaccagtacctaataaattcaactatattgaaaactttaatcaagtagattgagagagaatttcatcatattgcgttgatcccacttgcaaaatcatcattttgaaaaaggctcaacaattcaaaggaccataagagagcaaaaaaacgaacattttgaacggtggtatgaaatattggttgtgttgggttcaattaatgggtagtcgcctgcaggggaggttgcatgttttcggggcaaaaagacatgcgagacatgtgtgtaaagtaaaaccttctgttgaaatatcgcactaatcagctgcagacgacccacgcaaacaaaggcaaacccaccaccaccaccaccactacaagcaccaccaccgcgagcaaaccaccacccatttgaaaacagtaggcaccatcgacgacgactgccaactcattagcaaatgtggtccactcgataccggggtggaaacagaggggtgtggcacaaggaggctgtagagttggctaagggatatgatactgtgggtctcgggatgcgtgcccggcttgattttttggattttaaaaacaagttttgcacacttgagcgacttgtccgttcagagaaagagagagaacaaaagagatggagacaaagagggagagagagagtagcaccaatgtcaatagccttggtcaaatgcataacaagttggcagccccatcccccaggtaacagctgcttttgccggggggtgagtggggaaattaatttgaaaatctcgcacaaccgatagttactcatttgcggctgccgaacggtgacacatccgaatgccactcgaattgggcatcgagaagtttccattgagcgcaactcgcgtcgcgtgagagaaagaaatgcgaagaggagagcagagcagaagagcagtaaagtcgcgaaaagccggttttgcgtagacagctatgccaaaaacgttaataactaagcggagctcattatgcggcgatagcgaaaattccacaagtgccaaaaatctcctaaattggtagtttttcaatgaatgaacatgccacacgatggcactcagattctgtcacccaaagtcggttttctcaatgcaaagccatgtatataaatgtgtttatcataaacttttattagcagcccaaaaacacaactctctcacaaggtccagctcagctgatcaatcggaaaaggaaaaagctaagtattcacaatgattcatccgaatcaagatcaaaactgggtaacttgggtaatgcgaagttgggaaaaacaacaaaggcacctgcgaaggcagcgagagataataaaacgaaagtgatgcgcgtgcagaaatggcaggtagataaaagaatgagtgtgatggtgaggtgacgtaggcagcggatcgaatttggccaaaatcggttcctaatctaataagcggcgagatgaacttcattcgacggacaaagcactagggagtggctgcccgaatcgagtggaatctcgctgggagagcgagcaggataagagcacatggattcgtatttgtattcggattcggagtcgacaggaagttgcacacgcacacagacagccacactcacaaaagggcgaaaacgtggcgcgcatacgagaaatactcagagcattcgcattcgaaggtagcagattcagattcagaatcgaaatcagtaaaagaagccgaagcggagtcaactccactcaattcgattcactctgcgctggtgacgcggcatcgcatgctcaagatattttctgtacttctgttcgtttcattttggttctgttctgtttggttctgtatttcgctccgataaagagcatttattttggccgtcgccgcagaggaaacggtccgtctgtattgagtgcgataaaggcgagcgatagcgaaggggtggggctgatgccaggcgcctgtgggctgcattatcaggaaccagtgttgcacagcaccgcagacattcgaaccggctgcgctgatatcagatttcccggtcccggccccgcccccgctctccacaccacacactcatcgccgcatgcaagtgcattggtgattaccgcgaagcgaagctgcacctccttagtcaccgataaacagaaatccatccgtatcggctaggtcgcccaattggtctccctgctgggttgtatgatcacgcacactccctcaaaagcgtaggcgggagaggagggggtagcgggcctgcgcaggagtggcgctgcagggggtgaaactgacaagggcgagggcgaaggggtgggagttgctctttatcaaatgaaagttatcatggcggccgcgagaggaagacagcgcgagagtcacacccttgaacttgcgaaaattcattgtcaactatccgtttttccgtccgaattccattctatgggttttcccaaccgctttccgtccattagtccattccgttcgacgtactcacctcaaagccactggactgcgcccaaatgttgccgtcgtggccggcgatgcacgccttggtcacgcactgcgaggccaggagttggttgtccacataatcttgccagctcatggtgctttgtttgtcgtgggtgcggattaagttgaactgatatatatggatctggatatggatcgctgttgctttaccgcacggcgagtcgcactttcgtttcgggggtcacacgaaattggcagggagacaaagaaaaaccgcaacaccgacgattttttcttggggtaacttactttcaactgcaacgagaggtggagaaagagagagagagagagagatggattaacatttatcaaatcgtatcgtattttatcatgcggcagtgggtgttgcatccgcccttgacaaattaccgggtatcggcggaattgtgttatgcacatttatgtatatacatataagtatatatatctagtgattttgattgtgatgcattgcacaaagcgcctaattttccgcctccgaaaaactcacatatatacacacacacgcacgggggatgagaccaagagcaagagcaagaccaaggagaccaagacagacagaaacagaaaccgtacgccgcagctccacacacacgtccgactcgctgggaattttcgaagcgttcgaggcggatttcaaaagtcgaatgagcgcaaagcagaaccataaaccgattttgaattcgagaaaacccactcgagagagtgagagatggagagagagtggcgaaagagtgcgcgctgcagggggctgcttgccttgcctctgctccaaagcgctcaattccaagccgtgagtcacccgttcactcacccactgccactgctttcgagtggggcagagagtgagcgagcgagagccgtagccagggcgagtgcaacggtgcgcctggagtgggtgtgtgagcgagacggtcgtacgaggcgggccgttattaatcagccggctgcggacaatgcaaatgagcgagtgagagcagacgatgactcaacggcggctctccgagtgagtgttatgaatcgtcactttgttggccggcactgagtaactgtcataaattaaaaatagcctttaatttcaacgcctatatgttcgaatcccatctcacatatcataatgtgctgcgctgcaccgcacccgcaatatgttagcattggctgcttgacaaatcgaatggaataccgagtaccgaatgccgtatgccgaataccgaccggctgctgctgaacttttcccacttaattttttgcacacttatacacacaggcatacacacacacacacccgcagacggcgacgcacagccaacgcggttggccaagtagcgcgtacatgtgtgggttttcgccatttaaggcgtgcacccagcacgaaagtcgctttgtacgcaatttacccaaagtgttggtcggttttcgatttttgtcgaaccaccccacgttcagtaagtctagagaaatctctttctaaacggatttccaggaaacccacggcactcacactgttcacacgctgcggtaaaaattcagagtgaccgtcgacaagcggtagtactggaacacaagtcgctgttcgctcgaaacaatcgatgtgtgccaaaattcgatcacgatattcctcgcaatcgattgtattcgctatttgcctt

SEQ ID NO: 20333 - DNA, 1170 bp, DROSOPHILA
attcgacttttgaaatccgcctcgaacgcttcgaaaattcccagcgagtcggacgtgtgtgtggagctgcggcgtacggtttctgtttctgtctgtcttggtctccttggtcttgctcttgctcttggtctcatcccccgtgcgtgtgtgtgtatatatttgaaagtaagttaccccaagaaaaaatcgtcggtgttgcggtttttctttgtctccctgccaatttcgtgtgacccccgaaacgaaagtgcgactcgccgtgcggtaaagcaacagcgatccatatccagatccatatatatcagttcaacttaatccgcacccacgacaaacaaagcaccatgagctggcaagattatgtggacaaccaactcctggcctcgcagtgcgtgaccaaggcgtgcatcgccggccacgacggcaacatttgggcgcagtccagtggctttgaggtgacaaaagaggagctctccaaactgatcagcggctttgaccagcaggacggtctcaccagcaacggcgtgacactcgccggccagcggtacatttacctttccggcacagaccgcgtggtgcgcgccaagctcggccggagcggagtgcactgcatgaagacaacacaagccgtgatcgtttccatctacgaggatcccgttcagccccagcaggccgcttccgtggtagagaaacttggagattatctgattacttgcgggtactaggagaatagatcaacacaaacacccccatcaaccacaacaacaacaacacacacacaccaacaactacaactacaacaacaacagcagcaacaaatttgataagagcgaaccgtaaatgaactaataacacataaaaagtaattattaatatttaaatttatgggaaaagaaaaaccaacggccaagaaagaatttgcggttttttgtgtgtagcagaggaaatggatcgagtaaaaatgcatatgcttgaaagaaaaaaaaaatgtcaaaaaacgcaaataactacccaactacaaaaaaattataaatttctgcattattatatttaaaactttttggtttatacgataaaaataaaaggaaaacacaaaactataaaacgccccaatcaatagttaagaattcagtcctcagctttgaacgaaatttacaaaaacaaaaaaatcat

SEQ ID NO: 20334 - protein, 126 aa, DROSOPHILA
MSWQDYVDNQLLASQCVTKACIAGHDGNIWAQSSGFEVTKEELSKLISGFDQQDGLTSNGVTLAGQRYIYLSGTDRVVRAKLGRSGVHCMKTTQAVIVSIYEDPVQPQQAASVVEKLGDYLITCGY

SEQ ID NO: 20335 - DNA, 3431 bp, DROSOPHILA
cttatcatcctgttaagaaccttttatgtctggttcggcagcagaactcgctaacgataagacccccagcgtggacaagattggtcagagcggttgactgaatcgaactttgattagagcaacataccattatctaccattatcataccatctagcgcagtcgctttaaaagctattggaattcgaaaagtcactttcggaatttcctggtttttttgatggcgcataaaaccattgcttaattgctcattattaggactccaagtgtcgtatgattttggctcggtagtacaactctttgctaatagtagatatcattggaaattcttgatcagagtccacgataaacccgatcggttcataccatattccatattcccagcagcgaatcacggaaaccctatcagtagttgttgttaagatagagaataaaagttcgattctagcacttgaaaaacccactatcgacctgtctgccaaatcgttttcagatatgaaaattaagttttatagtggccatcgatagtgccaaacaaacaacattatagaatgaaataatcgtatataaattcaaacatattgattgtcttattataaatatacaagcaaattgcctgtttaaagagtagtacaatatttttcgaaggcatgaagtgattggaaaaaaccgtgggctttaaataatatttgaattttgtttattgtccatctgtatgtaacattaactcaattcaaatttgaagctttaaacaataattcattcaacaacaaaatcgtgactaagagcattctatgaatactccgtttgcaataggacttcttgctcaaaattaagaagaatcctgcgatccttgtgttcttggaggtagattaatgaaaaatacatatatgtacatcagagcctctgcaagttattcaaaaaatgatcaaaatgtaatcacctttcaaaagtgcacagccttcctatttgaaaaccaactaaaatcgttatgaattagactcaaacagtttgtgctggttctttcggtgaagcagtagtagctggaatttcatcaggtttcttactgcacgattcgtaaatcgagatacgtaatctgtagaaaccaaagaccaacacacaaaagcagctgaccagaaccacacatccacatacggttccaatggccagaccaggtcgctcccagtccaagatgaagtagatgaatcgatttcccattctgtgaatattattggaaaataataattggttttaaactttgcaagtatgtacttacggatccatgccgccagcccaaaagtaaatcaaggagaatactccataggtaatgccagcggtaaagggatacacgaaatgcataattctggtggggaaggccaccataaagcaatcgaagaccaggcaaatggagttaaacgcatgggcccacaagttgtacagctcagcacccattcctggcatggctataagaaactatcataagtacatatattttgtaattaattaaaatcagaactcacaaggataaagggcagcccagaagaccaaggtgatcatcatggccaggactacagttgtgtagtgggatatccaatagatcttcagggcccaactgccaggagctaaaagttgaaattgataatagttagaatacacaattgattgataatatcaaacaactcgtgtcgtgacaacttatatctatataattttgaggtatttccagacaagtattgttaagcccattggtattacgaagcggcggaatattcccaaagttcgaatttcaatttggtaattacgtcttatcttgatcattaccctgttaatagtttttgtacatctacgagcaatagctaatttaattataagcgaatttttaaggaatgatttttttttaataaaataattttgtaaacattactcaccaaaataagaaggctttatgaagtagatggtggcgattatggcgccatatgtacagcaataaaagcatagggaaaaaccccaatccgtgagataaataaaccagcgaccaccgttaaaggtttcaaccatgctgccgatcacacccgctgcgaaaaaagcagccaggatccatcgatatagcagccagatgatattccgatcgcccttctgccattgcgaacgacagaagtcgccaggatcatcgtgatgcagcgagaacttggagcgttggaactcctccttcagtggcaggcaacatggctcctgacttttgtcacgcatctcggtggctggatgaactcgtcgacggtttcgctggactaggagggccaacagagtccagagcaggtgacttccttgccggtagatcgcagactgacgaagccatgcggtacaggtgttaagtacgctgaatggatggccattttttccgcaaatcgtttcggcttgaatcggggtaatcggctgtgataggcaacgcttcagttatctggatccttatcacctggacaagtaccgtttatgtcaaaatcgtcggcagcgcacgccttcgataagcccaaaaaaaacctggtcgtcgttgtgtacaagtgcgttcagagtcatagactgaattgaacccagacgggtggtccgtgaatggtacttttccggcaccattaccattaatattccggattgggcccagacccacagcaatcgatggccctgaatttttaaacatttttgggaattttcgcatatgcaaggcaataaacatattgataaacaaacgtgttcctcaagtgctgacggtttttcctccttgacaagccaaaagtcgactcagactcaggcgcgataagagtctaccgaaaaataatcaattcaaaatcatatttgattgaaagcacttctaattgaagaacgtagaaactatgactttccctaagaaaactgaaaaatattccttttgtgttttttcaaagaatcgaaagtatttttgttgtatttgcactttaaaaactaagacatgatagatattagatatttcgaaaaatccacgattctattatgtatgtatgtatgtatatattaggtgtctaaaggtgtaataatgcataactctttccctaaaagggagagtttgtcacactcatattgccaatttattggttccactatcattgtacgagtatgttcaaagtggaggaaatttgattgaggttgtttcctttgctgataggaagtgttggacatgaaatcactggacttaaagcaaatattttgcaaaagcttttgggaatgtccaaaagattggaaaaaaaaaaacataaaaatactattttacttgaacttcattgaatgaatcatgggttctgtgataaggggaaatagtaagacagaaaagcgacgtagatggagctttttggcaaaacagggtgttttttatgttcataattattattcatcataattactctgc

SEQ ID NO: 20336 - DNA, 1011 bp, DROSOPHILA
ccgattaccccgattcaagccgaaacgatttgcggaaaaaatggccatccattcagcgtacttaacacctgtaccgcatggcttcgtcagtctgcgatctaccggcaaggaagtcacctgctctggactctgttggccctcctagtccagcgaaaccgtcgacgagttcatccagccaccgagatgcgtgacaaaagtcaggagccatgttgcctgccactgaaggaggagttccaacgctccaagttctcgctgcatcacgatgatcctggcgacttctgtcgttcgcaatggcagaagggcgatcggaatatcatctggctgctatatcgatggatcctggctgcttttttcgcagcgggtgtgatcggcagcatggttgaaacctttaacggtggtcgctggtttatttatctcacggattggggtttttccctatgcttttattgctgtacatatggcgccataatcgccaccatctacttcataaagccttcttattttgctcctggcagttgggccctgaagatctattggatatcccactacacaactgtagtcctggccatgatgatcaccttggtcttctgggctgccctttatccttccatgccaggaatgggtgctgagctgtacaacttgtgggcccatgcgtttaactccatttgcctggtcttcgattgctttatggtggccttccccaccagaattatgcatttcgtgtatccctttaccgctggcattacctatggagtattctccttgatttacttttgggctggcggcatggatccaatgggaaatcgattcatctacttcatcttggactgggagcgacctggtctggccattggaaccgtatgtggatgtgtggttctggtcagctgcttttgtgtgttggtctttggtttctacagattacgtatctcgatttacgaatcgtgcagtaagaaacctgatgaaattccagctactactgcttcaccgaaagaaccagcacaaactgtttga

SEQ ID NO: 20337 - protein, 275 aa, DROSOPHILA
MRDKSQEPCCLPLKEEFQRSKFSLHHDDPGDFCRSQWQKGDRNIIWLLYRWILAAFFAAGVIGSMVETFNGGRWFIYLTDWGFSLCFYCCTYGAIIATIYFIKPSYFAPGSWALKIYWISHYTTVVLAMMITLVFWAALYPSMPGMGAELYNLWAHAFNSICLVFDCFMVAFPTRIMHFVYPFTAGITYGVFSLIYFWAGGMDPMGNRFIYFILDWERPGLAIGTVCGCVVLVSCFCVLVFGFYRLRISIYESCSKKPDEIPATTASPKEPAQTV

SEQ ID NO: 20338 - DNA, 10655 bp, DROSOPHILA
gatgtaaattatttaggcaaacaacttttgtaatttggcttaacaatgaaatccagtgatttagcatataacaaccaaaacgtatcacagagatattaataaaatacaacgtttgaaattaatcgagatgcaattatacaacaatgtttggcaaaccaaaaactgtgcaatattatcaaattggaaaaacaattaaattaccctagtatcaatttagacacaaattttctaaagaaaattcaaattataaaaatgtattaagaagagcaatgggcactcaattcctactcataagtttccttaggcataaattatttgtatggttatttagttgtaattgtaattaaattgtactatactttatgtccttattatataaatgagttatgttcgttttctttttccgaaacgaagcccagttcatcgatagatacgttaaagagtaaatggatgtttaataaacaaaagaatccagcaatatttgcataattacacttattaagcaagataccaactgaataaacaatgaattataaaaataataatttcgtgtttctctaaaatgtagtgtggctgaatctgtggatcaactccacataaacataaagatgtacagaaaaattgaagcatatttttaggaatctaagaacatgtagtgtacatgtaagtaatggttaaatctgcctgcgtaaaaacagcaagggcgccatctggagttcatgtcataaacttatacattgatgcgtattctacagaatggtttttacattgtaagtttacaaaattacacatcattaaatccgaatatattaatatcttaactcaaaattggattaattccattgtccattcctttttattcttatataacatgtgacacattacgtaagaaacgtttagtgcaaaaacatagttatcaaagaaagattaaagaacaaatcaccatatttagaccatattactcatagtccttcccaataaaaaatgctcaggcttatgctttaatagagtgcgttgctgttggatttgctcttttattacttggttttatattttaaatatagtttaatatatgcagctatataatagttatttaaaatttgaatactacggctttgtcgaattatttatactcattataattatgcttcggcttttaaactaagaactttaaactaatttttgttgtgtttgctccgcttctccagccaggatgcgtatcggtctgttattatttgctactctagggtgctaaatacgtacgtatgtatgtatatcgttaatttatttacttgttaattatacacttgaacaacttcgtgcgagaattgttacgatcgttgattaggtgtttaaaaactatataatacaaaaagtcttggcgttaaatgataaatgtttaaacaaaataattaaattattttgcgctggtttacagttttcatttgttgcttgtctcacacgcacacacacacatacatattttaataaattaattaaacattttgctgtttgtactcaaaaccgcttcgaatcccttacagtttggcctttcataagaagcccatgtcgagggcagtgtagagggcgcgaatgtcgctgtgggcggagatgcgccagaaggggaagttcatggccttggcggcggtctcctcctcgttcccatccccaatcaccacgtaggtgctcttgcgcccaaagcgagtcacgatccgctcatagcaggtttcatggcctgcgggaaatggaagggaacaaaacaaaaactggttatatctcggatccatccaccatcgccatcctcaactcaccgattttgtgcgcactgtaaatgttctcgatgttgaagatgccgcccaatccgaacagcaggaccttggccagcgccggggccagttgcgtggaggttaccagcacgttgacgcagttctcccgctgggagatcatgctcaggcacttgagcgccagcgtggcccagttgtcggtcgccacctcgatttccgagcgtatctgtagccaggcctcacgttttccgggtcccagaagggtgccaacactggaagaacattcgatcagttagtaaactatgaatccgaaagcgcatcccccaatactcactttccacgatagctattgtagatgtccttgatcttgcggtagcggaaggccagcttgcgcatccaatcgacgccgcccctcacaccggtgggcaggcagagattgggcggggcgcctggtggagtgttcgtgtggaagccatccgtggcgaagttgtaggcgctcaggtcctggccattgtcgtccgagctgacatcgtcgatgtgcacctggtcgcactcctcgatctcgttgaagaagaaatgcgtgtcggccatgttgaagaccatctcctccatgcggaaggcgatggtcatcagggagctgtggtctttggtgtatcggttggcatagctgcccgacagcagcgtgtggaagatgatgagcgtctcgtccagatcccagacgaacacccgctccggtggcttcaccgcctcactgttcccggtgtccgaggcagtgcttctggtggggctgggctgctgatggcgtctaccacgcgcccgacccgtcttacccgtgggcgtggtcttgctcgttgccacgcccccagagccggcggtacccacactgctgcctccgctcgagttgagagcagcggccgcagctgccgcggacacattgcccagcgggccaatgccggagccagtgctcggcgagatcgggagcggggagtgcggcgagtgggtggtctggtgcaccggcgtcgtcgagtgggtgtccgtgggactctcggagagattcgaggaggccgccacatggaagccatgtccatgactcgcactcgagctgggcgagctgaccgcatacggtgagtagttggccggactgtaatagttgccgtactgctcgttgtagtagccgccgtagtcctgctgcccgaagttgttgtagccggcgtacggactgctgtacagctgcgagttgttgttgccgctggcggcatagctgggcgtcaagtaggcagccgccgcagctgccgctccgggttccatcttggcctgccgtgccgccgttgccgccgcataaggagttccgtatccggagtagaagggcggcggcgtgtactgctgcatgctgttgtagtagtagtagtcatgtttgccgtcgtagaccgctgctgctgccgctgccactgccgaagagttgaccgccactgctcctccgtccagcggattgctggccgagctgcagccgtacaaattggatccggccaccgagccgttgtccagcgatgcgtgcacttggcccgggctgcgggactccgacttgaccgctgcactcgagccagtgccatcgtgcgtccagtgcgacatcacagttgctccgcccaccacgccatcctcgccagaaactccaccgctggtgccaccagcctgttgatatgtggagaaactgctgccggcggactgcgcaaaactggatgctgtggccagactgcagctgctcgagttcacattcggattggcattaccgttcgagtagtgaccgctcagcgaggccagcgatcctattgtcggctggagcggctggctctgcggcggcagtcccagcggactgcactggccaactccgcctcctactcctcctccactgccaccgcctccgcccacaccgacacccatgccggcaccggcgctactgggtccattgctggccaacacggtgctggaatgggattgctgatgggattgctgctgctgctgttgttgctgctgatgcgtctgttgctgctggggttgctgttgctgctgctgctgtgacagattgcagaggctgcaagaagataagatgagaggcgtcataagtgggtgagccaattaatggggtggtggtgtcaagtgtgggaatatacaatgaaacacagacctttaagccgttttaaatgtaaacaattcattcacaaataacaaaagctgaaatacttaaattgtaatgtcacatttgatatttaaatcgaacttgactatataatttctacaatttatgcttatgaatatttaaaaacgagttcttagcaaatgaaatatatccttaggcggcgaacatgactaatgtaataaccgagtcactgggactgcattatatcaatcgaggtatttatattaaaaccggttaatttaatttatatatgccatcaaaaaggtggcggctaaatcaaagtatttattttaggctcatttgtttaataaaacgtgtacttacagcttaattgtgcttataaatagctaaagcccgaagcgaactagttattaaattacaaattattaaattatgattcccttttaatactctaaaataaagctagaaatatgtaattatatcttcaatattggaaactgatgaatttcaagcgacttcaagacgatttgtaattattaataggccgactgaggattgagtataaaatagtacacaaaacacacatgaggattttttctttgtgtggaggagaaccgaaacacagaaccttttgctcgttaaggaaacacataaaatagtttccaataatctttaaacaaccattaaattaacggcacgtagtcgttctgctctcggttgcccattccccgatccccttcgggccacttggaccaagtcaagtgcttccccgtcgaagacccgagcgaagaggtcttccaaatcttgtcaagtgttataaatatttttctacgatctggccgttctctttccctcttcctgttgctggatttgttcgggttgtttactgggatctcgaagaggaatcgcttggaatcggtgcggggcacttgagcggatcgctgggtccgccttttggtggcatgtgcggagtgtcccggacaagtcctgacccatccccccccccattcccttgccatggccatgtgtgcagcaaatgttgagcgacaaatatttcttttatatacatatatttaacgatttgtgttttgatgtttttttttctgttctgttactctgatgttattgcttttcgagtaggacattattaaagtggacaaattggaaaatctacgagggctcactaaaaatcaaataaaactgagcagcagtcgaaagtcaaataaatcagagctacgggaaaatgaaaacaaagaaaaggcttttcgatattttgggggaaaaatggagacaaattgggggagaaattcaatccttttcgatgcaattaagatgagttttttacaatcagctggcaaattaaatcccatattttctatcttaaagtagcaagataaaatcatttaaacaccgcgttatttccctatggaggataattattttaaattactctctactcaaatgatttatctgcctcactttcttccttcgactataccgtataccatatttccactttttccgcctacgatttccccccatccccccataaggcttggaaaatatttaacaatttttcataattttaataggaaggtaaattaagtgcccaatttccaaaggaatctgacaccttgagattctttcgctcggctggaaaggggccacatttatcttgctggcagccacaacaagagggaaaatggtaaaaggggagcagctggtgaaagggggaaaatcattttcccagcgcagaacgacgcgtgcgccaaatggagggaggaaacccaacccaaactttggctttgagatctgctctcctcacaatatgggctgaccaatgggagatttacgaatattataatagaaattatcgaagagggaggttgagaggtctttagcactaagccgcaactgttgccgcctttaagcctcttttaagtagttggccctgcaccgcctcgtgtccctacgatgtccaccatgccccttggcaagtgttaagtgccctgacacttttcggttctttttgtttttcggatttcggtttttggattttggatttcggtcttgggttcgcttcagtgtcgcagcggaagcgtgcaccgaattccttgaatttctgccggggcatgtggcaggttgtgtggaccacatgcaaaatgtgcacttcccttcccttacgacgatccgaccatggccacttttcaatcgaaaccaattgaaaatggtgagcctcttgtcaagtgttaggatgttctcgccgttctgctacaaattgtctacgcttacagagagggaaacctttttcttcaggatcctgggaagcaagttggtaaaagactcataatttaggtttcaacctataaatatatgcaaactattatttcccctatatgtgttttagttagaacatattacacttttaagaaatctatttcataaaagtacctaaattacatgtttatgaataagtatatttatatatattttattttatttgaacctaccggttgcgttcatgtgtatccgtgtggtctgtcttgggacgtttaacctgaaaaaaaagtgaagaaaatcacattaaaatatatacttatactgaatgttaatttttgtgaattttttggattttcgccggccctggaaagaatttgtttataaacaaggcggacgcactcacacctcagcgtctggcgtggaatcgccctgctgagctcggcacttccaccgcctgaaactctatttgggttatccagtgcgagtggcgaaagaaaacagcaaattttacataattcgcaatcgccatttgctgctgcgccaagcgattttcgctgcccgagcttgtgcgtgggaaaaagtttaactcaactgttactcggatgtgcggcgccatttggaggggaagtcggaaagggggggggggaggtggtagtgctcggaaaagcagcaggtggcagcggatttcgataaggatgcaaaatggctagatggaacaaagatgacatttaactatacagactttcgaggaaagattgtgtctctaggcatacaatagaacgtcctttacatccacttactatgttttatatttataaagctttgacaattcagcttttgccagaatgattttgacaaatggtcaaaaaaaaacgccccttaagaagacatgtatgcaaatcgaacggaagccagataaatcgaaggcggactaaggggcgcggcaagcccaggtgctggaatttgtgcgcctctccacccctaaagaagtccctcaaaacaaaaaaaaaaaaaaacaaaaaaagaagggcgggaagggagcgaaagctgagcggcttcggttgacagcttctgccgtccggcgagatgaccacacgcacgcactgtccatcatccggtgatctggtggggggcagcaggacgcagtttgctcagatttgtcgacggaccaagggaacacgcgcatgcgcagcggcggacaagcggacagattgccgaacggtagcgtttcgatgagctgcgcattggagttgcgatctcgggtcgcgaattctgcaggattgcgtgctgcacgagcaaccgaattcgagtccgaagttgtatgcaaaagtgagctggtgaggggccaacaaaaaaaaggggggggggaaagggaagagtcaaatgcaaccttttactaaactaatttatggcacaagctgacaacgtaaacattaacacagacaacactcgaatcagtatctgggggggttttggttgggccggcttggttggttccagctgcggaaaagagtgggagatatgtggtataaagacctgtttgtgggcatctttaacgaaattcctgtgatcgtaatctctttgtctcttctgctgctttagaagaagattaaaacacacacactcggtcacaaaaaggcaggcaaacaaaagacaagacaagaagacggcgacaaattttttattaacccggccctaagaccccgaagacccctacaaaccccttgagcccccttgagtccccctcgagtccccgcgataaaaatcaaaataaacaagaggaaaatttgtatcttctggtggacgaagtggaatcgaaggaaggggctgctatggcatgggacctatcccatgcaccttaacactttggcacgttaattacgttttgggccacgatcgtggtagtataatcaacaatcgccaagtgtcaatcgcagtggccataatcaatatttcgactcctccaccggcccccccccccccacacactcgcacacacgcacaccgatgtgaattctctttgtcataaattacatgcagcgcgtattgtcgcagttgaattatggcgtgttaatttttacgattacggcttaaacttaattaaaatgtgattaatgccgctggacgaatgccgtagcccagctctggcttttgtgggccaggctctttaaattcccataaagccggcacccagagacccactagagctgtaatttatgctctattaatatttcgccttaaccatccggccatccggccactccacgttcgtcacgtttccttcgatccgactttgtcttagccgtagtttagggacccataaaagcctggagaatgccgttccattaaatcgtcgggaaacgaactttacgctaatctcggccagactttgcatcgcaagcgtgcagtgaatgaaaaggctttggtaatttgatgggagaaatgcatcagcagcgaattggaaaaacgtttgtcactatttcggcactttattaagcgtttttaatgaccttttgggactcaacttgtttgcttcattaccccacagccaaaagttaagccgattaatgcgttgtaataaaattttggtcaggtgcccataatctttatccccattaacgatttcccaacaatgagcagtcattaaagcgcttttcttcgcaggatgggtctataaaattgataatcctctgtgaatgagtaacattccatacattttcaagcaacccaatgaaattgtatttcttcgagtgtatttgcacgacttattcgcttagatttatgaaatcgaatagcatctgaacacgacttagttgtcaagctggactagatttatatatgaagtgtgctatgatatcacaccgaccaatagatcagcttaaagcatcctaaactgttgttcgtacatatattagactccatccaggcttgataaatgagagtcgaagcgttatctcgccatggagtttcactttttggatactactccccgactaggtgaagccccacaaggcgcaaccaccaaggaagctaccgccgtcatcatagtcataacactagcaatactagtaatagtaataaccgacggcacagccatctcaaccacatcacttttaaagcttcgcgaggagagcactacgactatgtgattacctttggctcgatcattttgtcaattaatccgcatcgcggggcagcgtagttgtatggcattagggtgaccattctgtggacttgcgattactttcacttgcaacacacacaaaaacacacacgcgtggcggggtagtgaactcgaccgtttcaggtagttaatgtatggtcgatgttttgaaatcgaatatatatttagttatagcgtttcagaacgaacgaaatgtatctggtaggttttttatctgcgacttcgggcggatcgaccgttcccgtagcgctcgctttgagtggctcgaatcgactgaaccaccgaaacagccgacttttgtggctcaatgcgacgccggcagcgaagcggcagcggcgctgcttgagtggaaatccctggctcggattatttggattcgtattcgtaccggctaaatgtatctcggcactcgaaacgagttcgtgtgagcggtgcgcactcggagcagcctctctcgctccctccgccggccagagaatgcgcctagactccgcccattcccattccccaaatcgaagggccaagaatatcgcacaggggtgggtcgaaaaccacttttcctcaaagtttgttgtttctttctctgtattatgttagtttttttttttggtaagtatctctcggatgcgggcgaacaatgcccattgtgaatgagattttgccgctgggcgaacgccaactgaaaagttggttttcctatgcgcataaattaataaattaattcgaaacaactccgccaccattcgagcacataaaacaaattaataagctaatcagttggagtttctcggcctgttcaatggtaaccgccagcaaatttaatggcaatcgtaaaacgcgcaacgcgaatatcgggtaatttaaaacgcctaaaacttattgggttcgatggatccgtaacgcattagagaaggagctcccaaaaatcgaaatgctcatgtaagacgagccgaagtgtgctgggcataatcaaaccgatacgggacatggtatatggaatatggcaaatggtatatggtatatgggatatccgatctgtggacggattagtgagtgccataaacaaattggcatctaatcaaaatcacagggctatctctccgtccatgcagaagtgaatcacttccgatggtaattgggtagcataaacatgatggtttagagccactaatgagctcgattaaatgaattagaatgctcagacagtatggcagccaattgatgttgattggggcagctctggcaaattact

SEQ ID NO: 20339 - DNA, 3065 bp, DROSOPHILA
gagcgctacgggaacggtcgatccgcccgaagtcgcagataaaaaacctaccagatacatttcgttcgttctgaaacgctataactaaatatatattcgatttcaaaacatcgaccatacattaactacctgaaacggtcgagttcactaccccgccacgcgtgtgtgtttttgtgtgtgttgcaagtgaaagtaatcgcaagtccacagaatggtcaccctaatgccatacaactacgctgccccgcgatgcggattaattgacaaaatgatcgagccaaaggttaaacgtcccaagacagaccacacggatacacatgaacgcaaccgcctctgcaatctgtcacagcagcagcagcaacagcaaccccagcagcaacagacgcatcagcagcaacaacagcagcagcagcaatcccatcagcaatcccattccagcaccgtgttggccagcaatggacccagtagcgccggtgccggcatgggtgtcggtgtgggcggaggcggtggcagtggaggaggagtaggaggcggagttggccagtgcagtccgctgggactgccgccgcagagccagccgctccagccgacaataggatcgctggcctcgctgagcggtcactactcgaacggtaatgccaatccgaatgtgaactcgagcagctgcagtctggccacagcatccagttttgcgcagtccgccggcagcagtttctccacatatcaacaggctggtggcaccagcggtggagtttctggcgaggatggcgtggtgggcggagcaactgtgatgtcgcactggacgcacgatggcactggctcgagtgcagcggtcaagtcggagtcccgcagcccgggccaagtgcacgcatcgctggacaacggctcggtggccggatccaatttgtacggctgcagctcggccagcaatccgctggacggaggagcagtggcggtcaactcttcggcagtggcagcggcagcagcagcggtctacgacggcaaacatgactactactactacaacagcatgcagcagtacacgccgccgcccttctactccggatacggaactccttatgcggcggcaacggcggcacggcaggccaagatggaacccggagcggcagctgcggcggctgcctacttgacgcccagctatgccgccagcggcaacaacaactcgcagctgtacagcagtccgtacgccggctacaacaacttcgggcagcaggactacggcggctactacaacgagcagtacggcaactattacagtccggccaactactcaccgtatgcggtcagctcgcccagctcgagtgcgagtcatggacatggcttccatgtggcggcctcctcgaatctctccgagagtcccacggacacccactcgacgacgccggtgcaccagaccacccactcgccgcactccccgctcccgatctcgccgagcactggctccggcattggcccgctgggcaatgtgtccgcggcagctgcggccgctgctctcaactcgagcggaggcagcagtgtgggtaccgccggctctgggggcgtggcaacgagcaagaccacgcccacgggtaagacgggtcgggcgcgtggtagacgccatcagcagcccagccccaccagaagcactgcctcggacaccgggaacagtgaggcggtgaagccaccggagcgggtgttcgtctgggatctggacgagacgctcatcatcttccacacgctgctgtcgggcagctatgccaaccgatacaccaaagaccacagctccctgatgaccatcgccttccgcatggaggagatggtcttcaacatggccgacacgcatttcttcttcaacgagatcgaggagtgcgaccaggtgcacatcgacgatgtcagctcggacgacaatggccaggacctgagcgcctacaacttcgccacggatggcttccacacgaacactccaccaggcgccccgcccaatctctgcctgcccaccggtgtgaggggcggcgtcgattggatgcgcaagctggccttccgctaccgcaagatcaaggacatctacaatagctatcgtggaaatgttggcacccttctgggacccggaaaacgtgaggcctggctacagatacgctcggaaatcgaggtggcgaccgacaactgggccacgctggcgctcaagtgcctgagcatgatctcccagcgggagaactgcgtcaacgtgctggtaacctccacgcaactggccccggcgctggccaaggtcctgctgttcggattgggcggcatcttcaacatcgagaacatttacagtgcgcacaaaatcggccatgaaacctgctatgagcggatcgtgactcgctttgggcgcaagagcacctacgtggtgattggggatgggaacgaggaggagaccgccgccaaggccatgaacttccccttctggcgcatctccgcccacagcgacattcgcgccctctacactgccctcgacatgggcttcttatgaaaggccaaactgtaagggattcgaagcggttttgagtacaaacagcaaaatgtttaattaatttattaaaatatgtatgtgtgtgtgtgcgtgtgagacaagcaacaaatgaaaactgtaaaccagcgcaaaataatttaattattttgtttaaacatttatcatttaacgccaagactttttgtattatatagtttttaaacacctaatcaacgatcgtaacaattctcgcacgaagttgttcaagtgtataattaacaagtaaataaattaacgatatacatacatacgtacgtatttagcaccctagagtagcaaataataacagaccgatacgcatcctggctggagaagcggagcaaacacaacaaaaattagtttaaagttcttagtttaaaagccgaagcataattataatgagtataaataattcgacaaagccgtagtattcaaattttaaataactattatatagctgcatatattaaactatatttaaaatataaaaccaagtaataaaagagcaaatccaacagcaacgcactctattaaa

SEQ ID NO: 20340 - protein, 766 aa, DROSOPHILA
MVTLMPYNYAAPRCGLIDKMIEPKVKRPKTDHTDTHERNRLCNLSQQQQQQQPQQQQTHQQQQQQQQQSHQQSHSSTVLASNGPSSAGAGMGVGVGGGGGSGGGVGGGVGQCSPLGLPPQSQPLQPTIGSLASLSGHYSNGNANPNVNSSSCSLATASSFAQSAGSSFSTYQQAGGTSGGVSGEDGVVGGATVMSHWTHDGTGSSAAVKSESRSPGQVHASLDNGSVAGSNLYGCSSASNPLDGGAVAVNSSAVAAAAAAVYDGKHDYYYYNSMQQYTPPPFYSGYGTPYAAATAARQAKMEPGAAAAAAAYLTPSYAASGNNNSQLYSSPYAGYNNFGQQDYGGYYNEQYGNYYSPANYSPYAVSSPSSSASHGHGFHVAASSNLSESPTDTHSTTPVHQTTHSPHSPLPISPSTGSGIGPLGNVSAAAAAAALNSSGGSSVGTAGSGGVATSKTTPTGKTGRARGRRHQQPSPTRSTASDTGNSEAVKPPERVFVWDLDETLIIFHTLLSGSYANRYTKDHSSLMTIAFRMEEMVFNMADTHFFFNEIEECDQVHIDDVSSDDNGQDLSAYNFATDGFHTNTPPGAPPNLCLPTGVRGGVDWMRKLAFRYRKIKDIYNSYRGNVGTLLGPGKREAWLQIRSEIEVATDNWATLALKCLSMISQRENCVNVLVTSTQLAPALAKVLLFGLGGIFNIENIYSAHKIGHETCYERIVTRFGRKSTYVVIGDGNEEETAAKAMNFPFWRISAHSDIRALYTALDMGFL

SEQ ID NO: 20341 - DNA, 4084 bp, DROSOPHILA
catcttgacgagcttttccagctgcagtccattttcggccgccaagaccttcaggtccttaatgtcgcgaacgccccaggaggcgtccctctgtcgcaggctccgatcgaagtccacattgctctgtggaacgagtataccgtcttgtgcatatggtccgtaggtgaacatcctgccgcccttcttcaacagctgtccggcagcccggaatagtccaatggagcaggaccacggactgatgtgcatcatgttcgagttgaacatgtagtcgtagctggctggtgctggtggagcctcccagtctccgggatcccgggtgatgtccacatggaatggcgggcgaatatttcgagtgggacaatcccctgcataggcagcaatcgaaccgaactgattcctttcgtactccgtcggctggaaggtgatgttgggcagcaggggcgccaggaatccagcatgttgtcccgagcctgaagcaatttccagcaattgcaaattctcggtggttttgtccacttgagagagtagcgcctccgaaatcggttgcgaattgcgatccgccgagggatgcgatctcttggagaagctgcaacggggatggatgtgcagaagtcgcttggtcaggctgtgtttgttttgcatttaatagattaaaaatttcgatattcagtttatttacctcattttacttgtcaaaaaaaaaggatgaaaacaaatgccaatgtaaatgatgggcagcactgttcgaaaccagggatgggcaaagctttacaaccgttaagtagcaggaaagcagtcacggaatttggaaaataaatatcggtcacttgaaatgataacaatatatttttctcttctaggatataaataattgcaaattaggtatcagtcactatttctgttgctcatctctattagtcacagttatcgatttcaacagctgatagccacatttggcggcaatattttgctattcaccaaacggtcacacagtttttaggctttgtgtttttttctagtaaaaatattatagattggcaataatttgctcataaagcgtagtttacaaagccaaacccgtaaaatgtccgacaacgatgatgattttatgtgcgacgatgatgaggactatggattggtaactactacagcaatttgcctgttttaggcaaattcaaattaagccggcttctattgactcgcaactttgaaaatcttataggaatattccgaagatagcaactcggaaccggatgtggatctggagaatcagtactacaacagcaaggctctgaaggaggaggagcccaaagcggcgttggccagtttccaaaaggtgctcgatctggaaaatggcgaaaaaggagagtggggcttcaaggcgctgaagcagatgatcaagatcaactttaggctggtaaggaagtgtgcagccggttaatatattatatatccctagctaatggcttatcccttcagtgcaactacgatgaaatgatggtgcgctataagcagctactcacctacatcaagagtgccgtcaccaggaaccattcggaaaagagcatcaattcgattctggactacatatccacatcgaagaatgtgagtccttttctttcctttgtgtttttccatttaagcttaacaatttatgcttaatttcagatggcactgctccaaaacttttacgagaccactctggatgctttgcgggatgcgaaaaacgatcggctgtggtttaagaccaacaccaagctgggcaaactctacttcgaccgcagtgactttaccaagctgcagaagatactaaagcaattgcatcaaagctgtcagacggacgatggcgaggacgatctgaagaagggcactcagctcctggaaatctatgccctggagattcagatgtatacggtgcagaagaacaacaagaaacttaaggccctctatgaacagtcactccacatcaagtcggccattcctcatcccctaatcatgggtgtcatccgtgagtgcggcggtaaaatgcatctacgagaaggcgagttcgaaaaggcacacacggacttctttgaggcgttcaagaactacgatgagagcggttcgccgcgcagaaccacttgcctaaagtacttggtgttggccaacatgtatgtaaaacagaaaacaggaaaagcattttcccttattaattgttccactcattttcaggctgatgaaatcgggcataaatccctttgactcacaggaagccaaaccgtataaaaatgatccggaaatccttgctatgacaaacctggtcaattcctatcaaaacaacgatatcaatgagtttgaaaccatcttaaggcaacatcgcagcaatatcatggccgatcagtttatacgtgaacacatcgaagatttgctgcgtaacattcgcacccaggtgcttataaaacttatcaggccctataagaacatcgctatacccttcatagccaatgcactgaacattgagccagctgaggtggaaagcctgctggtttcctgcattctagatgagtaagatataaatattgaagatgatgtaaactcaactaacgtttatttcatcgccagcacaatcaagggacgcatcgaccaggtgaatcaggtgctgcagctggacaagatcaacagcagtgcttcgcggtacaatgccctggaaaaatggtccaaccaaatccaatcgctgcagttcgctgtggtccagaaaatggcctaagtacagctacatatttccaattcgatgaaaattattaaatttgctagaatttatcttaaacagttggagatgattcattgggcgtagcttttaaggctggtgcttcctccttccttttgccacaacagttgtacactgacatccgcaacctgtaaattccaaaggccacgagggaaaagcaacagatcaatgccaaactcgcgcaaacgaatccaatcgccagaccaggtcgagcccagtccagggcgaagtagatgaagcgatttccgtcgctgcaaaagtaatattaagctgaaagttggataagattgcatagctctacttacatgtcggttccgccggcccaatagtaaataagggaatgcatcaagaatatgagcaccaccgaaaagggatacacaaagtgcataagacggttaggataagccaccataaagcagtcgaagaccatgcagatcgagttgaatgcatggcaccacaagttgtaaagctcacctgccacttctggcatggctaagagagattaaattgggtcttaatgaaagtgtaatatagattttaagatctttgcttacttaatgatagagctgcccagaagacggtggtaatcaacatggatagtaccgaagtggtgtagtgtgagatccagtaaattttcagagcacaatgtccgggagctgaaagtgttattatagactgcccgatttaatacttttcttgcatacacaactaaactaaaacttagtcaaagtaaaagtgtatttagatttgcagaattgaaacttattacagtcccattacaacgactaatactcaccaaaataagattgattgaagtagtaaatagtagcgattacagccccgtaagtgcaggtaaatagacacagtgtaaatccccaatccgtgagataaataaaccatcgaccgccattgaaatcctgcatcatgctgccaatgactccagcggcaaagaaagcagccagaagccatcggtatagaacccagattaaattccgctctccgttctgccattgtgatcggcagaagacaccaggatcttcatggtgcagcgagaattttgaccgctgaaactcctcctttaggggctggcagcaggactctgcgttcggatcagccattattcgatggactcgactggatgagctagttataactttggtggtaatctgcagactgatgaaggaacaggtgttccattggcttaatagccacatttaccgctctgaatagagctaatcgtgtggtactaggcgtatgaattatcacgatccttatcatcctgttaagaaccttttatgtctggttcggcagcagaac

SEQ ID NO: 20342 - DNA, 1694 bp, DROSOPHILA
gctttgtgtttttttctagtaaaaatattatagattggcaataatttgctcataaagcgtagtttacaaagccaaacccgtaaaatgtccgacaacgatgatgattttatgtgcgacgatgatgaggactatggattggaatattccgaagatagcaactcggaaccggatgtggatctggagaatcagtactacaacagcaaggctctgaaggaggaggagcccaaagcggcgttggccagtttccaaaaggtgctcgatctggaaaatggcgaaaaaggagagtggggcttcaaggcgctgaagcagatgatcaagatcaactttaggctgtgcaactacgatgaaatgatggtgcgctataagcagctactcacctacatcaagagtgccgtcaccaggaaccattcggaaaagagcatcaattcgattctggactacatatccacatcgaagaatatggcactgctccaaaacttttacgagaccactctggatgctttgcgggatgcgaaaaacgatcggctgtggtttaagaccaacaccaagctgggcaaactctacttcgaccgcagtgactttaccaagctgcagaagatactaaagcaattgcatcaaagctgtcagacggacgatggcgaggacgatctgaagaagggcactcagctcctggaaatctatgccctggagattcagatgtatacggtgcagaagaacaacaagaaacttaaggccctctatgaacagtcactccacatcaagtcggccattcctcatcccctaatcatgggtgtcatccgtgagtgcggcggtaaaatgcatctacgagaaggcgagttcgaaaaggcacacacggacttctttgaggcgttcaagaactacgatgagagcggttcgccgcgcagaaccacttgcctaaagtacttggtgttggccaacatgctgatgaaatcgggcataaatccctttgactcacaggaagccaaaccgtataaaaatgatccggaaatccttgctatgacaaacctggtcaattcctatcaaaacaacgatatcaatgagtttgaaaccatcttaaggcaacatcgcagcaatatcatggccgatcagtttatacgtgaacacatcgaagatttgctgcgtaacattcgcacccaggtgcttataaaacttatcaggccctataagaacatcgctatacccttcatagccaatgcactgaacattgagccagctgaggtggaaagcctgctggtttcctgcattctagatgacacaatcaagggacgcatcgaccaggtgaatcaggtgctgcagctggacaagatcaacagcagtgcttcgcggtacaatgccctggaaaaatggtccaaccaaatccaatcgctgcagttcgctgtggtccagaaaatggcctaattggagatgattcattgggcgtagcttttaaggctggtgcttcctccttccttttgccacaacagttgtacactgacatccgcaacctgtaaattccaaaggccacgagggaaaagcaacagatcaatgccaaactcgcgcaaacgaatccaatcgccagaccaggtcgagcccagtccagggcgaagtagatgaagcgatttccgtcgctgcaaaagtaatattaagctgaaagttggataagattgcatagctctacttacatgtcggttccg

SEQ ID NO: 20343 - protein, 444 aa, DROSOPHILA
MSDNDDDFMCDDDEDYGLEYSEDSNSEPDVDLENQYYNSKALKEEEPKAALASFQKVLDLENGEKGEWGFKALKQMIKINFRLCNYDEMMVRYKQLLTYIKSAVTRNHSEKSINSILDYISTSKNMALLQNFYETTLDALRDAKNDRLWFKTNTKLGKLYFDRSDFTKLQKILKQLHQSCQTDDGEDDLKKGTQLLEIYALEIQMYTVQKNNKKLKALYEQSLHIKSAIPHPLIMGVIRECGGKMHLREGEFEKAHTDFFEAFKNYDESGSPRRTTCLKYLVLANMLMKSGINPFDSQEAKPYKNDPEILAMTNLVNSYQNNDINEFETILRQHRSNIMADQFIREHIEDLLRNIRTQVLIKLIRPYKNIAIPFIANALNIEPAEVESLLVSCILDDTIKGRIDQVNQVLQLDKINSSASRYNALEKWSNQIQSLQFAVVQKMA

SEQ ID NO: 20344 - DNA, 2921 bp, DROSOPHILA
gcgtaggccatttactttaagatgcgattctcatgtcacctatttaaaccgaagatatttccaaataaaatcagtttcttacaaaaactcaacgagtaaagtcttcttatttgggattttacacccccgaaattgtgctgcacattgacccacttgagttcatttgaaagttgaaacttgtaccccatctctcgacataaccgttcaatttgcagttcatgtcttggcttcgtttagttcactttgccattttttgcagctccttgctgttaacaagttcacgtgcgaaattgcaatgacccaaaggacacaacgacacacacctgccgggcgattttccacccggcgcccacccacttttagcacctgtggttcccactgctaactgctatgacaaccgtagatggtgcagagtaaccgaaacgtcaacggaaaggccagaagaaaagcgactatgggcggctagtggccaagcttgcagcaatttgcagcatttaatcaacaattagtgaggccaggaaaatggctgggaaaactaggaagagtcacaaacgcagatgaaaaacttctttccatcgaattggatacttctgccactcttgccagtcaattcaatctattgcaactttgtatgtttttctcttcgcgaaaacttttatttgccttcggtccaattattaggtaaatttgatcggttctgcctgcagttattgatatgatgtggtcatccagggcacttcctccttccagactatgtcaatattgggtccaggggtttttctgggtcaattgcttcgtagggcgatgatgaatggagcaaaagaaaagtgcagctggtgcaagaaaatgttgtgagttatttgagtgcatcggtttcgaaaacattgaaatctgtttactactgaagttcatatctttcctaaaaatacgcttgaaaattgtattttatgtaaatagggtattaactatgaaaccaatactcaaatcgtaacgtatatccattccctttattcatttagtttagttttgatgaagtaatgatctcaaatgccactaacagagctaatccagtcacgaaccgcagagactcgcgaataaacgccgggatagtttggtctagcacaaccgtagccccaggagaccacgccccaaaggacaccatcagcagcgagaggtcctccggagtcaccttggcaggcgtccttgccgccctccggcaatccggcgcagagcatgcgatccgtgatgctgccaaagttgccataagcctctgtgcactgcgtctgactgactttgggcaccgtaacggaccgcagaacggctgaggtctcctgggcgctctgcgtgtttccccagccggaaaccaggaccggtgtaccatcggcaatgtccgcatcctgttcgggaagcccaacgaaagcctgcgtcacgttcttggcactatattcctccagttcgagcagcgaaaagtcaaagtcaatggtgtaggcatcgaatttgggatgtcgatgaactcgcttgatccccaccaattgaccgcccacagaagtccgcgaggagccaatacgaactttggataagagtatcgcagatccttcagtgcagtgggcagctgtgagcacccaaccctgagcgattaaagagccaccacagaagtgatagctacgctgcagggaaacctgatagggaatgtcctttatgttagccacctggccgcccacaatgcgtccatccaggcgtgggcgccttacagtggctcctaagctcagatttaccaggagaatcccgccgataaacagatgaagaatcgtctttgccatgccggtcaatccaatgctcgatcgcatatgctgcaggtgcaaacaaatccgtctttatatatagtttgccaatcgatcaagctattatcaactgcgttttcagggtcaattcctgcactctcgctctgaccacttggcctagttcgatgagcaggcacttcgacgacaataaactttattgccgccaaaataaacgatgttatctaggagcgggtaatagcgccccaatagccttagtctagtgcactactttatagctttagccaggtcaggaacttgttgtttgatggcatcttgacgagcttttccagctgcagtccattttcggccgccaagaccttcaggtccttaatgtcgcgaacgccccaggaggcgtccctctgtcgcaggctccgatcgaagtccacattgctctgtggaacgagtataccgtcttgtgcatatggtccgtaggtgaacatcctgccgcccttcttcaacagctgtccggcagcccggaatagtccaatggagcaggaccacggactgatgtgcatcatgttcgagttgaacatgtagtcgtagctggctggtgctggtggagcctcccagtctccgggatcccgggtgatgtccacatggaatggcgggcgaatatttcgagtgggacaatcccctgcataggcagcaatcgaaccgaactgattcctttcgtactccgtcggctggaaggtgatgttgggcagcaggggcgccaggaatccagcatgttgtcccgagcctgaagcaatttccagcaattgcaaattctcggtggttttgtccacttgagagagtagcgcctccgaaatcggttgcgaattgcgatccgccgagggatgcgatctcttggagaagctgcaacggggatggatgtgcagaagtcgcttggtcaggctgtgtttgttttgcatttaatagattaaaaatttcgatattcagtttatttacctcattttacttgtcaaaaaaaaaggatgaaaacaaatgccaatgtaaatgatgggcagcactgttcgaaaccagggatgggcaaagctttacaaccgttaagtagcaggaaagcagtcacggaatttggaa

SEQ ID NO: 20345 - DNA, 921 bp, DROSOPHILA
gaaaacgcagttgataatagcttgatcgattggcaaactatatataaagacggatttgtttgcacctgcagcatatgcgatcgagcattggattgaccggcatggcaaagacgattcttcatctgtttatcggcgggattctcctggtaaatctgagcttaggagccactgtaaggcgcccacgcctggatggacgcattgtgggcggccaggtggctaacataaaggacattccctatcaggtttccctgcagcgtagctatcacttctgtggtggctctttaatcgctcagggttgggtgctcacagctgcccactgcactgaaggatctgcgatactcttatccaaagttcgtattggctcctcgcggacttctgtgggcggtcaattggtggggatcaagcgagttcatcgacatcccaaattcgatgcctacaccattgactttgacttttcgctgctcgaactggaggaatatagtgccaagaacgtgacgcaggctttcgttgggcttcccgaacaggatgcggacattgccgatggtacaccggtcctggtttccggctggggaaacacgcagagcgcccaggagacctcagccgttctgcggtccgttacggtgcccaaagtcagtcagacgcagtgcacagaggcttatggcaactttggcagcatcacggatcgcatgctctgcgccggattgccggagggcggcaaggacgcctgccaaggtgactccggaggacctctcgctgctgatggtgtcctttggggcgtggtctcctggggctacggttgtgctagaccaaactatcccggcgtttattcgcgagtctctgcggttcgtgactggattagctctgttagtggcatttgagatcattacttcatcaaaactaaactaaatgaataaagggaat

SEQ ID NO: 20346 - protein, 267 aa, DROSOPHILA
MRSSIGLTGMAKTILHLFIGGILLVNLSLGATVRRPRLDGRIVGGQVANIKDIPYQVSLQRSYHFCGGSLIAQGWVLTAAHCTEGSAILLSKVRIGSSRTSVGGQLVGIKRVHRHPKFDAYTIDFDFSLLELEEYSAKNVTQAFVGLPEQDADIADGTPVLVSGWGNTQSAQETSAVLRSVTVPKVSQTQCTEAYGNFGSITDRMLCAGLPEGGKDACQGDSGGPLAADGVLWGVVSWGYGCARPNYPGVYSRVSAVRDWISSVSGI

SEQ ID NO: 20347 - DNA, 2746 bp, DROSOPHILA
gcggcttagcatccttgttgttatagctgcttagctattcgtgacatgtccggggcaatgcccacgattgtgatgtatgattttcaattccacctacggcgagtccttttctagtattgttgaaattatcccttggcttgagcaacaaaaaatagtatggaatcatttttttgtggcttatcgtgagtttacttggcggctaagctatgtgctttcttccttttaactaaatcttaggttctaaactaattgaacattttatttatttcttacttcatcctgttgtcatagcccaatgcaaatgaatcactttttgtttataaggtagaaacttttaatattacattcacaatcggtttttatttcaaattaatttatgatgaacgtttagggtttcttatctgggttgaagcttattactcatcgtcatgaattcatatcgacttcagacattacctcacataaacaaacttaacttttaataactaataataatactaaaaaatatattctgagacacatacatatagtattatagtattttatagccttgttttgtctcacatataaaacgtatgttataaacatggcgggtatcatttattggaatattatcagctaataatcaggatgttagacattggtataaataagccattgtatgtcacctatcaattggcaatacttgcataatgatttaactttacatagactcatgcggaaaagcatataaaacttgggaagagttctgttcccattttggctttagttatcacattggaatttatttgataacagttatccgccgacctgaaaatgcacttcatcagcagaaatccccgtatttggctttagtcaacaattcctgactcaaagtgggtttgcgggcctagtgataacataatctaatctttataaccgacataaaagccgcttttattgaggtaaaatgttggactacaaattgagcagctatcggctacacttgattcagtttcgcttgaggtagccttacgaagagttgcgcttataattattaggaataatattaacctatcgaaatgtggaagaaaataattttctgtgtggtgcttgtggcctttgtggttgtgccgtttggtgagaagaaaaagtgatcacaaagttgaatctttgctaatggaatatttttatatattagccaactcactgacctgctccaagtgcacatcgccgtctggatgcaaaagtccttcctccgaaacctgctccaattcgacggccaatgccaataaggaatttctggaaggataccatagtaatgtgcccaccgttaatggcagtctgagtttttcgtgtgccaatctcacttactatcatgcagcaagtatgttttttttttttctgatttacgcttttgaaagaagacatcctaacttgttttgcatcccttttcagactacactcacacctttgagttcctgggctgcgtcttcaacgaaacgaatgtctgcaatctttccctgaacaacaccgcgagtggatggagcaagaagtgcctccaatgcggcaccgactactgcaatccagctggaacctacagcagcagtgtctatacaatcgtgggatccgccattgccgtgattttggccaaagttctaagctaaacttataatctgacgacggagctaaacagtatttcaactaccttttgattgtacaatatttatttgaattaaaaataaaatcatttaagataacgaacaatgggatcttatcataaaaaatgcgtaaaattttctacatggaaatccaatattgattttcatttctatcttgttcacctaggagatcctgactgtttgtttaagagtcttatgggtacgcattaatatatattagcttataaagtttactaatcaacacaattacaatcgtatttataaattaaagcatttttctacaagaaaaaaactaattaagatggactaaaatgtaaccattgcatatattctagaaaataaaaatgtaaataatctttgaccataaatcatgaagagttgccaatcaactcttcaagttaatgaggtaaaaagttccccttcccaattgctaccaattctacgcaacagacttatcatttattgcatatagatttggtggggactaagataagagctctttattaaagccgctcaggtgttagattaccaggttgtgactaatatttgaaacagtgggctaggcccacgaattttacaaataaaattaaaaagaatttacgcttaaatatatatatgtatttatatatattgctggaggattatgaaatgtttgttatttcggtaaagcagtgaaattcttatttgatttaatatgtttaaatgagagtaggaatacaggaatatttccaaaaatgaatgagtttcgaaaggggaaacccttactgcttctccattgaaactttttgataagtttatgagcctgtaaacgtaaaatgataagattaacttaacaaacgacatacatacaagcttatctcaaagaattgagtattgtgcaaaatctgaagagaatcgccgtataaaagagttcttggcatttaaaaagagtttagtttaaagcgaatcgacatcttgcaaagttgtactacagttaagtgtgaagtaaaaatatttaaaccaaaatgtatatgaaagctttaatagtcagcatacttgtggcctttgtgtgtgtgcaaattggtgagtcaattgcgtaaaatgtg

SEQ ID NO: 20348 - DNA, 614 bp, DROSOPHILA
ttgaggtagccttacgaagagttgcgcttataattattaggaataatattaacctatcgaaatgtggaagaaaataattttctgtgtggtgcttgtggcctttgtggttgtgccgtttgccaactcactgacctgctccaagtgcacatcgccgtctggatgcaaaagtccttcctccgaaacctgctccaattcgacggccaatgccaataaggaatttctggaaggataccatagtaatgtgcccaccgttaatggcagtctgagtttttcgtgtgccaatctcacttactatcatgcagcaaactacactcacacctttgagttcctgggctgcgtcttcaacgaaacgaatgtctgcaatctttccctgaacaacaccgcgagtggatggagcaagaagtgcctccaatgcggcaccgactactgcaatccagctggaacctacagcagcagtgtctatacaatcgtgggatccgccattgccgtgattttggccaaagttctaagctaaacttataatctgacgacggagctaaacagtatttcaactaccttttgattgtacaatatttatttgaattaaaaataaaatcatttaagataacgaacaa

SEQ ID NO: 20349 - protein, 150 aa, DROSOPHILA
MWKKIIFCVVLVAFVVVPFANSLTCSKCTSPSGCKSPSSETCSNSTANANKEFLEGYHSNVPTVNGSLSFSCANLTYYHAANYTHTFEFLGCVFNETNVCNLSLNNTASGWSKKCLQCGTDYCNPAGTYSSSVYTIVGSAIAVILAKVLS

SEQ ID NO: 20350 - DNA, 2997 bp, DROSOPHILA
aagtttatgagcctgtaaacgtaaaatgataagattaacttaacaaacgacatacatacaagcttatctcaaagaattgagtattgtgcaaaatctgaagagaatcgccgtataaaagagttcttggcatttaaaaagagtttagtttaaagcgaatcgacatcttgcaaagttgtactacagttaagtgtgaagtaaaaatatttaaaccaaaatgtatatgaaagctttaatagtcagcatacttgtggcctttgtgtgtgtgcaaattggtgagtcaattgcgtaaaatgtgaaattcgagatcaactgattgtttttaacatggattatagctgattccctgaagtgttacacctgcgtaacgccaaaggactgcaagagtcccaagaaagtcacctgcacgaatgcggctgcgaatgagactagttactacctgggtgtctatcatcagaatgttggcaacctaaccagcacgcgattcgattgcctggctctgaagtacaactggagtgagtagcgtggggaccccagaagcggactataaagatttattaactactttccacttgccagataacgatgtgatccatcagctccatggctgtgtgcatccaaatgttggagcctgcagcttagcacttaagccggcctatgctcactacaataagacctggtgtctcacctgttcgggcgacaagtgcaacaagaatccggccggaaagatgagcagcagcactattgccatcgcgtctagcgttctgggtctcttgctggtcaagatgtatgcctagtgtgactattaataaatatgagctaggagctatgatattttatatttgatattttttattgtaccgtcaattttagtaatatcataatttcatttgtagattatgtaggccatgtttattcggtcgagcagttaactaggagtgggtatcactaatcgatggcgcttgaatggacggtggagtgacgaaagttgttgggcgcttctctaggaggagcccattgggttgacggcgtttgtctgcaggttcttgagcagcatctgcagccactgcttggtgcacgtgtcatgttgcacgagcgacgtgaaggtgccgtcacgcagcagatccggcagacacactctaagtgcactgcgagcgcgcgcattttccgtaagtagtagatagcagcgcaccacatgcttcagcacccggaggcatggaaacttcaacatatggatgaccattttgcccagggtgatggccacctgcgagaagcgatcgtggttctcgcaaatgtacgtcagacccatctcatcgagcagtatcttctcaaggattgaagtggccgcgatcttggtcagcttcgatcccctgaccatattggtcagacagtgaggcacgacctcgctccatatcaggaagatgaggacctccgtatcaccggtctcggccagagcattaatcacgcccagcgtggtcaggcgcagctgctcgaagggcctgctcttgaacgtggtcgacaagaaggggtacaagtacatcggtatctggtcccgcaggaaggccgggcgagtctccggatgcgaggcgacgcactgtagcaaagtcagggcgtagcacacgcggttcgactggttggccttcaaaacgggcgtcgttattatggggtatatgttgacgatctcctgcagcagggtgcaggtggtaccgacgcttttccacagcatgggggccaggtccgcataggtgttcttgctcagctccagcagagcggtctcccgcgtggcaggataggccagctcgatgatcaactggtacaccttctcccgctcggcctgctgctggggactcattaccggacttggttccgcactcatcgcaaagctggttttttttcgcgttagcttgcaaagatctagtagcttggaaagatctggctccggaatttcgacggacgattgagaaacgtggtttcgagttggcgtctattgtggttatcgatataagcttcaagcgagaaaggaccgaaagcacgtggccgaacaatgtggccagagccgaggaacgcacgaatgccataaattaataaataatttcttgttcgaatgtctcccagaattttgtttcttatcaccattgatttgattggcagcttggaattcgtctggaaattcacgttttctctatattttacaagtattaatcggtagatgattaaaatttatgattctattaagtatgtcatagcatagcttagctctctgaaatggccagactaattgcgcatctgatggaggtccgatttatggcttaatgaccattaagtacttttggacaccagttttagaattaatgaattcgtattgacaaatactataaatcaaaaatcattctagcacacacaaatatttgcctttaaaattttcaaatattttatctcgcatttaacccattaaacagatggatgcttggaatagttgtccatttctggaattacttgccaatacagaaatggttaacagaaaatgtattctttgccacatcgtgcaacatttcaattttgtttgttgcagagagctttaaaaatttcagtccgtcacataaattggccaactatcccagagaaaatcggagattcgaacgagccgagaaacaagaataaatctttaatagtgttgccgtctgcctaaaagtcaatctcacttttgcatgccgaacattatccggtgggtcatgttatggttatcgtggctcggtttgtttggagctgcattcaggcatttaattgattgattgttgctcgtctatgtctgcatcgatttggccgtgttcacgcccctttcaccctttcaccgagccgcctccaaaatcccgttacagcgtcccctttttcggatgtttcataaccaaagcggaagggatccatgccgcccatcatatcgtgcacggttatcaaatcgacttccaggctatatcctcgcatacatgcatatgtggtcca

SEQ ID NO: 20351 - DNA, 997 bp, DROSOPHILA
tcgataaccacaatagacgccaactcgaaaccacgtttctcaatcgtccgtcgaaattccggagccagatctttccaagctactagatctttgcaagctaacgcgaaaaaaaaccagctttgcgatgagtgcggaaccaagtccggtaatgagtccccagcagcaggccgagcgggagaaggtgtaccagttgatcatcgagctggcctatcctgccacgcgggagaccgctctgctggagctgagcaagaacacctatgcggacctggcccccatgctgtggaaaagcgtcggtaccacctgcaccctgctgcaggagatcgtcaacatataccccataataacgacgcccgttttgaaggccaaccagtcgaaccgcgtgtgctacgccctgactttgctacagtgcgtcgcctcgcatccggagactcgcccggccttcctgcgggaccagataccgatgtacttgtaccccttcttgtcgaccacgttcaagagcaggcccttcgagcagctgcgcctgaccacgctgggcgtgattaatgctctggccgagaccggtgatacggaggtcctcatcttcctgatatggagcgaggtcgtgcctcactgtctgaccaatatggtcaggggatcgaagctgaccaagatcgcggccacttcaatccttgagaagatactgctcgatgagatgggtctgacgtacatttgcgagaaccacgatcgcttctcgcaggtggccatcaccctgggcaaaatggtcatccatatgttgaagtttccatgcctccgggtgctgaagcatgtggtgcgctgctatctactacttacggaaaatgcgcgcgctcgcagtgcacttagagtgtgtctgccggatctgctgcgtgacggcaccttcacgtcgctcgtgcaacatgacacgtgcaccaagcagtggctgcagatgctgctcaagaacctgcagacaaacgccgtcaacccaatgggctcctcctag

SEQ ID NO: 20352 - protein, 290 aa, DROSOPHILA
MSAEPSPVMSPQQQAEREKVYQLIIELAYPATRETALLELSKNTYADLAPMLWKSVGTTCTLLQEIVNIYPIITTPVLKANQSNRVCYALTLLQCVASHPETRPAFLRDQIPMYLYPFLSTTFKSRPFEQLRLTTLGVINALAETGDTEVLIFLIWSEVVPHCLTNMVRGSKLTKIAATSILEKILLDEMGLTYICENHDRFSQVAITLGKMVIHMLKFPCLRVLKHVVRCYLLLTENARARSALRVCLPDLLRDGTFTSLVQHDTCTKQWLQMLLKNLQTNAVNPMGSS

SEQ ID NO: 20353 - DNA, 2903 bp, DROSOPHILA
ccccccactctcctgttccttgcgttgaggaaaacttcctcttcggcctcaaaatttgattgatagcaacaaatgttgatttgcagccgcccaaaatttgccaggcattcaactttgatttataggaattacaggcattaagcggcttaattgggtcttgattttagatatgataatatataataaaatctttccgcctctgcttcacttgcttcactttgctcaccgtaatggctcttaattgccattccgttcgtcctgcagaaaacccttcaattaccgtgcaattaggtgcgagtgtcaagtggaatgaaaccgaaaaaaaaacaggggagcgcaaaaactgtgggaaattaggaagaaaaccaagtcagtagttcacttagaggcgtccgagcaaacacttgcgcagcacccggcataaattaattataattccccctgttagtgtaagtgtaagtgtaagtgctccgtgtaattgtaattgttgttatggctggcttataattgtcggtcttgttgatgccgttctagttgctgttttcggtatttctgttgttgtcgtgctaaacaattaagtgtaaagtgtaaaacatgctgagctgcggtctgtggtcatgtttttgtatgtgtgtgtgtgtttatgtctgtgtgggtgaagtcccgaaacggaaacggaagttgaaactgaaactgtaacaaaaacattaaagggactttttcgagtgccgaagatgaatttatatagtttgggtggcgcggctattacgaacgccaatgtaaacagaatttgtatttaagctatggatagtttgagctagtttgagttaatttaaatgatatgtttaatgcatttcaacacttaattatatcaattaataacagttaatttagagctatcaatggttttttatgggaaagtgatattaggttgatttagataaagcttgttaagttcaacagcttaatttaggatgttgcatttgaatataaaaaaatattaaatattttggctcttaaggaattcaaataaatactcgtaggtcaccaggagcatggccccaccagggccgacacgcaggatcatcgcccccagacccttgaacaacgatcgaaaaccctcctccttgaaggttgatttaatcgtgcttatggtccactggtacttcacctcgcccttcactggctggggtccttgaatcctgcacttggccatatccaaagtaacactcatcacgcaagccagggaactggccaacccagctatgatgacctttcgcaggatgttgtatgtcttatcctccgggcttggaacaatgtctttaagcgcattgtaaaaaccaaagaatccaaagtgaaagacggcatttcgagccactagtgcagtgataccccgatacaaccctttgatgccatagccatcatgcttgattatgtactttacgaccgacagtgttttcaagcgtttcccccgatgagcctgctgagtgatcttgaccacctcaaagggattgacgagaaaggactccagaattgcggccattgaaccggacatggcgtgggtcagcggagttggttgaggggctccaaactggaagtacggtttaaggctctcgtacatcaaaaacttgccgcccctctttggagtttccacgcagatcgggggcacaatacccttccatagggaagacaacccttcgtagcgatatattttgacgatggcatccagaggacaggtgtaaacaacctcgccgccaaatggatgggcaccctgtatctgcatccgggtcttaaccacatcgaggggatgaaagcagataatctcaatgaagcccgacaatccgccagccaaaaattgccaatgcgccagtgaacggaccgtctcttcagaacgggtcgccatccaacgtcaaaaaatttcgaatttcatctaaacacatgttgtagaaaaaataaaaaaagaacactttcgtctctgacttaaaagccaagtcgaagctaatggaattttataaagatggtatttatcttaagattaaagttcgatgtttatagaaacgttaatcctttgatatcatatcatatattatggcttcacaaaatcaaaaccttccaattagtagtttcaaatatatacaacaaatccaactctttggtagtagccattttagtttaaacatattattaatcaaattcaagtaattaatattccttgaggaaatgatccataaagtgaatgcgaaacaagcagcttgtaagtagttcctttaaggacctcactggttatttttcgcctcgtctcacattgcagcctcgttgttttggccaccctctaatgatgctccgagtgccatgttaatgaatgtcaagtgcactgcatgtaggaacaacttccattcccatgcccgtgcccatgcccccatatcaaaatgtcggttgtgctggtggactcctgggcgatctcataacaacaattatgctaatgtggcccaatccgggacgtcaatccaacataattgctaacaaattagtcatggtcgcacaggccagtcccagcccttttgtgaaccccactcagtactcatcctcattcgtatcctcgaatccccatcccagctattttggcctagttatgtagcaatgtgcggcgtcgagtcggatgtatgcggctgggtgtagtggagtgaagtccattcagctaagtttaacacgcgagcagaggagtgaaggaccccacattgtctgtggctaggtgtgtatcccggcaatttgcctgtcacgctgcacaattgcagaccatgccctggtcgatgttcataagtcagctcattgccgccggctgccctcttctgttttcgcatcctaacatcctgatggagagcgttaaatttatattagaatat

SEQ ID NO: 20354 - DNA, 903 bp, DROSOPHILA
atggcgacccgttctgaagagacggtccgttcactggcgcattggcaatttttggctggcggattgtcgggcttcattgagattatctgctttcatcccctcgatgtggttaagacccggatgcagatacagggtgcccatccatttggcggcgaggttgtttacacctgtcctctggatgccatcgtcaaaatatatcgctacgaagggttgtcttccctatggaagggtattgtgcccccgatctgcgtggaaactccaaagaggggcggcaagtttttgatgtacgagagccttaaaccgtacttccagtttggagcccctcaaccaactccgctgacccacgccatgtccggttcaatggccgcaattctggagtcctttctcgtcaatccctttgaggtggtcaagatcactcagcaggctcatcgggggaaacgcttgaaaacactgtcggtcgtaaagtacataatcaagcatgatggctatggcatcaaagggttgtatcggggtatcactgcactagtggctcgaaatgccgtctttcactttggattctttggtttttacaatgcgcttaaagacattgttccaagcccggaggataagacatacaacatcctgcgaaaggtcatcatagctgggttggccagttccctggcttgcgtgatgagtgttactttggatatggccaagtgcaggattcaaggaccccagccagtgaagggcgaggtgaagtaccagtggaccataagcacgattaaatcaaccttcaaggaggagggttttcgatcgttgttcaagggtctgggggcgatgatcctgcgtgtcggccctggtggggccatgctcctggtgacctacgagtatttatttgaattccttaagagccaaaatatttaa

SEQ ID NO: 20355 - protein, 300 aa, DROSOPHILA
MATRSEETVRSLAHWQFLAGGLSGFIEIICFHPLDVVKTRMQIQGAHPFGGEVVYTCPLDAIVKIYRYEGLSSLWKGIVPPICVETPKRGGKFLMYESLKPYFQFGAPQPTPLTHAMSGSMAAILESFLVNPFEVVKITQQAHRGKRLKTLSVVKYIIKHDGYGIKGLYRGITALVARNAVFHFGFFGFYNALKDIVPSPEDKTYNILRKVIIAGLASSLACVMSVTLDMAKCRIQGPQPVKGEVKYQWTISTIKSTFKEEGFRSLFKGLGAMILRVGPGGAMLLVTYEYLFEFLKSQNI

SEQ ID NO: 20356 - DNA, 3767 bp, DROSOPHILA
aataacagagatacatatgtatgtagtaattgttatgtatcaatccgttcattataatgcaacttaagccttaacttttatctcacaaattcgcattcatcggcactaataatattttattcctgttgtgtgaaggaatttctgtactgcgcgttcgggttcaacatgcgtgatgttgcaagtcggtttgttttgggaaattaaatttcccagaatgaaaattcgtaatattctttcataataaatctttgagatataaacaaaccctacataattaaattgcttaatttatatccatattaatattgtaagcagtattttactgtataaattcatttaattatacaatataattcacaaaaaaaattctttaataacctaaccaaacccaaatttagttttctgtaaatatattatatttttgtatcacttcatattgagctttctatttaaaggtattgttcttaaaaattcctggaagcaaaagattactttttattaatttggggtgatgactaaaggaagaaatcaaaatacagggaaattttctacgcaactcgaacggcacacaatgggacaacttctacatagcaataaataaaataagacaagagacaatggcatttatctaaataaaaaatgagctaacaaattaattttttatttgtcaattttacttttacagttgtaacctttaaagttttaaaatttcaaaaattctagtatgtgcaaattacttttggtaagacttaagctatacctatttgttgaaaagttttatttcgggacttgcagcaattctataacaaagttttaaaaataaaataatcctcttcaatcaatggcttaaatgttgaaaaaaaaaacattattttgctgatactgacacacccactgtgcggcccactgtgcgcatttcgaacatgttcgaagcgaaccccggatgccgatgcatgggattcggtggcaaaccagttttcgttgcgccagtcatcgacgggcagctcgcgtggatagttcgccttcgcttcggtcgctcgtttgctttgcgcgaccaactcactttgaaaataaaattttggccaataacaaaattggttttttcaatttgctaagccacagccgcaccgagaaaccgcaaagaaatgcgacgcgacacgctgccaacaaattaaatttaacctaaagaagtatgtgcaataaaccaacaaaccaattaccaacgaaaccaaattcaagaattaatatgtcagcggaaatatcaaaacaaacgtgtttggcatcacatatgcgaaagcaacgcgccaagaaaatataaataataagccccatcgacgtcagcaaacaaactcaaccgacccggccaataaacagcttcaaaagtgcccaagaatcgttgcgaatgcgaaaagatacatttgtatctttggtcatgcactttgcagttaccccttccatttccctaaaaaaaaaatacgcagtgttttgttgtgcgaaagtaaaaactacctgcaacagactttagagacagacctgcccagaccgaaaaacccgaaaaagaaaaccagttttgtgaaaattattgactgcgctcttgtgttggttttagtttagtttttatatctcgttatgcttctcttttttttactatttcttggctgcactcctttgtggattgcagaaaggaaaatggcaataataacaagccgaaattggcggctgccagcggatagatagaggagtcataaataaagtgagcggatggatagcattgataagaaatgcaattgagggagacataaattaccaaaggtgtcaaggggttctagcataaaattgaggtgtaaacatttcagtatggattgagtggttacggttttttgttaaatgtgctgttagattacaaacaaatttatagcgatgatttttattttattctgatccatttaaaatgtaaatagtattaaatgtataggcacattgaaggcacttaaagattcataaaatcagattactcagatacgatttcagaaccaaaccaacccaagtgtgtaacaagagccgactttgagtaacaattagcaaaagtacagaactaatggaagccactatttaattctccacccacagtcaactcgaaaagtgcaacattccccataaataataagcaagcgttgcagttaacttaccgctaaaatcaacgatccaacaatcaagcaaaaaaaaaaacaaaagaaaaaccatcaacgtaggctaagaaacagaacggaaaatgctcatgcacacaacatcaatttccacaacgtcgacggccaccatgaccaactcatcgtcctccgccacgcccacacccgggtcgacttcctccaacaacagtgccacgctcgacgcgctgcaccagcaacaacagcagcagcaccagcagcatcagctgcagcaacaactgcagcagttgcacacgaacgccgcaaacaattcacggcccccctcacgtgccccctccattctggacagtccgaccctggcgcgtgtggagcgggctcgtctgcgactggagcagcaggagcgggagcgggaacgggagcgtagcagccagcgggaggtgggcggcggcagcggaggaggcggcggcggtggtagcagcactggcactggcagcaccgccacaaccatgaatcgtgaggatagcctggagcgcagtattttggatcccaaggtgagcttgcagcaaagtctgcacaaaaaacaaaataaaaaacagtcttaactgatcccaaatcaaaagaagatctcaaaaattttttttttaagtttaaagaaacaaaacaaagcaattatttttttcggtgtactcttccacatactcgtagaatataaattacaattaggaggggggatcttgaaaaacctacgtgataatgaaggctcaagtaaccgaatgtattatcacagcgaatcatctgaaaacatctctgcaatccgcttaaagcatatattttaatcttttaatttatttaaaatgttcgtcagataattctcgcataccttgagagcctgataaatgtcttcaatcggaccaaagaatttgtttatatatgagacaacttttcgaagtttacgccatagaaaatacaatcttataaatggctgagaagattattttttccagctagagaaattctttgaatttcacgattctgattcttacgtcatcccatatgaaatattcttaagaagattcttagtgatatgtgttatgtaaaattactaaaacactattggacttatctttgttaaataccaagacttcacatttttgcagtgaacataaaatacatattttaaaaactcttaactaaataattagcccaatttccgtaatgtgttgccacatccaagtacttcccatagatgcccgattccttcaatctcataaagctcttattagatttggtccataaccgaaacaaatgccttcatgatgctgcaaattagtggctaccttctactaaaaccaaatgaagcacgttgagagaggaaaaggcaaatagaacagacattaggatgaggcagtgaaagaagagggcctaaaccgaataagccatacacacatttttttttttgcttgcccagccacagttcttgacagggccatttcactaatggcccaagtcctccttgcggcctaaagtagccccctttaagctataggttactggctgcctagccaactgaggagatggctacttctcgctgtccgaacacga

SEQ ID NO: 20357 - DNA, 827 bp, DROSOPHILA
gcagctcgcgtggatagttcgccttcgcttcggtcgctcgtttgctttgcgcgaccaactcactttgaaaataaaattttggccaataacaaaattggttttttcaatttgctaagccacagccgcaccgagaaaccgcaaagaaatgcgacgcgacacgctgccaacaaattaaatttaacctaaagaatcaactcgaaaagtgcaacattccccataaataataagcaagcgttgcagttaacttaccgctaaaatcaacgatccaacaatcaagcaaaaaaaaaaacaaaagaaaaaccatcaacgtaggctaagaaacagaacggaaaatgctcatgcacacaacatcaatttccacaacgtcgacggccaccatgaccaactcatcgtcctccgccacgcccacacccgggtcgacttcctccaacaacagtgccacgctcgacgcgctgcaccagcaacaacagcagcagcaccagcagcatcagctgcagcaacaactgcagcagttgcacacgaacgccgcaaacaattcacggcccccctcacgtgccccctccattctggacagtccgaccctggcgcgtgtggagcgggctcgtctgcgactggagcagcaggagcgggagcgggaacgggagcgtagcagccagcgggaggtgggcggcggcagcggaggaggcggcggcggtggtagcagcactggcactggcagcaccgccacaaccatgaatcgtgaggatagcctggagcgcagtattttggatcccaaggtgagcttgcagcaaagtctgcacaaaaaacaaaataaaaaacagtcttaa

SEQ ID NO: 20358 - protein, 164 aa, DROSOPHILA
MLMHTTSISTTSTATMTNSSSSATPTPGSTSSNNSATLDALHQQQQQQHQQHQLQQQLQQLHTNAANNSRPPSRAPSILDSPTLARVERARLRLEQQERERERERSSQREVGGGSGGGGGGGSSTGTGSTATTMNREDSLERSILDPKVSLQQSLHKKQNKKQS

SEQ ID NO: 20359 - DNA, 5084 bp, DROSOPHILA
aaatttaaaccaatgaccagttaagcttctgtgttagttttgacagttcatgctgttaaacatgtcaaaatataaaacgacatcaacaacaatgggatttgttcataaaacccatgaataacaataataaataataacaggcgagccaaacaagccgatcaatatcgaccttgagcacattatttgtgaaccaaaggtaaaacggaaatttggaaaatgtttagccatcgattgtgggttggcacacattatgaaatagtgaggtcagagattgggcagggaaatagaggtcaaaatgactaaatttatacgaaataaatttgatattttctgggcatcatactttcataaatatttaaacatgatatatttcttgcatgtcaccacccaccacacagcacttatgtgtacaactctctcaagtgagttctgatttcgatctttgatctcagcacgagcaagcccactaaataatccatcaaacgaatgaaagcttaatgcaattttccatctgctgccgccactatttatcataaaaaaacgatcggaatactttaagaacttaattatgttggccattagaagaagagagatggtaccaatgagggaaatgaataaagaaagaaggcggcgaacttacaggggccgcataacttggctaattgccacatgcggtggctaccagcgactcggtccccagcttcttgattttttcccctctttctgggcctgctgacatatttgcctaatggcctcgcatagttcttggccataagcgagcgacagcacgatgaatcgttcgctggcagagttaaagttttcctcataaacaagagctgcaagctggaaaaaaacaaaaaacaaaaaatattaagttcaataaaaagtttagcatgctgaaaagtttgcggtccctataggaaaagcaggcgatgtagtggttggtgggccacagaagagagagaccttctggcctaatgacttttaaccgagttgcaaaatgcaaaaggaaacgggccacgtactagagtaaaaggctctcgcttaattggtgcattatttagataaagttgtaagttcctaagttagtgctcagcttttttaagcagtcatttatttaacttattgaggcaacttttattccaaagagacacaaatgatttttgttacattagcagacttttacataaatcgttctatcgaaaacatagaaataacatcaattgttttatagtatttctttgtacctgattgggatctaaacataaatcatacttcagagtaattagttatattcaaacttaaccatatacacataaaactaagcattaaaactgcagacccctttcccatccaacaattgtgaaacattctcccagcgccccactgagtgtgatccggtcaaatcttttgttgttttacattcggcggaaaaacgtttacataacctttaacttgattgtctaacgatttgcattgtcttctgcggtttcgcttcaggtcaagctggtggacgtggagaaggtggagtggctgaatcggcgctcctacagcgccattggtctgctactgggtcgcgagggtcgtgttctactccgctgcgatgatggcctcgaggattggttcgagctgctggaggtgagtggccatgaattggataaatagcataactaacttggttcagaattagacataatggatccacatagaattaaacccaatcagtataactaaacattcgctatcctctttaggaatgcacaatgacctccaaggagcgcagacgagccctgaagattgcccaaggacccagatcccgagcctcattggctgctcccgtttcgcatgcttcgctgcagttccagcattttggactcggaggcacttactcgagtgccctggacgattggctgatgacgaatggaaccggtggtctggcccggcacaagattggagctggcagtctgaacggttatggcggggccaatcccttcctgttctccgattcggtgccggatctgagtgccctgaacaacgaaaaccacaatcatcacctgagcggcatcagcacgaaccactcgacgccgcaaaagataccgcaccacagcaatgcgaatctcagtcgatactccaatggatatgtctcggcccagaacagtttcacccaagccggagcactctacggatcgcctaggcggatctttatcaacagcagcttcggttccaatcaggtggtggatgaggagaccgaggagacggaggttcagctgaggagacccagactgttccggggagttagcgctactccggataatggcaacgaactggaccgcgattggctgtaccggaagccaagggcgcccactgatatgaggcactcaggtgggtttcaacctttgctttgaatgaatatgatattaatatttgcttatttattatatttagttcaaccaatgttacccactggcggcggcagcaacatcgggctggccaaaaccgaactggactgttcggcccatgatagtggcctggacacgcccccatcgacgcaccgcccctcgagctaccgggaggcgagcagggacagcacagagaccaatggcagttcgtcgaggggaacactgctgaataactcatcgccaggcggcagttttcgagccaaaaagctgagcacccaagtaagcaatctcaatcagttgaattccctgaacggatcgagatactcggtgcaggatcaacgcatcttgaagatgcgcaacaacgaggaggatcgctgtgcctccatcaagatggccaatcgtctcaatcagaatcaggagcaggccacttacgatcccaaccagaatcgctactataagaacggtaatgccacgccccccacatcactgacgccacagcatacgccgcagcacaaactgacgatgatgcactatggcaatgggaatgggaacatgggcaccctgaatggcaacaccaacggatcggatcgcataaacggatcggccattttccgggagcgctaccaacatcccgccctggccgccatcatcaacgaagcccagggccttaagtttcgaggtaggtttgaggatttatacggttttgcttgcattactcatcgttcatctggcatggttatgggctggctttaggatcatatttggattggtttcggaaaacgtaatatgctggaatgctccattaattagttaagatagttttgtaccatttttagttttaatgcatttcattattacttatatttttattttttacttttattcgtttatatgtttttagctttaagtagtttcattcttaataatgtttcaaagtgtttattatttaaacccatcttaaaggggatgattaggatttttttgaattgtataaagttttctctttcaaataaatcatcctcactccattttatcatttgttatcaaaaacaacacccttaaacctacttataatgtaaactttttacttttgcatgttatcaatataaagaagaatcagaaaatatgtggtaaacatacccaaagccccaaattgtgcatgttacacaaagtgtccagccgactggccccatagtgcatgagaagatcgtgatgttgaatggaccaaaagatatagataaagcgatcctttccccaacttgtagagcgggcctattcggacagtcagcagcgtcgcctcaacaacaacaatggaccgactccccaaccagcctcgccactcgcccagcgccggaataatggtggactcggatccggagtcggatcgggggctatatatggcacgcccacgcgtgtatagcgcctaaaggtctaaagataatccaaatcgatggagaattgattgctcccccactagtttaataatgatataaattagtcggtaaattagtcgacttgatacaaagttttggaaattatttgcatagaaaatacttcaacgaaggtagagaatagtaactaaatcttaactatgtagtagtactcgtagtgtgtgtgctccaatgtccagctttatgtaaatgtttaaataaaatatacattagtaaaaagcatcttaataaaagataaaataaaactggctactattattgggaagaatgggtttaaatatatggagaatatttctaattggcctatgtttgccataaactgttgaatggtaagttaggtgttcattgtaattacgaaatgattgaagcgagaataatttttatacaagaaccgctcaatatttgagtaccagaaaaaacaactgttgattaaaaatgaattcatttcggaaagatgcaaaacgatgctgagctttgacctaatttaggcgtggtctgaagatgcagagatcaagcttcttgggatttggcgaaaagctttcaggatttgctgcaggactcctttcgattaagctcgctttcggaaaacttttcggaaatgtcttataaaagatgcaacactaaaaagctcgccagcgcaaaagcttcagccgaaagagaggacaagctgcaaccccttaaaggataattctgggagacccccttgtgcgggcaatggaatgggcttttcggagtcaacaataaaattttcagtcagctttgagacgcagcagccacagcagcagcaaaagcagcagcagcagccgctgcaggatttagcggtcggttcaaccaggagcagcaggagtagagaattttcgcgtcagaatgcgaagtcgcacggaactggtgaccaccactttcgaggagagcgacgaggatgatttcagtccggacgattccgactccgaggaggactggcgacccaccaagaaacgtccgtccaagccatctggctccgatggcggcaggaagcggaaatcggcggcagccaatgcctcgaaggccaagcgccggatggccaaggtgagcgacgaggagtccgacgaagaggatgacctagaaaccgatcccagcgacgacgactttgactacccgtcggccagcacttcaaagcgaccccagagtctgccgcccaagaagcaatttgttaagttaagccaactggatttgctggtaaaaaagtctgatctta

SEQ ID NO: 20360 - DNA, 1840 bp, DROSOPHILA
atgcaaaaggaaacgggccacgtcaagctggtggacgtggagaaggtggagtggctgaatcggcgctcctacagcgccattggtctgctactgggtcgcgagggtcgtgttctactccgctgcgatgatggcctcgaggattggttcgagctgctggaggaatgcacaatgacctccaaggagcgcagacgagccctgaagattgcccaaggacccagatcccgagcctcattggctgctcccgtttcgcatgcttcgctgcagttccagcattttggactcggaggcacttactcgagtgccctggacgattggctgatgacgaatggaaccggtggtctggcccggcacaagattggagctggcagtctgaacggttatggcggggccaatcccttcctgttctccgattcggtgccggatctgagtgccctgaacaacgaaaaccacaatcatcacctgagcggcatcagcacgaaccactcgacgccgcaaaagataccgcaccacagcaatgcgaatctcagtcgatactccaatggatatgtctcggcccagaacagtttcacccaagccggagcactctacggatcgcctaggcggatctttatcaacagcagcttcggttccaatcaggtggtggatgaggagaccgaggagacggaggttcagctgaggagacccagactgttccggggagttagcgctactccggataatggcaacgaactggaccgcgattggctgtaccggaagccaagggcgcccactgatatgaggcactcagttcaaccaatgttacccactggcggcggcagcaacatcgggctggccaaaaccgaactggactgttcggcccatgatagtggcctggacacgcccccatcgacgcaccgcccctcgagctaccgggaggcgagcagggacagcacagagaccaatggcagttcgtcgaggggaacactgctgaataactcatcgccaggcggcagttttcgagccaaaaagctgagcacccaagtaagcaatctcaatcagttgaattccctgaacggatcgagatactcggtgcaggatcaacgcatcttgaagatgcgcaacaacgaggaggatcgctgtgcctccatcaagatggccaatcgtctcaatcagaatcaggagcaggccacttacgatcccaaccagaatcgctactataagaacggtaatgccacgccccccacatcactgacgccacagcatacgccgcagcacaaactgacgatgatgcactatggcaatgggaatgggaacatgggcaccctgaatggcaacaccaacggatcggatcgcataaacggatcggccattttccgggagcgctaccaacatcccgccctggccgccatcatcaacgaagcccagggccttaagtttcgagagcgggcctattcggacagtcagcagcgtcgcctcaacaacaacaatggaccgactccccaaccagcctcgccactcgcccagcgccggaataatggtggactcggatccggagtcggatcgggggctatatatggcacgcccacgcgtgtatagcgcctaaaggtctaaagataatccaaatcgatggagaattgattgctcccccactagtttaataatgatataaattagtcggtaaattagtcgacttgatacaaagttttggaaattatttgcatagaaaatacttcaacgaaggtagagaatagtaactaaatcttaactatgtagtagtactcgtagtgtgtgtgctccaatgtccagctttatgtaaatgtttaaataaaatatacattagtaaaaagcatcttaataaaag

SEQ ID NO: 20361 - protein, 524 aa, DROSOPHILA
MQKETGHVKLVDVEKVEWLNRRSYSAIGLLLGREGRVLLRCDDGLEDWFELLEECTMTSKERRRALKIAQGPRSRASLAAPVSHASLQFQHFGLGGTYSSALDDWLMTNGTGGLARHKIGAGSLNGYGGANPFLFSDSVPDLSALNNENHNHHLSGISTNHSTPQKIPHHSNANLSRYSNGYVSAQNSFTQAGALYGSPRRIFINSSFGSNQVVDEETEETEVQLRRPRLFRGVSATPDNGNELDRDWLYRKPRAPTDMRHSVQPMLPTGGGSNIGLAKTELDCSAHDSGLDTPPSTHRPSSYREASRDSTETNGSSSRGTLLNNSSPGGSFRAKKLSTQVSNLNQLNSLNGSRYSVQDQRILKMRNNEEDRCASIKMANRLNQNQEQATYDPNQNRYYKNGNATPPTSLTPQHTPQHKLTMMHYGNGNGNMGTLNGNTNGSDRINGSAIFRERYQHPALAAIINEAQGLKFRERAYSDSQQRRLNNNNGPTPQPASPLAQRRNNGGLGSGVGSGAIYGTPTRV

SEQ ID NO: 20362 - DNA, 3002 bp, DROSOPHILA
cgaggagagcgacgaggatgatttcagtccggacgattccgactccgaggaggactggcgacccaccaagaaacgtccgtccaagccatctggctccgatggcggcaggaagcggaaatcggcggcagccaatgcctcgaaggccaagcgccggatggccaaggtgagcgacgaggagtccgacgaagaggatgacctagaaaccgatcccagcgacgacgactttgactacccgtcggccagcacttcaaagcgaccccagagtctgccgcccaagaagcaatttgttaagttaagccaactggatttgctggtaaaaaagtctgatcttatggaaaacgactggctaaagaacaatcgcttgtgtctgtggcgcaaagatgaacaaacgaatctgcttcagaagtatctgcgggtcaagtcggctgccgaggaggaggagctgctctttacctccagttctgtagtgagtggattatttgtatgacaatggtggtcacatacatgatataccaatgtatacttaatcaattcaagttatttgcatcaatgtgataatttcaatatacctcctgtgacctcctgtgtttataaataattatcaataagcattctattaatatacttaattttgcagtattccagttgggatgatcagcagacgagcgacttcatagaggtcaaagtcaactgcttggatcccaacaacagacgtattaaactgcacgatctggaggcgattaagaaaatctccgtggaactacaatcagagcgaaataagaaaacgacatcggacaaagaagatactttggaggcggaggaggataagcaaaattaagctgattcttaaaaaaaaaacaactactaattatacacaaaactaacattttcattagtatttacaactagttggccaagttagggttaaacaacaaatttccttgtaacagctatgtgaaaacagcattaaatttaatttagaaaattaaagaaactaagaaaaaaaaaggaaatcaaaaggaaaacatttgaaaatatcaaattaaaatcttggcgtttcaattttaatacatttatattcaacagttcggtagatctcttcaaagtttacttcgctttaggcaaacatgcaaacattcaagcgaaatgcactttgtacagatttgttgtttgttgtttttaatagaaagagtctaaaaatattcgcttggggacggttatcgacgccgttcgcctttgacggttttgcgtttctccttcttttcctcgcgcagttgcttttgcttttcccgatcctctttgtccttttgctttttggccgcactatccattcgggcctgctcccgcttttccttggctagcgcctggacatccgatttgttggtattcttggtgagcgttccactgtcatcctcgctttccgcctcggaattctcgtcgtcctcgttggcaacggcagtctgcaaaaagattggcattgtcattagatactagatacttctactttaaagctagtaatagatatctggaatcagcagcttggccagcatggatagcaacctgggagtattgagctagaatctgctgcttgatgcgacgctcctcttcggtgtattcacgctccttgtttacggcgggttgcagcttctgttgctccagcaacttggccaactgggcattcacatcgatatccagaccttttttcggcggatcatcggcgctgggatggctctgtagccacttttgtagtatggtggccaccagttcgtcaatgttggcggactgcaaagatcacggaccataatttatgtaggcaatgatattactaaccataacttacacctgtttcgctgagaattccctcgagagcctcggttttttcatctgtcgtttcgtcgccctccaaaattccaataatatacgaaccgaaaacgttctcgtcggtgttcaatttgcgcagctgctcgttgagccagctctggaagtcatccgtggcgctcatggttactcggtatttgatttaaatatcatgtatagaggattttatttgcggaataaactctggcagtgacaaatcagccgcaaaaggcaacaaaaaaatttgtggagcatgtggcgcagtgttggtgagcgttgacagcggaacagctgctgcagtagcactgccaactgactggaaaaagaaagtttaacagaaaatacaatcattttactgaaatagaatttttagaaatagaatattatatatattaggtaaattcacaagtttattaattggtctttctattttaataattattatttacattaatattttccaaacttgttgctggcaacactgacacctgaacactactgttagccaactgttaactaccagcgaacagctgttgccgcagtgttggtaaatacccgcacaccttttagttgtttgccgattaaaaaattacgctttttgtttgaaaacgaaatattaactgctgtgctattgaaactctgtcagaattaaaagatattctatctggcctgccatctcttattgtcatacaacaagaagtcttgtgacacagctaaaggcgtgaaatggatcaattaaacttataaacaaattgtttgtttcttttgactgaaatacttgtacggttttgtgcgtaaatgtgcgctcgtgtgtgtgtgtgtgttacctatgcgttcgtgtgtgtttggtgattttctgataactcacatcgcagcaaacagcgaaagcaaaagcaacaataacaaattgcagcaacaacgtcacacgtctgcgacacctgcgtcgctgtcgccaaagttgtgttgttatttttactgttgctgctgtcgccgctgtcgtcgccatcggcttttgtttatttgttgttgcgtcgcgtcgtaaagaaggaaaagcgcccacacacacacacaacacacacacaatcgcgcgtgtgccgttggcaacaagtggaatatatacaaacgaaattcatacaaccccatgt

SEQ ID NO: 20363 - DNA, 944 bp, DROSOPHILA
atgagcgccacggatgacttccagagctggctcaacgagcagctgcgcaaattgaacaccgacgagaacgttttcggttcgtatattattggaattttggagggcgacgaaacgacagatgaaaaaaccgaggctctcgagggaattctcagcgaaacaggttccgccaacattgacgaactggtggccaccatactacaaaagtggctacagagccatcccagcgccgatgatccgccgaaaaaaggtctggatatcgatgtgaatgcccagttggccaagttgctggagcaacagaagctgcaacccgccgtaaacaaggagcgtgaatacaccgaagaggagcgtcgcatcaagcagcagattctagctcaatactcccaggttgctatccatgctggccaagctgctgattccagatatctattactagctttaaagtagaagtatctagtatctaatgacaatgccaatctttttgcagactgccgttgccaacgaggacgacgagaattccgaggcggaaagcgaggatgacagtggaacgctcaccaagaataccaacaaatcggatgtccaggcgctagccaaggaaaagcgggagcaggcccgaatggatagtgcggccaaaaagcaaaaggacaaagaggatcgggaaaagcaaaagcaactgcgcgaggaaaagaaggagaaacgcaaaaccgtcaaaggcgaacggcgtcgataaccgtccccaagcgaatatttttagactctttctattaaaaacaacaaacaacaaatctgtacaaagtgcatttcgcttgaatgtttgcatgtttgcctaaagcgaagtaaactttgaagagatctaccgaactgttgaatataaatgtattaaaattgaaacgccaagattttaatttgatattttcaaatgttttccttttgatttcctttttttt

SEQ ID NO: 20364 - protein, 147 aa, DROSOPHILA
MSATDDFQSWLNEQLRKLNTDENVFGSYIIGILEGDETTDEKTEALEGILSETGSANIDELVATILQKWLQSHPSADDPPKKGLDIDVNAQLAKLLEQQKLQPAVNKEREYTEEERRIKQQILAQYSQVAIHAGQAADSRYLLLALK

SEQ ID NO: 20365 - DNA, 2620 bp, DROSOPHILA
tatgttcacataattcttattttgctgattggcccgaaaaaagttgcaaggaatgtagcaatcggagcgttctagtcctccgcataaggtctgtagctgataatctggcgtgccacgatgttaagtatttcgcgtgcggccatatcctgtcgctcgtccacaatggccgtaatcctggcgcactccttgatgtagttctccagctcccgctggttgagagcccttctctgtggctccttggactgcagcgcctgcagcacctggccggtcatgtgcgccagctgggatcgagctccgctgaaagtctcgtcgagatcgtacagctccagcggcggagccgaaggctcgctgaagatgggcggaaacgttgccaactggacgttgggcagcggaatctcgaactgcggcttgatgatcttcagcggctcgtacttgacatgcagttgctcgtaggtatccatgacgtccttaagcaggcggttgctcagcctgcagagcctcatgtcaaacatctgcttgaagtccgtgggcatgtcggttccaatcgaatcgatcaggcaggcctttggcatatcggccaggaacccaatatcggtgaagtgcttgttgtcgctcagctgtggattataatgcaattagtttgctgcaaactttctgttggtaattaacccacctccacatcattgaagtccaagtgactgtaggtaatctcatcgcctccaagcagctttatcaagtactcaaacatggcatcgttagtcttgtcctgcagatacttgtcatgccaaatgtatccagatcccaccgccaggattttcccacctttcccgtttgtaaagtagccgaccaagggacgattgaagggatacaccactggacccgtggtgagcaggacattggcaggttccgatacattcagcgtggccccatagggatattgaaagtgtatcttgtacttctcgtcactgaaatcgtagtacaccttctctatgtctagcttgaggaggtgtcgccacatggactcgcaaacaacgccaccaccaacgatacactccttgggatggaagttcttgtagtagtgcggtcgcaccacagtgtcgccgttgatgtagatcccgtactgctccaggaagaagttcacgttggtattgaactccggctccccgccttcccccaggagcaccaccagactgcctccttgcacctccacgtagtgcttcagcacatcgaattcatcctctgtgaatcggtcctgtggcccggcgagaacaaatatcttaacccgagcaagtcgctccattctgagttccgcatcatttctgtaaatccattttaaaacataatttaataatagttcattctggatttttgattcattcctaagtctaaaatgtattacatttaaaaaagttttgttttaaggaaaacatcctttatgaaagtgggatatgcaaatattaaagatcaatcatttatttgaaaacctgtatgagctgattattttgatagttgaaaaatatttgttttgtttttatagtaatgtttgcttattggccaaaataatttctgggatactgactgttccacattccaattgaccttcaatttgcgatgcatcattttgtagttgtccgatatttgaaatcgttcattttttgatgtatcaaagcagattaccggcttgcttgacatttttcatgcagattcaataaactttttaataaaattttttgtttttacatttggttgcccggcaacgcagtggcgccctcttgtggtttcgataccagtgttccgccggtgttttccaacacttaagttcggttgattgttgcacactgtagggtgaccgttgtacattaattttttaaatgtggtatatcggttgctaacaaaaatatatgtttattattattttaagaactttattgtttaagctagagtttatttcccaattattacgacgaataacaataggacactttgtttgtttttatttggtctactcaagcatttgaaagtatcaatatcatattttctgcagcgtgtggtattttttcttactttaccgcggtcacactgatccatagctgtgtgaaaaattacgaaagaatttttggtgttcaccacttaagaccgaccgaaattttcgcaaaacgaacaatggcatcgatctgtggacgcatggcgctccgtgccgccgcacgccagaatgttgcctacacgcccgtgcgcttctgcaaaagtaagtggtgcaaatgcggagggaagtcccacggccagctgcttttcggtcacgttcgccgatttggcggagtttctgccctggaattgcataatattggagtgcaggtggaagaccagcatggcactgtgctccactaacctggagagcatcagatttggacccacagaaaagtgtctattgaaagtgcgaggttatgtaataactatgcgctgggaaatgtgcgacttatggtcggagagggggagcggtgacaccacagtgcggagttaacacctcgacagaagctggccgggattacccctccgaagagctgtacttgtgacggagcgtctgggtttggggcgtctgctgtttatgtaaccagtgacccat

SEQ ID NO: 20366 - DNA, 1233 bp, DROSOPHILA
atgatgcatcgcaaattgaaggtcaattggaatgtggaacaaaatgatgcggaactcagaatggagcgacttgctcgggttaagatatttgttctcgccgggccacaggaccgattcacagaggatgaattcgatgtgctgaagcactacgtggaggtgcaaggaggcagtctggtggtgctcctgggggaaggcggggagccggagttcaataccaacgtgaacttcttcctggagcagtacgggatctacatcaacggcgacactgtggtgcgaccgcactactacaagaacttccatcccaaggagtgtatcgttggtggtggcgttgtttgcgagtccatgtggcgacacctcctcaagctagacatagagaaggtgtactacgatttcagtgacgagaagtacaagatacactttcaatatccctatggggccacgctgaatgtatcggaacctgccaatgtcctgctcaccacgggtccagtggtgtatcccttcaatcgtcccttggtcggctactttacaaacgggaaaggtgggaaaatcctggcggtgggatctggatacatttggcatgacaagtatctgcaggacaagactaacgatgccatgtttgagtacttgataaagctgcttggaggcgatgagattacctacagtcacttggacttcaatgatgtggagctgagcgacaacaagcacttcaccgatattgggttcctggccgatatgccaaaggcctgcctgatcgattcgattggaaccgacatgcccacggacttcaagcagatgtttgacatgaggctctgcaggctgagcaaccgcctgcttaaggacgtcatggatacctacgagcaactgcatgtcaagtacgagccgctgaagatcatcaagccgcagttcgagattccgctgcccaacgtccagttggcaacgtttccgcccatcttcagcgagccttcggctccgccgctggagctgtacgatctcgacgagactttcagcggagctcgatcccagctggcgcacatgaccggccaggtgctgcaggcgctgcagtccaaggagccacagagaagggctctcaaccagcgggagctggagaactacatcaaggagtgcgccaggattacggccattgtggacgagcgacaggatatggccgcacgcgaaatacttaacatcgtggcacgccagattatcagctacagaccttatgcggaggactag

SEQ ID NO: 20367 - protein, 410 aa, DROSOPHILA
MMHRKLKVNWNVEQNDAELRMERLARVKIFVLAGPQDRFTEDEFDVLKHYVEVQGGSLVVLLGEGGEPEFNTNVNFFLEQYGIYINGDTVVRPHYYKNFHPKECIVGGGVVCESMWRHLLKLDIEKVYYDFSDEKYKIHFQYPYGATLNVSEPANVLLTTGPVVYPFNRPLVGYFTNGKGGKILAVGSGYIWHDKYLQDKTNDAMFEYLIKLLGGDEITYSHLDFNDVELSDNKHFTDIGFLADMPKACLIDSIGTDMPTDFKQMFDMRLCRLSNRLLKDVMDTYEQLHVKYEPLKIIKPQFEIPLPNVQLATFPPIFSEPSAPPLELYDLDETFSGARSQLAHMTGQVLQALQSKEPQRRALNQRELENYIKECARITAIVDERQDMAAREILNIVARQIISYRPYAED

SEQ ID NO: 20368 - DNA, 3437 bp, DROSOPHILA
tgtgaacagagaggagtgaaagggcggcacagcttccattttcagatctgcaaacgtgttttcgaacgcagccgaggaaaattgcttaattaacacaaaaagcgaacaataaagtctaaagaagagattttgagtgaaaatcaaaggatttattttaaaaaagcttgtctaaagacagaagaaagttgaatttcgtttaaaaatgtttaaaatcgcagaactaatttaattttaataaggcagtaggcgtcttaataagaaatcaaacattttcaaaaccctttgatcagattcaactcactcaaagtgggaaattctcgtgtgataaccataattttctagataaactcctttaaaaatgtcgtcctacatttcgcgtctacttaaggctcagtccgcctccaaacgtctgatctccaatttaacccagcgcgacggaaagctaagctctttgcttcgacgactaggtttacagtggcaaggatcagccgctgctcctcaacagcgtcccatatccacaactcaggtgcaaaagtcaggtaagtagtggttgcagcttgcaaagatctccagttcaggtctcatgcccgattagcgctaattgcggacgatcaactggtcaccgggattcagaagcgcgaaatgctgctggccaagcagggctgcgaggacccttggggtttcagcaaggtgatcaggcgcggatcgggaagggagaacgaccccaccgtcgtgccatcggcgttcgatgcacgcctcgtaggctgtctgtgcctggatgaccgcttgcccaagtggatgtggattgagaaggacgagggaccgaagcggtgcgagtgcggccactacttcatcctcaagaatgtcccacccgtttagatcgatcacacagagcgctgtacttaacacgaacacacttggcatgatcctcagctggcattaaacattgcatgatattatcaaaacaaaggcttacatgtatttgttagacgcacaacaactatctaagcgtatagcccgtcaaaaggtagccactatttccgctcatattcacttccggatgtgtgcgattgggcaggatctggtaggtgcgcagccagttcgaggtcaagtgcagacccgtcaccttgcctgttgttttcagctccatgaatgtctcttgtaacagctccttgcaggtgctgaataccaccacgggtcttgagggtttcacaagaggcagcagggcttgcagaatgttggatgggtgctccttggcggccaccaccagactgtcgaattcggcgtgcatcagggccgtggcccgcttgttttccaaatgccagcgcggaggtccctttgctcctataacaacagaaatagtatttgtacttgtcttgattagtttactattgtgaccaataccttctctaccactatttgactcatccagcttgggtttctttgtggtcggttctatcgcctcaggttgttcctccgttggcgtctccagctgggtttcctgaggttcgttttcactgggctccacaacgggaatatctgtggccttcgcgtcccctccttggtaaaactcccttaaaacggaatagagattaacggaaacacatcgctgttgctgctccaggggtagtttcagagctgagagcgcctgcttctggggcacattgcccgggtgcatgtgcaccagggtgccctccgtgcctgcgcctatagagttgagcatggcagccggcagtagaccattggtaccactctcgtacagcagatagctgccgaatccacaaacgcccgagtaagaaataatttgcgataaagtgtcaacgcgaatgcccatgaccttttccgagtcttggcggtagaagatgtccagcatcagacggatcgttggctggcggatttgaacgaactcgaaatactttttctccttctttagcaggtacttctcttgggagtactccgttcggttgtggaaagtcttagaattctccaccagcttctcgatgattttgctggagtcgttgcactcctcacgcagctgcgcaatgtcctctggtttcagggtctgcgcttctccatcatcccggatgtcccgattatccgctccactgctggagatgcccagaacctctcgcgtgcttctcagctcagtctcgctgcacagctccaaggtgtgttgtctctgggcgccccttttacccggctttgtctctttgacgcacatcttgaacgtggagccatagggttggtccaaaagagacttcagctccagtgtttctttgcccaatgtggccgtggtgtccagactgccgaatttttgtagcttcgtatatttctgccgctggatgacgatgtagtcgcccaattggattctggggatgtcctcttcggtggccatggttgcaactctatgttataattcttataaacaacgtgtttgtcgaaaacaaacgaaagccgcaaattctatagagaagaggaagagaaattcagtgctggaaaacggacaaaatctggtaatctagtcacctgttgcatgtgattagtaacgaaattttaaataaagagctataattaacaacaaattattttcttaatttggcaatacaaattcatttatgcaaacaagaatatttggattgatatttgactgatctggcagctccattacctgttgcttggccaaatgtttcacaattctaattaagaaataaccatgagtacttataccaaaaatttcatttactttaactaattaatttttgatcatgcaattagaacattcaagcacaatatcaatactcctagttaaaatatacacaaaaataatatacaacaaatatgtacatacattacccatttttgagataagtggctgtttgctgttgtgctttaataagtagagttggttgctatgaatgcttaagttgaacatgggtgtagctaacagggatggtgaaagtgtgagtaaataccttgaattactatgactaagtaataatcattgccaaaaatacattatttactgcccatacttacggtccctcttggcgattacggaagggaaggactgcgcccatgcgtaacggcacccctcaaatcgcttgtatcgacgcccataaatcataattttcaacggtgtggcaacgccgttcgatcgagtacagctgatacaacgcggcgataatcttgtagtgcggtgcggttttaacctttgattggatctgtgttgtaatcagcgctcttcgggcactgcagttgcgtctccacgtgaccactagttccaggcgaaccccccgccacgaggatataccctaatcccgaaatcagagtgctgtcgcaggcgcagggaaaatcaaaccttcccgccctcctaccggttttgtggccaccgcgaaaataactgaccgcgcaagttttcgggtttcaagcaaacgcct

SEQ ID NO: 20369 - DNA, 1437 bp, DROSOPHILA
caaacacgttgtttataagaattataacatagagttgcaaccatggccaccgaagaggacatccccagaatccaattgggcgactacatcgtcatccagcggcagaaatatacgaagctacaaaaattcggcagtctggacaccacggccacattgggcaaagaaacactggagctgaagtctcttttggaccaaccctatggctccacgttcaagatgtgcgtcaaagagacaaagccgggtaaaaggggcgcccagagacaacacaccttggagctgtgcagcgagactgagctgagaagcacgcgagaggttctgggcatctccagcagtggagcggataatcgggacatccgggatgatggagaagcgcagaccctgaaaccagaggacattgcgcagctgcgtgaggagtgcaacgactccagcaaaatcatcgagaagctggtggagaattctaagactttccacaaccgaacggagtactcccaagagaagtacctgctaaagaaggagaaaaagtatttcgagttcgttcaaatccgccagccaacgatccgtctgatgctggacatcttctaccgccaagactcggaaaaggtcatgggcattcgcgttgacactttatcgcaaattatttcttactcgggcgtttgtggattcggcagctatctgctgtacgagagtggtaccaatggtctactgccggctgccatgctcaactctataggcgcaggcacggagggcaccctggtgcacatgcacccgggcaatgtgccccagaagcaggcgctctcagctctgaaactacccctggagcagcaacagcgatgtgtttccgttaatctctattccgttttaagggagttttaccaaggaggggacgcgaaggccacagatattcccgttgtggagcccagtgaaaacgaacctcaggaaacccagctggagacgccaacggaggaacaacctgaggcgatagaaccgaccacaaagaaacccaagctggatgagtcaaatagtggtagagaaggtattggtcacaatagtaaactaatcaagacaagtacaaatactatttctgttgttataggagcaaagggacctccgcgctggcatttggaaaacaagcgggccacggccctgatgcacgccgaattcgacagtctggtggtggccgccaaggagcacccatccaacattctgcaagccctgctgcctcttgtgaaaccctcaagacccgtggtggtattcagcacctgcaaggagctgttacaagagacattcatggagctgaaaacaacaggcaaggtgacgggtctgcacttgacctcgaactggctgcgcacctaccagatcctgcccaatcgcacacatccggaagtgaatatgagcggaaatagtggctaccttttgacgggctatacgcttagatag

SEQ ID NO: 20370 - protein, 464 aa, DROSOPHILA
MATEEDIPRIQLGDYIVIQRQKYTKLQKFGSLDTTATLGKETLELKSLLDQPYGSTFKMCVKETKPGKRGAQRQHTLELCSETELRSTREVLGISSSGADNRDIRDDGEAQTLKPEDIAQLREECNDSSKIIEKLVENSKTFHNRTEYSQEKYLLKKEKKYFEFVQIRQPTIRLMLDIFYRQDSEKVMGIRVDTLSQIISYSGVCGFGSYLLYESGTNGLLPAAMLNSIGAGTEGTLVHMHPGNVPQKQALSALKLPLEQQQRCVSVNLYSVLREFYQGGDAKATDIPVVEPSENEPQETQLETPTEEQPEAIEPTTKKPKLDESNSGREGIGHNSKLIKTSTNTISVVIGAKGPPRWHLENKRATALMHAEFDSLVVAAKEHPSNILQALLPLVKPSRPVVVFSTCKELLQETFMELKTTGKVTGLHLTSNWLRTYQILPNRTHPEVNMSGNSGYLLTGYTLR

SEQ ID NO: 20371 - DNA, 3566 bp, DROSOPHILA
tgttcctccagaaaggtgtgtagagtaatgtaaattacttactctcgacaggttcatcattttgctggggtttatttttaagatttagcaaaaagtgagcagttttcctgggcgaaaaatatcggtctgaaatatgacagctgacaactggagatatatcgatgtattatcgatacatcgatgtcgatatttccagcagtttggcattcacctggaaattcctatttagtttaataaacaatttaagcagctgccaataaaaacatttgtttataattccatagcgttactaaaatacagacgttgtcatgggcttcctcacagtattaaaaaagatgcgacagaaggaaagggaaatgcgcatattactgctgtgagttccatggaattataaaaaaataaatagtgattcatgtatcgactttcttatagaggtctggataatgccggcaagacgacaatcctgaagcgctttaatggcgaacccatagacaccatctcacccacactgggattcaatattaaaaccttggagcacaacggctacaccctgaatatgtgggatgtcggtggccagaagtctctgcgatcctactggagaaactacttcgagtccactgatggtctggtctgggtggtggatagcgctgacaggatgcgcctagagtcctgcggccaggagctgcaagttctgctccaggaagagcgattagctggagccacactcctagttctctgcaacaaacaggatctaccgggagccctctcatccaacgaaattaaagaggttcactctcattgattttttattgaaacaacacatttaatatactttatatttaaagatactacacctagaggatatcaccacacatcattggctggtggccggagttagtgcagtgactggcgagaaactgcttagctccatggactggttgatcgccgatatagctaagcgtatattcactttggattaaatacaatttattttacttccttatttctcgaccaagtacattttgtatagcttttcctgcttttcgtccgcaaaattgggcttaaagttcaccttgtgtatggatataaatccttcgtctagggcgggttcctggtactttttcttcatcatgttaaataccatgtccttgatcttggtgcgcgcggagtctgatagctctcggaaagctatattgtgcttcacttgggcgacgggcacattcatcacaaggcagcggcatggaatcatcttttcgctggccaactgcaagaatttttttcgagaagctgcatccacattggtgttatccaccacacatgattggcccgagtccaggaaccgtttacaggcagtcaggcagttttgagtgctacccaatgtatctgcattgacgattttgtagccccgcggttgaaaaaagctggaacaaaagtggctctttccggatcctggcagacccaccatgatgaccatttcgcaggggtggtcatcgagggtcaagtcatccggatcaagcagagatacttggtcctgaacgctagtgggttcaaagtccggcttattccactgctccacttgtttgcccaggaaatgaacctctggagtgtagaatgaaattcccacgttggctgcaaaaagtctgtctactaaagagtgatctttgcgccgcttggtggctcccttgcccgtctccggtcttccggctgcatcgccgacgaagaaacatcgatcttcctgaatctcaacgccatcattcatttcactctttaagtgctgccacattcccgtcaaaggtttgcgataaaatccatcacctatggctataaatacttgaattggaactcccagtttagccacaatatgcttgatcttgaccttaaagtcatctaggttgatttttccacgagcaatgcctccttggttggtgaagagacagattttaaacccatccttgtggagattctttagtttctccggcacttcgggaaatatgatctgccagtcgtcggtgtttttggggaacaccagtcccgattttgtttttataatggtgccgtccatgtcgtagccagctatcttttcagaacctttaacgccgacgctggtaaagataaccagcttaccattgccagatgagtcccacctctcggatttctctgacggtgatagtgttgtggacaacggctcagctttctccttgtcatactccggtggagggttaaagacgacctcgaactgatgcctgccgtaaacgatctccaccaagtctccgtgcttcagctcgcgttccccgttctgcataagcatcagaccattgacgccgcagggattaactcccaggactttaagtgaaactacagccttttttaggtccacttgcagttgaatctgtcgcttcgagcacttggaatctcggatgccggtctcccggctgcgtcccacgaaattctccccagcggtcaggtgtatagaatggtgttccggctcagtgggtttaagggtgcatatcctggcggccacatccttgccagcttttccaacggatcggtttaggtatttagccatagacattttggttaatcaataaataagagcattgcttaatattgacaccaaaattcactagagagcgaatagtgtgacctaatttggcattaaaagaagaagagtggcacacagacatatgtactttgaaatgaaagtggttgtttttacctatttaaattgaaaaataaattactccatataaaaatcggagcctaggctctgtgtgaaacccttccagaaatcttaaatccatcaaagatggcttatagtaatagtgtcacttaaacattattcgatagttaaaggcagacaaaattttgttccgaatactccagaaagtttcaggaaacgtaaatgcaaagaaactgtttctctttgcgcgtaagttaccaccattccatacaaaacattaatttaattcgttctttccgatcagcccttccttcggggagtcggtgatgtgggtgcagtttgtaagcccattcgtgaatttcgcaactcggctgctttgaaatatgctgctgctgcagctgcagctccgaagacacgtcctggaaaagttcctccaaaaatggtcaaattgaggaagcaatttcaggcggacaatgatttgccgatttttctaaaaggcggcagtatggataacatattatacagactcacctgggtgctctgcttcctcggcataggtggcgatgtatggttgtggcttggctatatcattgcctaaaatcaacagagatcatgcaagcaagcccacaaaacacaaatactctgtacacgaatgcaaataccaattgtaacgacacatacattagttaactagtaacgtttctgtacataggtagttcaaatacggaaaatcaattatataataataataatgtgctttacttcaaagtgttcattggagtttttaaattatgccgccaatattttgccattcacatatcatataacacatatgtggtgttatatcgactcacaaagcagctggtcacactgcttgaacaacttg

SEQ ID NO: 20372 - DNA, 1566 bp, DROSOPHILA
atggctaaatacctaaaccgatccgttggaaaagctggcaaggatgtggccgccaggatatgcacccttaaacccactgagccggaacaccattctatacacctgaccgctggggagaatttcgtgggacgcagccgggagaccggcatccgagattccaagtgctcgaagcgacagattcaactgcaagtggacctaaaaaaggctgtagtttcacttaaagtcctgggagttaatccctgcggcgtcaatggtctgatgcttatgcagaacggggaacgcgagctgaagcacggagacttggtggagatcgtttacggcaggcatcagttcgaggtcgtctttaaccctccaccggagtatgacaaggagaaagctgagccgttgtccacaacactatcaccgtcagagaaatccgagaggtgggactcatctggcaatggtaagctggttatctttaccagcgtcggcgttaaaggttctgaaaagatagctggctacgacatggacggcaccattataaaaacaaaatcgggactggtgttccccaaaaacaccgacgactggcagatcatatttcccgaagtgccggagaaactaaagaatctccacaaggatgggtttaaaatctgtctcttcaccaaccaaggaggcattgctcgtggaaaaatcaacctagatgactttaaggtcaagatcaagcatattgtggctaaactgggagttccaattcaagtatttatagccataggtgatggattttatcgcaaacctttgacgggaatgtggcagcacttaaagagtgaaatgaatgatggcgttgagattcaggaagatcgatgtttcttcgtcggcgatgcagccggaagaccggagacgggcaagggagccaccaagcggcgcaaagatcactctttagtagacagactttttgcagccaacgtgggaatttcattctacactccagaggttcatttcctgggcaaacaagtggagcagtggaataagccggactttgaacccactagcgttcaggaccaagtatctctgcttgatccggatgacttgaccctcgatgaccacccctgcgaaatggtcatcatggtgggtctgccaggatccggaaagagccacttttgttccagcttttttcaaccgcggggctacaaaatcgtcaatgcagatacattgggtagcactcaaaactgcctgactgcctgtaaacggttcctggactcgggccaatcatgtgtggtggataacaccaatgtggatgcagcttctcgaaaaaaattcttgcagttggccagcgaaaagatgattccatgccgctgccttgtgatgaatgtgcccgtcgcccaagtgaagcacaatatagctttccgagagctatcagactccgcgcgcaccaagatcaaggacatggtatttaacatgatgaagaaaaagtaccaggaacccgccctagacgaaggatttatatccatacacaaggtgaactttaagcccaattttgcggacgaaaagcaggaaaagctatacaaaatgtacttggtcgagaaataa

SEQ ID NO: 20373 - protein, 521 aa, DROSOPHILA
MAKYLNRSVGKAGKDVAARICTLKPTEPEHHSIHLTAGENFVGRSRETGIRDSKCSKRQIQLQVDLKKAVVSLKVLGVNPCGVNGLMLMQNGERELKHGDLVEIVYGRHQFEVVFNPPPEYDKEKAEPLSTTLSPSEKSERWDSSGNGKLVIFTSVGVKGSEKIAGYDMDGTIIKTKSGLVFPKNTDDWQIIFPEVPEKLKNLHKDGFKICLFTNQGGIARGKINLDDFKVKIKHIVAKLGVPIQVFIAIGDGFYRKPLTGMWQHLKSEMNDGVEIQEDRCFFVGDAAGRPETGKGATKRRKDHSLVDRLFAANVGISFYTPEVHFLGKQVEQWNKPDFEPTSVQDQVSLLDPDDLTLDDHPCEMVIMVGLPGSGKSHFCSSFFQPRGYKIVNADTLGSTQNCLTACKRFLDSGQSCVVDNTNVDAASRKKFLQLASEKMIPCRCLVMNVPVAQVKHNIAFRELSDSARTKIKDMVFNMMKKKYQEPALDEGFISIHKVNFKPNFADEKQEKLYKMYLVEK

SEQ ID NO: 20374 - DNA, 3040 bp, DROSOPHILA
tataataagtttgcgacatgtgcaccgctacgttcccatcccataattagccaaacgaactttaattaaaaatcgagctcttttccgtttcgggggaatctatattttcgggatcacatatggcccacgaataggctatacaatgtctgcagcagatcaccactttcagttccgttcggaaccacctacgcagaactgctggccattcccaatgtgtttacggtgggccagtccgcgtccactttatgacttttcgtttcgcgcgcacatccaaaaattcaaatgggccgtagcggaataatggcaaaccaacgcaacgcaacacaacagaagaggaaagattacgcttttctgtttattccacttcgatgggtatgcactgtacagtgcgtggtgaaactataaggataagttacttactaagttcactatacgagttttctataagggaatatactcttagacttgagaacatgcaactgtttgcggaaactatctgttaaatattatttctcgtttaataactaacatatttcttaaattccacaacagtttcgtgacgcactgcccgttgtgagtgtgtggaaaatgccagggaaaatgcataaagcggcggatgttttcataatttttaatgctttagttttatttaagtgtttatggagaataactaatgaaaaacgtcatgaattgcatattccgccgcactcgggtattaataaacgggcggcgtgcatgggcctgtgcttgtgttaaagcgcaacatgattcgctcgatttaaaatgcatttccatgccaatggcaacgcgccgagttgccgccctttgatttataaaacaggccgtttccttagccgattccccagtctcgaccgcatcccagatctctgctccatgtcgccgctgtttgtttacttaatgtcaatgcaattaaggggaaatacttttgggcaaatatctcgttgccagcgaccgtgcctaaaacaaataagcagtctcgttactttacagccagatctcttatatttccacgctttaaatgctcttgcgaatgttcagtttacacatcaaatcttagctattctaacacaaaacaataagccaggttgtaggttggggtgtttcatgttgtccaggtatccagggcaaggctctgcaagataaagggattaaggattgcgattagttacaaacttttgggatagatgttgtatctgaatggcagatctcttaggcaagtggttctcatgttacacatatctattattgtacaaataaaattcctaattaaactattattgtataagacggagactttaagatgctagtttgcaaacaaatattataacttaaggtttaaacatagtctataaatttattagacaaatacagggaatagtttacggaatgttgtccttggataatgtcatattttatgtcaagaacttagcaacctagcataaacacaaaattctaaaaaatggaacttacacaatcaaaacattgaaatataaggcgactacgctgaatcacggatcttgcgcggggtttaatggcttagcttagggttcggtactgcgacttcactccttcttgggaacactcagctcgtagaaaagcttgcccatgccaccgatgccgacgagggcgagagcgacggtgacgcggtagagcacgttgtccacgacggatcccttgaggaagacgggcttgccgtccttcttctgaaagtgctcctgcaccttgcggatctcgaagtatcccttctcgatctggtccttgggcacggcggcggaccggcggccagcggtggtagcgaagctacggacaacagcctgccgaggagtacaaaatgtgcggttagttctgaggctccagggaacttacgtaattggatgtaggtaatgggatctccagtgtttcggaactcatgctgttcctccagaaaggtgtgtagagtaatgtaaattacttactctcgacaggttcatcattttgctggggtttatttttaagatttagcaaaaagtgagcagttttcctgggcgaaaaatatcggtctgaaatatgacagctgacaactggagatatatcgatgtattatcgatacatcgatgtcgatatttccagcagtttggcattcacctggaaattcctatttagtttaataaacaatttaagcagctgccaataaaaacatttgtttataattccatagcgttactaaaatacagacgttgtcatgggcttcctcacagtattaaaaaagatgcgacagaaggaaagggaaatgcgcatattactgctgtgagttccatggaattataaaaaaataaatagtgattcatgtatcgactttcttatagaggtctggataatgccggcaagacgacaatcctgaagcgctttaatggcgaacccatagacaccatctcacccacactgggattcaatattaaaaccttggagcacaacggctacaccctgaatatgtgggatgtcggtggccagaagtctctgcgatcctactggagaaactacttcgagtccactgatggtctggtctgggtggtggatagcgctgacaggatgcgcctagagtcctgcggccaggagctgcaagttctgctccaggaagagcgattagctggagccacactcctagttctctgcaacaaacaggatctaccgggagccctctcatccaacgaaattaaagaggttcactctcattgattttttattgaaacaacacatttaatatactttatatttaaagatactacacctagaggatatcaccacacatcattggctggtggccggagttagtgcagtgactggcgagaaactgcttagctccatggactggttgatcgccgatatagctaagcgtatattcactttggattaaatacaatttattttacttccttatttctcgaccaagtacattttgtatagcttttcctgcttttcgtccgcaaaattgggcttaaagttcaccttgtgtatggatataaatccttcgtctagggcg

SEQ ID NO: 20375 - DNA, 561 bp, DROSOPHILA
aaaactgctcactttttgctaaatcttaaaaataaaccccagcaaaatgatgaacctgtcgagagctgttgtccgtagcttcgctaccaccgctggccgccggtccgccgccgtgcccaaggaccagatcgagaagggatacttcgagatccgcaaggtgcaggagcactttcagaagaaggacggcaagcccgtcttcctcaagggatccgtcgtggacaacgtgctctaccgcgtcaccgtcgctctcgccctcgtcggcatcggtggcatgggcaagcttttctacgagctgagtgttcccaagaaggagtgaagtcgcagtaccgaaccctaagctaagccattaaaccccgcgcaagatccgtgattcagcgtagtcgccttatatttcaatgttttgattgtagccttgccctggatacctggacaacatgaaacaccccaacctacaacctggcttattgttttgtgttagaatagctaagatttgatgtgtaaactgaacattcgcaagagcatttaaagcgtggaaatataagagatctggctgtaaagtaa

SEQ ID NO: 20376 - protein, 89 aa, DROSOPHILA
MMNLSRAVVRSFATTAGRRSAAVPKDQIEKGYFEIRKVQEHFQKKDGKPVFLKGSVVDNVLYRVTVALALVGIGGMGKLFYELSVPKKE

SEQ ID NO: 20377 - DNA, 3588 bp, DROSOPHILA
ctgtgcctggcagtgatcctgggactgggtctgggctacttcttcttcggctggaacaagaagaatcccgacgagagcgagtgctgtccttagatcaagaatatcgctcttaattgtttatatatcttgcaattgttataaactaagcccttatcagttcttggttcacacatcaaagaaaaagtcccgtccccacgtaattatacaaattgtttaaaaatacaattttattcgatagttacacttggtttaattgttattgatgtaatcgtagcataaattagtcaactagtttacttaatgagcatattgtacaaatagtgtagtcatgagaacaagaacctatacaacgcgtattcatctaaagcgattaaagtactactcaatacttttgactttacaatatgtttttataagcaatacactttatttttgaccaccccgaactcaaaacgcaaacaatccgatatgagacaaaaaagaaggcaaagttaaatctccaggattacatgaaattcgttatgaaatgcgaacattaccaggtctgagtcctgacagcccacaactcacatttgaaggcctaactaatcacgatactcacctatcacacaatagtacatattttagtttagttaagatcttgaaaaatctttttaacaaatattttagctgtgatacatctgggcaggtaatataactaagcaaaccttatgattatgtgaatcatctcgcacacatttttttacgacactttatctatttgtacttgcctaaccacacaccagtatttgcaagcttcttagttaaagtttaaattattttgaaatttccgggataattataagttcttttagtgcatttgtttaaaatttgagtgacaagtgagcgccatgatgagaccattccctaactagctcttagactagagtaacctagactgaacaaccgcgatcgaaagtagctagacccgcaaccaatccgctgattatagaccacccaatcataagcccgtggctccagcggccatcattccgccgtgatgatggtggtgatgcattccgccgttctggaagtacatgtagtagttgtacggcgactgctgtcccgccccaccctcgcagtcgagcagtggctgaccaccggccgttcccgccaccggcgaaggagtcatcggcagcggggataccgtactgcccatgccgcccattccacccactccgacgcccacttggcaactggcgcgcagggcaacagcctgatggtgggccaggatatcgctgaccgagtgggaggagggccagtgggcggcagcggctgcggcggccacactcctcagctggtggggatggggcactgatccctgaccgcccgctccctgcggcggggatggacttccacagggcgtcttcatgctgtaggccgccgcagcactgtacggctggtagatggagttgtacaggtgggcgtgggcatgggcgtgggcgtgcacatgatgggcacttgccgccgccgccgctgactgatgatgatgatggtggtgcggatggtgcggtccaccgccgggattacccagattgctcagattaatattattgctggcactcgtgccattgttttgtccaccattgctggacacactgccgccaccgctgctgcttccgctgcccatcaccgttcccggcgtgtgctgatgccccaggctgcccaacttgttgcgcaggattctcgatatggagctcacactgggtacattcgttttgtcgcatatgccctcgctgagcaaacggtcccggatttcccacgcaaagatgccgggatctcgctgcttcagttccctgatgtagttgaccaccttgggtgtggtcacgcgcggcttggatcccccaattgcgccgggtagtatggagcccgtttcgtggtacctggccaggatcttggacacgcagccgtgactcactcgcagctggcgcgatatgtcgcagggtcggatgcccaggcgggccagctccacgatccgcatcctggtcgcattgggcagcggacggccgttgacaaagacgccgcccagctggttcacctcgccatactgcggacactgcgactctgcaaagagaagattgcggattagttaggttggtaacataaaggaataaaggaagtgtctatacattttaacataaatatgaaaaactgttttcggaaactgttcatatgccagagtatgccacagtatcatccgaaagctattcccggttcccagtacaaaatgcgaacaaagagcgttgcctgggaatgggaaggcgaacaaaagcacatttgcgtctaattagtttcggtggcaaatgagtgagccgagtggctaggagtgggacctgcagaagcggtggagcggcggagcggaggaggattggcgagcggcagcccaagttgagtggagagccgtttgttcggctgaaaatcgctaccatttgcttcttagaactgcggatgtgggtgccccgattgtgactgggaaaacacaatttgaatgcccggaacgtgcggaaatgcactttgagcgatgacgcaaagatttccccttggcgcatagaacactacttaaggataggtgcacatgggtgtatcctattcttgagattgaagaatgattaaggttcagcagagaagctattttcacaggaccataaataaagtaattaacaaccactcctgcgaaagggacaatatgggaacaattgtcaattatttaagacatgaagacacacccctcaaaacaacctgtgcaattttgcacgcaaataaaggcggttcttttcgtgaataactaactagcattggacaattaaacaacgcgtataaatgcaactagtttagggtactgccctcagtcttcaggtgacaaagttcaagtcaatcgaaacctctaaactttcaaaaatgatttttaagtacattcaagagccagtccttggatccttatttcgatcccgggattcgctgatctacttaaacagatccatagatcaaatgggatggagactgccgccacgaactaagccgtactggtggctctattacatttggacattggtggtcatagtactcgtctttatctttataccctatggactgataatgactggaataaaggagttcaagaacttcacgaccacggatctgtttacgtatgtccaggtgccggttaacaccaatgcttcgatcatgaagggcattatagtgttgtttatgcggcggcgattttcaagggctcagaagatgatggacgccatggacattcgatgcaccaagatggaggagaaagtccaggtgcaccgagcagcagccttatgcaatcgtgttgttgtgatttaccattgcatatacttcggctatctatccatggccttaaccggagctctggtgattgggaagactccattctgtttgtacaatccactggttaaccccgacgatcatttctatctggccactgccattgaatcggtcaccatggctggcattattctggccaatctcattttggacgtatatcccatcatatatgtggtcgttctgcggatccacatg

SEQ ID NO: 20378 - DNA, 1209 bp, DROSOPHILA
atgcgccaaggggaaatctttgcgtcatcgctcaaagtgcatttccgcacgttccgggcattcaaattgtgttttcccagtcacaatcggggcacccacatccgcaagtcgcagtgtccgcagtatggcgaggtgaaccagctgggcggcgtctttgtcaacggccgtccgctgcccaatgcgaccaggatgcggatcgtggagctggcccgcctgggcatccgaccctgcgacatatcgcgccagctgcgagtgagtcacggctgcgtgtccaagatcctggccaggtaccacgaaacgggctccatactacccggcgcaattgggggatccaagccgcgcgtgaccacacccaaggtggtcaactacatcagggaactgaagcagcgagatcccggcatctttgcgtgggaaatccgggaccgtttgctcagcgagggcatatgcgacaaaacgaatgtacccagtgtgagctccatatcgagaatcctgcgcaacaagttgggcagcctggggcatcagcacacgccgggaacggtgatgggcagcggaagcagcagcggtggcggcagtgtgtccagcaatggtggacaaaacaatggcacgagtgccagcaataatattaatctgagcaatctgggtaatcccggcggtggaccgcaccatccgcaccaccatcatcatcatcagtcagcggcggcggcggcaagtgcccatcatgtgcacgcccacgcccatgcccacgcccacctgtacaactccatctaccagccgtacagtgctgcggcggcctacagcatgaagacgccctgtggaagtccatccccgccgcagggagcgggcggtcagggatcagtgccccatccccaccagctgaggagtgtggccgccgcagccgctgccgcccactggccctcctcccactcggtcagcgatatcctggcccaccatcaggctgttgccctgcgcgccagttgccaagtgggcgtcggagtgggtggaatgggcggcatgggcagtacggtatccccgctgccgatgactccttcgccggtggcgggaacggccggtggtcagccactgctcgactgcgagggtggggcgggacagcagtcgccgtacaactactacatgtacttccagaacggcggaatgcatcaccaccatcatcacggcggaatgatggccgctggagccacgggcttatga

SEQ ID NO: 20379 - protein, 402 aa, DROSOPHILA
MRQGEIFASSLKVHFRTFRAFKLCFPSHNRGTHIRKSQCPQYGEVNQLGGVFVNGRPLPNATRMRIVELARLGIRPCDISRQLRVSHGCVSKILARYHETGSILPGAIGGSKPRVTTPKVVNYIRELKQRDPGIFAWEIRDRLLSEGICDKTNVPSVSSISRILRNKLGSLGHQHTPGTVMGSGSSSGGGSVSSNGGQNNGTSASNNINLSNLGNPGGGPHHPHHHHHHQSAAAAASAHHVHAHAHAHAHLYNSIYQPYSAAAAYSMKTPCGSPSPPQGAGGQGSVPHPHQLRSVAAAAAAAHWPSSHSVSDILAHHQAVALRASCQVGVGVGGMGGMGSTVSPLPMTPSPVAGTAGGQPLLDCEGGAGQQSPYNYYMYFQNGGMHHHHHHGGMMAAGATGL

SEQ ID NO: 20380 - DNA, 2817 bp, DROSOPHILA
tggcaacgacaccacctgaaggcgcgtcggcgggcggagggaggaggaggacgccgacgacgtctactccttttaacgctggccaactgccgatcaaaagaaattaacaaccaaacttctcacattgttgctgcatttgctggacgtcggcattgttgaccagaatagggatgaacgagaatattgatagtgcaatggctcatcctcatccgtgtgacccccaagaaacccaatcctatacccataagccaccactgcccaaacccttaagcctttcccccgactccccggaacacaagtaatatgcgaaaagtaaaacagcaatgaaagaacgtaaggaagaaggcaactggtgctcccacgaaaaacaaaacaaacaaaaattaaaaataaataaactagtatgttgcgaaagtgagtctaatattaaaaaagaaatttacaaaaactatttgtagccttggtccgttgttaatagctctttatacacgcactacattaaataaactatgtaaatttacaagagaattaacagaaaacacaacacactcaatcaaatagcaattcgtattcttaggcttaaagacatgtttatttgatcgtttgtattatacatcatgttaagtgaagtggggctctggctagacatcagttagtagtaaccagatactttaagcgaatcaaaacacaattagacttcaatgtgaaagcaaattgaatccggaagccaataccaattatcgctacaaacagagaaataacgaacgaaataatttgcaatatttaaactaaaacatcgtgtcgtttgccccggcggtttggagatatatttagagctctagtttaagcctaacttagacgaacatcggttccacaaatcaattggaattacgcattaaacgatttatgttaaagcctagactgattttagccatacatataagcctaaataaaacttaatagaaagcattttctcttaactacacgactatcacaacggctagatgtatcgcttggcttcctcctcggagtcgctgtgatctggagaagaatcaatgcgttattaatgggactccagccatgattgccaacttactttgcttcctcggcggtgtctttttgttcgccttgtatttgccgcgactttgtttgcctttaaggcctgccttcgatgggcttgcttccgagcgcatgggcagttcctgggagtcctcatcgtgtggcagccagtcgctggtgtccatcggtgcgccagcactttcctctttggacggctcttcgttggccacaggcgtctcactgctctcgttattatccaactgcattttctcgcttggcggaggttgctgctcctgtttctgtctgcccatcagtttgttgtagctcaacttgtgctccgtatttaaaatcagtgccaccagcccatcgaccgattgatcgccctgcgatcgacactcttcgtccagcgccaaagctttgcgtacgaaattcaacagagacttgcaacgaaccgccgcattgcgggcacactgcatgatgatgcgggcatttgtgggtgcagtgcctccggcagtcaggctgcacagctcctggaaggagttaaagctcaggacaattaccgaatcggcggcgttctcctccagcagcgtaggatccagtattggttgcacactgctcttgtaaacacagtaggttacactgacgggatagtggtggaaaagcagtggaatgaattcgcgctcctttttcttaaagatgcgcagttcgccgtccttataccagacatccggtcgacggaagtgcatcaatgcagccaaagtggctatggtgctggcgtctataagaaagaattgagatatatagatatataaaaatataaaactaatatgaagattattctttaaaaatgaaagtatggccaaagtatggctccaactgatagcttttgatcatttgtgaggtaatcacgcttttcatcttgagattggtgcttttaccatacagattcccgtcgtgattgagcacattgacgttgacacggatgcaccacacatgcttctcgacggccacgcacagagattccagatcgatgcttctagagctgcggaaggtcctctcgagcagggagttcagttttagcgatcgctggtcatgtgtggtatgcgcctcgtccagaaaagcaacaccgccaagatatacgttcaggtggattttgccttcgttgggccgcgacaaggccggcggtcccatttcgcaggtcacttgggccagtaccttcgtatcgcccatggacaccgccacggagccccaatccttgccgaaggtcagctccacatcgcgggactcgttggagcgccgcccatcgaggcgttggttttgcttcaccgccaattggacgaagcttcgctctggcttcgatttgcccggctcgaaaaaatttgagttatggaacatcctgggtattcgctgggaaggatcctttcgatttgttttgaattcgtttgggactgaatttggccggcttttaaaaacgtgcagagcgcggcgttgccactgcgatccacatacatgctgatccggaactggttccacggaactggaaccattaaaacgcataataaatatttagacatttttttagttatgtgtaataagaagacgattttatggtgcactacaaggtggcttttagcgccataaacatttaggtatatttaaactagagtttaaattttgcacaaataaatatttttttttaggtcgttggctatctaaaaaataattatttcaaatgccctatacaggcttatttggcat

SEQ ID NO: 20381 - DNA, 1401 bp, DROSOPHILA
atgcgttttaatggttccagttccgtggaaccagttccggatcagcatgtatgtggatcgcagtggcaacgccgcgctctgcacgtttttaaaagccggccaaattcagtcccaaacgaattcaaaacaaatcgaaaggatccttcccagcgaatacccaggatgttccataactcaaattttttcgagccgggcaaatcgaagccagagcgaagcttcgtccaattggcggtgaagcaaaaccaacgcctcgatgggcggcgctccaacgagtcccgcgatgtggagctgaccttcggcaaggattggggctccgtggcggtgtccatgggcgatacgaaggtactggcccaagtgacctgcgaaatgggaccgccggccttgtcgcggcccaacgaaggcaaaatccacctgaacgtatatcttggcggtgttgcttttctggacgaggcgcataccacacatgaccagcgatcgctaaaactgaactccctgctcgagaggaccttccgcagctctagaagcatcgatctggaatctctgtgcgtggccgtcgagaagcatgtgtggtgcatccgtgtcaacgtcaatgtgctcaatcacgacgggaatctgtatgacgccagcaccatagccactttggctgcattgatgcacttccgtcgaccggatgtctggtataaggacggcgaactgcgcatctttaagaaaaaggagcgcgaattcattccactgcttttccaccactatcccgtcagtgtaacctactgtgtttacaagagcagtgtgcaaccaatactggatcctacgctgctggaggagaacgccgccgattcggtaattgtcctgagctttaactccttccaggagctgtgcagcctgactgccggaggcactgcacccacaaatgcccgcatcatcatgcagtgtgcccgcaatgcggcggttcgttgcaagtctctgttgaatttcgtacgcaaagctttggcgctggacgaagagtgtcgatcgcagggcgatcaatcggtcgatgggctggtggcactgattttaaatacggagcacaagttgagctacaacaaactgatgggcagacagaaacaggagcagcaacctccgccaagcgagaaaatgcagttggataataacgagagcagtgagacgcctgtggccaacgaagagccgtccaaagaggaaagtgctggcgcaccgatggacaccagcgactggctgccacacgatgaggactcccaggaactgcccatgcgctcggaagcaagcccatcgaaggcaggccttaaaggcaaacaaagtcgcggcaaatacaaggcgaacaaaaagacaccgccgaggaagcaaaatcacagcgactccgaggaggaagccaagcgatacatctag

SEQ ID NO: 20382 - protein, 466 aa, DROSOPHILA
MRFNGSSSVEPVPDQHVCGSQWQRRALHVFKSRPNSVPNEFKTNRKDPSQRIPRMFHNSNFFEPGKSKPERSFVQLAVKQNQRLDGRRSNESRDVELTFGKDWGSVAVSMGDTKVLAQVTCEMGPPALSRPNEGKIHLNVYLGGVAFLDEAHTTHDQRSLKLNSLLERTFRSSRSIDLESLCVAVEKHVWCIRVNVNVLNHDGNLYDASTIATLAALMHFRRPDVWYKDGELRIFKKKEREFIPLLFHHYPVSVTYCVYKSSVQPILDPTLLEENAADSVIVLSFNSFQELCSLTAGGTAPTNARIIMQCARNAAVRCKSLLNFVRKALALDEECRSQGDQSVDGLVALILNTEHKLSYNKLMGRQKQEQQPPPSEKMQLDNNESSETPVANEEPSKEESAGAPMDTSDWLPHDEDSQELPMRSEASPSKAGLKGKQSRGKYKANKKTPPRKQNHSDSEEEAKRYI

SEQ ID NO: 20383 - DNA, 3500 bp, DROSOPHILA
cctttgttcgcggaatgtccgtcgacgaggcgctgaagcagctgaactttgtgctcaaaaagggggccaccgatgtgaaggagaccatactggaggcccagcaaatagccgtggagcggcataacgtggagtacaagagcaatctgtggataggtgagccgcaggggcacaaggaatctatgtatccactatgaatgatggattatcattagtttcttcatcactaaccattatattgatgaatctttgtctgttcttacctaccagccgaatccttcgtgggcaagggacgcgtcttcaagggcgtgaggcggcatgctcgcggtcgcttcggcaaagtggagtacaagcactgccactacttcgtgcgcctggaggagggcgagccgccgcagcactactaccaggagccgcagacgccggagcagcagtacgagagctggatggagcagatgcgaagccggaagatcatcaactcgctgtagccacctgaattggcactcgtatgcaatcgatccgcactcctgcagtcctccatcgccatcgcgtccacgcgcattaagcattttttttggttttagaagattgtttaataaaatagaaacagacaaaagaactatgtcagaggttcatattgttcttatttttacttagaggagtttattttatttagttttgcgcgtatatacacaatggatattattggttttctctctggatgcccgagagtttcggaactctagttgaagtcagggaatgtttgcaactgtaagcttaaagtaaataaactaattcgctccaggcgaatactactaataatagcttactaatttatgcaaattaatgcaatttcggatgtttctgaacgcaaatcctaagtatttactgataaattagttgtttctcttttagaagttgtggtttaaattaaagtagtcattcaattgttagcctcttgaccagaccttctcactcccgtccctttgaatggccttttgctctactcctgctccttttcctcttcatcctgcagggtctgtgccagcagctcctcgacggggtcatccttcagcgactgggtgatcttttcgaggaccaaaggctgtcgctcgcgcaccgcctcatcatcttccttgtccaattgcaggcaggccagtttggatagcctcgaatgtttgctgcgtccagcatcgcgtcgtcgcttgcgggatgtggacttagttttgcccccttctccagtcttactcttgtccttcttcttggctttcaattcctttttcgtcgcaccatctttgtgatccctgagcagatgtctcgccagattctgcgcactgctgaaacagcggccgcagtccaaggcctggcactcgaaacgcctgcccgagtgggcggtgagcatgtgctggcgtagattcctgaggtacgagtaactcttgccgcatccctcctcgttgcaggtgaaggaggtggcgcactcatccgtctgcgccgcctccttgtgcttcacctcgaggtgacgcttcagttcgctcggcttgtcgaaggcactatcgcagcggtcgcacttatggcgattcttgccgtgcaacgagtcgcgacaatgcttcgtatacaacgtccatttgtcgaactgcagcgggcagccgggacactcgtacagcttgcagctgggctcgtgactctggcactgccactgctggtagaagccgcgcgagcacttcgagcagctgtacggatactccagcgtgtgctccctgatctcgtggcgcttcagcttgagcttttgcgagaatttggcactgcactggctgcacggatagacctttgggctctcgtgggtttcgcgcatgtggcgggtcatgttgctaaccgagatgaacatcttgctgcactcctccagcgcgcacttcaccgtcttcttggccgccgactccggacgctcgtgggtgctgcgcagatgcctctttaagtgcgtcacaatcgagtacgtcttgtcgcaaccctcgtacgagcaggcgtgcttcttctgcaaagtggtggcggcgttactactggcttacacttaacatactctaactatactcacaatccctgtgtgatgatactcatggcgatccaattggtccagccgcttgaatgtggcctcgcatttgggcatgctgcacgcgtacttggccgagccgatgctgttgcggcgtccctggcgctgcttgaactcctccagagcggtctccatatcgctgtcgctggcaatttgcgttccaggcggcatttttgagggtttttatctccgaaatattgcaatctcttttttttttgtgttttaggttaccgcgacatccgcaaatgtcgtggaattatttggccacactcgtgtacgtggaaatagccaaggacttaaggttgaagagattgattttatttcaatttggtgtagcaaatctataacttataggtttcttttaatttggtgtagaaaatcgatgatgtccctggtaagcgtttatgatttcgtttttggagagatggtagattttttggtatttttccagggctggaaattgctgcctagcagtgttgtactgcaacaactgaataagatgtacgatacgttatcgaaaacgttacattggtcacattattattcatttattcaaaatataattgtcacatacgttatagctaagattttttttaatgtgcctgggaaaagtttgcagtaaccccgttgtttatttgcagaaaattctgcgtattccttttcccagtctttttgaatgattctgtttaattctccaactcactacggtgaaaattccttgcgtcgatgcatttaacaaatatatgcttgttagtcccccgtctcagaaactacaatcaagaattggtctgaagacgagtataataatattctatatagacaagcagtcagatacgcctgagaaaaaggaaattcaaatttcattgcactaacgtgagctagtgatgacaaaaacggtaattggctcaactatcgtaccggtgtgcggtacctatcggaattggaatcaatgctggaaaaggtaactatattttggtacacggtatttttaaatttaagtactgaaattaactaatatttatttaattaatattttgtgcgattattaataccaattaaaaaatattgatcgataatctggaaaaaaatgcacttgatatttaagatatttgagaaactgcaaacagtttcaaattgtccgctcttgccagctgcggaggaatttccccatttcccagtttggtcacatcgcgctgtcgaaagaaaatttttttcttgcaaagagaaacaaagcaaagcaatagtcgaaagtgagaaagacgaaagaggagacaaaggagcgaaacggagaaaatcagagaagcagcaagcagagcaggaagggggattggataggaactcgaaagcaatcggccaggatcgggaacaggatgaacaacggattcagcaccggcgagga

SEQ ID NO: 20384 - DNA, 1440 bp, DROSOPHILA
cttaccagggacatcatcgattttctacaccaaattaaaagaaacctataagttatagatttgctacaccaaattgaaataaaatcaatctcttcaaccttaagtccttggctatttccacgtacacgagtgtggccaaataattccacgacatttgcggatgtcgcggtaacctaaaacacaaaaaaaaaagagattgcaatatttcggagataaaaaccctcaaaaatgccgcctggaacgcaaattgccagcgacagcgatatggagaccgctctggaggagttcaagcagcgccagggacgccgcaacagcatcggctcggccaagtacgcgtgcagcatgcccaaatgcgaggccacattcaagcggctggaccaattggatcgccatgagtatcatcacacagggattaagaagcacgcctgctcgtacgagggttgcgacaagacgtactcgattgtgacgcacttaaagaggcatctgcgcagcacccacgagcgtccggagtcggcggccaagaagacggtgaagtgcgcgctggaggagtgcagcaagatgttcatctcggttagcaacatgacccgccacatgcgcgaaacccacgagagcccaaaggtctatccgtgcagccagtgcagtgccaaattctcgcaaaagctcaagctgaagcgccacgagatcagggagcacacgctggagtatccgtacagctgctcgaagtgctcgcgcggcttctaccagcagtggcagtgccagagtcacgagcccagctgcaagctgtacgagtgtcccggctgcccgctgcagttcgacaaatggacgttgtatacgaagcattgtcgcgactcgttgcacggcaagaatcgccataagtgcgaccgctgcgatagtgccttcgacaagccgagcgaactgaagcgtcacctcgaggtgaagcacaaggaggcggcgcagacggatgagtgcgccacctccttcacctgcaacgaggagggatgcggcaagagttactcgtacctcaggaatctacgccagcacatgctcaccgcccactcgggcaggcgtttcgagtgccaggccttggactgcggccgctgtttcagcagtgcgcagaatctggcgagacatctgctcagggatcacaaagatggtgcgacgaaaaaggaattgaaagccaagaagaaggacaagagtaagactggagaagggggcaaaactaagtccacatcccgcaagcgacgacgcgatgctggacgcagcaaacattcgaggctatccaaactggcctgcctgcaattggacaaggaagatgatgaggcggtgcgcgagcgacagcctttggtcctcgaaaagatcacccagtcgctgaaggatgaccccgtcgaggagctgctggcacagaccctgcaggatgaagaggaaaaggagcaggagtag

SEQ ID NO: 20385 - protein, 403 aa, DROSOPHILA
MPPGTQIASDSDMETALEEFKQRQGRRNSIGSAKYACSMPKCEATFKRLDQLDRHEYHHTGIKKHACSYEGCDKTYSIVTHLKRHLRSTHERPESAAKKTVKCALEECSKMFISVSNMTRHMRETHESPKVYPCSQCSAKFSQKLKLKRHEIREHTLEYPYSCSKCSRGFYQQWQCQSHEPSCKLYECPGCPLQFDKWTLYTKHCRDSLHGKNRHKCDRCDSAFDKPSELKRHLEVKHKEAAQTDECATSFTCNEEGCGKSYSYLRNLRQHMLTAHSGRRFECQALDCGRCFSSAQNLARHLLRDHKDGATKKELKAKKKDKSKTGEGGKTKSTSRKRRRDAGRSKHSRLSKLACLQLDKEDDEAVRERQPLVLEKITQSLKDDPVEELLAQTLQDEEEKEQE

SEQ ID NO: 20386 - DNA, 33249 bp, DROSOPHILA
agtcgcaaaagggtgatatgaagtcctgatcacaataccgatcgacgtgtgaacgaagtatctgatcggtttttttttattatttttattttctttttgtttttgctttggccacttgctaaaccggttatgccggcatttcacacacactcaagcacacacacactgcgacacttttccaccttcgtacaaaaacaacaacaacaaaacggtggcttgaagtgcgcttacatttacgctctctctctctctctgtctctttcacaggcacatacgcgattggaaattcctctgcagaaggaaaatcttagttttttacctttttgtttatagctcattggcattccgaaatatttgcatcccgccacaattacaaatatatttttttgcaaaaacacacactcgaaaaaaaatcaggcagtacacatacgcgcgaattttttggaggtttgctttgaattcttacgcgctcagcaacaacaacaacgagaaaccgaataaaccgctatgttcgccttctcaatgaaaacagggttgtgcgtattttaaattcgagttcaattattttgtatccttaacaagaattcaaataccaacttcttataattttcgcggcggtttatgattttttttttttttaatttttaaacggcaaacgacatccaaatcaacggtcgtagttttgttttgtgacgatttttatggcgatggtcactagtgatggacaatcggagccgcaattgaaatcgaaaaaccatctctatatatcagcgcgaaatatcgccaacgtggaaaacttgggtaaggtgggaaaaattgctatgaaatagcaaagacataaaccggaaaaggaactgccagaaaaacgttattctaatttaaaatagctcaagattattgtgcatgtgtaatgaaattataccgtacatttcagagtctcgaacccaaataataataaatcataataatcatattaaaaggcacacacttctttaattttacaactcgaccgtcatttttatttatatttttatggtaaatcattaaatttaatacagaaattagcaaaaaaaaataaaggacagtcaatcattattcatgacacgcattaataagtacagttaataaattaaacagtagcgtataattgaactaaactaactgtgagcagcgggcgagactaatttttagtatgggttttacgtggtacagacaggggttttatttcgagagtacactgcaagaagtcggtcagcgcttctcccactgtaatttggaaataaatgcaatattaatttaaatatataacgattcaactgttctccatctacgctttgcattttgtttttgatttttagtatttacacagagtttacattcaagaattacatagattatttaataatttttttaatgtttttaataatttcttttgcatttttcaacacattttggcgttgtaacttttcctccgaccggcaaactttgagtttggcaaacaattgtccataaatgggccttgcactaggcaaacgccgaataattttaagcgatttaaaaaaaattacagtagcacctaataagtgtggattttctctgtattattttccatgcctgggctgctgggggcgtggcagtattgggcagctatcggctctacattctcccctctttctcgattcagaacttataacatcgatatttccatattggctatcactcacattcaatcagtgttcattcattcagtcattcaactgactcattcactcacttagcctaggttcctttcgacttcttcaattcgcttccttagtacagattaatatagcacttgcgtaactttcctcgaaattgttgcaaagaacaaaaacacaaaagtcaaaaaattataaaaaaaaaaaaatgtgtgtgtctgttaaagttaaaaaacctttacgcattagaaagttcttcatgtcgtgactaggcaagtttaaatgtgttgttttctaacaatgttctccatcgtgttttccaagcagcaggctgatccccccaaaatattaatatctatatagaggggattatgcacttgcacctcccgtgtcgacatcgcatggtttaaaactcgactaagagctcgattttagtacgtcttagagccgtttcgttgtttttagtacgttttggtttggttttagtgcgatgttagagatatttcgtggctatgttagttctcttgctacgatcgctgcctttgctaaactggaggacctgcaggacatcctggcactctacaggtgctcgtcgccgtggtatccattcctcagtggctgccgctcctgcgagtgatccgttggccggttgcggttaaagaagccgcactgtagggttaaaggaatgagatatatttgattaaacacatccataccggaatcaccgagagaaagggttaacaactcaccttgtagagcagccagacgagcagcaggaagatgagggctccggcacaggcggccagtacgacgacccacagaggcaccacatcgggcacctgaagcggttccggttccgccttgtagaagatctcgtgcgtcttcacaatggcatccttcggcgctccaatgaagggcagcagtgtgacattggccaccgccagggtggacacattgagtggcacgttggaggccagcttctccatcgtcttggccaccatgcgtgcacggatggccacaaaggcggcgtcgccgtcctcggtgcctagatttgtgaccacgcagcggatgctcttacacctggccgactggcatggtgagttcaggtcgatctgtagcggcttctccgttgccccatccttatcgttggacctccgcaggcggcgtgtgccggaactggaactggagctactgctgctgctccagtgtccaggcgttgcctgctgcaggttatcctcgtcgtagaagtcctcattctcgcggccatagtagggcttgctgccagaggagtaggtaacatggtgggtctgatagccacctggttggccactgtactgcgtctgtccctggtaggaagtctgtccctggaagcccggattacgtgcctggaactgggcctgattttgtccctggtaatgtccctggttggcattggcctggaactgaccctggctttggcccagactctggctgggattctgatattgaccctgactcctgtacagctcgttgtccacattgcctcggtttagggtgcccaaatcgagagtaccggtatggaaattgttgttacggccaccaaattgcgatttgtcgttaaaggtaaccggagatccaaggccagatcctccggaaccggctaaaagtagttgctgatgctgctgctgctgctgcgctggccaagatcggtagttggaagaggaggagctgctcgtgtgctgaactggtccggccatctggatgtgaccctgtgtgctgtgtccacgcagttgggccgatggagcacccgaaccggaggaagagctgctggtggagtaggtagtgaagctggtctgattaacttgtggttcctggaccgcctgactggcgcgatcgcggtgcacgaaggatgcatctccaagcgcctccaatgtgtcctcctgccgccgttgctccacttgtttgggacttaatttgtcacccgcatcggtgctattgctgaccaagactcctcgaacgaaaccttcaccgcgagccttctcgatgtgaacgctggcaccgccggatgacgaggagctagacgattggccagagacctgggccgaattccaaatggcgccctgggcctgcagataggacttctttaccagcttctcgtccagcagcagattgtactcattgaatgccacatcgtcgcactggatcttgcccccggtttctggttgattcaacaggtacattagcggatccccgacgattgtctcgtagggcagatggatgaagacctccgcctcctcgatgattgagggacgattgttgcggatctcgtagatgtgcaccacctgaggtccaatatcgtcctccttggtggcattctccaactctttgtagtcgtcggccttgtacagctggtagtctggcagggaggtgcccttgatgtccagatccgtgtccacccagatacccacgctttggcggatcttgttgtcgtattcggagccgggtttctccaagttcgtcgaatttgcctcccagtagaagtcgtagctggacgagctaccatacttctcctccggcaccaaactgatcttgaagtgtgcctacaaagaatataaagatttgctttggctcttctgtttaagcaataacaaacttacaatcttgccagactctaacgggtttccaatatcgcacttgagtgtgtggttgttctccggagtgggcggcgagcacgtgatgggcgtgtccttcttctcgccaagctgctgcagcttcctgaactgcagatccggcggggtgaccatgtagaaggcagcctcgaaggcatcctcattggtgttcgagataaagacctcgatgaccagaggttcgggtgagccaaacagatacttgtccacagtgctgttccataaacaatagatagatatattactatccagtacatctggaggagattataccccttgacttacctgactttcagcttgagatctggctcgcaaatattgtcgggcccacagttcttctgaatgttgatggcatcccgcaggacgatctcgcggttctgatcaataaccggctcaaggatgctcctcctatgacgaaccatcgggtccaagggacgactactgcgcagattgtagcgggcttccacttccagaggcgtcaacttatcctgcaccttgtccagcagatagacggtctcgttcaggcaatacttctggccatagttcaagcggatcgtctgattcctgatgttcttgccctcatccctcaggaagaacatgcgaggattgagcaactttttggcatccagaagccaggacacatcgaagtccagttgctcgggcagatagcgacccgtgtagctccagcaggtggtcagtagcatgcatggcaccttcttgtgatccctgaccagctgacagctcctgtcgtccagactgatcagcttcgagttgctggcgaaactggtttcggcattaacagcggccacaggtcgcgacttaaagatgaacacctggtcggagctgtaggcgcccacggcgagatctggataggtattgccgtccatgtccagaccgccggacaaggcgaagccaaatgttcgcggatagggagctccctccaccaactgctcggacttaatgatctgcgacggtttggccagtggacccatcggcgagccatggaagatatagaccactccacgaccctcgggtccatcgtagggggcaccaacggcgaagtctccatagccatcgccattcacatcgcccaaggtggtcagggccaagccgaatctacccttgctgtggtagccatcgcgaatgtgctccgtcgtccaacgcttctcctcggtgggaccgccctgcagcaggatgtacaccctgcccacatcgtatttgccctccacgttgtcgggatccgtgtacatgggagcaccgataagcagatcgtccaggccgtcgccatccacatcgctggtggccaaggaatagccaaagtattcgccaatctggcgacccgtgatattaaagatgttcgccatgttccagcgattaacgacgatccttcccacgagattaccaccgcggggcattccaatggccacatcctcgctgcgatcgccatcgaaatcaccggtgaccatcgagtagcccaaataggagtcatcgttcaccgaggcactctccgaagtggagaacacttggttctccggcctggtcacatcgtgggagctggccatacctgtgaatcagcggaaaatacaccggttattgaccgagaaagatagctctctatatctctggtgttttaaggtgagtttgtttcgcctcagttgcggtcaaaataatagaatattaactttttgtacattttatatctaaaggtgctaattttgttttttttttcgtttcgttatcttttatctaccatcatatgctagttttgtgaccgcaactgttggcgcttaatgactatgggcatgctgggcaagaacaaacaacgagatcaacgatgatgggcacatggtaagatggcacatggaactttttttttgtaactactcccagccaaggaagccacaacaacaattaccacaagatactacgctacggttttggatgattacgtgtgtatgtgtgtgataacagggggcactacgaacagtaacatgcctggagaacgtgctgagattaaggttagttagcattcccagttagtacagtcaagaccagatataagcaacatgcactacaactataagctaagcgggttttgggctaaacagaagggacggtaccaagtcaggcaacaagagaaataatatgtatttaattaggacttcttaaatatataatttataatatttccagcactggaagtagtaatatctttcactttcagtttttagaaatcatttactttaaactctttaccaaagaatcgaacctatcagttttaaatatgtattgcatactttcagacatcttttaaatgaatattctattatgacgactgtctctttttgccgttccatgactcctttgccagccctttaggaaaaacccattgttaggcgaaagagaaattattttcttactaaactttattatttaacttaaacagttacataattaaaaagaacttctctttcgcctaattttcccaaaaagagtaaagctgtttaggcaaaaaccatttaagcagatttcagcaaagcgacaggtactataagtatattttttgaacctatggaaccacagatattaataagccaagctttcttctagcgacttctattgcaaaccatcgcacaaatctatagagtttgctttatttcgatggattgccaagatggttttcttatacggatgattgatgtgttggatagagctttcatgaggttgatatggtattttatttttaattatcagacaccgttaatgatactcccattggagttttgtgtgtgaacgggtgttggtgtttgttgtgtttaggtacttttttttttttgagctgggttaatgttcgtaggtacagtttcggttgagttttgaggcagtgagtgagaagcatagttgctgtttgtatttttggtttgttttattttttattttttggcatttttattattattacctccagtgccgaagggctgataaagaggcggcttaaatggaaacttggcatcgggcggtatcgagtaggtttgtcctttttaatggtttttgttttcggtatatcgggagttttttaaaaatttttttatttttttgattgggattcgatagtggtttacgggttcgggtgatcgagtggtgcggttcggttttttttttttttttttgggaatcggtacagaatgcatttcgcatttttcatatcaatttcggtacaaaatcgcatgcattttgacccgacacacgggagattgattgagtgtagagtgagacagaaggtggaggaaggagcaaaaaatataaagagaaagagagaacataattttgattaatcagatcaggaagaatatgacgcgttatacggtacaggtacaggtacagttatagttacagttatagatacgattacagttacagttacagtagaaatcgtgtatcaaatacggtacagtaaatgcagctaacttctattgggttaagtatacatacattaaattacgattaacaataatacgatatacggttataatgctgactcctgctgtcgagttgtagatgatatcggagttagcaaagtaattttaaagtaccttgagacggtacatgggtacaatttcgaacggtacaatcttgttagcttctagaagcgacaacggtgcgacgttaggccaattggggttaaacgaattgaaggacaacaactcgacaacacaatatatgtacatatatgaatgtacgtcacaaaacttaggtaactttaattgtttgataagtgtgcacttaataattctacctaaagcaaaccaattgattggcattttgccaaacatactaaaactgtagtacattttttccaaaatatattggtatatgcacacttatcgtttcttagaaacacattttataagccagacaattttataaaaaagttacagtttcataaaatattgcactgacttataataaataagtttttaatatctagctaaggatattttatcgactagaggacactacaatgcgacatgcactttagacacatcctagatacatctaaatttggcattccatcttctacagatgcacatttgatttagcccgctttaatctacggatcgagtgttagagactggagaaccataagttccgtttggaaaatgggtattacggtacaaacatatagctagaaccatattatttgtatagtatctatgtatttattttcatatctctgtgaaagttacttaggttacggaactgtctaacatataaaattaaaaacacacgaaggagaaagagtaagacaaactaaactagggactactatgttaatgcaatcactttgattttatacatcggaaggcaatcaaaattcaatacgtttgtggggaaggacgaagacaaattcaatacttttgtggggaaggacgaagacaaatgctaaatgataacggggataacgaaattcaaatttcaaaccagactacgtgtgtttttttgggtgtgtgtgtgtgtgttcgtgttttgggatcatctagaggagtttaaggatattacttatagttctagctatgtctaaatacattggatcaatttcggtagcctcattgagacacgagatactaaaaaaaatagcagcaacatcaaaatacatacagtaaagtaactcgtctcaagagacaaaaggtattgaggtacggataaataaataagtaaataaataaataagaagtagaacaacggtacacgaaacatgtgggaaaaacgtgcacttaccttgccaataccaactgccaggtgcgccaatgaacagacgcgagccattctgcaacgggagaaaagaggttacaaatatgtatatccacatatatagctagtgtgtatgtgtgtgtgtgtgtgcataatagtcaaatcgaatgctggggatgcaattgtgaatgcaaatgttatgccacgatcccaacgaggtgccaactaaacgtgcccacgtccgaccatccgtctgtcttatccgtatcattccatgcatataataactcaatgaaacccaaaaaataagagagaaaaaggggaacgctgaaaagatctagagatcggaattgggcaactacgaatttgagatactcttgaaattatttgaaactcaactaaagatttgtctcaaattaatcaatatgctattgaaataacctaggaaggtgtcttaatttatgcaacattatattttcaacttttagacacctataatgaaatgtttataattttttaatgaaatttttaatattctagttctggtcggtgaaacactattgtataaatcttccttcgagcatggataagtatccccacagttctttgataggctgttcagttcatacccattgaatacttaccccgttgatcgctgcactgaatccagcctgacacgagccctggcgatgataaccccagttgtctgcaacgaaagatggaaatgcatcgcataagtgagtgattgggcaaaaaaaaaaaaaaaaaaaaactgggaagctggggccaggggaatgccagtcacacgcagttgaccatttaggcatcgtgcgatttcatcataaatgttcgcagggccacggggctttttttccgaaaaaggggaacggtgtgtgggacaataaattgcaaataattaccgatgcaatgcaataaattgcgctgctatttgtcagacgctggacgagagttggacgagcgagttggaacaacataaaaggattagagcgcgcctttggggcaagatctttgcctgccacagcgatggacattgaaatgaaaatacaacaatgaaggcagcagccccaactgccgagcggcaaacaaaaagatcaagacgaggcccaaagtgaagacggcatccgcacacatatacacatccccacatgcacagtcacacatccttttgttggccccgccttttgtttgtttgtttgtttgtccggcaaagtgtctggcgaatgttgccttgctaccaaatacgaaatcacgtaacatcagcaaaaagctcaacaagaaataagacggccggaagtcgagtgctaggataccctattgcaatgccatcatggtagttgcacaattcaaaacttgtggcgcccacgggtgggcatttcactaggtcgcccaatggtgaacttttccttcaatataagctcttaaaacaggattttatttcatttgctttccattcccttgtcaaattagtaatatcctgcattttgggaagggtatttctcgcaacaccaacaacttgatgtcgcatgctcggataaaagcctccagctaaaaaggggagctggtaagggggagccatggagcaaaaacaacagagaaatcaacaggcagatcgtgcgtttgatcaaattaaacgataacaatttgtctcgaagtgtttcaatttgagctcagcgacagcagcgacggcagcaacatgttgctgctggcaccggcaatcgcataagtcaactcttttacctcgtcttttttttttgtattttgttttttttttttttttttgtacaatcgtaacgcacacaggtcctcgtacgtgagcatacccatggcattgtcttggcagttgtagtaattcccataataaaatcgccccgtcttgaattacaattagtttttagcaagggcacgccgagaactccgctcctttgccgacatttcaacttggcttggtcactccactcaactcgattcgattcgattgttttgtactttgatttacccctcttgtcgtattgctggccctgtgtttcctttaactatttagtttggcattttgtgcgttaagttggtatttattgctttcagtgatgtcggaatgtgcttaaccgactgtcaggatgagttgctgctgctgctgctgatgttgctgctaatcatttcacaacaacagcattaataacgcaacaaaaaggccactgggaatcgagttggcccattcgcgtgtgtttagaatctataaattgcccttggatgggccatattgaccgcggattgagcaatcgcctcatgtgagttcatgcaactggttcagagaaatatagctaataaggtgataaaaaaattaaaaaaaaaaaaaaacaaaagcaaaactataaaacattctccaaactgctataatgtgggcttaaagttaggtttatatcgctctataaagacacttttaagcttgagaaattctaggtcaatgtgaattatatttagcttttctcacagagcacagcgaataatattttgtatttttttgatttaaacttgatttctcgaaagtgaatatcacacaaaacgtgttcgataagcagttgttaaacattagtattctatggaccaagtatatggaaatgaaatatttttctgaatgaatcagtttactacagccacctcaattgactcagagtttgaacccaaatgcagtatactttgcactcacattcttggccattccacgaaccaccccaagtaaataagccataaagctgaaaatttaaataagcatagcaattctttcgtatgataaactagttcaagagtcacaaccccgactaatggccatatgctagccctcatatagaaagactcatacgtaaacacacacacaggtacatacatatatacggatatagctccttaaaaatccgaaagatatatgtgcatatatatatatatatatacacgccagttgaatgctttgcatctgcgaggcactgctaaaaataatcacacctcatcgaaactttgcggaggaggaggacgcgaatgccccatgtgtgtgctggcacatgtatgtatgtatctacatatatgcccatttatatagacctagatatagtcggtaaagtcggataatgcgatgactaaccaaacaaatttggcaggctgtcccaaaaatcaacgggaagaaaaagcgtacaaaaaaaaataataaaaacagaataaaatagaaaggcagggaaagtaaatgtgagataaaagccagaaaaacaaatgcatcagaacgaatgaaataaaactacaaaatatcgtatcaaatatttttagattttttcaaacaccgcactacagaactacacagaatgcatatgttttttcaaagttttcgacggtgcgcatttgtcggctgtcaagtcgcataaatctttcagtccatccagatgggtggtagatgggtggggattttctgggttgcaaaggtttacgattccgatctgctgttgctgtttatgcctctaaatgacgtcaaattagtcgcttagggctaagttgtgttcgaaaaatgagcgaacatcaaaaacttcactttcgaaaacagctgcattcctaaaagaagcgatcattcgcccacgaatcgaataataaactttgtaatccaaacattcaaagtctttttaaaattcttttgaagttatcggactatggattaacttgtcttggttcttgtactttttttttaaatattcatattaatatttaagatatttgaactttctgcagtaaagcacacatagttgtggaaagtctttaaaaaatatttgaataactaaacaaaatctacttaaatcgactcatatgctgcagcatgttccagccaactaaattgtggccaaagtgattgtcgttcactcttgacgttttttcactttccccaaagttgccgttattcgatacgctcgagtattaccgaaaaaacaaaaaaaaaataataataaagcttactacaagaaattgaagcaacaaaagccgaaagaatgccggagactgacagtttgaatttcgcttttcaagggattccctgccgctcgaattacagaatcacaccgaatcgccggccgaattaggcccattggtgtgggttaatgttaatccctgtcccgctgatcgatactcacttgtccggcagggggagacctcgtagaactcctcgaagttgtgcgaggtgaagcaggtgcccacgggatcaatgcggaacgccctcgatggcgtcatcgtgtggaagacatagcgcggtgcacaggcctgcaatgggaaatggggaaaatcattgtagatggagtacataacacggcgagaaatcaatggcgattaatacctaagtgtaactgtttattacatatgtatacataaatactgactacatttattcattaagtgttacaacttcaagtgccaagcctaattgtattaattgtatagttatcttaacttatgattttggatagctttttaaatcccttaactttctatgcagcttcaattgcataatattttttatatataattttttatatttttgctattatttttttttttcggtgcagctgaaggagggggggggggggcatgaaggcatggaaattatttggtgaagatgtgagacaatggcaggccatggcagaaacggcaaaggcatggagtggcggccctcctaaaatggccaaagcgaattaacagaacccatatcccccaggcacagtgggaccaaagtcctaaaaaaggaactttaattcttcgacaaatgtacaagaattataggaacttttagatatgtactgttttataaaacgaatattaatattgaagcattcaaatcacattctgcataagtgtttctttttggtttgtattttttcattctcacttttttcccaggcattggacacactgtgcttgggaagtgagttaacctcgtcgcattggatcgcttcgcatcccagccgatctgtgtgtttatatagttttataatgtataaatggctggcagttggacataaaacacgcacgagactcgaggtctcagccatctctgtctcagtgccattccaaatatggtcagcggtttgctgagtttgtggcatggggcatgaggcatgaggcattgagtatggggcaggaacagccagtaaagtcggaggcagaaggcaggaggcatcaacatcagcgtcaagatcttaggcctggccattgtctccgcagtgcaattacttttacaaatttatacatattgtgccatttatggcaaccagtggctctctctgtatctgtcgcttttccgcccatccaacggccaccagccacctcctccaacctactccatcctcctcctccttttggcaactctgacataaactcaaaatgacgcgctatcgccaaaaatgcatgctgatcggatatcggatggtagcggagcggaggggccaaaccattcaaatgccccattgaatcacaaatctatgggccaggccatattatgcaagcaggcgcagaaacgggcaaccaagataaaatatcgcaagcaaaaaaaaatcacagtccagctaagcctacacttgaggaaagttaagtcatatttatagaaaattccaataactccaaagccagaagaaaatattgtaatagttttccacccacagtacaacagaagcgttataattctcaagttcattttcaggaaacaacaaataggattcggcacagactaaaagctagtgctcattctagtacctgattttttttttcccagtgtatgcataagaaatgggtaaataataataaaaacaagaccctgcaagctcagccagacaatcgatttgccgctgggcactcgggggagcgttgaacaattcaattgaaattcccaacaattgcccgcgtggaccattgtccatgccatgatcaataagttaatagcaatttcctattaaaaactttattatcagttggccggcagacagattctttggctaactgagcggccccaaaaacacagtttgcagttcgcggtaaaatagttagatatgcaaatgaggagcggccggtggagaatatggataccgaatggtccgaacaggtcccaagttgctcttcatcccgagcattgaaatcaaaaattatggttatgaatatgggttttggccaagagtgtgtataagaaatcgctaccatttccagatgccttatttatgaccgagtcgttttaaactatggcaagaaagttggctacgaagttcgtttattgcacttcgaataagtgttataccattttgtgaaaacattaagcctttttttttatagattttcgaccagtgttcatatttaacttggtaaatattggtatacattttcagcggtgaccccaaaagctggttaataaacactttaagcgaatgatttacaaatcaaacacagcgagatgtaactccgtcgattttaaaagtattaataaaattgggtcaccattaattgcggtgaatttgggccaaggatcaggcaacaattggatgctgtagcccaaaaaaagatatatatatcgtttggtatgagatcacactccgattgtggccccaatcaacaacttgtcgccgagtgggcggggtggccatcgccatcgccatcgccaccgccaccgcccacaatggccatgatccgcaatcagcggcgcagcaacaccaaggtgacatcactgtgaactcactcgcatcgctgcgtctcgctctctccgcccatatagccgtctctttcgcggttgccctcgcccgggggcatgtgccgcatgtcgtgcggtctcgttttgctacgtttttttagattctgcatacccagtgatcgaaaatgggtgggtgggcgtatacatgggctagtcaggtgttatcattaaatataagtgtctaaaagtatgcagtgaaaagtttgattcctttagaatgcacccattgggctgtctaataaaagaaaccttttttagacattttagccagtagaatatgctacagagagcagttagttattgccaaatatatttataaataattaaaatatacatgggtagaacaacacggttaggtaaatggaagtcggcttccagttcaccatttcctgcagggatgctgtttggtttgcagtgcttcgattgcgacatgatcatcgacacgatctgcgaaattgcagcgctattgaactccaatatggccagggcactcgcacacagatataaatcggtactatatactgtgtgcggggacttggggttcagaggatccacagatcgaagctgccttgggcctagccgatttggcatctgcatctgacttcggtggcccccagatattcttgggcattcgcaatggtaacgtctgcatgtcgaccatgtcaaacgtgttgacttttgacttcagttgttttcttttttttttttcttcccacaacaaacaggaagaaccgacggcgtctgcaaaagtgcagtttaatgtctcaaaaatttatcgttggcgttttggtatgcactctgctccaaacatgggcaataaaccacatgaacaaaaaaaaaaatcgggcgcaaaaaaaacaaaagcccaaatacagacagagacctcaaaactactaaaaaaaacccagcgaaaagaaagctcaaacaaaagccaaacacaaaaatcgttcaaaatatgttaagctgctgaggaaataagccgggaacacgacaaaacaatttggttttaaagaatggaattggtaatggaaacggttgacatgcccaaaaaaaatgagccaggctaaaggtcacttcgaggtacttgatatttgtcttaatggaaggtaacaaggtatcttaaatatgctatatacatgaaactaagattgcaaattaaattaacaaaatacattattaaagctgcctgatgatataattcctggacagcgactgatgtaatgcgttcgatggattgtgatgtggctcagtaatacggcggggcacttgggttagcgaaaaccaatcgatggatgacctgctcgctcatcatccggttaatgggcgtcgtttgaaggccatttccagtcgcagtcccagtcctagacccagttcccaagtttccaggttcgcatataccatttcccatttggcggaagtgacctgacctggccgcaacaataacaagggtaacagaaatggtggaaacaaagggcgtactggccatcaatgttaacggttcttggtgcgccagggccaaaatcaaatgggccaaatcaaagttaattgagaactaaagtgaaaatcaaatgtttatgctgggtgggcggtcaacaagcggccaacaaaagaagccaacgccaacgcaattaacaaaagttgcgagacgtggcgcaccttaaagagtccgagcaccaaaagcagaaaagcacacaagcactctggcacgaaagcaacaaagcgcacttgcacaaacagaaactccatagaatgaaaacaatattgataaaaaatacaatatatataaaaaaatattgtatataaaatacatatatactattttatattaaataaataaaaaagaaatattttataagtatataaatataaatggctcccaaagcagaaaagcagcattgcacgaatgctaaaaagcagacttgcacaaatgaacaaatgttatcaaaatgacttgaagatttctcactgtgcagcaacaaagcactgtatctgtgcattggtatcttattatagttttccatctgtcttggtcgtttttctattgtggcttacttgacgcaatccgccggtgaaccgcagtgatgacaaaatcatagaaatcgaaaaccaaaaccataaccaataaaccccattgagaagaacacagtcttctttccgtaacacccactgatatctaacggcagagcgatagacagccataaaaaaaaaaacgtaattttcctcagagattttcttggcacatgatggaaatggaaaaggtgtcagttacgcgatgaggtgggcgaatgccatcaattcccttgcactttcaatgcaatttgacattttaacgagctacgatgatgccatcatcggtgaacactaaaatcagacagggttttccagtggttttcgtttttttttttttttcttttctcttagttagtactcgtatataggtcgtcttgtggtctgcggaaaatgaaagtatcttccagcttagtcctcacattgactcactttgtgtgccccataaaccggggttttaatgggcaatgataggagttatctgtgggttattaactatttttagggcaaaccaaaagggcattgagtaatcgtaaaactaaaaataaaatcaatgacttaaggggagctttacaaaaaaaaaaaatggaaaataaaagtataactggatcttattgtctacataaatatttagtatcattatcatcttatgattaccttagtggttaatattatttatttattatttaatattatttcacactcaccacaaccaagtcgctatcccgaccggttgccacagtggcgcccaaccattgataggatttcctgtccacgacctccttgtccacattgcgattgttgcctgatatgaaaacgagaaattcatattattaacttgtcaaataaataaaaaaaattgcagggcagcaataaaaaaaaacggcagaaaagataataaacctaattttgaaatgtacaaaagaagcgggtaaagattaagatctctgaggacagcgaaaaacaaagacgttgaaataattctgacaaaatgtggacggaaatgaacaatttagtgaaattaatatgtattttaaaggagggagaaaggcaaactaattaagctgcactgcgaacacaaaacacttgagaacgacatggataatgatgatggtcacttcctttgtcactgatttatgacacaatctccaggttctaacgtgaggtgctatacaaatgtacatatacatatacaaatttcaaagtgggctaaaacaattattatggagtgtactgtacaattactatacaactaataagggcataaaaggcccaggagtgaatccatcaaaaatggtaattaaatgtgatggatggctgaatgtggttgttggctgctgaaaaaaaaggacatttagtcatattaagtatgctatttttataatgaattataatggatccatcaaatgattcaacggcatctatgaatattatgttaaagaatatatgtacaatcagtcaaatttctcggtacctcaaacgaatcattcataactaattaaacattaatcacggaacaaactaaagcatttccttccgttttctatatgagtatttagtcatgaagacaacgcattgtgcgaaatgagtggtgaataagatctaacaactaatggacggctgacagatagccggatgaatcacacagaatcactttagtagatgagcaaacccaacgaacctgcgagctgaatgaagcacctgttgactccttttatttttgaattttttttttttagccacattacgcatgagtttgagcagagatttatatattattttagcgatatgaacagggagctgggggtctgttaatttatggggacacaccccccacggttcgccaacatccattatcgagtctgcagtctgatgtggcacgtgtcataacttttacccaaagtgtttaccattttgtgtttttttttttttcttttatttgttactttttccaccgatttgcgtatatttatggcagacaaacgctgagtgcagagaactcagctaatgcgaaaaatatgcaaaaacattgcggccacaggaggaagtggatgcgagtagtggagttgatcgtttccgctttgtgccgcggatgttctgctccgcggcaattgtctaaaaatatattattgcaattttgcatttttgcatttttcgcatttactttttaacatttttgcgccacggcattcttcgcattttgcatactaaaaggttgcgcatgcgtgtaggccataaataaactaattgcgatttctgcttccctggcgccagtttctggcgcggattggcgccaactcctgcgcttaggaactcccatcagtgctcaagaggtgccaacagactcagactcgatcatgttaccccggaattaaagtgcatatatataagagtatatatatgcatgcgtttttcttacctttggagtcgaatggcaccaatttgcagtcgtcgtcgttgaggctgcatttgaaaacgcctcctgcctcggtcacgccctgttgatagcgggaggtgtcgaatttgggtgctccgacaatcaaactgacactgaaacgaaagatatgggtgttaatgttggccagagactcggaataaggtatatccttaagcttaaaggaggaataagtgcaaaagtggaggctacagaagggaaaccgtatatcctatagtacatatatacatatatctattctatctatatattccatctacatgtcctatcttttagaagtgttgtatatcaacatagatatgaagtcaatacttcctattttatagattactaaacacacataaactatataatcaatgttgcttttgactcaagtgttgttttcaattgaaatttgcaacactttgtctgatcatctgcttagaactcgaacgctgttttaaagatctttcgttgagtttccgatgctcccactttaaactttatgccattcctttaacacatttaattggactcttgaaattcattccgtttcattcgaaccgataaaacctccctagtggccatttggcaaccctcctaatgggacagcaccgcccgcaccctcgatccctccatcatcatggctctggatttcggagtggttcggtggtttctcgtggttcggatggttctgatggttctactagttcgttctcctccaggggcagcagttcatcatggcacgcacattgacagctgtcattagcattgaatgcggaagtgcggcgagcagaaaggaaaagaatggaaaagggtgcccagtgttcggctttaaccctagggtgcaccaaatgggtcttcattaaaatcgagcataataaaacggaaagtgaataagtgcactggcataatttggccatcatttggaagtcatttacaggaaaaaaaacacacattttctcagataaatgcatctgaaatgggtttttacattttacaaaaatggaaagtcattgttttattatttgatgaatatttgacttttactttaatgcaatattattgttcttggtattttaatttcgttacgcttacttacaaatttccacaacaaaaaatcacatatgttaagaaagtatctaaagggaacacatttttttcgcaagtgtagcaaacttttacggatgctacagacggcacgccgcaaacggtccaaatcaaacacttgagagttgattaaaccacccattcaccgccccgcccccttttgccacccccttcgggcgatctgcccccttatcgagcgacctgcgcggcccacatgcaacaatttgatgcttcactaaagcaaaaatgccacagatgcgtgaaactcgagaggggacgacccacagaagaacttcctatgaatgggcgagtaagtgcactgagagaaagtcatagaacctagattaaaagcaaacagaattcaacaaacacacattccttctgaaataaactatagtttaggatagaggcttactaacagcaaaagctgggctttgaaatattcattttaatatcataagtttagcacatttttttttttcaagtgcatctcaataaatgggagggttttcagcgcgactgaatgaagcgggtctttggaagtttgcaagctgttgtttctgccggcatttgcaacgtacttatttaaaaaaaaaaaagatttaaaaaacacaaataggcaggcagctgcaatttattacgaagtgaggcaaaaacgttaagtaacgttaggtgaaacaaaacgctggctaaaagttttgagtattgagtgcaataggttgagttcacttgcgctctgtaaacctgaaggcgagtgagtatcttttcatcttcgtatctttgtatctgatgtgtgtgctcagtgctgacatcattggcgttcatcgaacggcgtcgattcgaatataattaatattaatttatggacagacgaacagaaatgacacaaactcaaacaggttccccacattcggggggaagttctcatttcgaagggggcgcctcgtagatcccatttgcatttcatttaagtgaatcaatgaataacgaaatttccaaaaaaaaaaaaaaccaagagagacctttcttcactcgatgattaatgcatatttgtttgtttgactcatgccaattgatttccaagtataccatgaagtcgagcaattataaatagtctttttatcatgccttcaagaagtatttataaattaattacatttaaatttgatatccttataaatgtatttataaatcagggctcaagtaaatattatatattaactgcttacttcttcttttaatttatatttatattcgttatttccctttttgatttcaagataatttgcctgaaatcacctacatagaaatataatagaaacgaacaaatacaattgtttggctcttttttttttagatttttcgattttttcaatttgtaatttgaaaacggttcaatgtctcaatcggaaaggatagatcgaaaagcaattttccgcacacatgtcttgaaaccgaaattcagggaaaaaaggagccacgaagtagatacaatagaagacaatacaataaactgaaatggtatggtatatggaatggaaaccttctgttggttcgcgccttgaatgctaaattgagtttgtccagggagacccgtcttgaattaccttcgatgtggacgtcgcgtgcagcagccgcaataaaaataatgttttaaaaataacattttcgaaaaattaccgcctctcctaagcccccgacttccgagtcattcgctgaacacatgtgttcgcaggatgtgtactgctatactcgaatgtatgtacatatagacatacatacatatatgtacgtacatacatacatacatatcttcatgtcccactgcgatttagtagacctactccggttccaattttctgaatgatgtgggtgcggggctcgtgtgaagctgcgcatgcttcctgccacatatgtatgtatgtgcactatatagtgctcctcctgaatgaattaagtccacagtggcgcagaaaagtgcgcggtcggtggatggatgcagatgcccaagatgacagctgccggaacggggtttctacgatagttcatagactggtatttcaccgtatcgcatggcaaaattctttgatctttgtttagatgcatttgcaaactcttcatgtcagcaaaaaaaatggtttactttccataagagatcactccgatttccgctgatctaatcagctcttatttgtataactccaatttgcgcggcagcaatatttaaatttttaagccttataaacaccccgttagttgctcaacttaaaactcaacttccgtcgattaaggctgacttttgaggtgcactgtcacttggtaaccttttaggtaaataaaagggggcaccattcccttcgattcgaacaacagaggaaaagtgaagtgaaaaacagccaactcacttgcgaagtcaggcggcgttaaaccgagaaccgaaacgaacggatagaataggatcgtatcgtatcgtatcggatcggttgggaatgatatgagggtgaggcaagagtcggggagaaattgggaaaagtgggcaacggcgagggcgtgtcggcgctaaacatgtgtgcgcccccccggaggaccgggaaaactgggaaaagccgaacaaaaacccttgcacacgtgacagacccggcgtttgttttgtccattgagcgatttaccattttcaatttaccattttcccattttcaatttaccattttaccattttcccattttccatttcccccgtacccaagtgcgtgtgtgtgtgcggtttcccagcaccttttttacacattgacacttccgttttcctgagatacccctatggccagctgatctgcgatcgatgatcgactatctgcgatctgcgatggatatcttatagctaccccgccactcgaaactccgcaatcaagcggcaattaaggtttcgttcggccaaacaaatgaaaatgccaaagtattcgagtgcagagaaaatacaaatggtcactaaaagatgttaataatattaaaaaaaaaaaattatatatatataaaaaaaaccaagaatgagctactctagaattagctactagaattagaggtttgaataactggtcttgaatatatgtttattttcttgtaaataatatattaaactatgatataccctcgagaacatttaacaaggaaatagttaatatatcagatattttaactcttttataaatttgcatagaaacacagcttgctagtgataaaatacactgttttttttttttttttgcagtgcacgtgcggcataaatatttgaaatcaattacagtactcattgcctgccgccgttttttgccatttcataaccacaacaaaaaggccgagagacagacgatcgatacgatctcagctgcagctgacagtagtttatttgagtttatgcaatagatggattgcccagaccaggccagacccaagcagcccacttactggaggtctggtgaaccggagaactggagaaccgacagaagactctgtggatggagaccccaaatgaactcctcaagtgatcttgatgcaatgttgcatcgatgttggtgggctaccggagaagtggctaaaaataattcaaggggtgactttgtagatgctatcttcgagatacggttactaaatgtgttacgaaaatgtgacccaaaggttttgaaataatcatcgctttcaacaacaacattgttctataacgatttaaacttgattattaaacattacattttgattttagaaaatcaattgcaattagactaaataatatacaaatctatttatacaaatctgctttcagcgcacattattcataaaaattgtttagtgataacaatacagctgattggcgagtgtagcagacaataaatataaagtttattatgtaaattatggattctaatttcggagcaaaagaagccaagagtcttatcatctgtgagttatcttgatgccaacctcgcgggccaacagtttaatgtgtgtgttaatacgacaccggcgatttcacttggccaagtgtctggtctagatttgtatgatgtgccacaaggataccgaaagcaggcatggagcaaggcatggagaacggggtcaggctaatgagttggtccgaccataatgtccgtctataaggaaacttgtgaccagctagccagctagccagctagccagctagccaaccaagcaaccaaccgatcgactctcgttctggataacggacaaacgactttatttggccaattgggtgaagcggcgacaaccttgccgctttgtatccaaacacttgaccgtaaatagaacgcaccacgcagataactatgtcgctctgcggcagatacaggtacattgcatagatgcccagctacagctagagatacatagatacatatgctattcaaggtagaacggtagatataggctcacgtagaattcttcggcaaatacggttacatcgtgtattaattgccgcctctcagggcaaaccacatacatacatattggccaacgacttcgggggctgttgccttataaacaataagcacatctagttacttagccaccttgtgttcagcactttcctcactgcgtatctcgaattgcctgtgtatctttgtcttcagagttaagcgcacaattatcccatggagtcgagtgatcttagacttttaacgatgcaaagaccgcaaaagtaatgcccttgcctgcccagctgggagattaatattaatatgtatattaaaataacatatatatattaatactaatatactatatagagtctactggtagatagtgatactatcaatatagtctgggcgcagcttacaacattatgtcacttgattttgatgtctgcaagctttaagatacttgtaccttaaaagatgcaacatctctattgctcagatctatacgacattttcaaaactacgtttaaagagcattcggagagcagtcaacttggttctaaagtcactgagtgctaactttttgttcggccttttatatctatgtatctttgtagctgtatctgtatctgtatcttcagttgtcgccacttctggggcagggtctaaccgaatgccgcgtgtgtttgcgtctgtttattgaattgtaaacaattttaacgctgcatttaaataattttcgttgcttttaagtgcacttagcgcagcagctcgtttttttcgttggttttttttcattttttttttttgaatctttggcccgagcggtgtgtataaatggattatagagacttatggcggtaaaaaaagtgcaaacggccaaaaagccattcacacacgtagccagatgctgttgccctgatagcctggtgcccactccttccacttttcacccggccactctctccatcgatggtatggtatggatctttggttcttcagtcctctcgaactttgctcatagtggacctagcactagacccccaactccggctaaaccatccagctaacgtgcgaaaagtccaagcagactaccgcctaaatgtaatacacagtacacagtaattatagaatatttgcaataaaaatgtacaaaattattgcactgtggtgcaaagttaacaattgaataacaccttaacgattgaataaaatctacattgattttaatcatttatactatgattttctagtagaacaaagcaactatttgacgactcactgggattttcgtgcagtgcaggcctgaaactgcgcgattaacacggtccatcaagctgaactttgcgggttcagaaaggctatcgctccgaacgatcgaacggctcacatgaatagcgtgaaagtactgggtggatcgcatgggcgggaaatgaaatgaaaatatgtttttcgccatttgtcaggggtcagaaaggggccctggaaaagaccccaataaactttccgctcgaaagtccggcggttggggcgaagtgtcccagatagatttaaatgaccgaccgaccgaccgaccagtgccgtccgatgcgacacgctcgtaaatttatcaatgaatctttacccgaatgggcgacgctatctcattgcgattgaaactaatgggcgtttagcattctagatgcatattttcacgctcctcaagattggaggcaggcggcatgcctgcgtgctgggagcctagtgcagatagccgggaatctcgacttgaagattaacatgtcactggattatctacaccaatggacgcataggctgcgaaaaaaaaagactcaagaagcggtctgtcatgaccaaagtatctcttagttttctacgcgactgataacgttaatagtcgctagaatcatatgaatatgaatatgaacagcattcagttttggggcttcttactgacatgtgaaaaggacactaccgtgctggaaagttttcgaaaaagaaggaattgaactgtgaaatcccggaaacttgcgtgaattgaatgaattcttttatcgccagcaagaaaacgaagtacttccgatgcactgatttttcccttttctttcatatcggcggaattcttctttttgggcacacttaactttatcaaaacaagagctctacttaattgaggaaaaaagatgaccctaataaataatatatattgtatactatatatcacatgttatattcatatcatagttggtcttatctggtatttttacatgatattatatgatggatgaacaccagcatcttttagatcgtagtacaaataagtgaaatggaaagagtaaccgatagcggcgtgaattcagaaattcagcaattcagataaaacgactatacagactgcattaactggaaagcgtgctttaatcccatatgatttacttatctttaatgagtttcattttaaagcacatttcttccaacgaagataatttattgaaaagaaatgtcaagagggtcgctcgaagataaagcaaaataaatgaccctattcggaagttgtaatgaatataagtaatccaagtaggctgaaaattctgaaaattttccaattatttacaattttatttcaattcagcttgttgccttggaatcgaaatgaaacgctaacttctcaacttagttatatgaaaatatatttatctagatctatgcttggctaacaattagttaaacttacttattctgattgccgtagaatccactgcgacccttgtgcatcgcaatgctgaatccgaacatcgagttgctggactgccggaaacggacgtagctgggcaggtcgatgttgtaaccatgggcggacatggcgatcaggagcagaatcaggctcgttatggggcagtgaagagccattcttcttcggtggatggaatctccactcattttgtcgactttctaacttctttattcgctgagctgattactttactttttgctgtatttctactttctctcgaatttgtatatcgatttcgttgggcttgcatccaagaacttagcactttacgcttgcatcttcacagctggcgatcggaatcgagaattattataacatatggtcaaaagagacgcacacacacgcgcggctttatttattatataaactcaaccttggccaacatgagttgagattccaaaaacgaaaaccgaaaaccaaaaaaaaaaaaaaagagcataaaacacgaaagccaaaaacaaaaactatattcttcaactcggcaaatgctgagtgtctctgttttttagtatctccacatatctctatctcaacgtctgcgatcttcctctctcattcgcacccactcgcccgctctctctctctctctcgcttaacatcataatcaagatctgttggccttgggaatcgcggagtgggcggggtggttagggctggtcggatatctaatgtctgaagtcggatgtcgggccaattacgagtatctttattacacggttcagtttcttttcaaattattcgttactattaaactgtcaatgccaaaaaatcaataaaatgcatgtcatccgataatttgaacttatttttatcgattattattatattattaggttttaattatatttctttgcatgtaaggttgtttatattatatttttatatttagtagcttttgttttcattaaaacggtttcttgttaattttttaacaaatcactttaggttctcacttctttttattatttattttattttattttttttttgtttaaatgatttcaatcatctccttttcactgcagcaaaatgctagggtatcagtcgggtcgttcatatattgttgtctaattctaaaatctgatttgttgtttttagacatttttgacggtttcatgtttgcttttggatttttttctttttgctgcatgcttagattttggcgcgttctacgctcagcatcgcgatgatggtgatggtgacgtaatgggccgtcaaacaggttggccaaaataacaaaataacggccaaaaagccattagacttttagccagattgaaagccagccagccagcccttcccacacaactttagtttaaattgaagataactttcaaggaaaagttgaaaatgcaattggtatcgaacgattcaaaatattatttcagttgcaagtacttgaagaaatcaagaccttaagtaagtatttgagctggatattttttgcagtgtacgtaggtttctgtggcggaaaagaatcccacaagttgtaggcggttttgtgcaggtgacatttgacacattttccactttttatgcccagtttttccgccgagtgtgggcgattcgagttcattgatgggcggctgccattcatagacaagaaaatgaattataattaagcgagagagaggaaaaaaaaacaacctaaaaattcgctgtagaacgcgccatatggtgtacaccatttaacattcaacaaattgatcatgcggctggcattcaaaatgactggcgaatgtgtcaatataaataagacagttaatttcgtggcccacaaattgcaggctaaaaattgaaatgcgttgccaggcgaacacaattgttaactgaaagttgctaaatttgcataaataacttcctaagcgtgcaatttgcatttaaatgcaaaagctggcgaaagtttctaaaaatatttcttcgtttcccatttatttgatcatcatttgaacttgtaactactaattaacgaaataaccttcagttttgaagtaaaaggtttgagaccctttttgaacacttctcttcttttttttgcacatcaattgaatatatttggcaacagtcactactggaattgccatacaatcttgcccagatggttaagatatgaatacgaaaaaaaaacacatcaaaatagtggaaaaaacgatcattgtctaaaaataaatctaaaaagttggaagctgtgtgctacgcccagcagagtccgcctatatctaggtatatatgcacatgtatatatagacgtgcatatacagatcgaattctacactgcacaaaatgtcggaggtgcaaacacagctgcgacattagtttattgattttggcttttgtgtttgtgtttttttgtcagattttgtttaatatgcgtatattttgggaatttatttggtcggtgcacttttcactggtgctgcaacactggaaaaaaatgtttcaagcaatttgttggcgcgtcgcgtgttgtgctgttaataagtaaagttcactttcaattggtattgtttgtattatttatattttgatttgctatttgacatttggtgtttgctctacctcggcagcgaacgcagcaagatttaaacgacgactaatggcgcacagtatctgtaagatacatcttagcaccgccagagatacatgggtgaactgctcgtgccagatcgcctactcaatacccaaccaatgtagtctctagtttttagactcgggagagcgatctcggaacaaacgcaaagctctcaaacaaccaaaacgatagcaaaagttttattttttcattatctacacatgtatgtagcgagcatcccactcgaaaaaaatttcaaaggtgagtttcgtgtgggaagtctgtaatttccgttagcaaaagtttcgaccatttgatgtgtcattttgttgggccatatgtacatatggaagaacgtttatttcgaaaatggaatcacatataaatttatgatttttatgttcatatacacaagcttatatccattcggaaattaaaaaaatgtatatattttttaaaattcggaaaaaggtaaatacacttttttcaaagttttaactaaatgagctttgaaatctataagttttaattgcacgatatgcaacattttcgcatgtgcgttggtgcaaattaattctgcctcgaaaatgagaacgctgcagtgaaaatgggttttcccatttatccagatggtttagattcgcaatcacgagatctcggaatgtagtgcaattcgactatacgagcaaattcgccggctaaccgaggcagagcaaactggcaatgcaaattaatgaaaacaaacaatgagccctcgaaactccggtaaacattttcgatggctggatatatgtatcagataacacgcaaatataaatgtttcgccgttcaattaccatcgattgcatttgcatacgcgaatttgaatcaaaactggcgcccgttgaatttccgtttcgaacgcgagcgctccgcactttacaccaggcaactttcgcttcacgccaccgaatgcagcactcagatggctagcaattcctcagatacaatttcaaatttcacgcagggatgccagatcgttgggcgattcaaaagtgagcgcgacgcgctgttgagaacgatcaacttaagtgtataatattgaactagaatagttacatagtgcataaggaatatttatgtctttcaattttaatatactttaaagatggtcaattccaaatgggtactttaattgttaggtttcatatttttatgaaaatgtgtattaattgctaatttgtgtggagataaatgtttccgtttcaatgcattattttaatggcttctaaatgtgaattgctgatatgctcttatttaagttaataattttatgtcgtaccaacttgcttttacaagtttttttttaaatctaataaataaatatattttcaagcaatatcgatagcgctgccagatgtttacatatcctaatcaaacgctgccataccgctcgcagatcagccgcttgtgcggtacgttttaggtccacggcatacctgctgccattggtcacactggcagattacgcgattattttttttacggaaagtctgcgttttcccttccggattgaattgcctggatttgctgtgataactcaagcaagctaagatgcacaaggtgatccggcaaatgtcccagctgcgcctgcaggcgccacagggagcagcgctcctccgatcggcggatagcagctcaatatcaccagccatatcaccagtttcaccacctgccctccagtcgaaatccctgcacacggccgcttccgccggaatgctgtgcgccaagtggaacaagtacaactacggaccccgcaaatggctggagtacaacaagaccgtgcatccgccgcaggaaacggacgaggagcccagaaatgctgtaagatacatatttcgaacgcactgctgttacccctccagctgcaatcctctaatccacttgcattgcacagtatgtctgccacatgcgca

SEQ ID NO: 20387 - DNA, 5726 bp, DROSOPHILA
gcattcggtggcgtgaagcgaaagttgcctggtgtaaagtgcggagcgctcgcgttcgaaacggaaattcaacgggcgccagttttgattcaaattcgcgtatgcaaatgcaatcgatgctgtgaagatgcaagcgtaaagtgctaagttcttggatgcaagcccaacgaaatcgatatacaaattcgagagaaagtagaaatacagcaaaaagtaaagtaatcagctcagcgaataaagaagttagaaagtcgacaaaatgagtggagattccatccaccgaagaagaatggctcttcactgccccataacgagcctgattctgctcctgatcgccatgtccgcccatggttacaacatcgacctgcccagctacgtccgtttccggcagtccagcaactcgatgttcggattcagcattgcgatgcacaagggtcgcagtggattctacggcaatcagaataatgtcagtttgattgtcggagcacccaaattcgacacctcccgctatcaacagggcgtgaccgaggcaggaggcgttttcaaatgcagcctcaacgacgacgactgcaaattggtgccattcgactccaaaggcaacaatcgcaatgtggacaaggaggtcgtggacaggaaatcctatcaatggttgggcgccactgtggcaaccggtcgggatagcgacttggttgtggcctgtgcaccgcgctatgtcttccacacgatgacgccatcgagggcgttccgcattgatcccgtgggcacctgcttcacctcgcacaacttcgaggagttctacgaggtctccccctgccggacaaacaactggggttatcatcgccagggctcgtgtcaggctggattcagtgcagcgatcaacgggaatggctcgcgtctgttcattggcgcacctggcagttggtattggcaaggacaaacctactcgataccgcccgatgccaagtttccatttaagccgcctctttatcagcccttcggcactggaggtatggccagctcccacgatgtgaccaggccggagaaccaagtgttctccacttcggagagtgcctcggtgaacgatgactcctatttgggctactcgatggtcaccggtgatttcgatggcgatcgcagcgaggatgtggccattggaatgccccgcggtggtaatctcgtgggaaggatcgtcgttaatcgctggaacatggcgaacatctttaatatcacgggtcgccagattggcgaatactttggctattccttggccaccagcgatgtggatggcgacggcctggacgatctgcttatcggtgctcccatgtacacggatcccgacaacgtggagggcaaatacgatgtgggcagggtgtacatcctgctgcagggcggtcccaccgaggagaagcgttggacgacggagcacattcgcgatggctaccacagcaagggtagattcggcttggccctgaccaccttgggcgatgtgaatggcgatggctatggagacttcgccgttggtgccccctacgatggacccgagggtcgtggagtggtctatatcttccatggctcgccgatgggtccactggccaaaccgtcgcagatcattaagtccgagcagttggtggagggagctccctatccgcgaacatttggcttcgccttgtccggcggtctggacatggacggcaatacctatccagatctcgccgtgggcgcctacagctccgaccaggtgttcatctttaagtcgcgacctgtggccgctgttaatgccgaaaccagtttcgccagcaactcgaagctgatcagtctggacgacaggagctgtcagctggtcagggatcacaagaaggtgccatgcatgctactgaccacctgctggagctacacgggtcgctatctgcccgagcaactggacttcgatgtgtcctggcttctggatgccaaaaagttgctcaatcctcgcatgttcttcctgagggatgagggcaagaacatcaggaatcagacgatccgcttgaactatggccagaagtattgcctgaacgagaccgtctatctgctggacaaggtgcaggataagttgacgcctctggaagtggaagcccgctacaatctgcgcagtagtcgtcccttggacccgatggttcgtcataggaggagcatccttgagccggttattgatcagaaccgcgagatcgtcctgcgggatgccatcaacattcagaagaactgtgggcccgacaatatttgcgagccagatctcaagctgaaagtcagcactgtggacaagtatctgtttggctcacccgaacctctggtcatcgaggtctttatctcgaacaccaatgaggatgccttcgaggctgccttctacatggtcaccccgccggatctgcagttcaggaagctgcagcagcttggcgagaagaaggacacgcccatcacgtgctcgccgcccactccggagaacaaccacacactcaagtgcgatattggaaacccgttagagtctggcaagattgcacacttcaagatcagtttggtgccggaggagaagtatggtagctcgtccagctacgacttctactgggaggcaaattcgacgaacttggagaaacccggctccgaatacgacaacaagatccgccaaagcgtgggtatctgggtggacacggatctggacatcaagggcacctccctgccagactaccagctgtacaaggccgacgactacaaagagttggagaatgccaccaaggaggacgatattggacctcaggtggtgcacatctacgagatccgcaacaatcgtccctcaatcatcgaggaggcggaggtcttcatccatctgccctacgagacaatcgtcggggatccgctaatgtacctgttgaatcaaccagaaaccgggggcaagatccagtgcgacgatgtggcattcaatgagtacaatctgctgctggacgagaagctggtaaagaagtcctatctgcaggcccagggcgccatttggaattcggcccaggtctctggccaatcgtctagctcctcgtcatccggcggtgccagcgttcacatcgagaaggctcgcggtgaaggtttcgttcgaggagtcttggtcagcaatagcaccgatgcgggtgacaaattaagtcccaaacaagtggagcaacggcggcaggaggacacattggaggcgcttggagatgcatccttcgtgcaccgcgatcgcgccagtcaggcggtccaggaaccacaagttaatcagaccagcttcactacctactccaccagcagctcttcctccggttcgggtgctccatcggcccaactgcgtggacacagcacacagggtcacatccagatggccggaccagttcagcacacgagcagctcctcctcttccaactaccgatcttggccagcgcagcagcagcagcagcatcagcaactacttttagccggttccggaggatctggccttggatctccggttacctttaacgacaaatcgcaatttggtggccgtaacaacaatttccataccggtactctcgatttgggcaccctaaaccgaggcaatgtggacaacgagctgtacaggagtcagggtcaatatcagaatcccagccagagtctgggccaaagccagggtcagttccaggccaatgccaaccagggacattaccagggacaaaatcaggcccagttccaggcacgtaatccgggcttccagggacagacttcctaccagggacagacgcagtacagtggccaaccaggtggctatcagacccaccatgttacctactcctctggcagcaagccctactatggccgcgagaatgaggacttctacgacgaggataacctgcagcaggcaacgcctggacactggagcagcagcagtagctccagttccagttccggcacacgccgcctgcggaggtccaacgataaggatggggcaacggagaagccgctacagatcgacctgaactcaccatgccagtcggccaggtgtaagagcatccgctgcgtggtcacaaatctaggcaccgaggacggcgacgccgcctttgtggccatccgtgcacgcatggtggccaagacgatggagaagctggcctccaacgtgccactcaatgtgtccaccctggcggtggccaatgtcacactgctgcccttcattggagcgccgaaggatgccattgtgaagacgcacgagatcttctacaaggcggaaccggaaccgcttcaggtgcccgatgtggtgcctctgtgggtcgtcgtactggccgcctgtgccggagccctcatcttcctgctgctcgtctggctgctctacaagtgcggcttctttaaccgcaaccggccaacggatcactcgcaggagcggcagccactgaggaatggataccacggcgacgagcacctgtagagtgccaggatgtcctgcaggtcctccagtttagcaaaggcagcgatcgtagcaagagaactaacatagccacgaaatatctctaacatcgcactaaaaccaaaccaaaacgtactaaaaacaacgaaacggctctaagacgtactaaaatcgagctcttagtcgagttttaaaccatgcgatgtcgacacgggaggtgcaagtgcataatcccctctatatagatattaatattttggggggatcagcctgctgcttggaaaacacgatggagaacattgttagaaaacaacacatttaaacttgcctagtcacgacatgaagaactttctaatgcgtaaaggttttttaactttaacagacacacacatttttttttttttataattttttgacttttgtgtttttgttctttgcaacaatttcgaggaaagttacgcaagtgctatattaatctgtactaaggaagcgaattgaagaagtcgaaaggaacctaggctaagtgagtgaatgagtcagttgaatgactgaatgaatgaacactgattgaatgtgagtgatagccaatatggaaatatcgatgttataagttctgaatcgagaaagaggggagaatgtagagccgatagctgcccaatactgccacgcccccagcagcccaggcatggaaaataatacagagaaaatccacacttattaggtgctactgtaattttttttaaatcgcttaaaattattcggcgtttgcctagtgcaaggcccatttatggacaattgtttgccaaactcaaagtttgccggtcggaggaaaagttacaacgccaaaatgtgttgaaaaatgcaaaagaaattattaaaaacattaaaaaaattattaaataatctatgtaattcttgaatgtaaactctgtgtaaatactaaaaatcaaaaacaaaatgcaaagcgtagatggagaacagttgaatcgttatatatttaaattaatattgcatttatttccaaattacagtgggagaagcgctgaccgacttcttgcagtgtactctcgaaataaaacccctgtctgtaccacgtaaaacccatactaaaaattagtctcgcccgctgctcacagttagtttagttcaattatacgctactgtttaatttattaactgtacttattaatgcgtgtcatgaataatgattgactgtcctttatttttttttgctaatttctgtattaaatttaatgatttaccataaaaatataaataaaaatgacggtcgagttgt

SEQ ID NO: 20388 - protein, 1396 aa, DROSOPHILA
MSGDSIHRRRMALHCPITSLILLLIAMSAHGYNIDLPSYVRFRQSSNSMFGFSIAMHKGRSGFYGNQNNVSLIVGAPKFDTSRYQQGVTEAGGVFKCSLNDDDCKLVPFDSKGNNRNVDKEVVDRKSYQWLGATVATGRDSDLVVACAPRYVFHTMTPSRAFRIDPVGTCFTSHNFEEFYEVSPCRTNNWGYHRQGSCQAGFSAAINGNGSRLFIGAPGSWYWQGQTYSIPPDAKFPFKPPLYQPFGTGGMASSHDVTRPENQVFSTSESASVNDDSYLGYSMVTGDFDGDRSEDVAIGMPRGGNLVGRIVVNRWNMANIFNITGRQIGEYFGYSLATSDVDGDGLDDLLIGAPMYTDPDNVEGKYDVGRVYILLQGGPTEEKRWTTEHIRDGYHSKGRFGLALTTLGDVNGDGYGDFAVGAPYDGPEGRGVVYIFHGSPMGPLAKPSQIIKSEQLVEGAPYPRTFGFALSGGLDMDGNTYPDLAVGAYSSDQVFIFKSRPVAAVNAETSFASNSKLISLDDRSCQLVRDHKKVPCMLLTTCWSYTGRYLPEQLDFDVSWLLDAKKLLNPRMFFLRDEGKNIRNQTIRLNYGQKYCLNETVYLLDKVQDKLTPLEVEARYNLRSSRPLDPMVRHRRSILEPVIDQNREIVLRDAINIQKNCGPDNICEPDLKLKVSTVDKYLFGSPEPLVIEVFISNTNEDAFEAAFYMVTPPDLQFRKLQQLGEKKDTPITCSPPTPENNHTLKCDIGNPLESGKIAHFKISLVPEEKYGSSSSYDFYWEANSTNLEKPGSEYDNKIRQSVGIWVDTDLDIKGTSLPDYQLYKADDYKELENATKEDDIGPQVVHIYEIRNNRPSIIEEAEVFIHLPYETIVGDPLMYLLNQPETGGKIQCDDVAFNEYNLLLDEKLVKKSYLQAQGAIWNSAQVSGQSSSSSSSGGASVHIEKARGEGFVRGVLVSNSTDAGDKLSPKQVEQRRQEDTLEALGDASFVHRDRASQAVQEPQVNQTSFTTYSTSSSSSGSGAPSAQLRGHSTQGHIQMAGPVQHTSSSSSSNYRSWPAQQQQQHQQLLLAGSGGSGLGSPVTFNDKSQFGGRNNNFHTGTLDLGTLNRGNVDNELYRSQGQYQNPSQSLGQSQGQFQANANQGHYQGQNQAQFQARNPGFQGQTSYQGQTQYSGQPGGYQTHHVTYSSGSKPYYGRENEDFYDEDNLQQATPGHWSSSSSSSSSSGTRRLRRSNDKDGATEKPLQIDLNSPCQSARCKSIRCVVTNLGTEDGDAAFVAIRARMVAKTMEKLASNVPLNVSTLAVANVTLLPFIGAPKDAIVKTHEIFYKAEPEPLQVPDVVPLWVVVLAACAGALIFLLLVWLLYKCGFFNRNRPTDHSQERQPLRNGYHGDEHL

SEQ ID NO: 20389 - DNA, 3237 bp, DROSOPHILA
atgatgctcccccatatacgcagtatgattcataaattccattccctcacagtgacgaattgacactggaaggcatcaagcagttcttcgtcgccgtggagcgcgaggaatggaaattcgataccctgtgcgatctgtacgatactctgaccattacccaggccgtcatcttctgcaacacgaaacgcaaggtggactggctgacggagaagatgcgcgaggctaactttacagtcagctcgatgcacggcgatatgccgcaaaaggagcgtgacgagatcatgaaggagttccgagccggccagtcgcgagtgctcatcaccaccgatgtgtgggctcggggtatcgatgtacagcaggtgtcgctggtcatcaactacgatttgcccaacaaccgtgagctgtacatccatcgcatcggtcgttctggtcgtttcggacgcaaaggtgttgcaattaactttgtcaaatcggacgatatccgcatcctgcgcgacattgagcagtactactccacacaaatcgacgagatgcccatgaacgtggctgacttgatctaaactaatattctatcattacttttatgtaacgcacttttcctagccgtaacaacaaacgaatgaagtaaatacatttgaagagtatttgaatttcaatagacaaccaaaatctgtataataataataaataacacgtaagaatttaatacagaaaccagtttgcttttcaaatgggttaggagggctcaggggatgggtgatttacgtaagttcttacgtcaaggcgggcacttacaattaagaattaattgatgtttaagtgaggtgtgcacttagtaatattctttaagacttaacctattgcaaatgagctaaaaatggtcataagcctatttacaagattttatctaatcagatacctagagactttggttttggcgaatcaaaaagcgcgctataaacataatttaacactacaatctacgctcgtctggctcatctcagcttaaaacttctggcttttgcggcagcgctggaacgtacgagctggccgtcgatgttgttagtgaggattgtcgctgtttcttgctttcgtctgatttcagaagggtgcccagaacaatgccgaggaagagaatgagtcctacttggtggttcgatatgaactttttggcgcagtcgctggggttgtcaatgttgagggaatagatctgaaatgccaaatggatgaataagtgactttctgtaaggtaatataacaaggactacctgctgcaccagatgggcacccactactccaacagccgcgtagtacggcaccgtttgatcgcaagcccagccggcggcagaaagacccgtcagcattgctgccgtgaatcccgacagccagaccttggtgttctccccaaatcgaagtgccgtggacttcacaccgatctgcaggtcatccagcttgtcctggtgggcgtatatcgtgtcgtagacaatggtccaacagacgccggagaggtagagtggcaagcaggcggcaaggttgacactgccctgggtggcacaccagcccagtagggcgccccaattgaaggccatgcccagaaccagctggggccagtaggtgactcttttcatcagcggatacgtgatcacgaggcccagcgaactggcgcccaacaatatggattgccagttgagctggaccagcaccaaaagacccagactgagctgcgccgagaggaatactatggcatcgaactgactgatctgacccgaggccaagggccgcaacctcgtgcgctccactttggcatcgatgtccttgtcccagagatcgttgatggtgcacccggcgccgcgcattatcagtgccccggtgccgaacagacccagcatggtgaggtccggccagcagcccgcatccgcgctgagcgctatgctccaggcgcaaggccagaaaaggaggtaggtgccaataggccggtcgattcgcattagttgggcatagggtttggcggccgacacgagttcctgcagcggcgtttgctgcttcacgggctcagtggcggtactcgaactcctggagcatacatcctgcagccgggacttatcccaagtgctccaatctccaatcagaacacgcgctggttgccggggcagcatgtgttttgttgttgccgccgctgcataagagctgcggaagtgcctagcgctctggagtcgcaggtgtcgaagcgcatacattgcgatttgccttgcactagcaccttcaacgattaaagcattaagtcacacgatgttaagttgtatttgttcgtaaactcacagtcaaaaaatggcaagatgtttaatggaactttggttgggaatgtcaaagggctgccatccgggtaaaggcagacaaagagttgccggatagatgaaaaaacaatatgatccggtggcactgctgcatttggcgataaaaatttgaatttaagtttcaaagacaaatatattaaagttgtaaacaacttgtgttaattgttaacttttgagttgtgtttcaccaaagtcatatttatatatctaaacacagaagaacatatgcggaatgtagttcttcgttttaccaatactaataactaaagcttctttacagttatctccacctaagcagtttagcaaaagcttttgctctcttttttgcgtagacccaaccatttacccctctgcaatatcgttaatgttttgcgcacgtcgcccatttttcgaaattggcacacggcgcaggaatgtccgtagaatttatgcacacggccgcagaaggtttgcgcacggccatcaattttggcggcattctatcccagttagaaatagcacagtaagaaataacactctaggaaagccaagtggactaaggcagacctccggcgatccggcggccgacggttgctatcgctcccatgccggaatatgggcatatacctacgtatgaatgtactcgactagagccataaaaccgtgatcgaagcgaagaaataatggaattatttcaacatcatgtattacagcaacaatttcagggggttgtattagcccatgattgataatctgaattgcaataaattctgcacacgaatcgattgtcgaacctttgccatgagtccataaattaagctgcaaaccgcagagaaacccacgacgcatcaattatggattttatctctcgagataaagatctgcaactgatacccagaatata

SEQ ID NO: 20390 - DNA, 1179 bp, DROSOPHILA
atgtatgcgcttcgacacctgcgactccagagcgctaggcacttccgcagctcttatgcagcggcggcaacaacaaaacacatgctgccccggcaaccagcgcgtgttctgattggagattggagcacttgggataagtcccggctgcaggatgtatgctccaggagttcgagtaccgccactgagcccgtgaagcagcaaacgccgctgcaggaactcgtgtcggccgccaaaccctatgcccaactaatgcgaatcgaccggcctattggcacctacctccttttctggccttgcgcctggagcatagcgctcagcgcggatgcgggctgctggccggacctcaccatgctgggtctgttcggcaccggggcactgataatgcgcggcgccgggtgcaccatcaacgatctctgggacaaggacatcgatgccaaagtggagcgcacgaggttgcggcccttggcctcgggtcagatcagtcagttcgatgccatagtattcctctcggcgcagctcagtctgggtcttttggtgctggtccagctcaactggcaatccatattgttgggcgccagttcgctgggcctcgtgatcacgtatccgctgatgaaaagagtcacctactggccccagctggttctgggcatggccttcaattggggcgccctactgggctggtgtgccacccagggcagtgtcaaccttgccgcctgcttgccactctacctctccggcgtctgttggaccattgtctacgacacgatatacgcccaccaggacaagctggatgacctgcagatcggtgtgaagtccacggcacttcgatttggggagaacaccaaggtctggctgtcgggattcacggcagcaatgctgacgggtctttctgccgccggctgggcttgcgatcaaacggtgccgtactacgcggctgttggagtagtgggtgcccatctggtgcagcagatctattccctcaacattgacaaccccagcgactgcgccaaaaagttcatatcgaaccaccaagtaggactcattctcttcctcggcattgttctgggcacccttctgaaatcagacgaaagcaagaaacagcgacaatcctcactaacaacatcgacggccagctcgtacgttccagcgctgccgcaaaagccagaagttttaagctga

SEQ ID NO: 20391 - protein, 392 aa, DROSOPHILA
MYALRHLRLQSARHFRSSYAAAATTKHMLPRQPARVLIGDWSTWDKSRLQDVCSRSSSTATEPVKQQTPLQELVSAAKPYAQLMRIDRPIGTYLLFWPCAWSIALSADAGCWPDLTMLGLFGTGALIMRGAGCTINDLWDKDIDAKVERTRLRPLASGQISQFDAIVFLSAQLSLGLLVLVQLNWQSILLGASSLGLVITYPLMKRVTYWPQLVLGMAFNWGALLGWCATQGSVNLAACLPLYLSGVCWTIVYDTIYAHQDKLDDLQIGVKSTALRFGENTKVWLSGFTAAMLTGLSAAGWACDQTVPYYAAVGVVGAHLVQQIYSLNIDNPSDCAKKFISNHQVGLILFLGIVLGTLLKSDESKKQRQSSLTTSTASSYVPALPQKPEVLS

SEQ ID NO: 20392 - DNA, 3073 bp, DROSOPHILA
aaaatatctagccaagtcaaattggaatttagtaactaaagattataaagatttatatgtacagtaaatataggcaacgaaagcaaatgaaaactatggctatttaaagtactcatcacttggccaaaaacactctttcactgcttccacttacgacaattaactgtaaattatattttccatcaaacgcaatccgctcccctccccccggccaacgaacgcaagctggcatctcgaaaccgaaatttatcgaaaacttttagtaaagcaaatattgacgtggtttcgagtggttggatggctgcgcgggtggaggggattggagtgcgctgcacttggcgggaaatgcacttggacggcatacaaatggcgatgctgcgatgcgagtgatgatacaaacgacgtgttagcttgcttgtttgtttgtcacttgcgccgcgtgcagaaagtaagagcccacccactcccactcgcgccagctccacaaaacttgaccttatggctctccagtttagctgcctaatatggtcgtagcgaccatgcacgccagccaacatctttccgggattgagccctcgaaaagctgacactgattaatagcttaagaagcaggaagccattgccgtaaagctagctacatgcattgggtcagcattcgcatccgccagcgtcgttatttgcatgataaaagcaaagtgcttgcaacgttcagctgcgccgattgagcagctcctggagcagcagggcgcatcagctgggtccggcaaagccataaaagcgagccagagatgataaaaccgaaatggctgccacgaacacgtccgccggcgaagccctgcaattgataacctagaatgctcgctcggctagcaacgtgacccagttaacacgaaagtgcatcatcgacggtcaggtacgtcgataaagtcacactcgaaaaggtaattggaaagcaaacagggtggtctttaccatcagatgcgccttaaactaggttactttattccgaaaagccatatatcttaacgttgccagcgtcacgtcgccgatcgttgtccttctcatcgcaggcgtaggccagcaggtactgcttcggatgccaggccaccgtgaacgtggaggcgtccacgtgaatgtcggttacccgctcgcccgtctccgtgaaggcaatgtcgataatgaggtcctcgctggccaaggcaatcattcgctcgtcgtggctaaacgatatggtgcggacgggccactccaggcggctgatcatgcgcaggcaggccagctcgttggcatcccacaaggagacttgtgcgtccgccgagccagtggcaaagtatttacctggaaacgaaagaggcatatttagatatgatatgagattgcaatggctgcctacccgtgggtccgaactcaatgcaaatgcagttggcgggatgggccttcagggtcatctggtgctcgagactgggatagctgaggatatgcatgcagccgagtccgttggttaggaagaacaggtcgttggtgttgttccacgatatctcgttgacctcgaagctgaacggctcctccacgcgaatcttgttcgtgcgtgtgtctataaaggtgatcagatcctccttgttgcccacggcgatcgttttgccatcgggcgaccaggcaatgttgatattctcccccttggtgttcgtcaccgatacgcattttccaactcgtatgtcccagatgcgcacggtcttgtctccgcttgcggtggcaaactggtcgggattggtgcgatgccaacacagctggtccacggacgcagtgtgtccccggtatgtgttgcccttcaagaagcggtcccgctccagcgagtagacgaccaccgtcttgtcgaagcttccggaggccaggtaacgaccatcggcattccagcagaccgagtgaacctgtgggcaggcgggaattcattggttgcccaataaatgtggccatcgtgctcaccttagacatgtgcgaccgctgctcgcggattttgctgtgactccgcaaatacgacttcaggtcttccaatgtctgctccgtgcgactcattgttaaatgtttatttatatttcaaccggctttttcttaaaagatctaaacaacaatgtgactgtagcccactaaccaaattatactaactgcccgatttgcattagcaaggactcacaccaatatatcgattcctggcttagcggctaattcaaatattcttacaatctctgaggtaacgttttcaaacgagtttctgccaacattcaagctcatatcttttgttgttaattacgctattgtttgcgctgcaaacatttaaacaagcagagagagagagagagagagagagagagagagagtttaatgtcaacaaaactttattgtatcgctgcagcaaaacaaacattaaatgaggaaaacaaataaataagaattacaagcctagattgtggcagtgcactattgaagtctgtggtttcgcggcggctcgcgcacattccgatcgctcttgtcgtggatatgcacattctccgctagctccacgttggcatgcaaggccgcgtcattggcattcaagtgcgcctcctgggcggacaaggtagccttctccgccgcatcgcgcgtttcctcgtagtccagtcgagctgcataagcctgcgattcggcgtgctccagcttggtcttggcctgggccaccatatcaatttgcgaagctagctcggccgccgcctccgatgctgccttttgtgccaactccgaggcggattgggcattgttaagtgcggcagttaggacactgacatggttgatggcctgctgggcggcatattgggctgccttggcggatctcttggcctgctgcagttgggtcagctcgttctccatggccttgtgggcctccacgctctgatcctccagccgatggagcagcacctctttgcccttgagcacggccacagctgtgccggctgcttgtgctgccgcctgagccagagtacttttggccacataggatgcctgtttgcctgccgcattttggctggccactgcggacagg

SEQ ID NO: 20393 - DNA, 963 bp, DROSOPHILA
atgagtcgcacggagcagacattggaagacctgaagtcgtatttgcggagtcacagcaaaatccgcgagcagcggtcgcacatgtctaaggttcactcggtctgctggaatgccgatggtcgttacctggcctccggaagcttcgacaagacggtggtcgtctactcgctggagcgggaccgcttcttgaagggcaacacataccggggacacactgcgtccgtggaccagctgtgttggcatcgcaccaatcccgaccagtttgccaccgcaagcggagacaagaccgtgcgcatctgggacatacgagttggaaaatgcgtatcggtgacgaacaccaagggggagaatatcaacattgcctggtcgcccgatggcaaaacgatcgccgtgggcaacaaggaggatctgatcacctttatagacacacgcacgaacaagattcgcgtggaggagccgttcagcttcgaggtcaacgagatatcgtggaacaacaccaacgacctgttcttcctaaccaacggactcggctgcatgcatatcctcagctatcccagtctcgagcaccagatgaccctgaaggcccatcccgccaactgcatttgcattgagttcggacccacgggtaaatactttgccactggctcggcggacgcacaagtctccttgtgggatgccaacgagctggcctgcctgcgcatgatcagccgcctggagtggcccgtccgcaccatatcgtttagccacgacgagcgaatgattgccttggccagcgaggacctcattatcgacattgccttcacggagacgggcgagcgggtaaccgacattcacgtggacgcctccacgttcacggtggcctggcatccgaagcagtacctgctggcctacgcctgcgatgagaaggacaacgatcggcgacgtgacgctggcaacgttaagatatatggcttttcggaataa

SEQ ID NO: 20394 - protein, 320 aa, DROSOPHILA
MSRTEQTLEDLKSYLRSHSKIREQRSHMSKVHSVCWNADGRYLASGSFDKTVVVYSLERDRFLKGNTYRGHTASVDQLCWHRTNPDQFATASGDKTVRIWDIRVGKCVSVTNTKGENINIAWSPDGKTIAVGNKEDLITFIDTRTNKIRVEEPFSFEVNEISWNNTNDLFFLTNGLGCMHILSYPSLEHQMTLKAHPANCICIEFGPTGKYFATGSADAQVSLWDANELACLRMISRLEWPVRTISFSHDERMIALASEDLIIDIAFTETGERVTDIHVDASTFTVAWHPKQYLLAYACDEKDNDRRRDAGNVKIYGFSE

SEQ ID NO: 20395 - DNA, 2290 bp, DROSOPHILA
cgggattgcggctccgagctttgaacgtgggaaatgtgacgatggggtgaggcttaagcaaggaattgtttaaattaggggacggatgtttagtctaccagtgggtgacttatctagaattggggtttttttaacaatcttattctttctggtatctgttggatacatccggagtagtgtatgttgtattggggtgtatatgttgtaagtgtattagtatgtaggcatatgcttaagtcttagggacttatggatatgtcactatatgaaacggaaagggtttgaattgaccaaaaaccagctcaccgcgctatgtccatgaatatcgaatgttgcagaccacttgtataatgaatttgaacctgatggtggtgtgaatatgcccatatatacactaccatcgtctaccaggtcgtatttgaagtaattaacacaacaattgtagggcacgtatactttctgagctgagctcagaaagatccatgacaaagtcagccaaatgattagcattctaagaaccgctctttataaagtcgaaacaatcactaatcgccatagacagcatatgggaaacccaattgataacgcggcacggatctgctatttatttacttggaattcacgaacataacttttacttttgtatgaaatactttttgcacagaaatatatttaatgttcttagcattttacaatatataatattaaatatacgaagagtatttgcctttatttttcactctaattgtcatttgatgccttagagtaattctagtcttaggaaatggatctgtaagatattgaaaatcagtgatcagttaaaatgcccaagaaatacgaattttcaactcacattcttcattggagcagagtagttgatcgttgagatacaatgatgttagcttgggcagcgcgttggtgatgttcaagaactccacaaaaacctcggccggcataccccttacaatgttaatggcggcctcattcttattgggatacgtgttcattgaacccacaaacaacttgggaagttcaaagatgcagatattcgtatctaaaagatgtataactactcacgtcgcgctttccttgcatttcgaatgtcgccagccaatttaaaactgtatttgaatttattgcctcgtcgggggccgagaaaatgcctatataggtctgttgtttgtctttcatggcatatctgaagtgctcatcgcagtagtgctggggcacaagaagccccaaagttgggcctgcacatagaaccaataacgcaaacaaggtgattgacatggcgagtttggtgtgcataaggtctgaagactgactgattccattttaagctctcagaatattgtatttttaataggaatcattatcactagagagcttatttaatgcctatttaaagcgactgaatgagataacacttttgctgatgacaagctgttagaatgaaaaagattgtatatatattgaaacgaataatatttttgttgctgaaaatggggaaatctacagcgagaacacgccgagccagtcgggcacaagtatttttcaaaggtgaatttaattttcctgctctcatttgttgtctgccgtcgcctttgtcttcttgggaaattgcatttttcatctttcaccatccctttgtgcgctgctcttgctcataagtcttgcattgtcatgcaaaagtgcagcaaattaatttgttttacttatcaactgggtagcccgaaaaatttgtctcgaaatttcccctgttcttggaagtatgcattttgtttgtggcttgggggtatctttaaaatcagcttgcggctttggtcatttgaagtggcctctttccaggtcataaaatcatccaaacgacgacgctcaagttctggcaaggataacgatccttggtccattgactgtgatgcgaaagccactcgaagcgcattcggttgttgacatccccaatataagttatcaacatgagacccaaacacttacgtccaacgaccgacaaccgacaacactaagctacttttaatgtttagacacaaacacaaggacgacggcgtacacaaacacaaacgcaaacacactcacacttgcacacgcacagacacagttgcacgctaaggggtttcggcatgaagttaataaaagttctacgacattttgacctggaaaatattgcaaaaataaaatggctgccgggctgttgcttcagcagcattttgcttcgccttcgccagttcgccgcaggttttccagctgtggttttccagctgtgcccccatct

SEQ ID NO: 20396 - DNA, 381 bp, DROSOPHILA
atgtcaatcaccttgtttgcgttattggttctatgtgcaggcccaactttggggcttcttgtgccccagcactactgcgatgagcacttcagatatgccatgaaagacaaacaacagacctatataggcattttctcggcccccgacgaggcaataaattcaaatacagttttaaattggctggcgacattcgaaatgcaaggaaagcgcgacttgtttgtgggttcaatgaacacgtatcccaataagaatgaggccgccattaacattgtaaggggtatgccggccgaggtttttgtggagttcttgaacatcaccaacgcgctgcccaagctaacatcattgtatctcaacgatcaactactctgctccaatgaagaa

SEQ ID NO: 20397 - protein, 127 aa, DROSOPHILA
MSITLFALLVLCAGPTLGLLVPQHYCDEHFRYAMKDKQQTYIGIFSAPDEAINSNTVLNWLATFEMQGKRDLFVGSMNTYPNKNEAAINIVRGMPAEVFVEFLNITNALPKLTSLYLNDQLLCSNEE

SEQ ID NO: 20398 - DNA, 2803 bp, DROSOPHILA
taagtgaggaccacactaaacacggttgttagggagcgaccgatgtagtagaaggccactgtgacgtaggacagcgacaggttgttggccccaatcatcagggtatagagcacagatagaggcaggatcttgcggaaggtgtcgatgtccagtggatttccctcgggaaacgtaaataccgaggggtacttcctgctcagccgacttgccacaaaacatatcactgtggaaaccacgcattggaaccaggacataaagagcggagctcccaggtttactgtatcgctgctcagcaggtgcttatttacgaataccgtcaatatcgaggtgcacctgtggaagaaatggaactgcaggcggcgcacagatggagggttcgcacgcattactcaccagtagagcgacacgacgaagaatatctttaggtatttgttaaccagccggttgtgctcctccagattcttgtacatttcggagtttttaggaattgcagagcaatttgtgcgagccaaaagtaattgtgcgtttatttttacacgtatctgctacccggtctgccgatcagctgttttcgctgagaacgtttcggttgagtgcgggggtggattcagcagttgttcgttgtgagataaaatgaataatgaaataaaaacaatcagcacaagagttcaacgacagtttcttgctcacctttattgtgcgttttcaaaatgctctaattgaaaaaagttgttgaaaactgttgatttaaatttattcgttacaaattaaatacatacattatccaaatcttattctgtcgagtgttttaaccaaacttgttacagaaataaagtgctatgatataacaaaatattaattaaaatacatttatgttgtgaggtgctcgaaagagtgtttatgtggtggattcattaatttattttacagcctagttcttttctaggaaatataaacatttttgtgtttctgaagttcctttaatgcgtttattgccactgttttccttatgatactcctctgtacttgctaattcaagtcgacaatccccaaaatgtacacgttatagtaattattctctgttaatctctctcgctgactctataaataaaggagtatggccatttcgcctacttctcccactcgcggaactcggttccatttggaggcttcacggtgactctttctttgcccacctcattccagttggtgctgagcacggtgcctccggactccgagaaggacttgttcatggccttttggacctcgggcgaggatgagctgtagattttcttgaacaggttggtgagggccgcctcgcccttggcctccttctcgtcgatcttttcctcctcgctgaccagctggtcccagttcttggccttgggtttcaccggtgcagccacgatggcctcctccagattctcccaccgaattcccgtctccttagccagtgtgatttccactttggtcgaaaaggccttgtaggaggaacgctccacaacaatgggatgaagcagcttcaggtccaactcgtagccatccgccgtcatgtggactcgcttctgggtaatctccacagcatagttcttatcgacggcgttcttcaggagcacggtgatgaccaccttggtctccgactggtaccagtcgtggcgcacggacatcttgctgcttcagctggtactggaaattgggaattgttgaggattcccctataattgctttcgcccactaaacggggttaattttattattatctggaattatctagaattcaatacaaatgaatgtgactaaaggcagtgctaccagatataaaatgattatcgacaatcgattttttgtagcttaagtggcagcgcctattaagtttcaacattcaaacgtcgatatcgataagtatcgacgaaccggttcagaaatcagggctgtgagcgtggaataaggtgtagcaacgactctaaccttaatggaactgttggtgcggcaagtaatttccagcactgcaaaaacttaaattaaggcgccaatttcccttttacaaatttgatttttttgtttgaacttttcatcacgattgaaataatttcaacagactagaaagttgtcaaagacaaaaaaaaggttacaagttcttttttgcaaggatacaaatccacgggaaattatttgaaatctgctcacaccaactgctcacttcaactgcagccaactgaaaacaaagttctagccaatttacgggcactttaatttcggtacttcgctttggggaaaaaacagcagtcgaaagcgcataagtcccgacgacagcaaacataaattccagtcgtctggatccacccccctaaagaaatccgcatagtcaaagtttgtccaaagtgacagcagaattgaaaagtgtgcgaggggctgggcaagtggcccagaaactatttactgctctaagttttatgacttgcactcgactttttttgtatgcttgcctttccgatcaattgacaattatcttgtgagaattgaagaacagctgctaaaattcggaagacacgccacttttgcatttaagtgtggcaaacaaatttattcacaacataattttttctcttaacttataactttactctaacattataacttcgcatatttgcatctataaataaaataataaataaaactaaaatatgaaatatggaatatacagttacatttacatttcacgcgtgttttatgtgcaattcctgtacagatttgagaaaatgtcgagaataacattttattgcattcattacatttcattaac

SEQ ID NO: 20399 - DNA, 803 bp, DROSOPHILA
cctttagtcacattcatttgtattgaattctagataattccagataataataaaattaaccccgtttagtgggcgaaagcaattataggggaatcctcaacaattcccaatttccagtaccagctgaagcagcaagatgtccgtgcgccacgactggtaccagtcggagaccaaggtggtcatcaccgtgctcctgaagaacgccgtcgataagaactatgctgtggagattacccagaagcgagtccacatgacggcggatggctacgagttggacctgaagctgcttcatcccattgttgtggagcgttcctcctacaaggccttttcgaccaaagtggaaatcacactggctaaggagacgggaattcggtgggagaatctggaggaggccatcgtggctgcaccggtgaaacccaaggccaagaactgggaccagctggtcagcgaggaggaaaagatcgacgagaaggaggccaagggcgaggcggccctcaccaacctgttcaagaaaatctacagctcatcctcgcccgaggtccaaaaggccatgaacaagtccttctcggagtccggaggcaccgtgctcagcaccaactggaatgaggtgggcaaagaaagagtcaccgtgaagcctccaaatggaaccgagttccgcgagtgggagaagtaggcgaaatggccatactcctttatttatagagtcagcgagagagattaacagagaataattactataacgtgtacattttggggattgtcgacttgaattagcaagtacagaggagtatcataaggaaaac

SEQ ID NO: 20400 - protein, 178 aa, DROSOPHILA
MSVRHDWYQSETKVVITVLLKNAVDKNYAVEITQKRVHMTADGYELDLKLLHPIVVERSSYKAFSTKVEITLAKETGIRWENLEEAIVAAPVKPKAKNWDQLVSEEEKIDEKEAKGEAALTNLFKKIYSSSSPEVQKAMNKSFSESGGTVLSTNWNEVGKERVTVKPPNGTEFREWEK

SEQ ID NO: 20401 - DNA, 3127 bp, DROSOPHILA
gaaacaggtgcccaaagatgactgctatgtggggcgctactaccgctggccagtgtactcggtgcaggaagctatccagtgccatcgggagacgcatcatcccagcatgtacaacgtacccaatgctcccctcaatttggatattgaactcaacatgcaggcggagaagatcacacgttttgtggataacttccagcgcatggccatgattccacacaagtttgaccacggcgaggagcggaagatcatagttttcaccaagggaaatgtgagtgcagcttcttagtacaaaatcataaaataacatcttgaaatttatttccagaatgaagtcctggaggccagggaagctggcgcctcgctagtcggcggcgtggagctcattaaggatattaccagcggcgagctgctgctctccgactaccagtacgtcattgcccatccgaatatactggccgagctggtggccctgcgaggcctgatgaaacgcaagttcccaaatccaaagagcgagacgctgggcaccaacctggccgagatgatcgtcaaattctccagcggcattagttacagtgcagccaaggatgagtaccagcaaaactttggcctgatcaccgccagtgtgggcactttggacatggatgtccagaagcttgaggagaacatcaagttcctactgcaggatattaacactatgaggcccaagcgcgagggacgtttcattacacgtgtcctgctgaagagcccgccaagcagtgagcagctgaaaatcgatccctttgtctacgttccagagatgtgggacaagagcacggcgaaggtgaaaagggatggggccaagaagcagacagagccggcggaaccccaagaagcagttgcctccaattagttaaaacagaagcctatgtatttttgttgatggattgtttgtgcatactttaaacttacatctcctagagtcctaaacagtctactttactttggcagcttttaattgcattcaggccttctgggtggcggtgctgcgttgttggtgctggcgcatcatctccagctgcttgacacgggtgtaggcggcgctggccaccaggaccaccacattggaggtccaccagagagccgatcgaacgtcatggtagtactgagtggcgatcaccgtttgagcgcaggccttggccgttcccgagatattatgcgtcagggcggatgtgacctgaaatatcgatcgggctagataagcgattaacatgtgaattgtttgattaccttgatttccagcgcagtgacaaatccaatggcaaagccacaaaggccactaagcgtcatcgcggcccagaaccaagaagcccacaggtgcggatacgtgataatgctctccagctcgccattgatgatgatcaggggcaggaagagcaacgtggagtagagattattgtagtagctaagcagccatacctcctggttgacataacccaatgatttcttcgtctgaatagaaaacatggccaaagcaagcgaactaagcactccaaagatggttccccgccaggagaagacctccgtcaggctttcttggtccacacccagccagaatccaacgacaatagcgccacaacacagcaggcacttgaagctggttcgttggcgtagaatcacgtaagtgaggaccacactaaacacggttgttagggagcgaccgatgtagtagaaggccactgtgacgtaggacagcgacaggttgttggccccaatcatcagggtatagagcacagatagaggcaggatcttgcggaaggtgtcgatgtccagtggatttccctcgggaaacgtaaataccgaggggtacttcctgctcagccgacttgccacaaaacatatcactgtggaaaccacgcattggaaccaggacataaagagcggagctcccaggtttactgtatcgctgctcagcaggtgcttatttacgaataccgtcaatatcgaggtgcacctgtggaagaaatggaactgcaggcggcgcacagatggagggttcgcacgcattactcaccagtagagcgacacgacgaagaatatctttaggtatttgttaaccagccggttgtgctcctccagattcttgtacatttcggagtttttaggaattgcagagcaatttgtgcgagccaaaagtaattgtgcgtttatttttacacgtatctgctacccggtctgccgatcagctgttttcgctgagaacgtttcggttgagtgcgggggtggattcagcagttgttcgttgtgagataaaatgaataatgaaataaaaacaatcagcacaagagttcaacgacagtttcttgctcacctttattgtgcgttttcaaaatgctctaattgaaaaaagttgttgaaaactgttgatttaaatttattcgttacaaattaaatacatacattatccaaatcttattctgtcgagtgttttaaccaaacttgttacagaaataaagtgctatgatataacaaaatattaattaaaatacatttatgttgtgaggtgctcgaaagagtgtttatgtggtggattcattaatttattttacagcctagttcttttctaggaaatataaacatttttgtgtttctgaagttcctttaatgcgtttattgccactgttttccttatgatactcctctgtacttgctaattcaagtcgacaatccccaaaatgtacacgttatagtaattattctctgttaatctctctcgctgactctataaataaaggagtatggccatttcgcctacttctcccactcgcggaactcggttccatttggaggcttcacggtgactctttctttgcccacctcattccagttggtgctgagcacggtgcctccggactccgagaaggacttgttcatggccttttggacctcgggcgaggatgagctgtagattttcttgaacaggttggtgagggccgcctcgcccttggcctccttctcgtcgatcttttcctcctcgctgaccagctggtcccagttcttggccttgggtttcaccggtgcagccacgatggcctcctccagattctcccaccgaattcccgtctccttagccagtgtgatttccactttg

SEQ ID NO: 20402 - DNA, 1014 bp, DROSOPHILA
atgtacaagaatctggaggagcacaaccggctggttaacaaatacctaaagatattcttcgtcgtgtcgctctactggtgcacctcgatattgacggtattcgtaaataagcacctgctgagcagcgatacagtaaacctgggagctccgctctttatgtcctggttccaatgcgtggtttccacagtgatatgttttgtggcaagtcggctgagcaggaagtacccctcggtatttacgtttcccgagggaaatccactggacatcgacaccttccgcaagatcctgcctctatctgtgctctataccctgatgattggggccaacaacctgtcgctgtcctacgtcacagtggccttctactacatcggtcgctccctaacaaccgtgtttagtgtggtcctcacttacgtgattctacgccaacgaaccagcttcaagtgcctgctgtgttgtggcgctattgtcgttggattctggctgggtgtggaccaagaaagcctgacggaggtcttctcctggcggggaaccatctttggagtgcttagttcgcttgctttggccatgttttctattcagacgaagaaatcattgggttatgtcaaccaggaggtatggctgcttagctactacaataatctctactccacgttgctcttcctgcccctgatcatcatcaatggcgagctggagagcattatcacgtatccgcacctgtgggcttcttggttctgggccgcgatgacgcttagtggcctttgtggctttgccattggatttgtcactgcgctggaaatcaaggtcacatccgccctgacgcataatatctcgggaacggccaaggcctgcgctcaaacggtgatcgccactcagtactaccatgacgttcgatcggctctctggtggacctccaatgtggtggtcctggtggccagcgccgcctacacccgtgtcaagcagctggagatgatgcgccagcaccaacaacgcagcaccgccacccagaaggcctga

SEQ ID NO: 20403 - protein, 337 aa, DROSOPHILA
MYKNLEEHNRLVNKYLKIFFVVSLYWCTSILTVFVNKHLLSSDTVNLGAPLFMSWFQCVVSTVICFVASRLSRKYPSVFTFPEGNPLDIDTFRKILPLSVLYTLMIGANNLSLSYVTVAFYYIGRSLTTVFSVVLTYVILRQRTSFKCLLCCGAIVVGFWLGVDQESLTEVFSWRGTIFGVLSSLALAMFSIQTKKSLGYVNQEVWLLSYYNNLYSTLLFLPLIIINGELESIITYPHLWASWFWAAMTLSGLCGFAIGFVTALEIKVTSALTHNISGTAKACAQTVIATQYYHDVRSALWWTSNVVVLVASAAYTRVKQLEMMRQHQQRSTATQKA

SEQ ID NO: 20404 - DNA, 7690 bp, DROSOPHILA
atcgctgtcggaatcgatgtctacggcaaaatcaacaaccagttgccggaggaggccatccactctgcggagtgtggagtggtgttcgtcaacagcataccccaaatgttggaaacggcccagaatctgaccacttgcattacctacgtgaatccggataagcccgacttcgaattcacgcatcccgaagaggatcgctattggaacactggcgctgatcctccggaaataccccatgaaaacgtggtggacgatgatgacgatgatacggactatccggagttggacgactatgaggatcacagataagctttggaatttcacccattgataaggcaaagtttgataatcggcacaataatgtccaaataagaataaattgatcgttgtgattacaatacaattattgaaagattgtgattaaaatagatcatggttttacaagaagtttttgttttacgagacttttaaaccacaaattcgtttgtgaaatcagcaaacaatatcaatttaaaggtgagttttacttaacattaaaagttcacccattattttcgtaccgaggttcttatcttaaaatcggtaatcggaaatttatattaatttattgcaccgaatgaaaagcgtttgatatatttttaaaatgtacatatatttaaaatatatttggttagatataaaaataggtaattgcatgtttcgtaaacaaaaaatgtggatttagtgactacaccttagatttggatttttgattttacgcagatcaatctgattctgcttcgcaaatggctcgttgagtatctcaactttactgcacacggtcgctaattattaacgtacaaaaaaagaaatattgatgagttctgagaacctgacatcttttgtgccaacatctaaataattaattcgggttgaccccaaaatgcacgcgcttatctcgtacaacgattttatagattgctcctatgactagattctggactggagactgggaatctgactagacgtcgctctccttgagctggcggacatattgttcgctcagcgacttgggaatcccttcgaaattgatattcgaaggtccagcagcctgcggcgtgctctgcgactttgagacatttcgtcctgtgggacttggtggaggcttctccgttccgaaagcctgtggtatggctatgacatcggccattagggtttgccgacacagggcggataaggcgctaccaggactaggaggtggattcttgggctttttgttgccccttcgtaactttgatgttaaagtggcgaatcccagtttactagaaatcttggcacttcggctcactgctctgggcaaactatcgtaggcactggagtggcccacactttcctgatccgtggatgtgtcatgataatgctgttgctgtgccgcctcatggacagctgctcctccccctgctccacccctcatgctgcccgcactgatgctcttttggagcaccacagattccgttgccttagttggagtttggggaccctggcggggagtaactggagcactttgaagaaactgcgccttggccaactggaggcgtatggctctctccgaaagaggagtgactggacgttccggcgcaagaatctgaggtggcggaaactcgaactgcttggccttggttggagtattgggatgtttacgctggattcgtggcagagtgttatcttgtttattgggtagagttagcggaacaggcgacggtggcggaggatgcacccgggagaaactgggtcctgagctagtcttggctatcttgtgctcaatcttgttgctcgcatttgcactgtgtgacttgtgcaaagagtttttcttgtaaagatgagctttccgaggcggaactggaggattgtttaactcctgatgtttcttggacaatctctcgatgctatcactagccagtggcggtcgcacaaataggattccccgccggaagtgttcgctactttgacatttccggagttcttctttgctgggcggttgtgttatacggtccaaactaatggacttgtacagattaaggggcttgagagggcatcttgacttcccaggtctgtccaccttttccgatttctcctccgtgggactgtccagctccttttctatcacagctaggccttccgcggcgcttggttttgggatagtagtgaagagtttccgtttggtcttcacgaagacattggcattagtgttgtatgttcgattgtgttccggcagaggaggaggaataaaggctcccagctttgtgggtggagtaactattgaggaaggagtggttgaagtgagaggagtggtggatgcggaggaagataaagatggatcatgtaaaacgaggtgcactggagcaggtgccacgcactgactctgctcaatgagttcgcctggcttaaccttcagtgacccgtagactatgtcttctctggcagtagccacatcatgttcatttgtcgtcgagctcaaccggaagtcatcatccaaggaacgctgcttcagccggaaattcttgcggcgcaatcggcgcggtgtctccaaaactgagtgggtatccgcatcgctgctgtcgctctccgtcttgctgttctgccgggaacccatttttcgcagtcgcagcagttttttcttagcagaagcacttgcactggttgcaccattattggcaatcggattggcattcacggtgggcaaactggatcggcacaaagtgcccgttgtggtgctagtctccgtttcatgctccatcggtgaagctgcactagcactgttgtcatcctgagccaatcgatcccggctggagttgtcgcaggtggcataggccgaactggagtccaactgctgcccatcctcgctggtgatgttaatatccggcactaagtctcggggataccggttgcttccaccctctacaaagtcattaagattcgaataaggtacggttcggttaagtggaagaaattcttacgtatactcagcttaaggcactgcaggcattcatacagtccttggagttcctccagatactccagcgttcgctcttgcatggtttcttggcagcaggcttcgtccaaaggcgatttttggctctaaaatgataagtatttagcaaacaaattggtaaacaaataactcaaatttttaattgtcatctcaccagctcggttagtcgtcccagttcgctctggacatcggatatggcgttgagcacgcccgccctcatcaggttgttggagtagtacggataaatgctacgaatgctaagtaatgcggcctggcagtcccgcatggacgggtgttctagcagatcgggcgaagcattcttcagttggccaaacagctcatcggcacgtttcagtgctcccagcaagggggccagatttgtgtgggactcaaagctctggacgcgacgcgaattgctggagggaatgagaagccatcagtttacgtaggatcgggtattccaaatggcacctacacatagtcgttacactgcacctcctcgtacttatatatgggcgtctgctgctccaccagagtgtgagcggtgaccagtggagaggcggtgtcatgaatgtgctcctccacctccaccatcacagcctccggctcgtcgtactttttgaactcgtgatcggtgagggcgtcggtgtcctcgacttccttcagatcgttgacgtcgtttagagaaagggatgaagcctgctgggagatggcctgggccaggttgcagttgggtgacacactgtcaagggacagtgaacggctgagagtcggggagtgatccgctgccactatagaaaagttaagaattaacttcagatcgatcagatagttccatacccacctttattgcactccttgttgatgcgcctcacatctatgggacagtaaccaggatgcagcagggcaaacgtggatgcttccggcccgattcccctagctttctcccactcgtaaagcttcctagtgaacttcctcgagatgccctcaaacttcatcacctctccatccgaagtcttgacctcaattttcttggtatgatccggtaccacaatggcctttaggcgggacaatctatccaaatattcaaggtttagtcttcagaagagaaagattttcggctgtctacaaacttctctttctcgtgcggcctatgcttgtaccatcgatcgtcatcggatccccttcttgtactctgactgtgcttggatcctcgcttcagggagtcattgtccgaggtagtgccgccaccaggagcgcacttcaaccgattccactgctctgtgggcaaggcatgttgttaaatatgactataaaaggaaaaaccgtgccaaataccaacccaacttcttctgaaacttctcgggcagatccttctgatcaggcaaagcgcacaatccttggccctccaacttcacttgacccatgctccacagattccagtcaatcttgggcttaacatccccactttggctcttggccgtgggacttgctgctggttctgatgaggtgattgatcctgcagagcaattttgctgcttggcccgccacttggttagcttctttttgaactgtggggtaagattctgctccagctgggctgtggacatgagttcgttgtgcaacagttgggtgggcgagtgctcctcgctgctgcgctttccactaccagctcctcctccggctgctccacttcccagtttgacacctaaaatggtggtttagcattgattagaggcttattggatatgtcttcaatgtttttgaggatccctactgcggttgctggcgctggaacgctctaactcgagttgcttgcccttaaactctgaatctagtttgagtacgagaagttgataatgttgaaatatctcgtcatcggcgttctgtgggaaattcttacagtttggcgtagtgggttccgagaaatcaccactggatagatcctcgctctctgcaaaataccacaaggttaaagaagtttcgttatgacaaagggattgtggagtgaaaccatcccctcttggacctaccaaattcaccaaagaaatccgattgcctggaaggactgctgggcaccgaggaggtccccggcgaatggacacgacgcatgcgcgaatccttgggactcttgagcggagagtgcagttgtggcagatcactatacatctggttcacctggttgagattcagtggactcggtggcaccttttgtcgacgactgctggtagccttaatctccgccacatgatcctctggcaggacctcaaagtcggagaaggctttcgaccttcgcaatgacttgctggatgatgatttgattggtagtggcggagctgaagatttaatattgtccaggcgttcgtcagtagcggattttcgtaactccacctcaaagttggagtcgcgggattcgcagcgggtatcacttttagaggaatcacgacctggaaaggattgacattactctaacgagctgtaaattaattattattaagagaattacgataattctgtcgggtggtggcctcaagatcatccatggagctggccgaactgatggtaccaggtgtcccacccgtatcactcataatatgaccagaggaggagctgatgatgctgtccgcggaactgctgccggctgccgcgctaatgggcaccttgaggtatctgaaaaataaataagcaatagaataacgccaatgagagtaacaatccgcaatacaaacctctccacctcatggttgagtggcatcaagacgtggttttccagagcacctggtcccgaaggcggcacatttgcccgctcccacttgaaggcggccttgaccttggtccacttggacaccttggccttgttgtcgctgtaggtgctttgacgcctcaggatatatggtcgcgaggagctcagctttagactgggacgatcgcccttcatgaacacgtttatgtcctcctccatcatggacttgctacgctcgcgaatactgtataacaaagtgtaattttgtttttgaattatattcatacgcaaaaaatcataatcaccgtttaaactttccctgcttgaagggcggcaccacctcagtgcccatcagagattctagccaggtaagggagtgctccagatcgaactgatggtcagtattgttggagcgaggcggcttggtgggtggatgctgattggcaacttgactagtggaaggaacatcgtcatcatcaacaactgtcagctcagcttcccgttcacccgcctcgttgtcggtgatggtggctagtcggtgctccagaaatccctccagcaaagcgtacgtgcgagtcagctcatccatggcttcaattgccgagttgaggcgagttttcagcggttcgatggtgccccgatccgcccgatagggctggcacttggagcaagagtgcttacccagttcgcaaacgggcagatccttggcctctctcctctcgaatttaggggaggcggagagattgcgggcacgggaggccaccgccggaaactggaaaatgttctcttccgtgcgaccgcacatcgccggcggagcggtgggcaaggactcatagtgcaggacattctgccgggatcgcgttcgtcggggttttggcggtggatgcggcggcggaggtggcttgtcccactccatctcgatatcgctcaataggaacttgtttgtttactctgcccgattcgccactaaaaacgcacacaagaaaagaatatccgagaattatcaaaatcgggagattgtttatagaagaggaagaccaatgtggaacgtccgccgccaagcacacacacacacacaaacacacacacacatacaaacgagtcctaaagtgtaacgattaagtccgcgaaatgtaaacaatattttcgaaaatcccatttcagcacgttttcccacatgtgcgaaagttttgaatctttcccaaaaatatgcacgcgtgtggtcacttaaccgaaacggagaaccgattcggaatgcactgtgttattgtgttttgggtcttgattacgcttttggctcaacaactggatgccatcgtgcgtcgggaggcccgccgaagaacaaataaaagcacgccgcaaaccaaactatttataaaacgctgacactcttttgtttgcctccccatggcgatcgcactacgccaccacacacacccaatgtgccgctggcccccttctcgattccccatcgccaagtgcgcaacacttcctttattccacttttaggttacacgcaattaatatttccaatttatgcgaaagtgcacgcactcgcgaaagaaatgtgctggatggatggatggacggacgtggaccggtggatcagtgggtgggtgggtgaatgggtggatggctggtgctgggatcagatcatgtgtatctgaagtcggcggcccccattactttcgccactttccgaacgttatatcgaaactgttgccacacattgaatacacacatttttcttttcttcgctcgacttttcttcctggctgcgcttcttttgtttaatgggtttatgcgcaaggttgtcggtctatttttggtgttttgttgaaaggaaaaacaataacaaattattacttgcacttttcctacttgcacactcggtcgtccgacccgccgcggaattt

SEQ ID NO: 20405 - DNA, 5004 bp, DROSOPHILA
atggagtgggacaagccacctccgccgccgcatccaccgccaaaaccccgacgaacgcgatcccggcagaatgtcctgcactatgagtccttgcccaccgctccgccggcgatgtgcggtcgcacggaagagaacattttccagtttccggcggtggcctcccgtgcccgcaatctctccgcctcccctaaattcgagaggagagaggccaaggatctgcccgtttgcgaactgggtaagcactcttgctccaagtgccagccctatcgggcggatcggggcaccatcgaaccgctgaaaactcgcctcaactcggcaattgaagccatggatgagctgactcgcacgtacgctttgctggagggatttctggagcaccgactagccaccatcaccgacaacgaggcgggtgaacgggaagctgagctgacagttgttgatgatgacgatgttccttccactagtcaagttgccaatcagcatccacccaccaagccgcctcgctccaacaatactgaccatcagttcgatctggagcactcccttacctggctagaatctctgatgggcactgaggtggtgccgcccttcaagcagggaaagtttaaacgtattcgcgagcgtagcaagtccatgatggaggaggacataaacgtgttcatgaagggcgatcgtcccagtctaaagctgagctcctcgcgaccatatatcctgaggcgtcaaagcacctacagcgacaacaaggccaaggtgtccaagtggaccaaggtcaaggccgccttcaagtgggagcgggcaaatgtgccgccttcgggaccaggtgctctggaaaaccacgtcttgatgccactcaaccatgaggtggagagatacctcaaggtgcccattagcgcggcagccggcagcagttccgcggacagcatcatcagctcctcctctggtcatattatgagtgatacgggtgggacacctggtaccatcagttcggccagctccatggatgatcttgaggccaccacccgacagaattatcgtcgtgattcctctaaaagtgatacccgctgcgaatcccgcgactccaactttgaggtggagttacgaaaatccgctactgacgaacgcctggacaatattaaatcttcagctccgccactaccaatcaaatcatcatccagcaagtcattgcgaaggtcgaaagccttctccgactttgaggtcctgccagaggatcatgtggcggagattaaggctaccagcagtcgtcgacaaaaggtgccaccgagtccactgaatctcaaccaggtgaaccagatgtatagtgatctgccacaactgcactctccgctcaagagtcccaaggattcgcgcatgcgtcgtgtccattcgccggggacctcctcggtgcccagcagtccttccaggcaatcggatttctttggtgaatttgagagcgaggatctatccagtggtgatttctcggaacccactacgccaaactgtaagaatttcccacagaacgccgatgacgagatatttcaacattatcaacttctcgtactcaaactagattcagagtttaagggcaagcaactcgagttagagcgttccagcgccagcaaccgcagtgtcaaactgggaagtggagcagccggaggaggagctggtagtggaaagcgcagcagcgaggagcactcgcccacccaactgttgcacaacgaactcatgtccacagcccagctggagcagaatcttaccccacagttcaaaaagaagctaaccaagtggcgggccaagcagcaaaattgctctgcaggatcaatcacctcatcagaaccagcagcaagtcccacggccaagagccaaagtggggatgttaagcccaagattgactggaatctgtggagcatgggtcaagtgaagttggagggccaaggattgtgcgctttgcctgatcagaaggatctgcccgagaagtttcagaagaagttggagcagtggaatcggttgaagtgcgctcctggtggcggcactacctcggacaatgactccctgaagcgaggatccaagcacagtcagagtacaagaaggggatccgatgacgatcgatggtacaagcataggccgcacgagaaagagaaattgtcccgcctaaaggccattgtggtaccggatcataccaagaaaattgaggtcaagacttcggatggagaggtgatgaagtttgagggcatctcgaggaagttcactaggaagctttacgagtgggagaaagctaggggaatcgggccggaagcatccacgtttgccctgctgcatcctggttactgtcccatagatgtgaggcgcatcaacaaggagtgcaataaagtggcagcggatcactccccgactctcagccgttcactgtcccttgacagtgtgtcacccaactgcaacctggcccaggccatctcccagcaggcttcatccctttctctaaacgacgtcaacgatctgaaggaagtcgaggacaccgacgccctcaccgatcacgagttcaaaaagtacgacgagccggaggctgtgatggtggaggtggaggagcacattcatgacaccgcctctccactggtcaccgctcacactctggtggagcagcagacgcccatatataagtacgaggaggtgcagtgtaacgactatgtcaattcgcgtcgcgtccagagctttgagtcccacacaaatctggcccccttgctgggagcactgaaacgtgccgatgagctgtttggccaactgaagaatgcttcgcccgatctgctagaacacccgtccatgcgggactgccaggccgcattacttagcattcgtagcatttatccgtactactccaacaacctgatgagggcgggcgtgctcaacgccatatccgatgtccagagcgaactgggacgactaaccgagctgagccaaaaatcgcctttggacgaagcctgctgccaagaaaccatgcaagagcgaacgctggagtatctggaggaactccaaggactgtatgaatgcctgcagtgccttaagctgagtatacagggtggaagcaaccggtatccccgagacttagtgccggatattaacatcaccagcgaggatgggcagcagttggactccagttcggcctatgccacctgcgacaactccagccgggatcgattggctcaggatgacaacagtgctagtgcagcttcaccgatggagcatgaaacggagactagcaccacaacgggcactttgtgccgatccagtttgcccaccgtgaatgccaatccgattgccaataatggtgcaaccagtgcaagtgcttctgctaagaaaaaactgctgcgactgcgaaaaatgggttcccggcagaacagcaagacggagagcgacagcagcgatgcggatacccactcagttttggagacaccgcgccgattgcgccgcaagaatttccggctgaagcagcgttccttggatgatgacttccggttgagctcgacgacaaatgaacatgatgtggctactgccagagaagacatagtctacgggtcactgaaggttaagccaggcgaactcattgagcagagtcagtgcgtggcacctgctccagtgcacctcgttttacatgatccatctttatcttcctccgcatccaccactcctctcacttcaaccactccttcctcaatagttactccacccacaaagctgggagcctttattcctcctcctctgccggaacacaatcgaacatacaacactaatgccaatgtcttcgtgaagaccaaacggaaactcttcactactatcccaaaaccaagcgccgcggaaggcctagctgtgatagaaaaggagctggacagtcccacggaggagaaatcggaaaaggtggacagacctgggaagtcaagatgccctctcaagccccttaatctgtacaagtccattagtttggaccgtataacacaaccgcccagcaaagaagaactccggaaatgtcaaagtagcgaacacttccggcggggaatcctatttgtgcgaccgccactggctagtgatagcatcgagagattgtccaagaaacatcaggagttaaacaatcctccagttccgcctcggaaagctcatctttacaagaaaaactctttgcacaagtcacacagtgcaaatgcgagcaacaagattgagcacaagatagccaagactagctcaggacccagtttctcccgggtgcatcctccgccaccgtcgcctgttccgctaactctacccaataaacaagataacactctgccacgaatccagcgtaaacatcccaatactccaaccaaggccaagcagttcgagtttccgccacctcagattcttgcgccggaacgtccagtcactcctctttcggagagagccatacgcctccagttggccaaggcgcagtttcttcaaagtgctccagttactccccgccagggtccccaaactccaactaaggcaacggaatctgtggtgctccaaaagagcatcagtgcgggcagcatgaggggtggagcagggggaggagcagctgtccatgaggcggcacagcaacagcattatcatgacacatccacggatcaggaaagtgtgggccactccagtgcctacgatagtttgcccagagcagtgagccgaagtgccaagatttctagtaaactgggattcgccactttaacatcaaagttacgaaggggcaacaaaaagcccaagaatccacctcctagtcctggtagcgccttatccgccctgtgtcggcaaaccctaatggccgatgtcatagccataccacaggctttcggaacggagaagcctccaccaagtcccacaggacgaaatgtctcaaagtcgcagagcacgccgcaggctgctggaccttcgaatatcaatttcgaagggattcccaagtcgctgagcgaacaatatgtccgccagctcaaggagagcgacgtctag

SEQ ID NO: 20406 - protein, 1667 aa, DROSOPHILA
MEWDKPPPPPHPPPKPRRTRSRQNVLHYESLPTAPPAMCGRTEENIFQFPAVASRARNLSASPKFERREAKDLPVCELGKHSCSKCQPYRADRGTIEPLKTRLNSAIEAMDELTRTYALLEGFLEHRLATITDNEAGEREAELTVVDDDDVPSTSQVANQHPPTKPPRSNNTDHQFDLEHSLTWLESLMGTEVVPPFKQGKFKRIRERSKSMMEEDINVFMKGDRPSLKLSSSRPYILRRQSTYSDNKAKVSKWTKVKAAFKWERANVPPSGPGALENHVLMPLNHEVERYLKVPISAAAGSSSADSIISSSSGHIMSDTGGTPGTISSASSMDDLEATTRQNYRRDSSKSDTRCESRDSNFEVELRKSATDERLDNIKSSAPPLPIKSSSSKSLRRSKAFSDFEVLPEDHVAEIKATSSRRQKVPPSPLNLNQVNQMYSDLPQLHSPLKSPKDSRMRRVHSPGTSSVPSSPSRQSDFFGEFESEDLSSGDFSEPTTPNCKNFPQNADDEIFQHYQLLVLKLDSEFKGKQLELERSSASNRSVKLGSGAAGGGAGSGKRSSEEHSPTQLLHNELMSTAQLEQNLTPQFKKKLTKWRAKQQNCSAGSITSSEPAASPTAKSQSGDVKPKIDWNLWSMGQVKLEGQGLCALPDQKDLPEKFQKKLEQWNRLKCAPGGGTTSDNDSLKRGSKHSQSTRRGSDDDRWYKHRPHEKEKLSRLKAIVVPDHTKKIEVKTSDGEVMKFEGISRKFTRKLYEWEKARGIGPEASTFALLHPGYCPIDVRRINKECNKVAADHSPTLSRSLSLDSVSPNCNLAQAISQQASSLSLNDVNDLKEVEDTDALTDHEFKKYDEPEAVMVEVEEHIHDTASPLVTAHTLVEQQTPIYKYEEVQCNDYVNSRRVQSFESHTNLAPLLGALKRADELFGQLKNASPDLLEHPSMRDCQAALLSIRSIYPYYSNNLMRAGVLNAISDVQSELGRLTELSQKSPLDEACCQETMQERTLEYLEELQGLYECLQCLKLSIQGGSNRYPRDLVPDINITSEDGQQLDSSSAYATCDNSSRDRLAQDDNSASAASPMEHETETSTTTGTLCRSSLPTVNANPIANNGATSASASAKKKLLRLRKMGSRQNSKTESDSSDADTHSVLETPRRLRRKNFRLKQRSLDDDFRLSSTTNEHDVATAREDIVYGSLKVKPGELIEQSQCVAPAPVHLVLHDPSLSSSASTTPLTSTTPSSIVTPPTKLGAFIPPPLPEHNRTYNTNANVFVKTKRKLFTTIPKPSAAEGLAVIEKELDSPTEEKSEKVDRPGKSRCPLKPLNLYKSISLDRITQPPSKEELRKCQSSEHFRRGILFVRPPLASDSIERLSKKHQELNNPPVPPRKAHLYKKNSLHKSHSANASNKIEHKIAKTSSGPSFSRVHPPPPSPVPLTLPNKQDNTLPRIQRKHPNTPTKAKQFEFPPPQILAPERPVTPLSERAIRLQLAKAQFLQSAPVTPRQGPQTPTKATESVVLQKSISAGSMRGGAGGGAAVHEAAQQQHYHDTSTDQESVGHSSAYDSLPRAVSRSAKISSKLGFATLTSKLRRGNKKPKNPPPSPGSALSALCRQTLMADVIAIPQAFGTEKPPPSPTGRNVSKSQSTPQAAGPSNINFEGIPKSLSEQYVRQLKESDV

SEQ ID NO: 20407 - DNA, 2946 bp, DROSOPHILA
tttaaacagctagcattggcttttaaagcacaagtactctttaatttatcttatttgtttgggcaatttgtttttgatgctataagaaacatttacgaactgataagaaaagtattactttttaaatttatttttctatacttctactgactttttacattttcaagatctgtggcggctcctcttaaaaatcgcgtaagttttgctcaaagctattatcaggcgtggcaaggtggcttatgtgaatttctattgaaaattatgtttgtgggtcgacgtttatagcgacaacgcatttggccaaaaaaaactttttccaacaaaacaaaaaggaagcccgtagagaatgaggggaagtgctcctaacttcacgatacccgcaactcaattttgctgcattgtggccgccggtcccccaatttgccccaactgcctgccggcaacttttataatcagtttcaagtttgttaagctttgtaataatttgttgagatttggtgcgaaatttttcgatttcgtttctttttcgcaaacaaacttgttgtgaattgtgccgtgggctcaagtctgccaacttagcggaggcactttgacaacacatcggaaaatggtggtgcaggcttccgcctgcgtcaataatcgggtggcaagtggcaggtagcgtgcgtctgactgcacttgaaggcagctccaattgggcggcctaattgaagcggttcctgttcgggcgccacttcaacatgatggcttgaacggccgggcggagcaaatcaagtcgtatcaaattaggcgacgtgaataagtattaaactgggctaaaacagatgttatgatgtttaaattcgatttattgcatgtaatatatataatcttgtgtaaacttgagattttttttacattttgaaatttttttaaaagcaataaataattacttgtctatagcaacttcagttggcatttgctaataactgctgatggaaattaattgaaagaatttgttctatgcccgtcggattatcttataggtatcgcaggtgcagatgccacgaaaacgactaaatacgaagacaaatggctctccgcaggacttaaggagctgatttttctgtgcgtgcacaaaagctgtgcgaagggagtattgcacctcatcgtgccatgagttatcagccgattcttccaccaaatacgtgtggaagacattgagcacctgaagcgatcgttccatgcgaggtgttcgaggcaatgccagtaactgaatatatggacgaaactttatccagcgctggcagtccttaatgtccacatcagtgcccagatcgataatcattagcttgcagtcgtgatcatgaatggccctcaagatgtccagctccatgggtcccttgaagcacttctgcagctcctcagtgatggtgaagcccagttcgtgactgggagtttgcatggtccaaggatagcgccgattggcaaagtcgtacgccaacttctggcgacgctcctgctccatcctcagtttgtttaccacctcatctatgggtctaatgtcccgggatccatggcgcagaaagtccacctgattcgacgccgttcgctcctccacctcctggtttaaggcattctcagcatcctcgttctcgatctcctccctttgggctcctttgcagcagcgcagctcatgtggcggcatgtagaaaggaaagcccacctgggacagatagatatgccaatccagtcgattgaagggctgccggggcacaaagaattcgtccggcttggtctcgatgcgacagacattctcgtccaggatcaatggccatagcacgtcgaagaaggggctacccagcgttcgtttgacttcggaggtattcattttgggtacttggaatttctattcatgtaatttggcctggctagcaaatgtgtgtctatggcagaatttccgttgcctcgctatcaaatgcttaatagggtgacacaaatctgctggcatctacattaaaatacacctagaaatatttggatttcttaatttcagcccaaaacttaatatacattatttcaacagatttttacgtatattaacatgtttacagagtctttagtttcgtagcttaaaataagaattaaaatttataaaatgtatatatgcttattatcttttttcaaaaaattcgcagcagtgaaagcacatcccttcctatcagcgaaataaatcagctactggcacgccccctaataacaaagccctcccacatttttctatagctaaacttgtttgtttgcatttgttgccaaatttatgcgcactcacaggcaataacggtaagtaagtattctcatcgggaatcggcaacaacaatttgcgtaaattttacgacattccatgccgtatattcacggtagccgacgatcgccattattttatgagctgaaacagtgaggtgaaacaggattttatgacggaatgcaggcgcaacaagatggccgcgattttcattatgccccagttcgaacatacatacatatatattagtttaaggagggcgtggcagatccgaaggggaaatggctgtgacaacggtgacgagttttcgggctcattagcttttatggctttgcttttattgctcgcggcgtggcagctttaatttcaaacacaaagtgttgcctatcgcagggcgctcgggcgcctggtttttggtcctccgcatgtgagcaataaattttcataaatcaattgttcgtgccacgttgaacacaatcagtgggcttacaaatcgaaggcacctagcaaaaatccaatccacaaaaggtttgaatttagatttatgtcggtgcaccgaaaaccgagtgacgaatgcctattttacgcctcgatgttcaaacacttattgttttaatattcagcgccagtgcgaaattttgattcgaacccacgattttaat

SEQ ID NO: 20408 - DNA, 946 bp, DROSOPHILA
gcaacggaaattctgccatagacacacatttgctagccaggccaaattacatgaatagaaattccaagtacccaaaatgaatacctccgaagtcaaacgaacgctgggtagccccttcttcgacgtgctatggccattgatcctggacgagaatgtctgtcgcatcgagaccaagccggacgaattctttgtgccccggcagcccttcaatcgactggattggcatatctatctgtcccaggtgggctttcctttctacatgccgccacatgagctgcgctgctgcaaaggagcccaaagggaggagatcgagaacgaggatgctgagaatgccttaaaccaggaggtggaggagcgaacggcgtcgaatcaggtggactttctgcgccatggatcccgggacattagacccatagatgaggtggtaaacaaactgaggatggagcaggagcgtcgccagaagttggcgtacgactttgccaatcggcgctatccttggaccatgcaaactcccagtcacgaactgggcttcaccatcactgaggagctgcagaagtgcttcaagggacccatggagctggacatcttgagggccattcatgatcacgactgcaagctaatgattatcgatctgggcactgatgtggacattaaggactgccagcgctggataaagtttcgtccatatattcagttactggcattgcctcgaacacctcgcatggaacgatcgcttcaggtgctcaatgtcttccacacgtatttggtggaagaatcggctgataactcatggcacgatgaggtgcaatactcccttcgcacagcttttgtgcacgcacagaaaaatcagctccttaagtcctgcggagagccatttgtcttcgtatttagtcgttttcgtggcatctgcacctgcgatacctataagataatccgacgggcatag

SEQ ID NO: 20409 - protein, 289 aa, DROSOPHILA
MNTSEVKRTLGSPFFDVLWPLILDENVCRIETKPDEFFVPRQPFNRLDWHIYLSQVGFPFYMPPHELRCCKGAQREEIENEDAENALNQEVEERTASNQVDFLRHGSRDIRPIDEVVNKLRMEQERRQKLAYDFANRRYPWTMQTPSHELGFTITEELQKCFKGPMELDILRAIHDHDCKLMIIDLGTDVDIKDCQRWIKFRPYIQLLALPRTPRMERSLQVLNVFHTYLVEESADNSWHDEVQYSLRTAFVHAQKNQLLKSCGEPFVFVFSRFRGICTCDTYKIIRRA

SEQ ID NO: 20410 - DNA, 3934 bp, DROSOPHILA
cccattggcggtcgctatgatccgtcgatgaccttctcggagaacgtgaatctctcggagcccatcctgtcccgtttcgatgtgctgtgcgtggtgaaggacgaatttgaccccatgcaggatcagcagctcgccaaattcgtggtacactcgcatatgaagcatcacccgagtgaggaggagcagccggagttggaggaaccacagctgaagaccgttgatgagatcccgcaggacttgttgcgacaatacattgtatacgctaaggagaacattcggcccaagctaacggtaagcgaacttattgaaatcacaggaaaagtgtaacaacatttccgtttcatacagaacatcgacgaggacaagatcgccaagatgtacgcccagctgcgacaggagtcttttgccacgggctcactgcccattacggtgcgtcacattgagagtgtcatccgaatgtccgaagcgcacgcgcggatgcatctgcgcgaaaacgtaatggaggcagatgtcagcatggccatccgcatgatgttggagagctttatcgaggcgcagaagttcagcgttatgaagaagatgcgcagcacattccagaagtacctgtccttccaaaaggaccattccgagctgctgttctttattctgcgacagctgacgctcgaccagctcgcctacattcgctgcaaggacgggcctggcgccacacatgtggagattatggagcgggatttgatcgaacgggctaagcagctggatattgtaaacctgaagccgttctacgaatcagatctgtttcgcacaaatggcttctcttacgatcccaagcgacgcatcatccttcaaattgtggtcgacggcaacacagcttaagtttcagccatttacttcatctcatttagttatagtattcatgttttgttacccccattttcggtctaataaagtttgatatacttatgtatgtatttatactaaaataggtatttgaattgaaatttatacttccgtaaatattttttattgtgcatacaaatcagccccagagtatgtcaatcgttgttcccttcgatgcccatggctttgtcgaaatcttcctcgctaatcttgttctttttcagccgcttgaagagccgaatatcgctggccagttcatcgaggtcctcctggctgaactgctgcctcttttttcccttcccggacctgctcgcctccgcctctgccgctttctttcgctgcttcttcgccttgcgcagctccttcttagacttggcatccagttttgccttctttgtctgatcccaggactcaacacgctttttgtgctgcttttggcccggccagcttcccgtttgctcgtaagtttccattttcttttgccggacttgttctttctgggcgtttttgtaggtaagtttggataaatccacttcaaaagcaggcgccacatagccgccgccctggtagttctttagctccggcatgcgtggcagttgcaggagaccgtaagcagtggccatcttgcccaggtccagatcctttagtcgcagaatagcgctgcattcgtgtttggtgtatgctctaacatgggaaacaaaagcgcgcatgcctttgtcatagacgcccttgtcggccgcctgcagccgatggagttgatctaagacggctggtagcttctttttttcacgatctgcatcctcagcctcctcggttagcagtttagttagctccactttctggttgatcttcaggaagtgcacataggcatcctcgctgggcaggagaaacaccagagcgttgccctcgtttccctgccgagccgtgcgacctacacggtgtacaaagctggaggcagttgatggtggatcccactgcactacccactcgatctcaggtacatccaaaccacgtgcgaggacatctgtgcagaggagtacggcctgtggagtgttccgaaacttctccaccacattggccctcttgtttttcatctttccgtggattcctagcactgtgcgtttgggcaaaagaggcggcagggcctcagcccaatactccacacaggcgcaggtggggaaaaagaccattacctttccaataacggtggcgggtgaactgaggaactccagcagggccacaaactttagttctggctcgacaatcctgtagaagttctgcaggcgggctggagtgtttacggatgccttctctttgactgatacgagaacaggatttctcaaccccgcacggattaagtccgtaacctcggtagtctgtgtggcggaaaagagcccagttcgacgttggcggggcagatagcccagtatgttatttacacttgttttaaagcccaagtccaacaggcggtcagcttcgtctaagacgagaaactccaaactcttcacttgagccgccagattaagatcatctcctttgcgctgaaatagatcctccagccgaccgggagtgcacaccagtatacacggcgtttccctacgcagcgtggcaatgtcctcttcaatgctgttgccgcctacaatcaactgttgattcaggtgctccaagtcttcgtgttccaaaaactgggctaggacctcggagatttggcgcgccagttcccgggttggtgagatgacgagggcacctatttccttggggccccacggggtctccttgtgccgtctctggaggatttctagcatgggcacaaggaaggctagcgttttaccactaccagtaacagcctccgctgagacatccttccgggccagaagtagcggtatggccgccgtctggacgggcgtcatctgctggaagccgaagctctgcaccacttgaagcactgcatctgagaggggcggtttgtccaacgaagaccacttctttcgagacattttgtggtttggtttgtcaacaaaaacatgtgcgcgatagtgtgaccatttcacacccctggcgaaaagaatggcaacgccggcacctaactttgaaatgcgcgccggattgaaagcattgccagcacaaataagtaccagcgtagtcacttatcgacttatacgcgattactattggcgcgaaatggcagagtttcgaaatccgaaacataaaaaagtcttgccacagccttgacacttgcgcctgcatctccaacaccagctgccacggctttcactcgcaattctattgcacccacccacgagcgcattcaaaaaaagcaaccacacacgctgtttgttgttctgctgcttgtatggattccaaatcgtccgaaaaaagcgtgtgccatctgtcgcctggcgctgcatttccaaaatatcgatgcgaataaaagaaaaaatcggaagtaaaaagcgttcgtcgtattcggtttggctcgtcaacaaactgggatagcgacagcgaggggaatcgtgaggaggattggaggacgaggtgtttagaccggaccaacaggctaaacgaccgaccgcccgccttggctgaaagaggagagcacaacgtttttggacgcgtgtggccaaagttaatgaagcgtttaagaattaacttgtggccaaacggagaaaaaaaggcccgaacagttaggggcgagaatgagactcaaaaaaagggattatggctgcttattggcgtcaaaaaatgctgtataaaaaaggatggtcagtggtcaagtgtttcataaaacaaaataccagcacgttctagaatacatcacaaagttgcatattcaaatacaaatgtattttatccttaaggcaaaccaagacaatacgattacttacaaaaccattttaacaataactctgaacacgaaactgaaggagtcacatagaacacagagatcgcattggcattgatctattttcctcataaatatgtattaaattagaggattccctttcatatttaatttcttttgtgcccaaaggaataa

SEQ ID NO: 20411 - DNA, 1934 bp, DROSOPHILA
ctatcgcgcacatgtttttgttgacaaaccaaaccacaaaatgtctcgaaagaagtggtcttcgttggacaaaccgcccctctcagatgcagtgcttcaagtggtgcagagcttcggcttccagcagatgacgcccgtccagacggcggccataccgctacttctggcccggaaggatgtctcagcggaggctgttactggtagtggtaaaacgctagccttccttgtgcccatgctagaaatcctccagagacggcacaaggagaccccgtggggccccaaggaaataggtgccctcgtcatctcaccaacccgggaactggcgcgccaaatctccgaggtcctagcccagtttttggaacacgaagacttggagcacctgaatcaacagttgattgtaggcggcaacagcattgaagaggacattgccacgctgcgtagggaaacgccgtgtatactggtgtgcactcccggtcggctggaggatctatttcagcgcaaaggagatgatcttaatctggcggctcaagtgaagagtttggagtttctcgtcttagacgaagctgaccgcctgttggacttgggctttaaaacaagtgtaaataacatactgggctatctgccccgccaacgtcgaactgggctcttttccgccacacagactaccgaggttacggacttaatccgtgcggggttgagaaatcctgttctcgtatcagtcaaagagaaggcatccgtaaacactccagcccgcctgcagaacttctacaggattgtcgagccagaactaaagtttgtggccctgctggagttcctcagttcacccgccaccgttattggaaaggtaatggtctttttccccacctgcgcctgtgtggagtattgggctgaggccctgccgcctcttttgcccaaacgcacagtgctaggaatccacggaaagatgaaaaacaagagggccaatgtggtggagaagtttcggaacactccacaggccgtactcctctgcacagatgtcctcgcacgtggtttggatgtacctgagatcgagtgggtagtgcagtgggatccaccatcaactgcctccagctttgtacaccgtgtaggtcgcacggctcggcagggaaacgagggcaacgctctggtgtttctcctgcccagcgaggatgcctatgtgcacttcctgaagatcaaccagaaagtggagctaactaaactgctaaccgaggaggctgaggatgcagatcgtgaaaaaaagaagctaccagccgtcttagatcaactccatcggctgcaggcggccgacaagggcgtctatgacaaaggcatgcgcgcttttgtttcccatgttagagcatacaccaaacacgaatgcagcgctattctgcgactaaaggatctggacctgggcaagatggccactgcttacggtctcctgcaactgccacgcatgccggagctaaagaactaccagggcggcggctatgtggcgcctgcttttgaagtggatttatccaaacttacctacaaaaacgcccagaaagaacaagtccggcaaaagaaaatggaaacttacgagcaaacgggaagctggccgggccaaaagcagcacaaaaagcgtgttgagtcctgggatcagacaaagaaggcaaaactggatgccaagtctaagaaggagctgcgcaaggcgaagaagcagcgaaagaaagcggcagaggcggaggcgagcaggtccgggaagggaaaaaagaggcagcagttcagccaggaggacctcgatgaactggccagcgatattcggctcttcaagcggctgaaaaagaacaagattagcgaggaagatttcgacaaagccatgggcatcgaagggaacaacgattgacatactctggggctgatttgtatgcacaataaaaaatatttacggaagtata

SEQ ID NO: 20412 - protein, 613 aa, DROSOPHILA
MSRKKWSSLDKPPLSDAVLQVVQSFGFQQMTPVQTAAIPLLLARKDVSAEAVTGSGKTLAFLVPMLEILQRRHKETPWGPKEIGALVISPTRELARQISEVLAQFLEHEDLEHLNQQLIVGGNSIEEDIATLRRETPCILVCTPGRLEDLFQRKGDDLNLAAQVKSLEFLVLDEADRLLDLGFKTSVNNILGYLPRQRRTGLFSATQTTEVTDLIRAGLRNPVLVSVKEKASVNTPARLQNFYRIVEPELKFVALLEFLSSPATVIGKVMVFFPTCACVEYWAEALPPLLPKRTVLGIHGKMKNKRANVVEKFRNTPQAVLLCTDVLARGLDVPEIEWVVQWDPPSTASSFVHRVGRTARQGNEGNALVFLLPSEDAYVHFLKINQKVELTKLLTEEAEDADREKKKLPAVLDQLHRLQAADKGVYDKGMRAFVSHVRAYTKHECSAILRLKDLDLGKMATAYGLLQLPRMPELKNYQGGGYVAPAFEVDLSKLTYKNAQKEQVRQKKMETYEQTGSWPGQKQHKKRVESWDQTKKAKLDAKSKKELRKAKKQRKKAAEAEASRSGKGKKRQQFSQEDLDELASDIRLFKRLKKNKISEEDFDKAMGIEGNND

SEQ ID NO: 20413 - DNA, 3651 bp, DROSOPHILA
ggattagaaaaagaagctctcggttccgcacgcgacaacctacggtgggcaaataagactgattgccgagcatcgggtattgcttacacatctcgacgagttgttgagtcactgagtatcggtgttgagcaaaactggaaattccgcatcgtgctgagccaataaggcgcagcttccatcaaaacatttaagaattaatctgccgactctttgatactttgctctcaactaaatcatagttttacttcggctaaagtaaccagtatagtataatctggtagattaagttaagtaaatctttttttggttttcttgcttacctttctttattagcccctacaagcaattgtctataatattgcttaaaatcgttgtttttaagtggatatacccttggtacctcgtaatcaaatgtctagaagccatctgccttctgtgttttgagcgaaaatcccctctctagtaatctttgactaattcgtataaacaaaacaagagcttcaatacaaagagtttacaaattatcatcaatttaattttaagcttatgatcatagatcgaattactattctcaacatggatgggctaacactgatcgaatgtgttaattgataaggtgctaatacgactaaagaaattaaaaattacatttatctttactgataagctagtgagtcaaaaccctgctgttgctcacaactgattttcttgctcttgagtcaaaagtattattaacaagagatctgacatacagccttatttgtttatagttcttattattattactctctgatgagctctcacttgtttaaatcgaattccaaaagcactaataatctattcctctctttagaaaatttgtaatcaatgattgcaaacatctgcactttaagtcataggcttaaagcaagggttttattttagcgcaaagtatacacttaatagattgttggcaccaatgcatgcttgggaaatccaccgactaggaaaaggtaatctattatacgacttaaagatttattgagaattttgtacataaatttccgtgttttcctgtattgtcacattataattatttcagcgcctcacatgaccatattttgacgtacccagtcaatgtgccgtgcaacatcgcaatagataacatacttgctaaggtcgcaaatctctccgtggcgaggcgataaagagaccacaccacgaacgtaccatcgattgttacgcaggacgatcagagcagatcccgagtctccgaagcagggaccatgtgattctgaattgccggcacagacggtccgccgcgtgatgaagtcctccgcccgcttcatctccttgagacactgatcccggggcaccaatcgaacactcactgtcttgggaaaccgcgtcttctgggcactcctgtcgtagccccaaccggctactgctccagtatcgccctcattcggtggcaatcccatattggagccccaaaggcagaggggtcgaatgtacttggtgtacaccatcggagaggtcagcaccagcagaccaacgtccgcatccggaactggattgccctcgtaggcggacggagtcagcacgctggtcacgctaaccagggaggctccattctcaggattctcgttgcgatcatgcctgcccaaatagacccaaagctggctggcgctctttccataaatgcagtgagctgccgtgatcacagtccgtttggagataaccgacaccacgcatttgtatgtagccgtgccaacaccttcgtaaagggccgcgagccaggggtactgaccgcgggtcaccaggtcgcctccgatttgaagaggcgaaaagccctcaacgccgcattcctcaaagtccgaatctattctgggcatgattgaaggaaggaaaggattggggtcattgctcggtgtgctcggcggcggacgccgctgacgcactatttctcttggtgctgacttttgactaattggcgttgaggtggacatggactggcgtcgggtcattgtgcttgaaggggcatcatctgcacaaagtaaaaagaaagatatgagaaaattatcatcaactatatgagatcatctactatatagaatatctttagggtaacaataattatttcaaagtaatttaactaaagatattctatctagttttattattactcacactcctcattttgacacagaacctcgccgttgaattccgcccggacaagtttgggcagctcgtttccaaaatccgtgaaacgcacaaacacctcgccacgttctccgctgtgtatcttttcaaaggccctttccttattgggatacggaatgagtgagcccacagtgtttgcctgcatggggggatatcagaatgttgaatcagttgaaataaacaaatatatatgtaatttgttagggctttacctcaccagttccgtgagcagtgaaaaccacctcccatgataggctgttcacaccagcgcgtggcgccgtgaagacgccaatgtaggctccactgtcctctttgtagtaggagaaatacctctcacaattatgctgcggcacgtgcaacgccgacccgagtttcagattgagacaaaggcccagcaaggtcagccacaagattgtcattgcgacggtaacaaccaatgctgaatggaactgaatgagaactgggatcgaaatcggaatccacaagcgactatcgatgcactccctctccatgtaacagctgatctctcgccagattgcggagcacccccattgagtgatcactggttattcccagccatatcaagtcttcggcttagtactatttttaatcattcaactaactaacagctatttaagaacctggttctccacggaactatttaacagaggagctactgttgagagaaaaatccccatctaagtaaacatgtgacttgttttacaaacccactgtatgtactcgtatatatatgatatgctcgtagctaactgaagaaatattttcttctctttttctgatcttgctcaatttttatagcaaaaaactgttcagtatcaatcgagaactgttgtaaaacacaactttttgtggcttagtttacgcctgacagcaatttaaaatttaaacagctagcattggcttttaaagcacaagtactctttaatttatcttatttgtttgggcaatttgtttttgatgctataagaaacatttacgaactgataagaaaagtattactttttaaatttatttttctatacttctactgactttttacattttcaagatctgtggcggctcctcttaaaaatcgcgtaagttttgctcaaagctattatcaggcgtggcaaggtggcttatgtgaatttctattgaaaattatgtttgtgggtcgacgtttatagcgacaacgcatttggccaaaaaaaactttttccaacaaaacaaaaaggaagcccgtagagaatgaggggaagtgctcctaacttcacgatacccgcaactcaattttgctgcattgtggccgccggtcccccaatttgccccaactgcctgccggcaacttttataatcagtttcaagtttgttaagctttgtaataatttgttgagatttggtgcgaaatttttcgatttcgtttctttttcgcaaacaaacttgttgtga

SEQ ID NO: 20414 - DNA, 1435 bp, DROSOPHILA
ttccattcagcattggttgttaccgtcgcaatgacaatcttgtggctgaccttgctgggcctttgtctcaatctgaaactcgggtcggcgttgcacgtgccgcagcataattgtgagaggtatttctcctactacaaagaggacagtggagcctacattggcgtcttcacggcgccacgcgctggtgtgaacagcctatcatgggaggtggttttcactgctcacggaactggtgaggcaaacactgtgggctcactcattccgtatcccaataaggaaagggcctttgaaaagatacacagcggagaacgtggcgaggtgtttgtgcgtttcacggattttggaaacgagctgcccaaacttgtccgggcggaattcaacggcgaggttctgtgtcaaaatgaggagtatgatgccccttcaagcacaatgacccgacgccagtccatgtccacctcaacgccaattagtcaaaagtcagcaccaagagaaatagtgcgtcagcggcgtccgccgccgagcacaccgagcaatgaccccaatcctttccttccttcaatcatgcccagaatagattcggactttgaggaatgcggcgttgagggcttttcgcctcttcaaatcggaggcgacctggtgacccgcggtcagtacccctggctcgcggccctttacgaaggtgttggcacggctacatacaaatgcgtggtgtcggttatctccaaacggactgtgatcacggcagctcactgcatttatggaaagagcgccagccagctttgggtctatttgggcaggcatgatcgcaacgagaatcctgagaatggagcctccctggttagcgtgaccagcgtgctgactccgtccgcctacgagggcaatccagttccggatgcggacgttggtctgctggtgctgacctctccgatggtgtacaccaagtacattcgacccctctgcctttggggctccaatatgggattgccaccgaatgagggcgatactggagcagtagccggttggggctacgacaggagtgcccagaagacgcggtttcccaagacagtgagtgttcgattggtgccccgggatcagtgtctcaaggagatgaagcgggcggaggacttcatcacgcggcggaccgtctgtgccggcaattcagaatcacatggtccctgcttcggagactcgggatctgctctgatcgtcctgcgtaacaatcgatggtacgttcgtggtgtggtctctttatcgcctcgccacggagagatttgcgaccttagcaagtatgttatctattgcgatgttgcacggcacattgactgggtacgtcaaaatatggtcatgtgaggcgctgaaataattataatgtgacaatacaggaaaacacggaaatttatgtacaaaattctcaataaatctttaagtcgtataa

SEQ ID NO: 20415 - protein, 439 aa, DROSOPHILA
MTILWLTLLGLCLNLKLGSALHVPQHNCERYFSYYKEDSGAYIGVFTAPRAGVNSLSWEVVFTAHGTGEANTVGSLIPYPNKERAFEKIHSGERGEVFVRFTDFGNELPKLVRAEFNGEVLCQNEEYDAPSSTMTRRQSMSTSTPISQKSAPREIVRQRRPPPSTPSNDPNPFLPSIMPRIDSDFEECGVEGFSPLQIGGDLVTRGQYPWLAALYEGVGTATYKCVVSVISKRTVITAAHCIYGKSASQLWVYLGRHDRNENPENGASLVSVTSVLTPSAYEGNPVPDADVGLLVLTSPMVYTKYIRPLCLWGSNMGLPPNEGDTGAVAGWGYDRSAQKTRFPKTVSVRLVPRDQCLKEMKRAEDFITRRTVCAGNSESHGPCFGDSGSALIVLRNNRWYVRGVVSLSPRHGEICDLSKYVIYCDVARHIDWVRQNMVM

SEQ ID NO: 20416 - DNA, 4310 bp, DROSOPHILA
tccagcattccaacctccgcgcagattccaattgcgtcgacgggttcttggtctctttttgaagaaacctttaataacggcaggaaactatacttttctcggggaatgcggtcacaagcactgagttctaggacagtatttgcacaaaaaaataattgattagggttgtctgaaactttataggaacttatcgccttctccacctcaaacccagagataaggtataccaggcctgtttgaatctggccgtaaagtccattgtcatagtcagcaaacacaagtcctgttatttcaccagactcatccaataaatgcataataaaaactattccacctttgttgccattactccattgcgttatctctgatttccatagcacacgggcttttatggatgaaagattaaatccggtgtttaagctgcaaatgggctgaataacggaaaaatatccctctcagaatagtgtatctgcaaagacactagaaccaaaaacactagaatattcaaattattctagtgtctttgctagaactttccgctctctctcgctctggaataaaaattcgagagaggctggagtcacctctagagatacggcgaaaaaatagtgtgccaaaaaatcgtatcgtgtctttggtatcttaattgatttaataaaaatccacgtaacgaatacttactataattgcgttagagttcattttaagacgtttataatttctagaatttgtaattttgttattttcaatcgtaatggccagtactctgtgctttgttgtgaatgacgaacaacggaaacaagccagaagagcaaattttattaacgctacatgagagcgtgagagaatagagaatagtagtcggctagcaatttcaattatttttaagctccaaacagcaaaaagctttataagtacatacatacttgtggaatataatgtatggaatacagaatgggatgatagcatatggataatacgaaataaaaaaaacaatattatcaagaccaggcggttattttatattatttatatgtactcagctaatattacatgtttcagaatcgaaaccaatttacttccactttctccaatgcttttaattttattttaattaagggaagcgtagctgaataacaacccattcacaatatttggaaataacgtatgtaatgtaatgaataaatgtatagcctattcctaatttatgggaaacgtgttttggcgcactgcgcatggaactcagtttgatgagccaatgccggttagctcctgcagctccttgagcaagtgcttattgtactccttgtgattgataggggctacagactgcacagtgagcttgttgcgagtcatgtccccgtaaacctcgttcttgcagcgcagcttaaagatgtgtgaagtgaagttgagtgctgagaaaatctgctcggctttggcagggtcgttctcaagggcctcacccacttcctgcgaagtgtgcccgagaagctgttcaccgacctcgttaaaactgctgacccaacggttggaagtccagtccccgatgctcatctaaaaaaaaggtattgatatcagttaatgaaattgtatttaaagttagaaagctaaatgtttcacagcaaatacatacgttgatcagcagtcggtacttaaagttgggaaacagtgcgttacatttctcgcagcggaactggtcgttgccctcatcgacaaccttcttgttgcagtcgctctgagggcaggctcggtagaaagcattttcctgtttgacaatgtgcaccactgccttgcactggaagtaatcaggcttgtcgccgctgccgagattgcgagcccgcgcatccttaagcgtcatccattcagtagagaagcttcctccgcccgttcgcgccgaaaccatattggcgacactgtcaccacctccattgtcgaaccagccgcgcagcttatgtgcctcgggtatatcggggttaatcttcatgattgagccaccgccgaggctcaaggactttccgccattgaactcgttaatgcgtgttcccttgaccaggatcacaggctgcacatgaccgtcaaagttaacggcatcatccccccaaagggtcaagctgatggccgagttactcatgtccactagggttatgtcccgtttcttgaattccttgtttgtggtgcgagctacgaatgattgcaactcgcccacctccttgcaaattcctattgtgtctaccgctgctttattttccatacccgacacatcggaaataggaacaaggttgtacttaatttccggtatgggatcatcgtcggtatcctcacaaagctggacaactgtttcaccggaaaaagtcatctcgtaggcgttgttcagcgaagagtactgcttgtttgccggtttcaattgacactttgatatatagtacacgctatccacttgaatgaggtcgtagaacttatcgcactgttccttgaaggcagtggcccgaatttcgcccgattcgtccattaaatccatgctgaacaacttgccctcgccgcgggcattgctccaggtgcgaatgccggattttgaggtcacgcgagccttaatcacccacttattttggtagggacttaggctagaaatgggatgtgtcattccactattaatagaggaattcattactatgttattattgttgttgtggctcggttcctttttggcaattggcttggaattagatgttactgctggcttaggcgccagatcctgcttggctgcattttcatacgtaacgggttcgccaattttggacttaacctcggcgccaggattcaccacagttagttcggaaatgatgagaacgcgtctaaaaggaaaacatatgttactatactgtcgaaagtctgttttacagcgtacttactttccggctccgtccttgcctaccagtgaggtcacatatttatctagctggacaatggtgaactcctctaattctccattgtgctgcatcacgttcagctgactggccagcatcgcatagctgttaaagtacttgccgtcggagattaggatgcgatagcgctctgagtccgctgcgctgttaatcttcttgattgccaggatctggagaaccggggcatccacaacctcgccatgcataatgcgctgtggccggtagtacgatgtgttactataccaatccattattttaagctggcatacttacagcaatcacaccagtggacaaagatgccaggaccattttgattataaaaataagttgggcaatttcacaagcaaatataattcatgcgtcgagggctgggtacaaagtgaagctagaagaggcgggaagggcttctgtgtaattttgaatcagttgttgcggaactagttcaatttgctttccagttagagctgtatttcagggcagtaaagttttggttgcttaagagaaaacatttattttactttattattactatttcctacagcaacatattgagaataattgtctattattttgacacatagctttaagcttgacttacattgtttgtgttaatgctcacaactagttattgtaagcatttctatttcaatggaattataaatatttaataactgtgtgatattttattgacacattctttgtattaaagcctacattcagtgccttgtaaactttttaaattgaatggtgtaatatatatatttaaaattttttgtaagctctttaaactcggtgatattttattgacacaaggaaagttgttacagtcgggtgttcttataaacatgtatgcagaagcgggtgtccactgtatgacccagacgttaacagcactgcttatcggaactagaccgcagccctgagttggctcgattagcaaacattttcccgcgcattttcgcacgcgtcgtcacaacaagatcggcggtacaaaacaaaacatattacagataaacgctaagcacaacagacgcacgtaatggacaatcccagttcaccaccgccaaatacgcccagcgatgccgccgaacgccgcgatctgcgggcagcaatgacgtcgccggttggcgactttgagccgttcgagaacgaggacgagatcctgggagatcagaccgttcgcgatgaggccgaggaggaggatggcgaggagctgttcggggacaacatggagaacgattaccggcccatgcctgagctggatcactacgatccggcgctgctggacgacgaggatgacttctcggagatgtcccagggcgatcgctttgccgccgagtcggagatgcgtcgacgcgaccgggccgc

SEQ ID NO: 20417 - DNA, 2113 bp, DROSOPHILA
ccctcgacgcatgaattatatttgcttgtgaaattgcccaacttatttttataatcaaaatggtcctggcatctttgtccactggtgtgattgctcgcattatgcatggcgaggttgtggatgccccggttctccagatcctggcaatcaagaagattaacagcgcagcggactcagagcgctatcgcatcctaatctccgacggcaagtactttaacagctatgcgatgctggccagtcagctgaacgtgatgcagcacaatggagaattagaggagttcaccattgtccagctagataaatatgtgacctcactggtaggcaaggacggagccggaaaacgcgttctcatcatttccgaactaactgtggtgaatcctggcgccgaggttaagtccaaaattggcgaacccgttacgtatgaaaatgcagccaagcaggatctggcgcctaagccagcagtaacatctaattccaagccaattgccaaaaaggaaccgagccacaacaacaataataacatagtaatgaattcctctattaatagtggaatgacacatcccatttctagcctaagtccctaccaaaataagtgggtgattaaggctcgcgtgacctcaaaatccggcattcgcacctggagcaatgcccgcggcgagggcaagttgttcagcatggatttaatggacgaatcgggcgaaattcgggccactgccttcaaggaacagtgcgataagttctacgacctcattcaagtggatagcgtgtactatatatcaaagtgtcaattgaaaccggcaaacaagcagtactcttcgctgaacaacgcctacgagatgactttttccggtgaaacagttgtccagctttgtgaggataccgacgatgatcccataccggaaattaagtacaaccttgttcctatttccgatgtgtcgggtatggaaaataaagcagcggtagacacaataggaatttgcaaggaggtgggcgagttgcaatcattcgtagctcgcaccacaaacaaggaattcaagaaacgggacataaccctagtggacatgagtaactcggccatcagcttgaccctttggggggatgatgccgttaactttgacggtcatgtgcagcctgtgatcctggtcaagggaacacgcattaacgagttcaatggcggaaagtccttgagcctcggcggtggctcaatcatgaagattaaccccgatatacccgaggcacataagctgcgcggctggttcgacaatggaggtggtgacagtgtcgccaatatggtttcggcgcgaacgggcggaggaagcttctctactgaatggatgacgcttaaggatgcgcgggctcgcaatctcggcagcggcgacaagcctgattacttccagtgcaaggcagtggtgcacattgtcaaacaggaaaatgctttctaccgagcctgccctcagagcgactgcaacaagaaggttgtcgatgagggcaacgaccagttccgctgcgagaaatgtaacgcactgtttcccaactttaagtaccgactgctgatcaacatgagcatcggggactggacttccaaccgttgggtcagcagttttaacgaggtcggtgaacagcttctcgggcacacttcgcaggaagtgggtgaggcccttgagaacgaccctgccaaagccgagcagattttctcagcactcaacttcacttcacacatctttaagctgcgctgcaagaacgaggtttacggggacatgactcgcaacaagctcactgtgcagtctgtagcccctatcaatcacaaggagtacaataagcacttgctcaaggagctgcaggagctaaccggcattggctcatcaaactgagttccatgcgcagtgcgccaaaacacgtttcccataaattaggaataggctatacatttattcattacattacatacgttatttccaaatattgtgaatgggttgttattcagctacgcttcccttaattaaaataaaattaaaagcattggagaaagtggaagtaaattggtttcgattctgaaacatgtaatattagctgagtacatataaataatataaaataaccgcctggtcttgat

SEQ ID NO: 20418 - protein, 603 aa, DROSOPHILA
MVLASLSTGVIARIMHGEVVDAPVLQILAIKKINSAADSERYRILISDGKYFNSYAMLASQLNVMQHNGELEEFTIVQLDKYVTSLVGKDGAGKRVLIISELTVVNPGAEVKSKIGEPVTYENAAKQDLAPKPAVTSNSKPIAKKEPSHNNNNNIVMNSSINSGMTHPISSLSPYQNKWVIKARVTSKSGIRTWSNARGEGKLFSMDLMDESGEIRATAFKEQCDKFYDLIQVDSVYYISKCQLKPANKQYSSLNNAYEMTFSGETVVQLCEDTDDDPIPEIKYNLVPISDVSGMENKAAVDTIGICKEVGELQSFVARTTNKEFKKRDITLVDMSNSAISLTLWGDDAVNFDGHVQPVILVKGTRINEFNGGKSLSLGGGSIMKINPDIPEAHKLRGWFDNGGGDSVANMVSARTGGGSFSTEWMTLKDARARNLGSGDKPDYFQCKAVVHIVKQENAFYRACPQSDCNKKVVDEGNDQFRCEKCNALFPNFKYRLLINMSIGDWTSNRWVSSFNEVGEQLLGHTSQEVGEALENDPAKAEQIFSALNFTSHIFKLRCKNEVYGDMTRNKLTVQSVAPINHKEYNKHLLKELQELTGIGSSN

SEQ ID NO: 20419 - DNA, 26542 bp, DROSOPHILA
caggcaatgctggagcgggcgcagctggagcgggacaagcagctggtgatcaactgccgcgagaagcgtcgtctgaaggagcagataggagagcagccgccaccgcaggatagcaaccacaccaagaatccaactactccccccagatccactgatccctggaagcaggtcctccaagatcgcgaccgctttcgggccaactgcaatcgcagctgtttctacaacaattcgcagagctcagcgctctggaaaatatatgccaagtaagatatataagcttataaaatatatactattttataatacctaaatcgtccacagagtggctagcaagttgagctcgcagctaatcgaaagcgtggatgtcgaattccatcgcagtgtaataaattatatcaacgacattgtaggccacaaagtgaactaattattgcaacatcctgcgattcttatctctactgccaatctttttatcagattttacaaaactgaatgtagagctttgtactacttcttttatgggatctcaaatagtaacattatatcgccacaaggtgacaaattatgagtgtagtaaaattaacacaattttcaaattgcaagaaccaaaaatcatataaataaaaaattatagtgtgtacagatgacgagagtatatattttaatatttaattaaagtgaaccctgaaagtaggcaatgatttgtagcacattcttaagattcttcaaaagataagacgtttttctgattagattaagttgtccaagaaggataatagtacgctagtcaattaaataaaataatttcgataatacaaaaaagtttttctcttgatatgccacattttttcttttaaagttaatttgttaatttctttttcaatctatatatgcagcagttctacaaatactaatttaaagaaaaaaaacttcactgtttcgaaaggattttggtttgttccatgacgaccccaaacaattataagttccctttccaattgtgtgaaaagtcattcgcatttaatggttcttcaaaaatcaaattcaatcaatttatacagggtggcagacggcgcttagcaactaactaagttatggctatcgaactagactaaactaggcgtagggttcgtacttaagccgacttgctgccccacttggttacttcgtgtccaattggagcagattgcgaatgtgtggcgtgatgtcaacagtggctagtcaatgtcaagtctgatccttcatggttaagctacgtgctaggcttaatcgctaaactacaactagggcgatgtgtgtgtggtgtggggtcagtgtctgtctgtatctgtcaggtgtatcgtgtattctgtatctgtgtctctggcaatgtgtgggagtaaaaaaaaagtacaataaataggttgttccgtttcgcagctgccgaaggacatcatcatccggttcatccacagggctctggctgaggtggaggtcctggtggatggaaaatcgcatctcagagcaggttggagcaagtcgcctccgcggcggcacagtttgtggagcggggtagaaactggatatgctgccatgtggcgttaaagctaaaataacacggaacattattgcttatggtgctggcaacaaaagtagcaaccactcacagataactctcggccagctggctctctacgagcggcttaatcctggcgtagtccttgtcagcaattgtggtgctgcagtgctgctgcatgtaggagagcgtaaagagttcgttctcgttgaaagacctcagaccgggtattctcaagcgcctggtaagtccaagggcctcataggtattagcctgatcgattcccgatccctggatggcactgcccgcatcgatggcattcacgaagttactcaacgccctcgctgccgttcgagctgcactcagcgttacatggaagctcttcagtgcattactagacagctcattcagctcgtggaccaacctcggtggctgtcctgctgccagacaattaacatccggctgggcataccgaatctccggtgctgcatcactgatatccgtgctctgggtgttgaactgcagcaggaaggtggagaagttatcgatcagggcctccaatatatcagtgcctatgcgggcaaaattcacagctctgcacaaaatggaaaaggaaaagaaatcgaataattagaaagagagatctcatcaaacaatatatatattctgttttacgtacacaggatatcggtagtcatagtaattggagctaatcaacaccttagagaccagcagcatattcagtttattggagtaggcgatggcctgtggattgtcccttgtgtacatctcggaaacaatgctgttggttgcccaaagagagcgggatggatggatgcacggatagatgggttgatcgtggagaaagtgttagaaagtttttggatcagcaaatgtacattgcgcaagacttacacatccagtatggccagcggtcccagcttcttttccatttgcgatcgacggaatgtccaaatccactccaaatgctccacgaaaaacacattattgagtatcagttcgttgtagtattgcgcaagataggtgggttgctgcaatacctcatcgggtatgccaaactgcaggcgcatctcgttcagtttcttttggataaattgcctagccgccggctccagccatttggcttgctccagcgaatctttcaactgattccgcagactgaagaacatcagcttgaggagctcctcgttgccctgggtcttgtttaagccccggctcttggacgtcatcgtttcgaattgctgcctgggtggctgttgctgcaatgcatccaccgcaaagggcagccaatcacgcaccactttgctgcatatgagccacctcggatagctagctgtgcgtccatacaacgcatggtcgaaggtctctgccaaagtgcgatactccttggacaaatgcggcaacattttacgagccagcgaccatacaataaagttgttaataggcctataaacaaagagatttaattaagcgatagctcccagggacttatgtagaattgaacttacttcttatccgaagtggagagtaaaacagatagggcatgcataacctctggatctcgtaccaaaacctcggtgtcttcagtgattttggtttttgggaaaatggcctgcagggactccagaattggcaactaaatgggaatccatattagatcgttataacttaaaagaaattagcctggcttacagatggtgcttttatcttcagatcggccagacgcattagtttatttatcggacgatttgcatcagctttggcgtcctcaatgtgattaacaatgcgacgttcatagtggaaaatatcgtcggcaaatagatccgcttcccgtgaaacgattcctaaataaagatataactttcattacgaataccaacactctcttaagctcgaaacttacccatattgatggcaaagtcccggaggagcagcttatagccacgaaccacttcctcgtcagcatcgttgccatagaagtacttgtccggcagaccaagttcgccctcgtccagggtgatcacatagtcgtggggattactaaagccgttctccacggtgacgcggtagtaaggaaatatgccatgtttggcctgtaggacgaccagaacccgcttgtattcccaggattgcagtcgattggagtcgcggaatgcctgccagccatctagaaattaataaagacgctcaaattagtgggatcatgcgaatagttctggttctatcggtggaaaccccccgtttggattggctatgcgctaatagaaattccccagagccaatagcccatggattttaacaagaaagtatcagttgcatgcacaaattataccatagatccgcaatatacatatatggtatacacaatcaagtttatattgacgaatattggtggtttatggcaattaaaagcgctaaaatgtttggctgcttgaagtttttcggggcgctcaattcgtctcctcttgcaatcataaaatattaaaacaaaaaaaaacaaataaatgataaagagaaaatttggaatgccctttcttaagaagttccttttaaaatcgttgaaaaatgtggctttttacaatatatatcttagctattcaaaatacaatttcacactaagataatgtaaaaaaaaggtacataaatttattttataagctggatgcaatgcagttttttcttattaagcagtatattctgtatttctgaacacttgtttttggtgagatatcaatcaaaagatcaagaaatattacttcaagattattatatatgtaaagtacatgttagtattgccaccttgaaggcaactcgccatagattatcactaatggggatcactcatcagccctacaagtctttgtagacaccatttgacccccatacgattatgactgtcttcctcgcaagcttcatcatccagtcgaatgacatgcagacatagaaattgactgtgtttcagtttgttgacacctgcaattagcacttgatactgatacaaaaaaaagaagcaaaagatacaagaagaaatatatcaaaataccagccgtgctagccggatttcgtagttataacacagagttggattttcgattttgggatttttgggtgttatagttttttaacgatttattgcaaaccactttaattaacttcaattaaagtcaaatcttggccgctatataaaaggtgacagttgttagtgactggcatatcaatccagtgcaacagctccagggcgacagttgcttctcctcctcatccatccatccattcctaccaagtccaacatgaagcagtttgtggtaagtccaaagcgaatcttcacggggatttccagagcaacgtactaagagacttcgataacccttaggttttggccgttctggctgtgattggcggttccctggccgctcctcgtccggatgtcagccatctggcgggatacagctaccaggctggtggttacaatggcaacctggtggccaatcaggtgctcagtgctcccttgaccacggtgaccacctcgtaccagcccacggcagctggtaccaactactacagttcggcaccatccattggtcagcttaatctgggctcctccggttcttctggtgtggtcaactaccaggtgggcggctctggctcgtccagctatcaagtgggctcctcctctgtcggcggtggcatcgtgaacgataacattggcctggccggtctgcagcccggacccaccatcaactacaacgagcaggagtcgtacatcagccatctggccaacttccagcccgcccagatcaacaagcacttctacatccacagtgctcccgaggatcacgatgagcagcagatcgtgcgctatgtgaatgtgggcaggccccagaagaactaccgtgtggtcttcatcaacgctcccacatccaccgccagcaaggccaagatcattgccaacgtggcgcccgttgaggagaagactgccatctatgtcctgtccaagaagtctaatgccctggatgtcaccgccgaggtggtcactcagcgccctgtggccaacaagccggaggtgttcttcgtcaagtataagactcctcaggaggcggcccatgcccagcagaccattcagggtgagttcaaccgttacaatactgtcaaataacaaaatctttaagatcctaattcacttttcaaaacttatcaacttcgaattcttcaaatatgtcactcaaatagccaactatgatgctctgggtggaagctctgagaccagcaacgagggtgtgattcccgtttcctccgtgatcggtagcctgggcgataatggagcctccggagtgttgaccgatgccagcggtagcgtgaacattgtgggcaccggcggagttccaaccgtggatgctggagccagctatgatgccgagggcagccagcgccaggtgatcagcaccgtgactaccggcaccaatgcccaggctacctatctgcccgtgaagccggtgaggaagtaggtgaatcgcctggattccattacataatccgcatccactgccaatgaatgacagacacaatccagcctcggaagattcggactggatgggaaagccccttgggtttggggcccattacagtggaatctcgccggggaaacctttgcgatttttcctatttagttttgccttcggcactaattcatattttttgtgtataatttttttttttttttaaataaaatttaagagttctcataggcattcaaaaaatgtaaagctcatggagttctttttgtcgtggatcgattgaagtcacaattgggcattagtgcaaccatagtgactatagattttcagctttaaatggaaattcctggagtgaattgatctggttgaaccgcctgcatcttgcataatcggaaagcccgcgatgccgcccaagaaataccaaatactaatccatgggacacagcctcaactatttggcaagctgctcataattgttcaatccaatcgactgggcccgttcaacccgttcaaaactcaactcaaaaagccacttgggtaaataaattagcgacttaggggggaaactcaactcggagttggaattggaattgaaatcggaatcggaatagctaacgctatcggtggtcgccaaggtcgccatttgggccaatgcaagtcgcattaaaatacctgagggtattaaataaaaattagccatactaaatatattatgcggcaaatgcggtcacgcccgcaaaacaaatatattatcaattacaaatgggaggagggcagaaatcagttaccaactcccatatctcttgctctctctcggaaatctggcgatctgcatatcaatgggcggcggcggccagatcttttgcataaagataatcacacctactaaataaaacctaccgcgacggacggtagccgccaagagccgaggtccgaagaagattgagatcgaaagatcgaagatttgtccctcgattcgatttctattactgtcatcatcaataaaatgttacataaattttcagcacagcaagcgatcgcgatcgcgatcgcaggtggttataaatatggaatgcctaattgataattatcattttgttcgattttccataatccacgggcgatatgcgatctatgcgatctatctgtgatcgctgatcggctaatggctaaattagtctagtcggattgaaaatcgattggaaactgttagaatacggattactatccattccattgtttgtcaccgcaaagtgtcaatcggttttatgcatttatgctctgtcatcaatcttggcggccataaatccattcaaaggcattattcaaatatgctcgatgagtgcaaattatgttttatgtgtttattttggcaatatttatgcgacctccaaagcgacgagtgaatgttggttcgcgtcttggcttctcagctgactcacccaatggactttgcgttggggtcaccatttatggtgacaaaaatatcgaagcaccagtcgaaatcgatgggaaattccggaaagcgaatgagatggctaatcggagcggtaatgatttgatcttttaaggcaacggaaattaaatgggactcaattctaaatcaataccattttcatttttcataatatataatataatataatatatgtaaaactaaagagttgcaaaagaagtaaatttgaatttatatatttgtatatttctgttacaagcaaatattttttcatgcaactgttttgttttcacttaattatcaagcgttataggattattaaagcaatagtttacattcgtataatgtgctaaacatgattttaaaaggaacttctggataataaggtccttattagcatatatataatatataatatcacatataatatagaaataaatgttagcctgactggcttgcagccgtctccaaatattcattgatcaatccaactgttatagatattcgcaaattaattgataggcccgaaactaatgatagacgtgggcaaacaaactaaaaaaaaaaaaaaaacccagcaaacgtgtttctggacaagattaatgccgccagcggtgatgaggtgccgtttaatgagattcgctaggcccccattcaatagtttcttttttgcatgtaagataggtatatatcagctagttatgaagccgtatatttagatatttgctaatccatcgtgaatgcccagccgaccgccagggtcaccgcaccgctgcggcccagtcaagttcaatgtcagagaagactctttgtccaatggttagtccaagctatggtggtttctattgctgttgctatttcggctgcgttcgttctaatttgaataaattttaggtcagatcacaaggcgtatgccatgccaatggatccataggcccagagaagacgctgatgacgatgctttggatatcgagagcagcggcgacgatgatgttatatgcggcatttgcatttgcataagcggccaaacagcgacgccgacagaggaggcagccatttgacaatcggagcatatttaagacaagtggagcggcccaaaatgcaatcattgcctcgcagcaattcgtcaacgaagcatcccaaacaggagaactaccattaaggattacaaacactcgagaagggattacacatataaaaaaaaaaaaaaaaaaaaaaacaccatgtttgtccaccaagtgctcgtgagctgcctgatcctggtggctttgacccaagcccgtcctcagtacggctacgaacagcccagttcggacatcttcatcggcggtggatcggcgcccgttggtggtgtgggcatcggtggctcctccggtggcggtctggttagcatccagccacaccgtggtggcgacaagtacctgccgccggccagcaccaccctggcgcccatcatcaacaagaaattctatctggtttccgcacccgaggatcacagcaacgatggcaaggtgaagcatctggtcttgggacgtccgcagaagaactaccgcgtggtgttcatcaaggctccagccggcgataatgccaacgtgaagtattccgccgagtttgcgccacaggaggagaagaccgtcatctatgtgctcagcaagaaggataacgatgtggacgccagcgatattgccacgcccgcacccacgcagcccagcaagccggaggtgttcttcatcaagtacaagaccgacgacgaggccaagcaggcgcagcaggagatccagggccagtacgacaagctgggaggcaccaacgagtatcaggaggacaacaatgcccccatcacctcggtgatcggcagcctcgatggcctgaatcccgatggtagctacaactaccgccagatcgccaaccgtccaccagcagtggtgcccaactcgcagtatctgcccagtttgctgaagcactagaggatgtcggtgcatcagtagatcatctctccatcatctaaatcagaaaacaaaacacccattctcgaaccctgttgtgttgtatattcttaagaacgccctcaatatttttttgtatttttttttttgttatatcgaaccgttgttaataaaaagcttatattaaaaaaaaaaaatcataagcaatgtgtttaagtttctcaaagaaatctcgattgccatttcttttatcaagtgaaaattaatgaaaagatgctttggaaaaatcttccagtaatttccaatgtttctattttttcaaaaatctcacatttcttgtttcaccagtccaataaaaccatatgtaaaaataggtatgaaaaaagtcagaaggtcagtcatttaaaaaattaataaaaatcgtataaataaaattgaaatgtctcatcggcgcaattaaattaaaaacgaaatcaaaatccaaatcaaagtcaaagtcaaaaataaatcgaggcagaaacaaaaattttagctttgttttccccagatattcaaatcagcagacacatttcaatatatgtccaaatccaaaaccaaatcggaatcggaattggaattggaatcggtcggtattcacaaatcgaagccaaagctgccgttaaaatttccaacagaaattagcttaaatgaagtgagaaatcaaaataagctcatcaaatttaattaaatagcagagttttatattttgattttggcttatttctctttattttgttgctttgattgggccattaaactgacgctgcataaactcgggccaaagatcgattgattaatgttgaatccggagctaatggcaccccaaagatactccacaaaaattgtggaaattgaaccgaggaaataaaaacagccaagtgcaaaccaattttggacatcagggaagtatatctcttctctttatcggcattagagcattagtattaattgacatttaattgcggcaataaaacaatgtgtgtgtgggaaaaataaaagatactactactacttttggctcacgcaaaaaactttatgcaattcccagctagtcagttgataaataaataatctttttaaatactgattgctatttttgacccccccaatctctttatcaattatcattatccgttgacctcccccaaatgtcatctaagaatgacccaaaaaacaaaaaacaattcatgccaactttaacatcttcataggccactcatctaacccacttatctatgcgtatgccgcatatggctagacaatttttcttaataaaaatcgagcataaatcaaattagccgtaccactttgcttaaatgcgacatgaaagtgtgggaattacgcgccaatttatgcaaatccaatgcacatacacatatacatacaatataaattcgtatatagcctatatatagccattggtgatattttaattgtctcttgttgacaacaacgagcagaaaacgagaaaaagagcccaaattaatctactaatcagcgacgaggctgcgaaccaaatacaactaagtgaattcgaaattgaccgagagatgcagatggtaagcgatatcaactagagttggccaagatcattagtcaatgatgggggcgtcggatgctgggatcaatcgcgcccaaaatgcctacgatccatagagcacatcaatatccgaatcccacctgatgataaatgatctgcagatcggtgatctgaagagcataacgaaaaggtatgtcaaaaccgaagcaaatcaaaatttaattaattacttttaaattaagttaggggattttttggggtaatcgggttttcaagtgaattttcaaggccattcggccatgaacttcttggattaaagaacaaaagagcaaaacggcgttgtaaacaattaaatatagataaaactagtatttaattaaaatatttcattccgaatggcaattgttttactattatttattaattaaattatatactttaacaaggatatggtgaaacttttattttactacaacattaacaaagccaactaatgtaatttaataactttttctgtagcaaagacctagagataacatgtttattatgtaatcgagtaatataaaaaccctgaggcagcttctttctgttcccacattttcacgcacaattaagttttgagccaaaagcaagttcgttgcttaagtcttttgtttggcagcgatttgaggtcgacaaaatatgtgatagagctaattttcacaaattttcattcctatcggtctgtgcaatctaagtagatctcgtttaaaagtgaaccagagatgaaaaacccaagtcagttgtcttctgcaattcgtgaaatgttgaacatatttgtgtggttatcactttcgttgattagtctgtcctgggcacaaggatcgcgttatttaccaccaccgaatccggccatggaacccatcataaccaagcagttttacagcatatcacccgccgaagatcctgaggatctggagccaagaacgaaacacttggtgatcggacagccacgcaggaattaccgagtgattttcatccgcgctccaacgggaaacagcgagcatgtgaaatatacggcggagttggcacctcaggaggagcgaactgtgatctatgtgctgacccggaagcaacaggaattggaggccgccgatattatggcaccgcagcagaagtctcaagtcgaacagaagccggatgtattcttcatcaagtacaaaaccaacgatgaggcagcggctgcccaaagggaaatccaaacgcaatacgatcaacttggtggaaatacggaaatcgcagcgccctatgtggcgcccattaaatcggtgattggagcacttagtagcccccaatatccagcagctccatatccagttcaaagacaatctcctggctatcactatgataggcccgataggtccacaatcttggcgccagtggaacgaactaactgaagcgccgattatatccgcatactatttgcatataattgataagacatttccaccaacgaatttatcacacaactcggcaatcgcgtaaaaagtttttgttttttttttttgtttttttgtttagcataatttttgcaaacttttttatctgatttgctttgtgtttaaaatagatactgacaaaagtgctttgaccctgtgacaaaggagaagaattcgagatgaatttgcaaagggcttatttatttgcccatcaggtggttttatcaaaattattaaaataacatatatatatagataattacaacaaccaataaacaaatatggaatatgaagtacccctttattttcttatatgtatttgtgacattttcgtatttctgaatttcaggggctccgaaatttcgttttaacttgatagtttgccaaaaaaaattgaatcgtaaaaaaaacaatctgcataaattttgcaagtcgcaaccgaaaaaagaaaccgcaaaacggcaatgcagtttttttatgatgtgtctcctctgtggctctgctagtttatcttcttttggatttatttgcatttgcatttaattaatgggattttttttaaagccatttttgggcatcaagtgggcgacctttttttgattggcagcagcaacaatttggcagcaattaatcttgatggttggttggccaaaacgcgaataaaagccaaggtcgcggcgaaaattcgaaactaaaaagttcgattctaagtcgccaaactgagccttttcacacttcattgttttctctaaaatattgagcatttcaaggtggccaaaataatataaataaatcacatattggttttagccaaaagcgcaaacacagacaatgggcctaaatcggccctgcccaaaacgcattcaaattatggcaattatattgaaatttttcatcaacaaaaaaccagtagaaacactcggccaacgatttgtggttttggaatttctgcttttagcagccttaactaaaaatagaccatgacacaacgccatctatgcatattttctcgtataccctttgttggatgtataaaaatgaagagaaataataaaaaaaaacacactaaacactaccaataaatgtaataaaattatgcagctcatagataaagaaatattaaaataatataagtgcctagggtatttcctgttttgtatatatatatattatcaaatcctttgcggcactttgtttgccatgccgccgaacttatcaaaactaatgatataatttatgggctaacaaagatttgtcaaaactgcgaagatcaaagcggaaacctaaagtccaacaataattgaaatgccattgcaacaacagaaagccgactagtttctttaaaactcaaaatgagtttagtttaattcaagaggcagattatgtaagaaagtttatcatcaatctattaattttcatgaatttagagtgaacttttcaaatacaagagtatacagcattcaaaattaaagctctgtatgaaatcaatgccaataaattgctgcgcctgtggcttcaaaaaataataacgctcttagtgatgctgcttaattcctccaacataattaagctcttgttaacaatggcttaatacgtcaaactaaatgccaatggcggaagcaagttctattccaagaaccaaacaagccagcaaaaaagaaatcccaaaaaaatcaagaaaaatcaccggcgaaaagaaaagaaccagtaaaaaaaaaaaataaagaactcactgattctttcagacatttgtttgaacaacgaagatagcaaacaaattgcgtccatcaatcaagatggtcaaagctatagtttcaagtatatgcacacatgttcaaacattcttttttaaatggtgaacgcgattgaaagagaatttccaaaggaaattgaaagcactgcgaatgaaagttggcttacataattccattgcaaattgttttgttgaagaacaacttttgaaaatatctaatcaaatagtccttgaattacatcatatatttttatgtcaaatcacattacctattccttcgctttcaacttgtgaataaacctcacttctcattgaagggccgattaacgaacacatattccgcttctcgaaaaaaaaaaattcccaaaaattttttttatattttaaacaatcctaaaatgaataactccaaacgctcgcgactcagcgacaaggatgaaggtccgtgcaaaattcgaaaagcgaccaacctgtcggataagaaggcaatcgtagatctattctctagtttcgtgaatacacatcattttcgacccaaccccgatggtcagaggattgataaaataattgtaataaaggtgagtgcaatagatcttaaagagtttggagttaactaattactaattcctatagttagtggaacgcttagaaactacagatgtaaatgatcgcaaatttatgcagagtatattgcggcgcgtctatttaaagtgcaccgacttgcgtctatttattcgaaatcagctcaacgatgtattctttcgattgattttcgaaggaactgactttcattgcatcccagaaattctggaaatttactatgagtacgtttttttttttttttcaaagctgctttgatatgttgcttgataaatattttttttcttttttccatattttttttttttttttgaacagtataatcaagggatttactcaaccatatgagactgaacatgagcaactgctctttaagatccttttgcctttgcacaagccgccatcgttaacaaagtattttcatcagctgataaaatgcattattgcattccttaaccaatatccatctttcattgaaaaatatgtcaaaggtcttctacggctctggccgaagacgtcctttactaaggtgacattgtttctaagcgagattgccagaattttggtaataaaaaatgagcaagaggtcaagaaagtcatgctgacgatttttaatcatattgcaaaatgtctgtgtgatgaaagcaataaggtaagagtcgaccgaattaaaaatggtattaataattacctttcagatagccgagcacactcttcttttgtggaaaaacaatgcggttttggaggttatacatcgaaaccacgcgctcatcatgcccattgtatatccacacgtattacgcgtattgatacgtcattatatgagaaaaccaatgcaaacgaatgcctccattgctttatgtactttactaaaaatgaacaatccgatgcttagatgcctgactactgtatgcatgagcaccgatcatagaccgatgaaacacgacgccgagaattctatacctaagtagattatataagaactacattaatgataacaacagaaacattgcatatttattttatatgtcaatatttcttaacacttcatactttacaaaccataaagaacttttagcacaatcgaaatatatctgcaagcgggctaatcttttcaatgctgatcaaattaagacataaacacgttcctgcatatacatgatcaatcgccaaaaattaatcaattaatcgaggattttatacggacttttgcatacaacttaaaaatggtggcttgataattatcacaaaacaatatgacaaaacggaaaaaatgcaaccgaatttcgtgcgttgtgtattcgtggtggaattgaaaacgatattttgatagtgatgctgatatggatattgatattgatccacctgcgatcaacaacgtcgacgaccggcaaatatatatgaactcgactatgatttatgatcgcaccgaataaaaaaaaaaaaaaaacaaaacgagcaacgctggacaacaggtcatattaaaggaagcgcgaaagagacggtgccaagaggtgcgacagagagggccacacaaacaagtcaaatgtcagaggttcggcatagtgaaataattgagcaattaattaaaccggcgaaaagaaaaaaaaaattatagaaaaatcgtaagaagcggaggaaccaatattcggtgtataaaaggccacaaatcatcaagggggagcatcattaagccaacaactgaaaaccattcaacatgcgtctatttgtggtaagttaactgacggattaaccggaggaacaaccgcaggattaacgccggaggattacattatttttttttgtgtttctagacactttgctctctgctggttcttagccaagccaagccccagggctataactatggcagcggagtgtctggttctttgaccacgtccggttccagtggaggatccagcggcggtttcctgacggctcccagccattcttcggtggcttcctatggaccgctgggcgcattccagaccgccagcgttggctccctggtgggcagctcctctgccccccattcggtgagccactatggcggtggtaatggagccacctacaccactggtggcggtaatggccacgcagccacctactcgactggtggacatggagccacctactcgactggaggaaatggagccacctacagcactggtggctcttccaactacggcggtagctccttcactggatttggacccacgcccaacattggattcggtgctctggccggctatcaggcacccacctaccagcagcagcaagagcaggaggtccagcgtggcttccaggagcccatcatccacaagcagttcttcaccgtcgccgcacccgaagagcatgagaatctggagcgctccaagcatctggtgattggacgcccgcagaagaactaccgtgtggtattcattaaggccccatcctcaagcaatgccaacgtcaagctgtccgccgaatatgcacccaaggaggaaaagaccgtcatctatgtgctcagcaagaaggacaaccagctggaggtcaacgatattgccacgcccgcacccacggtgcccagcaagccggaggtcttcttcatcaaatacaagaccgacgccgaggcctctcatgcccagcagcaaattcagggtgagttgtccgcatgttggcacagttaattaggatatttgcaaaactggtactgattacatatcgttcttatcatccgtcagccgaatacgacaggatcgaaggaacttcagagcaccaggatggtggtgtggctcccgctcagtcggttgttggcattttggatggtggtgctattggtgccgcaagctctggcagctctaactacgtttccggaggcactactggctccactggcggcacctctcactacgtttccggtggcactggctccactggtggcagctacactacgacctcgttgtccggcggcacttcgggcggaatcacaggaggagtcatctccggtggcaacatcatcaagaatgcccagagtgccacctatctgccacccaatggcaaatagatgttgttcatcagaatagtgataaatagccaccaattttactgtacagtcatgcaatagtcaaaggttttttttttaaacatacataaatacaccgaaatacaagaatataaataatggtctcgattttttaagtgcaacgaagaatgaaaaaaccggaatttaaagctgaaggcccaaaagttatcggaacaaaacttcctaatgttttggtcaatttggtcaacactttaactaagaagcctaaaagtatgtcatctttttgtatagagaaaagcaataagttcatagcaaagcaatcagcatctttccgtgcacataacccccgaaaagtgtaggtaatcattactagaactcacacactgcattaatggcccgtttcaggagcagatccgactggctcttgtcgaggacatcggtctcgcggcaactgcgatatagactgctcaccgtggactccacggaaccctcttgcgaatttggcagcattgcaataaatcgattcagttcattgagttctgtgaaaagatatagtatatacatgaatgaaatggcagaaagatgggtaaaggggataaagctcggctcaccctgatactcattgtaggtctcgtagttccactcgccgcgtttgatcacaaagtactcatgattggcataatcgctggcaaaattgccgcatgcccactcgtatgtctcgtggcaaggactcttcgaggtgttggcccacaggagcagctgccggctgctctccacgcactccttatccaggcagagcggcgcccgcaggtagaagggcacctccggccaaaaggccagcagcaggatgatgatcagcaggagcagggcgcacaggcaggcggtggttacgtacaggatgcgtcgcttgcgcgacaggctcatcagcgcgtcgaaggatcgtcggcctggaagcaacaaggctatcatcgggcgagggccagggataggaaaaatgtgatattaatgatatgaggatggaactggctacaattatgaaaattaaagaaatttaagaatcaaatttaagtcatacttaagaatgaacactacaaaagtagtttagatccctaattatatttagaatgtttaattaaatgagatttactatgtatatttacgatcttcttctatttcaagaacaattaacttagaaacacgaagctacatatactttataagcaaaaagttaaccctaatttgagaatgaatggatatatgaatggatcatgctttccacacctctcagtccattggccgatggatgcgtggagttgggtgtgattgccgctggtgtcctgccacctgctcctccggcagcgacctcgttgagggcatcctggcgcgccgcctccagatccttgggcgtcagatgtgaaccgtcgtccatgtgcaacttctgctgattggtggtcagtggagccgtttcgctgccctcgatctgctgcagctgctgcttgccaccgatctcgtcctggctgttgtgcagcttgaaactgcggtcatccacctcgtcgatggcgcagattgacggtttgtacttgccctgattgatggccattgcgtttggatgtgcaactcgatgtttccccagctgatcagccgatttaagtcgtgctctcgtcgttttctaccgctcaattcagatgattcggcattttcaatcacttcctaagtagctctgcaagtaagacaaggaaatcgttgagaattttttacaaagtgagtataaaaatacacggaattccaggcggtataacccgtctcttgctaatcaaaaagattaccttgagacatgatatacggacatggttatacacccaaccacccaccaagcgctggcaataaagaaacctttttgttatgtggagcatcggagataagtgaaaattgcccagagatagcaaccacttgatgcctgagatccacagctgcggccaacgaagtggcacctggatgtttgcaaaaaagtaattcgataatctacgggattgcttttcaaaagttaaaaagtcattattaagttaaatttaacatacttttttaggtgatggtaaatcaaaaacacattctttgcgatttcgaaatacaaatttaaacggaacattctagaactatatataatttttataaatgaaatataaaagcgattaaataattatccaagaacaccggctatatattcgctcctaagcgcacatacatatgtatatgttgcctgcattcttgttcaacatttgacttcttttcaattttaaattgacaacaattgctggcaatttgcactggcgaaagacttcgactggcgaaaatatatatatccaaatatgtgggagggagacctcaaaaagaaaaaggggaaagagacagaaagaacgctgactgttttttttttacgacatgcataaatttctattgagcgccgtgcaaataattaaaaatgcagcgacgtctcggttgtcttaaaaaattaaactgggttaattgctaattgcacgaaaaatctgtctggcaatttaagcaagttcgatagtatttttttttttagaatttatatattattaaattgacaacgagctgttaggataaatccagccattggcaaagtattatcttattttggagcattgattggctatatcaatcgttatatagtattggatcttaaaaaagtgatctatttgtatggcaggccgctttagtttcgctccgccgaccgccagagggcgtcacttcgctgtgtttctgtttctctgtggttatgctagacttgaaatagttttccaccttttgttttcgccgtgaaatcgtatagcatttttgtcatttaatccgcaacgaaagcaaccaattcacccacacaattgaaatggggaggcggcaggttaattatgaaactacatacaatgcacgcgagagtttatgaagcgcaattcgagcatcagcatcagcacatgatgttcaaacaagcaggtttttctacttctcttgaaaataatacattttccagcattgaaaaatccattttacaatgccaggcggacattaccagcccgtgaatcacaattacatttaattagaagagccctcagcgcattggcatttgaaaaagagttcgatattcaatctagatttcgtttttcaagcccctgcaaatctttaaattcccaaaatagcgataagttgtggtcagttgtgaggatttggccggttgaaaaataatatgtagtataagcggagaggggaaaaaaaacaatgaaaacggctattacttatcttatcgggttgagattattgcttaatacattgctcatttctagacgccgctactaagacattctccgtccatttttcattcagcctgataagttttacttttatatagttcacggttagcataaatcaatttcgtaacattcagcaaagattagttctgtagattgcctaagggattaattaaaaaaataaaggtctggttaaaattcggagagccataaacaattatctccgcactctatatctccgacattatctgtcctatatatccctatatagccatagccactcgaaaaaaactgaaggttgcgatgaaatatggcggtgctatggacgactatctcaggttgttgagaaatgctgggagaacctgtctccatatcaagcgataagatctccacaagaagtcgtatagagataaacgcggatgacacactaaactaactgaggaacttgaaagcattattgagaagatttctgaagtttaaaaaaaatcttgaaatattgaaaactaattaatgtaaatgtgtactttaatcaggtcctagagcatatgctttttaatatataatactacgagtatgtatatattatatactatactatatatcttatattactatatacataatatactactactactatactcttctgaattttttcaaaaaaaattttcagagcttttacaatgaattaactttgactttctagctgcagcttcaagaactcgtagaatactgaaatttcactctcaaccctttcagtgtgtttcatatttctgctggctttaatgcctttaaatatttttttaagaaaaattagttgccacttctcgggttttatgggccactttgtcagctcaaagaacggctgccgcagtggcgaaatttcattaaaaaaaaatcattaattattggggacacacgcttcggccaaaaacagagctcaatttcatcatgataagaactatcaagttgcaattgctttgattttgaggttttttttttctgaagcctgatttatgcatatttggcttgattcgattatggattgagaagccatggccatggcgaaactctagtttggactgagtttatctcagccactagaaaatattgagatgatgcggcgtcatttagtttggggtggattctcgattattgttcttattcctcgagcgcagcgcaattgaaagttgagacgcagttcgattggggatgggatggaaataatacaaaagtgaagaggtgtgggaaattccctttggaagtcgaagataagctttgataaaatccgaaagctgcacggagctcaatgaaagtgcgagtcagcacttatttttgttttttatatatacacaataacagtaataacgaatcatgtttcgctccaaaattatattcctatttcattacaattatgaggcaataattcttagccaaagtgaaatatgaagacattattcattcacagcatatttaggtgtttattgtaatatttccggggtagcggaaaccccaaagaaaaatgaaagaaaatcggtgcttcctttgtgtgaccaaaaaaaagaaaataaataaaataacaaggcggcatcgactttccccttccatttatttgctttccagttcgagttaccatatttgaacatgccgcgcataaatcaccgacgaccatatcatatatatacagataggttgggaagaccataaattccctgactacttgtgacaggcgttataaaacgtaatgctgtgacttaaaaaatcatactcatgctaaacagatattagccatacaaactaatacatggaattagaaaatcaatttgactttgcggctaattgagtgtggcgtacttttgacagcgattttcagcccccatgtcgaagccaatttatacgattttttgtgccccgcgctattgacatttaatttgagttaatggcacagcgaacaacgctgtagtattatcaaaagtgttgattggccagctttgggtgcgatgataaccttgtcgcaccaaaccccccaagccaccaaacccccagtccacaccttccacccaccgaccatcgcaatcagttgttaaatgtgtcaacaatttgtcgtcaactagtcaaagtcactaaaaaaaaagtcgacaaattgagaactgcagaatgtgaatgtttgcttatgcaacttcgctttcgaacgagacaaacactccaaacatggaaacctaattaattgagctggctgagaacatttctaagattttagaacactgtgatgcaaataaatgtagcttttcctgtgtatttcccaaccatttaaatgcaagtcaatcaaaatgtatagggaaatgcattcagaaacgtatttacattttttgcgggaattagttttttattttatagcacattttaaatggatttcaaaaccaattatctgttgaacctatcatattcgatcgaccaagtctgtaagtcagtcagtctttgtgatcttagccctcgtatgcaaaaagcactcgagcggaatgctgaaaccgtaaaacgtttaacggaaaaaggtgcggttaaggttagcttttcaagtgtttttttttttataactttttgtttcgatggacagaaagtgcgtaacgagtgacgcagacaatggaaaagtgacgaatgcgggcggaggcgtatatttggtacaaaaaatactcgtaggagggagtttttggggatttggtagtcccaattttgtgcgtgagcattacaatggaggatacagcgatgaagaatggaggcttcacttttgcacatgctcaaaatgctaaattcataacggtaatccaaaaataagtgggccaaaacggaagaagcagagaaacagatgtgtgtactggggtaaggacaacaggaagtacatactttaaatgtcataattatccacacagtcataaaattatcaaaaacaaaaaataacgggggaaagatacaagaattttcttactaagtattaccatctgctagaatgattttattatgcaatgtgtaccaaaataattgtttgcgtgtaatgaaagcaacatattttcaaaaactgcaaactagctaaatacgcaatcaggcgttaagatctgtagatttgtgcccaagatcaaggttatttacgacgtttttcaatgtcaccggcttattatctcaaaattatgagttcttgttgtttttttttttttttttttttggacgtgatgcagtgatcctctgattcttcttcttcttcttctgccaacgtcgacgttcttacgcattaattacgggaatttcgggaaaaggaaaaaaaataaaagaattgacacggtcgcatttgcagcgaatgaggggggaggaggagatggcgaagaagagagagcgacacagaattgttggtatgtctgttggtcgttcacacgaaagaagatcgcgatgttcattcatgggaagattgcgaacgaaacgaattggttttttgaatacaccgattttagaaaaagaaagtcgataacctctatacacacaattaaaaaataaatttatataaatctaacttggtttacaaatatattcggttttcattcagtcatttatgtccgtaagtccaacgatctttacacatcatcagtcgcaaaagggtgatatgaagtcctgatcacaataccgatcgacgtgtgaacgaagtatctgatcggtttttttttattatttttattttctttttgtttttgctttggccacttgctaaaccggttatgccggcatttcacacacactcaagcacacacacactgcgacacttttccaccttcgtacaaaaacaacaacaacaaaacggtggcttgaagtgcgcttacatttacgctctctctctctctctgtctctttcacaggcacatacgcgattggaaattcctctgcagaaggaaaatcttagttttttacctttttgtttatagctcattggcattccgaaatatttgcatcccgccacaattacaaatatatttttttgcaaaaacacacactcgaaaaaaaatcaggcagtacacatacgcgcgaattttttggaggtttgctttgaattcttacgcgctcagcaacaacaacaacgagaaaccgaataaaccgctatgttcgccttctcaatgaaaacagggttgtgcgtattttaaattcgagttcaattattttgtatccttaacaagaattcaaataccaacttcttataattttcgcggcggtttatgattttttttttttttaatttttaaacggcaaacgacatccaaatcaacggtcgtagttttgttttgtgacgatttttatggcgatggtcactagtgatggacaatcggagccgcaattgaaatcgaaaaaccatctctatatatcagcgcgaaatatcgccaacgtggaaaacttgggtaaggtgggaaaaattgctatgaaatagcaaagacataaaccggaaaaggaactgccagaaaaacgttattctaatttaaaatagctcaagattattgtgcatgtgtaatgaaattataccgtacatttcagagtctcgaacccaaataataataaatcataataatcatattaaaaggcacacacttctttaattttacaactcgaccgtcatttttatttatatttttatggtaaatcattaaatttaatacagaaattagcaaaaaaaaataaaggacagtcaatcattattcatgacacgcattaataagtacagttaataaattaaacagtagcgtataattgaactaaactaactgtgagcagcgggcgagactaatttttagtatgggttttacgtggtacagacaggggttttatttcgagagtacactgcaagaagtcggtcagcgcttctcccactgtaatttggaaataaatgcaatattaatttaaatatataacgattcaactgttctccatctacgctttgcattttgtttttgatttttagtatttacacagagtttacattcaagaattacatagattatttaataatttttttaatgtttttaataatttcttttgcatttttcaacacattttggcgttgtaacttttcctccgaccggcaaactttgagtttggcaaacaattgtccataaatgggccttgcactaggcaaacgccgaataattttaagcgatttaaaaaaaattacagtagcacctaataagtgtggattttctctgtattattttccatgcctgggctgctgggggcgtggcagtattgggcagctatcggctc

SEQ ID NO: 20420 - DNA, 3596 bp, DROSOPHILA
gtttgccgtttaaaaattaaaaaaaaaaaaaatcataaaccgccgcgaaaattataagaagttggtatttgaattcttgttaaggatacaaaataattgaactcgaatttaaaatacgcacaaccctgttttcattgagaaggcgaacatagcggtttattcggtttctcgttgttgttgttgctgagcgcgtaagaattcaaagcaaacctccaaaaaattcgcgcgtatgtgtactgcctgattttttttcgagtgtgtgtttttgcaaaaaaatatatttgtaattgtggcgggatgcaaatatttcggaatgccaatgagctataaacaaaaagagctacttaggaagtgattgaaaatgccgaatcatctgaattgagcggtagaaaacgacgagagcacgacttaaatcggctgatcagctggggaaacatcgagttgcacatccaaacgcaatggccatcaatcagggcaagtacaaaccgtcaatctgcgccatcgacgaggtggatgaccgcagtttcaagctgcacaacagccaggacgagatcggtggcaagcagcagctgcagcagatcgagggcagcgaaacggctccactgaccaccaatcagcagaagttgcacatggacgacggttcacatctgacgcccaaggatctggaggcggcgcgccaggatgccctcaacgaggtcgctgccggaggagcaggtggcaggacaccagcggcaatcacacccaactccacgcatccatcggccaatggactgagagccttgttgcttccaggccgacgatccttcgacgcgctgatgagcctgtcgcgcaagcgacgcatcctgtacgtaaccaccgcctgcctgtgcgccctgctcctgctgatcatcatcctgctgctggccttttggccggaggtgcccttctacctgcgggcgccgctctgcctggataaggagtgcgtggagagcagccggcagctgctcctgtgggccaacacctcgaagagtccttgccacgagacatacgagtgggcatgcggcaattttgccagcgattatgccaatcatgagtactttgtgatcaaacgcggcgagtggaactacgagacctacaatgagtatcaggaactcaatgaactgaatcgatttattgcaatgctgccaaattcgcaagagggttccgtggagtccacggtgagcagtctatatcgcagttgccgcgagaccgatgtcctcgacaagagccagtcggatctgctcctgaaacgggccattaatgcagtgtatggctggcaggcattccgcgactccaatcgactgcaatcctgggaatacaagcgggttctggtcgtcctacaggccaaacatggcatatttccttactaccgcgtcaccgtggagaacggctttagtaatccccacgactatgtgatcaccctggacgagggcgaacttggtctgccggacaagtacttctatggcaacgatgctgacgaggaagtggttcgtggctataagctgctcctccgggactttgccatcaatatgggaatcgtttcacgggaagcggatctatttgccgacgatattttccactatgaacgtcgcattgttaatcacattgaggacgccaaagctgatgcaaatcgtccgataaataaactaatgcgtctggccgatctgaagataaaagcaccatctttgccaattctggagtccctgcaggccattttcccaaaaaccaaaatcactgaagacaccgaggttttggtacgagatccagaggttatgcatgccctatctgttttactctccacttcggataagaagcctattaacaactttattgtatggtcgctggctcgtaaaatgttgccgcatttgtccaaggagtatcgcactttggcagagaccttcgaccatgcgttgtatggacgcacagctagctatccgaggtggctcatatgcagcaaagtggtgcgtgattggctgccctttgcggtggatgcattgcagcaacagccacccaggcagcaattcgaaacgatgacgtccaagagccggggcttaaacaagacccagggcaacgaggagctcctcaagctgatgttcttcagtctgcggaatcagttgaaagattcgctggagcaagccaaatggctggagccggcggctaggcaatttatccaaaagaaactgaacgagatgcgcctgcagtttggcatacccgatgaggtattgcagcaacccacctatcttgcgcaatactacaacgaactgatactcaataatgtgtttttcgtggagcatttggagtggatttggacattccgtcgatcgcaaatggaaaagaagctgggaccgctggccatactggatgtcattgtttccgagatgtacacaagggacaatccacaggccatcgcctactccaataaactgaatatgctgctggtctctaaggtgttgattagctccaattactatgactaccgatatcctgtagctgtgaattttgcccgcataggcactgatatattggaggccctgatcgataacttctccaccttcctgctgcagttcaacacccagagcacggatatcagtgatgcagcaccggagattcggtatgcccagccggatgttaattgtctggcagcaggacagccaccgaggttggtccacgagctgaatgagctgtctagtaatgcactgaagagcttccatgtaacgctgagtgcagctcgaacggcagcgagggcgttgagtaacttcgtgaatgccatcgatgcgggcagtgccatccagggatcgggaatcgatcaggctaatacctatgaggcccttggacttaccaggcgcttgagaatacccggtctgaggtctttcaacgagaacgaactctttacgctctcctacatgcagcagcactgcagcaccacaattgctgacaaggactacgccaggattaagccgctcgtagagagccagctggccgagagttatctctttaacgccacatggcagcatatccagtttctaccccgctccacaaactgtgccgccgcggaggcgacttgctccaacctgctctgagatgcgattttccatccaccaggacctccacctcagccagagccctgtggatgaaccggatgatgatgtccttcggcagctgcgaaacggaacaacctatttattgtactttttttttactcccacacattgccagagacacagatacagaatacacgatacacctgacagatacagacagacactgaccccacaccacacacacatcgccctagttgtagtttagcgattaagcctagcacgtagcttaaccatgaaggatcagacttgacattgactagccactgttgacatcacgccacacattcgcaatctgctccaattggacacgaagtaaccaagtggggcagcaagtcggcttaagtacgaaccctacgcctagtttagtctagttcgatagccataacttagttagttgctaagcgccgtctgccaccctgtataaattgattgaatttgatttttgaagaaccattaaatgcgaatgacttttcacac

SEQ ID NO: 20421 - protein, 879 aa, DROSOPHILA
MAINQGKYKPSICAIDEVDDRSFKLHNSQDEIGGKQQLQQIEGSETAPLTTNQQKLHMDDGSHLTPKDLEAARQDALNEVAAGGAGGRTPAAITPNSTHPSANGLRALLLPGRRSFDALMSLSRKRRILYVTTACLCALLLLIIILLLAFWPEVPFYLRAPLCLDKECVESSRQLLLWANTSKSPCHETYEWACGNFASDYANHEYFVIKRGEWNYETYNEYQELNELNRFIAMLPNSQEGSVESTVSSLYRSCRETDVLDKSQSDLLLKRAINAVYGWQAFRDSNRLQSWEYKRVLVVLQAKHGIFPYYRVTVENGFSNPHDYVITLDEGELGLPDKYFYGNDADEEVVRGYKLLLRDFAINMGIVSREADLFADDIFHYERRIVNHIEDAKADANRPINKLMRLADLKIKAPSLPILESLQAIFPKTKITEDTEVLVRDPEVMHALSVLLSTSDKKPINNFIVWSLARKMLPHLSKEYRTLAETFDHALYGRTASYPRWLICSKVVRDWLPFAVDALQQQPPRQQFETMTSKSRGLNKTQGNEELLKLMFFSLRNQLKDSLEQAKWLEPAARQFIQKKLNEMRLQFGIPDEVLQQPTYLAQYYNELILNNVFFVEHLEWIWTFRRSQMEKKLGPLAILDVIVSEMYTRDNPQAIAYSNKLNMLLVSKVLISSNYYDYRYPVAVNFARIGTDILEALIDNFSTFLLQFNTQSTDISDAAPEIRYAQPDVNCLAAGQPPRLVHELNELSSNALKSFHVTLSAARTAARALSNFVNAIDAGSAIQGSGIDQANTYEALGLTRRLRIPGLRSFNENELFTLSYMQQHCSTTIADKDYARIKPLVESQLAESYLFNATWQHIQFLPRSTNCAAAEATCSNLL

SEQ ID NO: 20422 - DNA, 4867 bp, DROSOPHILA
attcagacacttattttgacatttttttctttttaatttatggcatttaactaaataaaaatgacactgctaattcgtaaggaagtaatttttaattaaattaactacgatagtctacctatttaccaaaatcaataaacaaatttcctttaaattaacaaaaagttaaagcaaatatttttcttgtcaagatctgggtgacgttaatttagaggattgaggccatatggccattagtttgaccatccaaagagggtgattcaagaatattttgttaaaataactgatttttattatttacaaatctatatacaagtatctagaacctcaaaaagagcgaaccaccctactgcaacatgtatacgtgcgtcgctcgacggcgtgtatgtgtgagttacttacttgcagacacaaatcgaagttttcgcactccgcgcagtgcactcgaatgccctgaatatcatcctggcaatttgtgcaattatactttgtgaataaatccgcgattgtggtcattttgggccaaaacctggattttcacgacaattatgagttgtgcgaaaaaaacctatgccagtaatgtgaccagacgcgaagtcaacgccatattgctctactgagaattcttatatgtacggccaacgaaccgaaccagttcatcggaacagtgccgcctatatagctagtcttaaagcctttttagctaattttcataattctgttgaatctctgaattatagttaatttctaaattatactacttaccaaaagtaccaacacattaaatatagaatacaaatttcaaacattaggcacatgttcaaaactctaatgtttatgcgttaaatattgatagtagtttatttaattattttaaaagtttaattcgagtgttttgccttttttaaattatcacaaaaaataatattaatatatataaaataaaactaaaataaaagaagtgcatatcaaaccaaaacaaggtaaacataaatacgaatatgtgatggttgaaacatttgtagcgtggtgctgaataaaaatataaaaaactcatgtgcttaaatgcagttcgatacgtaaatttaagcggtggtcaggattaaaaacttaagctaaattctgagttacaaaaaaaatataaaatgggtaaatatcttttgtttcaaacaaaaagtgtaaaagtaataactgccgaaaaatatttcggttgcttacatctaacatgaatagggcgtgggactgccgagatattgtaggttacaatcattacaatcattgggaaggatttggggtaggctacgctgtataaatagttgattattcgattagttcatatggtgaatacgtttatattattgttagtattgctgtcttacaccgagcagtagccgaattgttatgggttccagatatctcagtgggcggtgaggactagtttgtgttgcatgtggctttggtggcattgttgctagtttactcttgctagttagcttggaccagagaaaaacaaaacgagttacacgatacaaaatgggttaacagatcttaaacagatatggcaagttacttgtgcagctgcgcttttcaaaaacacgcacacggccaacaaaatttatcaattcgagtacctaaaaacgtctaaataagtctatttgagcgccaaattcggttttggtgtcgcacctgcgtctgatcctagggactgaagtatgtttaacaatactgttcgaggacattcaagagtttgagattcacgattttcacagatacggttcgatttgaattcgcttgcgtaaggaactaaggaaaagtcacagcgcaggcgcgaccccagtcgtcataattgacgactggcaacggaaacagatccatgtccagatccgtctgaaccgcctgctcccagcatcgagactcataagcaggcggccgcgatggatgggctctcaaaatttgcataagcgagtagtcctaaagcataactatcaactaatttggtatgtaaagtctttgtgtctttgtcatgggcattggcgcgatgagggctcaaggtcctgtggcaatggccaactagcaacagtatgaccaacatgccggcagatgccacaaactctgcaccatactcactcggatatgggaaccgattcgctgtgctcggtgtctcgtctttgtctctaaactctcgctgctcatcgtcatcgtcttgggaagcgtctaaacattggctaagcttggcggggatcactggtgtggtgaagctggaataggtgctgacatggcttttggcggcgctcagcccaacaatatgcatatgattgcacacactgtgctcgatttcgggatggctgctgttgttggtgacgttggatctgcagctactgctactggcgaagatcgttttcgtgggtgcggataagttattggggtgtgtattaatttgctttttgataaaatacttgaagagggttttgttcctctttagttacggttgaatctgcttcttgggtttttttaactcagcatcttcgtcacgcttaatctcggtgtaccgctcgcccttaagcgatacgatcttattgtcccggtagcgaaccagcttgcgaggctccatcttcggtaccaccggcttgtactcgcgctgggtggcattcttgtcaacataggagtacctagatggggtcaaaaaaataatattttacgtttggctattttaagttgatatccacttcaatatactgctatgtttatttgctttttaaggtgtacacttacctagcgataatacgattcttgagttcattatcgtcgacgattacattcttcttcatataagtagtatgcgacttgtcagtaatacactggttcgtctcttgacgatgcaagagaatctgggtggcgctatcgatgtcccccttggaaattgcgatgcagtgtttgatctagaaatggatttaaattcattacacagtattacaaaattctttaaatttcaccataaactaatacttacctcggctattgccgaatccggaaacatttcctggagcacctcagtctcgtccaggaagtagtcgcaagtggagctggagctgtcggtggaacctccatcgctagtctccgaaagatgttgggaacgcttgttgccgccacagccgccactgctgctgctgttcgatgagagctcgtctttttcggaagttgacgagttgcgagcacgcagcttggactccggaataatgctggagaggctcagggagctgtaaaaatattttatattaaatgtttctggcataggaatgagaatgaaaacgtactttagcgataagttgacggcgtctgggttttcctgggttttctccatatcggtaagctcattggccagcttgtagatccagtcacagatgatgccctggtcaatggttgaaaactcctcgaagtaggctcccatcatctccacaaagccctcaacatcgaagcatggatcctgggatgcctcctccaaaatcgaaataatgtacgaaagcacgatttcgtccacaacactaaagtcggcacccggaatgtggccgctgataaactgcaccaggctacgcttcaccatctcgtgctgcttctctaaattggtcataatggctatatagtttaaatggacttctcgaagtgtctcttgctggatcggcggtaatcaaaaagtttcccacgcagggcgtcactcaaaatgctgaaactcactagatggggacttccccggaacttagagcatgtcctctgacagtcgtattactgaattataatttagttttattgcaaattccgttttgaatagttttgatttagctagctgcgcctttcttttgcttcttcctgctgcaatcaataatactccgatacacaggctgctcctatcgattgggatataaggaacagaagtctatcgataagtggcttcgaatttaatgagttatattgacgatcggtaatttgctaatttttatactataatatatttcaagtaattatactgggcggttataaacgtaaaagttaaaaatttagaaattaaactcttgctaaccgatatcaatcacggtgcgcatctctaatgaaaataggaaaagcgaaagtcacgcaaagcagtaaacaaatttaaggtatatcgatagacgtacacccacaaccccaattccaaccggcaagttccggaacgtagtctcttctttaaaagtctatagaggtgagtcttttttgcctctacctcgtagctgccatacagatacgtatccttgtagggaagtggccaatccgatggacaagcgcgtaacagtcctgctgcccaatggtcggcggcagaatgtgaacgtgacggcgaacatgacgctgttggagattctggagacggcctgcttcaagcacggctacgatgcggaggagcactgcctcaagtttcacaacaaggtggtcggattgacgcaacagttccgttttagtggcctgcctaacaactgtgtcctggagatggagcaaacagaaaagcggcgcacactgagtaacgttcttgtctgcgtccaattgaacgacggttcccgccagcaaggggacttctcgcccaacgacaccatatggctggtggtcgagaagctttgcgaaacacatgtaaaggcttacgaaagccccgtcatcatctacatgcgcagcgaggtcataggacatgagcagatgcgacagaccactcttaagtccctaggaatcctcgagggtcgtgccatgatgcgtcttatcgacaaaaaacccgaggaccttaagacccaggcaaatgtgtataaagctcccgctgtcaagcctcgggtggacaatgacgaccagccca

SEQ ID NO: 20423 - DNA, 2269 bp, DROSOPHILA
caggaagaagcaaaagaaaggcgcagctagctaaatcaaaactattcaaaacggaatttgcaataaaactaaattataattcagtaatacgactgtcagaggacatgctctaagttccggggaagtccccatctagtgagtttcagcattttgagtgacgccctgcgtgggaaactttttgattaccgccgatccagcaagagacacttcgagaagtccatttaaactatatagccattatgaccaatttagagaagcagcacgagatggtgaagcgtagcctggtgcagtttatcagcggccacattccgggtgccgactttagtgttgtggacgaaatcgtgctttcgtacattatttcgattttggaggaggcatcccaggatccatgcttcgatgttgagggctttgtggagatgatgggagcctacttcgaggagttttcaaccattgaccagggcatcatctgtgactggatctacaagctggccaatgagcttaccgatatggagaaaacccaggaaaacccagacgccgtcaacttatcgctaaactccctgagcctctccagcattattccggagtccaagctgcgtgctcgcaactcgtcaacttccgaaaaagacgagctctcatcgaacagcagcagcagtggcggctgtggcggcaacaagcgttcccaacatctttcggagactagcgatggaggttccaccgacagctccagctccacttgcgactacttcctggacgagactgaggtgctccaggaaatgtttccggattcggcaatagccgagatcaaacactgcatcgcaatttccaagggggacatcgatagcgccacccagattctcttgcatcgtcaagagacgaaccagtgtattactgacaagtcgcatactacttatatgaagaagaatgtaatcgtcgacgataatgaactcaagaatcgtattatcgctaggtactcctatgttgacaagaatgccacccagcgcgagtacaagccggtggtaccgaagatggagcctcgcaagctggttcgctaccgggacaataagatcgtatcgcttaagggcgagcggtacaccgagattaagcgtgacgaagatgctgagttaaaaaaacccaagaagcagattcaacctagcagtagctgcagatccaacgtcaccaacaacagcagccatcccgaaatcgagcacagtgtgtgcaatcatatgcatattgttgggctgagcgccgccaaaagccatgtcagcacctattccagcttcaccacaccagtgatccccgccaagcttagccaatgtttagacgcttcccaagacgatgacgatgagcagcgagagtttagagacaaagacgagacaccgagcacagcgaatcggttcccatatccgagtgagtatggtgcagagtttgtggcatctgccggcatagcccatccatcgcggccgcctgcttatgagtctcgatgctgggagcaggcggttcagacggatctggacatggatctgtttccgttgccagtcgtcaattatgacgactggggtcgcgcctgcgctgatcagacgcaggtgcgacaccaaaaccgaatttggcgctcaaatagacttatttagacgtttttaggtactcgaattgataaattttgttggccgtgtgcgtgtttttgaaaagcgcagctgcacaagtaacttgccatatctgtttaagatctgttaacccattttgtatcgtgtaactcgttttgtttttctctggtccaagctaactagcaagagtaaactagcaacaatgccaccaaagccacatgcaacacaaactagtcctcaccgcccactgagatatctggaacccataacaattcggctactgctcggtgtaagacagcaatactaacaataatataaacgtattcaccatatgaactaatcgaataatcaactatttatacagcgtagcctaccccaaatccttcccaatgattgtaatgattgtaacctacaatatctcggcagtcccacgccctattcatgttagatgtaagcaaccgaaatatttttcggcagttattacttttacactttttgtttgaaacaaaagatatttacccattttatattttttttgtaactcagaatttagcttaagtttttaatcctgaccaccgcttaaatttacgtatcgaactgcatttaagcacatgagttttttatatttttattcagcaccacgctacaaatgtttcaaccatcacata

SEQ ID NO: 20424 - protein, 462 aa, DROSOPHILA
MTNLEKQHEMVKRSLVQFISGHIPGADFSVVDEIVLSYIISILEEASQDPCFDVEGFVEMMGAYFEEFSTIDQGIICDWIYKLANELTDMEKTQENPDAVNLSLNSLSLSSIIPESKLRARNSSTSEKDELSSNSSSSGGCGGNKRSQHLSETSDGGSTDSSSSTCDYFLDETEVLQEMFPDSAIAEIKHCIAISKGDIDSATQILLHRQETNQCITDKSHTTYMKKNVIVDDNELKNRIIARYSYVDKNATQREYKPVVPKMEPRKLVRYRDNKIVSLKGERYTEIKRDEDAELKKPKKQIQPSSSCRSNVTNNSSHPEIEHSVCNHMHIVGLSAAKSHVSTYSSFTTPVIPAKLSQCLDASQDDDDEQREFRDKDETPSTANRFPYPSEYGAEFVASAGIAHPSRPPAYESRCWEQAVQTDLDMDLFPLPVVNYDDWGRACADQTQVRHQNRIWRSNRLI

SEQ ID NO: 20425 - DNA, 5257 bp, DROSOPHILA
ggtgagctttatggtaggggggttttcccggacgcgacttgtcttatcagccatgcaattcccctgataatcaacttgatcactgaactcgcccagatcgattgcgaaatatcggacatccaatctgagagcgaggtcaatgcttgataacactatagtaaccaaagactaaactttataaaagagttgacaattgggaaaacttaccggggtgtttctgccacgctgggaaagttcaacgcgcacaacgttctccgtatttgtactatccagggttagctgcaagtgtccaatgaactgattgtcgtactccaggtaccgaaatatcatcggacactggatatatggcaagttttgggcacttatatagctgatttgcagtatggcgatcagaaaaccaagcaactgcagttggcgcatggcgatcaccctttccggaacagtaaatatttatggaaaacaaatgcgactgcaatcgcacagcattcagctagacgcgaatttaatccaatcgagaatcagaggttaaaccgcactgattgagagtcgcgcgatgaatgattggtattagctcagccaattcgcattagtttccgatctagctgaatagtccgattcaaaacaaagctgcttggctctcccaacctgatcagaataagtgacgtagttatactcttcaaaaaaaggttttgggggactaatactatgtttgactcagaattattttttggggcttaagagcatgaattgggattttataaaccaaaataaccaaaataaatgttcatggaaacaaaagatccaaaaaagtttgcagtgtattcaagatgcgccgttttgctttattatttcaatgattaatggatccacttagaattacccataacgcaatagtaggcagtaatacatggatcttccgattacgtgattttacattcatcaatgggaatctcttcaagaagggggcatgcttttcatgttcgcaatcttcattttgtgttcaattccacattttttggcgaacccattcaatgtgcttggccacatcagtgaatacggatggcttggatagctcacaggtgttttccttttcgttgatcacacctccggagatcactccccgcagcacccaaacgtcctgttcccgcagcatcaatggtccaccaccatcgctggcacaaggacccgctcccgttttcttggcacacagggagctcggctggaccagaacatgtggcagctccagggcgcagttcgcttcgctgactatattaaggtcagtaaccttggatacttcagtgttgccggtgccggtctcatcaggtccccagccggcaacatagctcttgagcccctggggcaaatccatgcggttgctggtgctccaaaggcaaataggtactatgtagtccgtgtaccttattatagtataagcagtagttttttatatttaatatatttatataatttatagactcacctcacaggttcgtccaatcggaccagcgccaaatcggcctccgtaaactgtttgaattggaagttttcgtggataatcagctgggatacgccgcgaaattctccatcggagtgaatggccaaagtatttcgacccaaggagacggccagccgagaggcgggcaaatcccttccaggagcacgaaaacagtgggcggccgatagtaccgtggatgtggagatgagggttcctccacagatgaaagcgggtccgttgctctcccgtcgttcgaaaatagcaaccaaccatgggagctggcctcgctgaagacttttcccttggaagatcaatggagtggtactagctctctcccgaccgcagggaataccattggatgaagggttctgctggggaacaagatctacagggcttctcaccgcctgctgaggagcattagatcgactaggatttggtgtcggtcgttgtgggacgggacttggtatctccggctgagaggtaatacctctattcggatttgcctgctgaggggcggtaccccatccgggattttggaaggctggcagtgactcattactccttccaaacaactctccgctatcctctagtctgggttgactgggtctggtttccctgtagtctatctgtggactttcatcttgccaagcgggtcgaggtctggttggcacaggttggggattaacgccgaaaaccgatatgtaggagggcgtccaagtgattcgcagcgtaatgccggttcttggcttaggatctagaaattatacgtccataaattgcatttaaaatatattgaactataaaaacttacatacaccgccactacaaagttgtacgccattcaattgcatgctagtgatcttgggcggtattgttggaataggaaaatccacacggtatctaatcggcaagccctgacgcagattttcctgggtcacttcatcatcatccaccagagagatactgcccacatagtccttaaaaaaagaaatatcaaaaattaattgattaataattctatcattctattgtgcttgtttatatatttttgcaatgtcaattttcattgccgcatgggaaattgcacaaccgcaaagtaagcaaagtgataacagaagcgacttattatgagttcagaatttccaagttaataatgctgaatcttacttcgaaatcgtgatatccctgctgggagaattgaaggatgagtgtctggttattggcctccggatgacgaacttccaccaaaccgatgtactgcccctggtagccctggtattgaaatcgcccagagcagccattccggggcaactggccaagaaccaagttaatcagagaagccagaaggagaacggtcaccagctgatgcggactcattgcaactacgtatgagctgagcttttccagtctattttatagagattttaattactcgcattaaaactcaaaagactcactcaatgagcactgattgatacccgatctaagtctctcaatagtcagtggctctccccactttgtgggtatttaagtattcagtttttggagctaaattctcgagcgtaaattgcacttccacatgctaagctccattaagccaaaaaatgcattaatattacttaccttttcttaaaataactttattaacagcacaaagacaatgaatgaacattttctcacagtaggtatttaaaagatttaatttttgattttctgctcctttatcataaaacatatttaatggatctcatatttatttatttgtttctataataattggtgcgaaaggttcctaattatgtgctgtctctgctatatgttcgccagtgattattgaaataatatctgattttaaatgtatagatcccgacttatttggtaaatgtttcactctcaagataatcctcgattatatcatctagctgtctttctacctcgacccgctcctcagtgtattccttaacagttttatccacacactgattactttgccgttgaatgtcctccaactggttgcccttagtccgcagattcagcaaattctgtggagcattctggatgccatcgatagctcttctgacgttccgccggcacttttttggcttaacgctggaacagccttcagtgacatcgatcaagtgctccgttggattttgcaggccatttagggaactttccaagtccaagttaaaccgaatctgattccagataaacagaccaacacaactacgcaatcgaaggccgtaacgactgttgaagttttcagtgatggaaacagcctccgcggttctaagacctttagtcgactcctgaactttcgacacctttgcggcagcccagaacttccattcctcctggacattaagtttcgagacaagttgctcctcctctgccttgatgttcgttaggaattttagcaatggagatatgctcaaacctagaccagttagagcttgcagagattcctgcaggccttgtctccttttctttttccgagtattgggcaaatcggataataattttgccacataattgtcaagaagattcctcaattgcgttatcgttccttcgttcttgttttgcaggtcgttagttggacttagaaccgaaatacctttttcgtttagcctttctggatcattgggcagagctccaccatctccaaatttattccagatatcaaaagcagtttctattgccagaacgctgtcattccaggcaaactggaccaccaggaggattagaaagccgctgcacttcatctttataccaggcctctaagagtctatatatcgtactgcaggccttttatagccaattacattgggtacttaaatgtgcagcacgcttcccaaacatttgctcagccgatgccaatcatttagcagtcaatacgtgggcatatatgtttacttttatgtcatacatgcaatacacatggccattaatttgtaagatattagctaaagaaagttagcgaaaaagtcagttgtgtcttttagccagaacaatcaatcggttctaccaataaaaaaaaaaagtggccgctgctaaatcctaaaatagatgaactattaatgaagtacatctcaacaattaaagttatttttttacaaacattttattgtcagcacgtagcaacctatctgtacttttttttgcctttcaatcatccatcattgccaataaaataagtgaaagatgggaggcgcaaactcgttttgccgaaaatcaccagacagtgaaacatctaaatatcttttggcattaaagtttttaatttgattgtccacaaagcaaatccggatgctcagcgaatgttttcgcttatccagttgatgtgcttggaaagatcgcagtacagtacatactgattaagctggcaggtgccggcaggtccgcgttcccctgcagacacaataccccggagcagccatcgatcgccctgcttgaccatcagtccaccgccggaatccccgacacagggtccagatccatcgcgatttcccgcgcacagacttcgctccgtcaccatggtgcccctccaggtgctggcgcagaccgtcggactggcaatctccgcctccaccacgcgtggatactgggtcctggagctgtcctcatctctcccccaacccgctataaagccagtggtggacaccgttctgcttgcctccaccgtccacatgcaaatgggtgcaataatgtcgttaaacctgaaagaaaacatgatagtccttaaaatatgaactttataagaga

SEQ ID NO: 20426 - DNA, 2403 bp, DROSOPHILA
atgaagtgcagcggctttctaatcctcctggtggtccagtttgcctggaatgacagcgttctggcaatagaaactgcttttgatatctggaataaatttggagatggtggagctctgcccaatgatccagaaaggctaaacgaaaaaggtatttcggttctaagtccaactaacgacctgcaaaacaagaacgaaggaacgataacgcaattgaggaatcttcttgacaattatgtggcaaaattattatccgatttgcccaatactcggaaaaagaaaaggagacaaggcctgcaggaatctctgcaagctctaactggtctaggtttgagcatatctccattgctaaaattcctaacgaacatcaaggcagaggaggagcaacttgtctcgaaacttaatgtccaggaggaatggaagttctgggctgccgcaaaggtgtcgaaagttcaggagtcgactaaaggtcttagaaccgcggaggctgtttccatcactgaaaacttcaacagtcgttacggccttcgattgcgtagttgtgttggtctgtttatctggaatcagattcggtttaacttggacttggaaagttccctaaatggcctgcaaaatccaacggagcacttgatcgatgtcactgaaggctgttccagcgttaagccaaaaaagtgccggcggaacgtcagaagagctatcgatggcatccagaatgctccacagaatttgctgaatctgcggactaagggcaaccagttggaggacattcaacggcaaagtaatcagtgtgtggataaaactgttaaggaatacactgaggagcgggtcgaggtagaaagacagctagatgatataatcgaggattatcttgagattgcaatgagtccgcatcagctggtgaccgttctccttctggcttctctgattaacttggttcttggccagttgccccggaatggctgctctgggcgatttcaataccagggctaccaggggcagtacatcggtttggtggaagttcgtcatccggaggccaataaccagacactcatccttcaattctcccagcagggatatcacgatttcgaagactatgtgggcagtatctctctggtggatgatgatgaagtgacccaggaaaatctgcgtcagggcttgccgattagataccgtgtggattttcctattccaacaataccgcccaagatcactagcatgcaattgaatggcgtacaactttgtagtggcggtgtatatcctaagccaagaaccggcattacgctgcgaatcacttggacgccctcctacatatcggttttcggcgttaatccccaacctgtgccaaccagacctcgacccgcttggcaagatgaaagtccacagatagactacagggaaaccagacccagtcaacccagactagaggatagcggagagttgtttggaaggagtaatgagtcactgccagccttccaaaatcccggatggggtaccgcccctcagcaggcaaatccgaatagaggtattacctctcagccggagataccaagtcccgtcccacaacgaccgacaccaaatcctagtcgatctaatgctcctcagcaggcggtgagaagccctgtagatcttgttccccagcagaacccttcatccaatggtattccctgcggtcgggagagagctagtaccactccattgatcttccaagggaaaagtcttcagcgaggccagctcccatggttggttgctattttcgaacgacgggagagcaacggacccgctttcatctgtggaggaaccctcatctccacatccacggtactatcggccgcccactgttttcgtgctcctggaagggatttgcccgcctctcggctggccgtctccttgggtcgaaatactttggccattcactccgatggagaatttcgcggcgtatcccagctgattatccacgaaaacttccaattcaaacagtttacggaggccgatttggcgctggtccgattggacgaacctgtgagcaccagcaaccgcatggatttgccccaggggctcaagagctatgttgccggctggggacctgatgagaccggcaccggcaacactgaagtatccaaggttactgaccttaatatagtcagcgaagcgaactgcgccctggagctgccacatgttctggtccagccgagctccctgtgtgccaagaaaacgggagcgggtccttgtgccagcgatggtggtggaccattgatgctgcgggaacaggacgtttgggtgctgcggggagtgatctccggaggtgtgatcaacgaaaaggaaaacacctgtgagctatccaagccatccgtattcactgatgtggccaagcacattgaatgggttcgccaaaaaatgtggaattga

SEQ ID NO: 20427 - protein, 800 aa, DROSOPHILA
MKCSGFLILLVVQFAWNDSVLAIETAFDIWNKFGDGGALPNDPERLNEKGISVLSPTNDLQNKNEGTITQLRNLLDNYVAKLLSDLPNTRKKKRRQGLQESLQALTGLGLSISPLLKFLTNIKAEEEQLVSKLNVQEEWKFWAAAKVSKVQESTKGLRTAEAVSITENFNSRYGLRLRSCVGLFIWNQIRFNLDLESSLNGLQNPTEHLIDVTEGCSSVKPKKCRRNVRRAIDGIQNAPQNLLNLRTKGNQLEDIQRQSNQCVDKTVKEYTEERVEVERQLDDIIEDYLEIAMSPHQLVTVLLLASLINLVLGQLPRNGCSGRFQYQGYQGQYIGLVEVRHPEANNQTLILQFSQQGYHDFEDYVGSISLVDDDEVTQENLRQGLPIRYRVDFPIPTIPPKITSMQLNGVQLCSGGVYPKPRTGITLRITWTPSYISVFGVNPQPVPTRPRPAWQDESPQIDYRETRPSQPRLEDSGELFGRSNESLPAFQNPGWGTAPQQANPNRGITSQPEIPSPVPQRPTPNPSRSNAPQQAVRSPVDLVPQQNPSSNGIPCGRERASTTPLIFQGKSLQRGQLPWLVAIFERRESNGPAFICGGTLISTSTVLSAAHCFRAPGRDLPASRLAVSLGRNTLAIHSDGEFRGVSQLIIHENFQFKQFTEADLALVRLDEPVSTSNRMDLPQGLKSYVAGWGPDETGTGNTEVSKVTDLNIVSEANCALELPHVLVQPSSLCAKKTGAGPCASDGGGPLMLREQDVWVLRGVISGGVINEKENTCELSKPSVFTDVAKHIEWVRQKMWN

SEQ ID NO: 20428 - DNA, 5395 bp, DROSOPHILA
tctacgctttgttacgacgcgcactgccagtcgcttgagctcaaatgctagttctacggcatcctcgccgcttccttctcccatggacgactccatagccatgagcgcacccagcacaacaaccttgccatttccctcacccaccacgacagcggtggtcaccagcagtagtagtacggccacgtgtgatgccctaacgaatatagtttgtccagcgggtgtggatgccgaggtgttcaaagagctacccgtggagctgcagacggagttgatcgcatcgtggcgcagctccctggtggcggctgttgagcaaacgaatgggaccggtgccgctacaagcgcagctatcgccagtggagccccagcaactgccacaaccgccagcggacaaaagaacactttgtatcgctactttctccggaataagtgatgcagtgtatccgagcatcacatcgtttttagttataatggtaaagagaataaatttgtttaaatatatgatatatttttgtaggtatacggttacagagtgcatgctttagggtgccgcattggacgaacataagctaggataaataactagtgggtttcttgaactgaatgagtgattttgttaagtttataataccgaagaatgtcattagataaccgcattttcatttaacaagttttaatcttcgctaatttataaaacattccatatgtgttaacatattagatatttatatattttttccagcattgttttccattcctcagcctagtacattgattatcatgctctcatgggctttaatgaattacgttcaaatgcattgttcagaatcttgcctagaaaactagctaccataagaaataatatacgaatataaatactcaacgcggtattatcgctatcagaggcttactcaataccttacttcttacatatcctagcggcattcagtccaaagcggtctcccagctgtgagatccgagaaacaagtcgcgtccttgttgtacattcactattacatttattacttcatttacaattcatatcatacatattcaattggttgggtcccctacttaagcttagttaatacacaatatctgaatcccgacatctcacacaaaggaacaacacttattgtaattgagcttgacttgatacaagtaaattgattttcagttttgtagtttttaccttgatgaaaatgccaacgacagttgaacagtataaaaatgtctttaacctattctaactaatacaaaaataaagtgaagtccttggaaatgcatgtggctcttaatcgaaggggagcgggaagttggaagatgttcagtggctcagccagccgcacttgataaagaacttgcgcagcgaagtctccataggactacccaacgatggtgctccgctcaagcagacagtcttaaccgagaggtaggtggtgggcgtaatattatgcttcttgcacagatccagctcgttgtgactgagcagttcactgcccggcggctgtggcagatgttttagttcctccagctgggtgcgcaatttcaggctcatgctgggcacctgatcactgcctccgccggcggcctcgttttgcattttgtgctggttgccgctttgcaggagctgaggatgctgctgcagcggctgcagatgttgttggcttcccttcgccgagttcgttggcagattcgccatcgtcgtagccgtggaagtcactcccgtcgtcgctcccgagtccactgttacccccattaccattcccgtcgtctgcagcatcgtagctgccgacgatccccgacagctatccaagtagtttttgctgggcaataatgcgccggagcaggtcgggtcggcgatgtggagcgtgtttcttggtgcgattgaatttgaacttgcctcgccgccgcttgacatttcgctaaataaacgaaaaaccgaattattcaagttctaaggtaattgcaattttttgccaaaatacttacacctttctgagattcggttgtggggagtgcaaggaagagcttggcggccgatgacttccattggaggtatgcgtgtggtcctgtggttaaacattgtcttatagaaccattcgaacgctcgttgtttggcgcgtttattatgcagtggagctgaatatcgtgagacaagacggaaaagcgattgtaagagttgggtcagttcaggtaaggacgacggttaaagcaaggcagaacacacgatattcaactcgtcatgcattctcagtgggaaaagcttactccaaggggaatgaaatcgaaactagccaatttgaccatttaatattctgtattaagtattccaaatcgatttatccaaacttttatctatacattcaacttaaatcatttgttttctttcaatttaagttaatctactcattgttgataaaattataaagctaccggttccggtcacctaacacctcttttaatttttgtgaaacaatcgaaagaaaaggtaatgtttggattttaataataaaaaaaaaaataacaaagttccaaaaagttcggattttcaagaccaaataaaatatttaatggttagttcgatttcggcacccctgttgcggagccttaaacttacggtcttgccatggccatatggtcctgtagagcggtgcgtcgctgttgcggcgtgctgctcgaaatgtgtgcattccgcgattttggtcaggccattataccggtatcggtacagctctgactgtcgaatgcgcagttccttttcgcgctccagtgatcccaatagccgctcatactcgttacacgtgtagaactgggcgtagacccgaaatctgtcccgaaactcgcgctgctccttggtgagtccttgttgctgagcgtaatttctgtttcggaagaaatttgatactaattgatagtccctgaccatccgtttcctgcgagcacgctctctgagtcggcgggtgtatatgtcaacgtgggccagcttaagcatcacatccacctccgtatcctcggagcttaatgagatgttcgagatcagttgctctgccgtgggatcgtactcccgctcaaagctgtccctgttgggcatgtagcccagctgcatggcctcatcggagttgatttccagtggaggcaaggtagagagagcattggtgcccagaggaccagcgtcgtcgtctccagtgtgatcgataaggcggggtctctggctctgggccggcgtccaagtggcccttccaatcgtgccatttacaaacttattcacgtactcctctttggcatcctccgctgacttcgtctcaatgtgcttgctaatgtcctcccagtttccaaagccgtactgctcgattgcatccaacaggcggatttcctctcgtgccgtccacgccccctttccacgaaatacactcaatatggaagtgccggtgtccatgaactggtaggagtggttgttttgatgggcgccgatctccgcacctgcggcaaagcactgcgcaaaaaataaacaatacaatataaatacagagtcagctgttttttaatcaatatggtgaaattgccggttgtgtgtatgtattatttgaatgtctagatgagtcagtttttggttccaaattggcgacgcatctctagattgtacgagtgtgggtgtaacagggtgggtcgattatgttgacaaagaaaacgtgtaaatagttcctcgataaaaataatttgattaggaaattaaaacagaaacatatttcatattccctaaatttacgctttgtcaggcctttttttaatacaagattcagacacttattttgacatttttttctttttaatttatggcatttaactaaataaaaatgacactgctaattcgtaaggaagtaatttttaattaaattaactacgatagtctacctatttaccaaaatcaataaacaaatttcctttaaattaacaaaaagttaaagcaaatatttttcttgtcaagatctgggtgacgttaatttagaggattgaggccatatggccattagtttgaccatccaaagagggtgattcaagaatattttgttaaaataactgatttttattatttacaaatctatatacaagtatctagaacctcaaaaagagcgaaccaccctactgcaacatgtatacgtgcgtcgctcgacggcgtgtatgtgtgagttacttacttgcagacacaaatcgaagttttcgcactccgcgcagtgcactcgaatgccctgaatatcatcctggcaatttgtgcaattatactttgtgaataaatccgcgattgtggtcattttgggccaaaacctggattttcacgacaattatgagttgtgcgaaaaaaacctatgccagtaatgtgaccagacgcgaagtcaacgccatattgctctactgagaattcttatatgtacggccaacgaaccgaaccagttcatcggaacagtgccgcctatatagctagtcttaaagcctttttagctaattttcataattctgttgaatctctgaattatagttaatttctaaattatactacttaccaaaagtaccaacacattaaatatagaatacaaatttcaaacattaggcacatgttcaaaactctaatgtttatgcgttaaatattgatagtagtttatttaattattttaaaagtttaattcgagtgttttgccttttttaaattatcacaaaaaataatattaatatatataaaataaaactaaaataaaagaagtgcatatcaaaccaaaacaaggtaaacataaatacgaatatgtgatggttgaaacatttgtagcgtggtgctgaataaaaatataaaaaactcatgtgcttaaatgcagttcgatacgtaaatttaagcggtggtcaggattaaaaacttaagctaaattctgagttacaaaaaaaatataaaatgggtaaatatcttttgtttcaaacaaaaagtgtaaaagtaataactgccgaaaaatatttcggttgcttacatctaacatgaatagggcgtgggactgccgagatattgtaggttacaatcattacaatcattgggaaggatttggggtaggctacgctgtataaatagttgattattcgattagttcatatggtgaatacgtttatattattgttagtattgctgtcttacaccgagcagtagccgaattgttatgggttccagatatctcagtgggcggtgaggactagtttgtgttgcatgtggctttggtggcattgttgctagtttactcttgctagttagcttggaccagagaaaaacaaaacgagttacacgatacaaaatgggttaacagatcttaaacagatatggcaagttacttgtgcagctgcgcttttcaaaaacacgcac

SEQ ID NO: 20429 - DNA, 2147 bp, DROSOPHILA
ttgacttcgcgtctggtcacattactggcataggtttttttcgcacaactcataattgtcgtgaaaatccaggttttggcccaaaatgaccacaatcgcggatttattcacaaagtataattgcacaaattgccaggatgatattcagggcattcgagtgcactgcgcggagtgcgaaaacttcgatttgtgtctgcaatgctttgccgcaggtgcggagatcggcgcccatcaaaacaaccactcctaccagttcatggacaccggcacttccatattgagtgtatttcgtggaaagggggcgtggacggcacgagaggaaatccgcctgttggatgcaatcgagcagtacggctttggaaactgggaggacattagcaagcacattgagacgaagtcagcggaggatgccaaagaggagtacgtgaataagtttgtaaatggcacgattggaagggccacttggacgccggcccagagccagagaccccgccttatcgatcacactggagacgacgacgctggtcctctgggcaccaatgctctctctaccttgcctccactggaaatcaactccgatgaggccatgcagctgggctacatgcccaacagggacagctttgagcgggagtacgatcccacggcagagcaactgatctcgaacatctcattaagctccgaggatacggaggtggatgtgatgcttaagctggcccacgttgacatatacacccgccgactcagagagcgtgctcgcaggaaacggatggtcagggactatcaattagtatcaaatttcttccgaaacagaaattacgctcagcaacaaggactcaccaaggagcagcgcgagtttcgggacagatttcgggtctacgcccagttctacacgtgtaacgagtatgagcggctattgggatcactggagcgcgaaaaggaactgcgcattcgacagtcagagctgtaccgataccggtataatggcctgaccaaaatcgcggaatgcacacatttcgagcagcacgccgcaacagcgacgcaccgctctacaggaccatatggccatggcaagaccctccactgcataataaacgcgccaaacaacgagcgttcgaatggttctataagacaatgtttaaccacaggaccacacgcatacctccaatggaagtcatcggccgccaagctcttccttgcactccccacaaccgaatctcagaaaggtcgaaatgtcaagcggcggcgaggcaagttcaaattcaatcgcaccaagaaacacgctccacatcgccgacccgacctgctccggcgcattattgcccagcaaaaactacttggatagctgtcggggatcgtcggcagctacgatgctgcagacgacgggaatggtaatgggggtaacagtggactcgggagcgacgacgggagtgacttccacggctacgacgatggcgaatctgccaacgaactcggcgaagggaagccaacaacatctgcagccgctgcagcagcatcctcagctcctgcaaagcggcaaccagcacaaaatgcaaaacgaggccgccggcggaggcagtgatcaggtgcccagcatgagcctgaaattgcgcacccagctggaggaactaaaacatctgccacagccgccgggcagtgaactgctcagtcacaacgagctggatctgtgcaagaagcataatattacgcccaccacctacctctcggttaagactgtctgcttgagcggagcaccatcgttgggtagtcctatggagacttcgctgcgcaagttctttatcaagtgcggctggctgagccactgaacatcttccaacttcccgctccccttcgattaagagccacatgcatttccaaggacttcactttatttttgtattagttagaataggttaaagacatttttatactgttcaactgtcgttggcattttcatcaaggtaaaaactacaaaactgaaaatcaatttacttgtatcaagtcaagctcaattacaataagtgttgttcctttgtgtgagatgtcgggattcagatattgtgtattaactaagcttaagtaggggacccaaccaattgaatatgtatgatatgaattgtaaatgaagtaataaatgtaatagtgaatgt

SEQ ID NO: 20430 - protein, 418 aa, DROSOPHILA
MTTIADLFTKYNCTNCQDDIQGIRVHCAECENFDLCLQCFAAGAEIGAHQNNHSYQFMDTGTSILSVFRGKGAWTAREEIRLLDAIEQYGFGNWEDISKHIETKSAEDAKEEYVNKFVNGTIGRATWTPAQSQRPRLIDHTGDDDAGPLGTNALSTLPPLEINSDEAMQLGYMPNRDSFEREYDPTAEQLISNISLSSEDTEVDVMLKLAHVDIYTRRLRERARRKRMVRDYQLVSNFFRNRNYAQQQGLTKEQREFRDRFRVYAQFYTCNEYERLLGSLEREKELRIRQSELYRYRYNGLTKIAECTHFEQHAATATHRSTGPYGHGKTLHCIINAPNNERSNGSIRQCLTTGPHAYLQWKSSAAKLFLALPTTESQKGRNVKRRRGKFKFNRTKKHAPHRRPDLLRRIIAQQKLLG

SEQ ID NO: 20431 - DNA, 3791 bp, DROSOPHILA
catcgcggacaggagcagtcgaagcacttgcccaccttgaggattttgcgacgctcctcggtgcccaggagcacattggtgtagcaattgtaaaggatctctccggcggctataaaccgatttgcgtagacctttatacgttgctcgtcatcgattgagatgaccaggttgggcgtgcagctgtgggcgaagagtcctgcccggcgatacagtcctctcatggcgccacccacctccggggcccttatctcgtaggcatttatgtccaggatgcctaggagaccctgtactaggtcctcatccgccgcaccccgtagttgtgctagcactccaccataatccagaggagtaaatgcgtgctcctggtagtttttccagacttcagtccctcttctagtcataagttgggaatccatttgggacatttcctcgtacaagggcagggtttcctcgtgctctcttaacagcaggcatttcaaaactggctggatttcggtgtgctcctttttctgaagcagctccacctggtcgtccgaaaaattcatttcagcaagccttttgcaatctcgttcgtcatgatccgagcaatcctcacacaaagctaacagacggcactttctaagggtttacataagattcgtaaatggataacacatttgtatggagtccacctaccgacaaaaactctcggttagattaaagcacttggagcagcgtctttcgcccattaggggcaaaaccacgataggattctccagcagcagggtctcgccagcccgaacattacagagggcaaccgcaaatcttcagggaaacccacaggggttaaatattttaaatgggttatagatgcacccacctgcccagcgtgtcattctgctttatctcgcacttccttgcaaaatcgtcggttactgcggccattctctgtttcccgttccctttggctacctttggcatactgacaacacaaccagcgccatgctggcaacttatttttaattgaacgacaattctttatttatttcttggtcaatgattccccccacccagccatacgttgaaccatgtcgccggtacacaatgtaaaagtggcaacaactgaagggagcgcattgtgttcgcttcccttcgactaatcaaatttgttttagactaaaaattgccggagcagggccacaaagtggatataagatatgtacccaaaatggggatattatctgccgtatttcttcaaatcggactcaatccgctccagctccattgaaatccggtctgcaagatagccttctgccgagttttctggctcaaagcgaagtaggtccattgcttccgtggccaccagactcgcggtccttaaatgagcctgtgaattgcatttatttaataattgcaattttaaaagggtattcactttactcaccacatattcttttttgctcagatcactttcggcaaattgcaattccaccagctccaccaaggccagcaagtactcaaacagaccaatggcatacagcttggagatgcctggaaccacagcccgacagacgggcagtaagtcggagcagagttccacccggcgggcgagaagtttcttgcacggctggtccatggagttcattaaagcagccgctcgcagaatactggcaatgttctgcttgatgtccagcagcatgaaatgattgggatggagcagtggcccgtactgggtcagtagagcttcgtatacctgcaggtcacccatggcgtctactaaggccgatcccactgcagcctgtagttcgtggacctcggcagcggttaacagggctctacaatccgggcagcgccagtctccaagttttccatttgaatcaatctcgcaaactgaaaatccggggcactccttgcacttcaggctgctcatgtgggtgcccatctcggtcggatccagacagcgcgagcagatacactccagtcttctacttagacgcagttggtgttgtctctgactggtgcccatcagaggattggtgtacgagttgtagatgatgtcgccaggctgcaggggaaccgccgcatatagcttcatgttgaactgttcatccaaggccaccaccgtgtttggaacgcagtggtgcggtaaagtagcaccccaaacaaaaattcccttcaaggtatcaccatcctttgcggtcacctcgaaggaattactgtcgatacgtatgcaatgggcgtgaagtgcatccgaagttagctcctgagtgggtagaacatccgctaggccactctccattagtggacgcaccactagctcctcgtgctcttgccacattccttctccgtcgcggtaatcactcagatttataggaacatcgatgagcatttggcaatcgccttttgtacgaggattctctagcagaagaaggagctttaggagtccacatatgccaaagttcttcacaagaatatccttgcagagggcttttcctgctccgctggtgaaaaactcacactcgaattcatcatgctggttgcagtccatgcacaggggaaatacctgacaccttcggcatatcacataggattcctgaaggcattgcgcgcacttcagctgatggcattcccagtgtggagctaccagcaagggtcgctcctccaatatggtatctcccggttcgatggctatactagccaccagatgcctgcacagaattacactttaactattgttttagaaagctatttgaacttacctgcccaacttctcatcgtgagcatgctgaatattttcgccaaattcttgcatcgattacgtctgttgcctggcgagaaaagtaatttagtgattctgccatcgccgtcgtggcttgtggttcgtctactcacctaaaacgcactgagcaattataaatatactctgcagtgctgctggctgaggaatatccctctttttcaggagccctgtcgtattgctaagtacttttgctaattgcgtgcatagctcgaacgagatgatgacttatttatagaatcactcgtttggaagaggtgatgccgcactaacgtgtctacttttcactttattttccctttacgggaaagatatgtatatggacatttttgtgctattcttctcaataactatgttgtttattgttctttataaatgtatcaaacattgtgtgtttatctgatattttttaagtcgataatatgcatatatatatgtatttaattagttttacgaggggacaatgttagacttaatttaaagtgttatcggctcttgtggaatacataatattttaagaaaacaaatgaagctacattaacagtagtaaaaggcatgctctaagaaaggctactcgtaaaacatagacgccgccaattcaattggtcaaatgcgtgcgggaaaaacaagaacaaatatgtattttatacaaaaaaaaattaaacaagtttcctattcctcatcctcagtgctagtaatcctcatggcttccgctgtctctacctggccgctggcgcttggtgatgctgtgggaatcggcgtaggcgttggcgtcagcgaactgttggaaatggcgtcaatatcatcgtcaaactctacatcctcagcatgcatcagcttctttagatcaaacggagtttcctgcgaaaagacacagtatcaacatttctgatattctactttatttattttgagtcattacctttacttcatcaactcgctgtcgatcatgcagcgcactcaagagctcgcgaaggtgttgattctctttacgcaatcgctccctttccatatc

SEQ ID NO: 20432 - DNA, 1683 bp, DROSOPHILA
atgcaagaatttggcgaaaatattcagcatgctcacgatgagaagttgggcaggcatctggtggctagtatagccatcgaaccgggagataccatattggaggagcgacccttgctggtagctccacactgggaatgccatcagctgaagtgcgcgcaatgccttcaggaatcctatgtgatatgccgaaggtgtcaggtatttcccctgtgcatggactgcaaccagcatgatgaattcgagtgtgagtttttcaccagcggagcaggaaaagccctctgcaaggatattcttgtgaagaactttggcatatgtggactcctaaagctccttcttctgctagagaatcctcgtacaaaaggcgattgccaaatgctcatcgatgttcctataaatctgagtgattaccgcgacggagaaggaatgtggcaagagcacgaggagctagtggtgcgtccactaatggagagtggcctagcggatgttctacccactcaggagctaacttcggatgcacttcacgcccattgcatacgtatcgacagtaattccttcgaggtgaccgcaaaggatggtgataccttgaagggaatttttgtttggggtgctactttaccgcaccactgcgttccaaacacggtggtggccttggatgaacagttcaacatgaagctatatgcggcggttcccctgcagcctggcgacatcatctacaactcgtacaccaatcctctgatgggcaccagtcagagacaacaccaactgcgtctaagtagaagactggagtgtatctgctcgcgctgtctggatccgaccgagatgggcacccacatgagcagcctgaagtgcaaggagtgccccggattttcagtttgcgagattgattcaaatggaaaacttggagactggcgctgcccggattgtagagccctgttaaccgctgccgaggtccacgaactacaggctgcagtgggatcggccttagtagacgccatgggtgacctgcaggtatacgaagctctactgacccagtacgggccactgctccatcccaatcatttcatgctgctggacatcaagcagaacattgccagtattctgcgagcggctgctttaatgaactccatggaccagccgtgcaagaaacttctcgcccgccgggtggaactctgctccgacttactgcccgtctgtcgggctgtggttccaggcatctccaagctgtatgccattggtctgtttgagtacttgctggccttggtggagctggtggaattgcaatttgccgaaagtgatctgagcaaaaaagaatatgtggctcatttaaggaccgcgagtctggtggccacggaagcaatggacctacttcgctttgagccagaaaactcggcagaaggctatcttgcagaccggatttcaatggagctggagcggattgagtccgatttgaagaaatacggcagataatatccccattttgggtacatatcttatatccactttgtggccctgctccggcaatttttagtctaaaacaaatttgattagtcgaagggaagcgaacacaatgcgctcccttcagttgttgccacttttacattgtgtaccggcgacatggttcaacgtatggctgggtggggggaatcattgaccaagaaataaataaagaattgtcgttcaatt

SEQ ID NO: 20433 - protein, 488 aa, DROSOPHILA
MQEFGENIQHAHDEKLGRHLVASIAIEPGDTILEERPLLVAPHWECHQLKCAQCLQESYVICRRCQVFPLCMDCNQHDEFECEFFTSGAGKALCKDILVKNFGICGLLKLLLLLENPRTKGDCQMLIDVPINLSDYRDGEGMWQEHEELVVRPLMESGLADVLPTQELTSDALHAHCIRIDSNSFEVTAKDGDTLKGIFVWGATLPHHCVPNTVVALDEQFNMKLYAAVPLQPGDIIYNSYTNPLMGTSQRQHQLRLSRRLECICSRCLDPTEMGTHMSSLKCKECPGFSVCEIDSNGKLGDWRCPDCRALLTAAEVHELQAAVGSALVDAMGDLQVYEALLTQYGPLLHPNHFMLLDIKQNIASILRAAALMNSMDQPCKKLLARRVELCSDLLPVCRAVVPGISKLYAIGLFEYLLALVELVELQFAESDLSKKEYVAHLRTASLVATEAMDLLRFEPENSAEGYLADRISMELERIESDLKKYGR

SEQ ID NO: 20434 - DNA, 1664 bp, DROSOPHILA
cactcacagggtaataaccatcagagtgtccagaaacatagcaagaagagatccgcaaagcccccgagggcacccactcagcccaggcaggagaagctacgatcgcacgagcggtacgatctcaagatgtgcctgaatgaccggaagctctacgagccgcgtctggtgcccaaggagcgtcagcagccggagaagcgacccctacgaatgcgtcgtcccagaaacactcaaaatgtagccaccactctagggaatcctggtgagcatgctaatggacagatagaacagccctgtgacatggatatgcaatcccttggacccgacgatatgcaaacccagattcagatgaccgccgatgttggcaccagcagttcggtgagcctaatgcccactgtgacttatcagcgtgctcaccctttcgaggacggccaggtggagagatcaaagccaccgtcccgagatgagcaactgcgtcgcgttttgctggatgcctttcacatggtatcccgttcgcaggtgaaacaggtgcttgatccactcatgcgatcgctgggcgttatactcgctgaaaagacagcaaaggcaggaggtgtacaccaggagcagtagatcctccaagcatcgatcattttatccatctggctgtcgtctaaattgctcattttccaaaattgtttaattattattcactagttccgcttgtgtcggtcaaatgcgagactaaattgttaagtattgttcgtgcaaataaaatgctaacttcgaacgaattaattaatttatttaattttttaatatatgtacataattcgatctatgaaccagaaaaatgcaatcagtgcttgtttgtattttgtttatttgtaagagatatcaacaatgattcaaagattatttttttatataccatttatcagatatttttgtgcaagtggagaatcgtagtgggtggcgtggttgtgggcgtggctctgggcgtgggcgtggtcgtgtgagtgagtgagatagcaaaagagaaatgtaattaatttaagcattaacaatccatctacgcccaccaacagctccacaccatttgaatgcacttctcgtgttcctgtaaaatttaaaaacggaattttccaaattttccaaatttcccaaattttccattttcacatccacgaccttgctgctgttgctgcgttccccggcgattggatcaacaaattggattactacaaataccataagaatagataatatacatggatagcgatgtgaaatggttgcgttccggattctttaatcggagcaggccttgcacaacggttggttatcctccacgacaaaggaactggccgtgatgggtgttttgcatttctgaaatcatagatattaacgtaaccaattatacactcctcgttcgattagcagtattagtagtaaaaggaggttatatatgtacataccttgcacttgaagcactcccgatgccacttggcgtcgagggccacgatcgcgttctccgtaatgggagctttgcaattgccgcagcgggcggcgaacatatgctcgaagtctgtccggcagtagggaagcccatcgtgctcgtagaaggaggagcccgccaattgctgcatgcagggtccgcggcacaagaaacattcctcatgccacgtctc

SEQ ID NO: 20435 - DNA, 575 bp, DROSOPHILA
gagacgtggcatgaggaatgtttcttgtgccgcggaccctgcatgcagcaattggcgggctcctccttctacgagcacgatgggcttccctactgccggacagacttcgagcatatgttcgccgcccgctgcggcaattgcaaagctcccattacggagaacgcgatcgtggccctcgacgccaagtggcatcgggagtgcttcaagtgcaagaaatgcaaaacacccatcacggccagttcctttgtcgtggaggataaccaaccgttgtgcaaggcctgctccgattaaagaatccggaacgcaaccatttcacatcgctatccatgtatattatctattcttatggtatttgtagtaatccaatttgttgatccaatcgccggggaacgcagcaacagcagcaaggtcgtggatgtgaaaatggaaaatttgggaaatttggaaaatttggaaaattccgtttttaaattttacaggaacacgagaagtgcattcaaatggtgtggagctgttggtgggcgtagatggattgttaatgcttaaattaattacatttctcttttgctatctca

SEQ ID NO: 20436 - protein, 82 aa, DROSOPHILA
MQQLAGSSFYEHDGLPYCRTDFEHMFAARCGNCKAPITENAIVALDAKWHRECFKCKKCKTPITASSFVVEDNQPLCKACSD

SEQ ID NO: 20437 - DNA, 3663 bp, DROSOPHILA
aagtgcaaatgtagacaaattttccctgctatttgaaccgaatcggggagctgcggagtccggattagagctgtacccaccatccttgagcagctgacgcatctccttggtgcgctggaagttaatgtcctccaggagctgctgcagaggcgtctgcgaacccttcaagagggcggcggcggcactggcgagggccatcctaaagggggattttcacggctccgcgcttccggatgacgaatgtcgatgtagaatggtgagtattactatttcacaacgtccaacacattacggcctttgcgggggtggcggcaacgttgcggggacgcggctagtgatgtatatattgcagcatttgttgttgctccacggttggaaattttttgcagtcgcagaatcaagcggtgcagaggagcaccttatctccacggcacatgcaaatcgcaactgagcagcaaaccctcgtttttttcccacttgggggttgttttatcccttattcgcggtgcataccccatctgtattatcagttatcagctgttcccataatttcactgcctctttgtgttatttattcggaaatgtcgaaaattccacggttaactcttttgtctagctgagcttttattgtttaatgcaaaaaaaagataaataacaataaataaactcagtagtgttgcaaaagcggtaaattaaacgataacagcaaacgtgcggctcttcgattaaagctctatatcagttatcgaatttaaattgatttaaagtttcattaaaaagtaatgcaaactagtattatttcctattgttcgtgaacattcctaacaatttcggtttgatttgatttgaaatttagctcagttaatattgtatcctctttttttttcaaatttttaatcaacaagatgaatgctatacacatgaataagtcattagttaaacatgggaaacaatgcttattgaattcaaataccagttttaatctgcaaactcgcagatcttattgatttaccacatcgtcatcggattcccgaagattttttatatcatcctgcagctccttcagctctcgaagcattgatcgcgtcagctggccctctggagtggccagtggctcaaatagaagcattcgcagagactcccgcagcatgacctcaactcgttccaattccgcctagaaaaaatttcattaatttgacattaaggaataaatccaggactttcccaccaggaggtcattggcactgtgctccatttcagtatacatttttctggccaattcggcctgtgtgttagccagttcatagagggcgatagccttcaatctggagattccaggagttacgaccttaagtaccaacaatatctcctggcacaaacgaatcttccgctcgtatactttcttatttggtcgggttcccatattctgaagaatctgtcgcaatatagaggcgatattttgctttagatcgagcattaggaaatgattccgatgaagtaggcgacttagcttggccaagagtagctcctgccggtatatatcatcccttgcgtgaaatatttcctccttagcacgttccagcatattcgagacaaactcctgtttcagtgtgtgctccggattaagaaggcactgccatattccggtatccggctgacgcactatgtagccatctacgcacgagcattgactgcaaatgaaactgctcatgtgtgttcccagctcggtgggatcctggcatcgcggacaggagcagtcgaagcacttgcccaccttgaggattttgcgacgctcctcggtgcccaggagcacattggtgtagcaattgtaaaggatctctccggcggctataaaccgatttgcgtagacctttatacgttgctcgtcatcgattgagatgaccaggttgggcgtgcagctgtgggcgaagagtcctgcccggcgatacagtcctctcatggcgccacccacctccggggcccttatctcgtaggcatttatgtccaggatgcctaggagaccctgtactaggtcctcatccgccgcaccccgtagttgtgctagcactccaccataatccagaggagtaaatgcgtgctcctggtagtttttccagacttcagtccctcttctagtcataagttgggaatccatttgggacatttcctcgtacaagggcagggtttcctcgtgctctcttaacagcaggcatttcaaaactggctggatttcggtgtgctcctttttctgaagcagctccacctggtcgtccgaaaaattcatttcagcaagccttttgcaatctcgttcgtcatgatccgagcaatcctcacacaaagctaacagacggcactttctaagggtttacataagattcgtaaatggataacacatttgtatggagtccacctaccgacaaaaactctcggttagattaaagcacttggagcagcgtctttcgcccattaggggcaaaaccacgataggattctccagcagcagggtctcgccagcccgaacattacagagggcaaccgcaaatcttcagggaaacccacaggggttaaatattttaaatgggttatagatgcacccacctgcccagcgtgtcattctgctttatctcgcacttccttgcaaaatcgtcggttactgcggccattctctgtttcccgttccctttggctacctttggcatactgacaacacaaccagcgccatgctggcaacttatttttaattgaacgacaattctttatttatttcttggtcaatgattccccccacccagccatacgttgaaccatgtcgccggtacacaatgtaaaagtggcaacaactgaagggagcgcattgtgttcgcttcccttcgactaatcaaatttgttttagactaaaaattgccggagcagggccacaaagtggatataagatatgtacccaaaatggggatattatctgccgtatttcttcaaatcggactcaatccgctccagctccattgaaatccggtctgcaagatagccttctgccgagttttctggctcaaagcgaagtaggtccattgcttccgtggccaccagactcgcggtccttaaatgagcctgtgaattgcatttatttaataattgcaattttaaaagggtattcactttactcaccacatattcttttttgctcagatcactttcggcaaattgcaattccaccagctccaccaaggccagcaagtactcaaacagaccaatggcatacagcttggagatgcctggaaccacagcccgacagacgggcagtaagtcggagcagagttccacccggcgggcgagaagtttcttgcacggctggtccatggagttcattaaagcagccgctcgcagaatactggcaatgttctgcttgatgtccagcagcatgaaatgattgggatggagcagtggcccgtactgggtcagtagagcttcgtatacctgcaggtcacccatggcgtctactaaggccgatcccactgcagcctgtagttcgtggacctcggcagcggttaacagggctctacaatccgggcagcgccagtctccaagttttccatttgaatcaatctcgcaaactgaaaatccggggcactccttgcacttcaggctgctcatgtgggtgcccatctc

SEQ ID NO: 20438 - DNA, 1497 bp, DROSOPHILA
atggccgcagtaaccgacgattttgcaaggaagtgcgagataaagcagaatgacacgctgggcagatttgcggttgccctctgtaatgttcgggctggcgagaccctgctgctggagaatcctatcgtggttttgcccctaatgggcgaaagacgctgctccaagtgctttaatctaaccgagagtttttgtcgaaagtgccgtctgttagctttgtgtgaggattgctcggatcatgacgaacgagattgcaaaaggcttgctgaaatgaatttttcggacgaccaggtggagctgcttcagaaaaaggagcacaccgaaatccagccagttttgaaatgcctgctgttaagagagcacgaggaaaccctgcccttgtacgaggaaatgtcccaaatggattcccaacttatgactagaagagggactgaagtctggaaaaactaccaggagcacgcatttactcctctggattatggtggagtgctagcacaactacggggtgcggcggatgaggacctagtacagggtctcctaggcatcctggacataaatgcctacgagataagggccccggaggtgggtggcgccatgagaggactgtatcgccgggcaggactcttcgcccacagctgcacgcccaacctggtcatctcaatcgatgacgagcaacgtataaaggtctacgcaaatcggtttatagccgccggagagatcctttacaattgctacaccaatgtgctcctgggcaccgaggagcgtcgcaaaatcctcaaggtgggcaagtgcttcgactgctcctgtccgcgatgccaggatcccaccgagctgggaacacacatgagcagtttcatttgcagtcaatgctcgtgcgtagatggctacatagtgcgtcagccggataccggaatatggcagtgccttcttaatccggagcacacactgaaacaggagtttgtctcgaatatgctggaacgtgctaaggaggaaatatttcacgcaagggatgatatataccggcaggagctactcttggccaagctaagtcgcctacttcatcggaatcatttcctaatgctcgatctaaagcaaaatatcgcctctatattgcgacagattcttcagaatatgggaacccgaccaaataagaaagtatacgagcggaagattcgtttgtgccaggagatattgttggtacttaaggtcgtaactcctggaatctccagattgaaggctatcgccctctatgaactggctaacacacaggccgaattggccagaaaaatgtatactgaaatggagcacagtgccaatgacctcctggcggaattggaacgagttgaggtcatgctgcgggagtctctgcgaatgcttctatttgagccactggccactccagagggccagctgacgcgatcaatgcttcgagagctgaaggagctgcaggatgatataaaaaatcttcgggaatccgatgacgatgtggtaaatcaataa

SEQ ID NO: 20439 - protein, 498 aa, DROSOPHILA
MAAVTDDFARKCEIKQNDTLGRFAVALCNVRAGETLLLENPIVVLPLMGERRCSKCFNLTESFCRKCRLLALCEDCSDHDERDCKRLAEMNFSDDQVELLQKKEHTEIQPVLKCLLLREHEETLPLYEEMSQMDSQLMTRRGTEVWKNYQEHAFTPLDYGGVLAQLRGAADEDLVQGLLGILDINAYEIRAPEVGGAMRGLYRRAGLFAHSCTPNLVISIDDEQRIKVYANRFIAAGEILYNCYTNVLLGTEERRKILKVGKCFDCSCPRCQDPTELGTHMSSFICSQCSCVDGYIVRQPDTGIWQCLLNPEHTLKQEFVSNMLERAKEEIFHARDDIYRQELLLAKLSRLLHRNHFLMLDLKQNIASILRQILQNMGTRPNKKVYERKIRLCQEILLVLKVVTPGISRLKAIALYELANTQAELARKMYTEMEHSANDLLAELERVEVMLRESLRMLLFEPLATPEGQLTRSMLRELKELQDDIKNLRESDDDVVNQ

SEQ ID NO: 20440 - DNA, 2783 bp, DROSOPHILA
tactttttaatattagtctgtgagatatgttttaagtagtgcctttagtggtatttttctagttccattgttttctgcctcgaaccaattgattcagtccttatctggacgcctaatttcatgttccagggatacaatctagctgcaggacaacggcgattttcatcgagccatttcgatggcgccccacaggaaacgctcactcgacaacacaaaaaaggcgcgaagcaatcgatttgtgggcggtgggctgttcgtggtgggtggtaatgcacgcccacgcactccgtaaaataccaaccagagcggcaactatcagaggagcacacccccgccaaaatacattcattaaaaacgcattagaaatgacattagaacaaatgttcaaggggtaacgaaaccaaaaaaaaaaaaaaaatggaagaaattacttaaacacagcataaatcgaaatggtagttaaggtctgcggcatttcccccaaatcttgttaaaatatatatatttagaaaactttcattgatttctcaaacgttcagttggtttctgcttaaacaataatttttatgtgtgagttaagaagagataaatcgattttacatatgacattattattaattgcgaagaatcataagaaagtattttgaagtataaccggaatggtttaagaaaaataatacctaatatctgaatactgaattattttatggaaagtatttacagctggaacttaattcatgacaccaataacgtctaattttcgtagttttgagtggtagcggatgtgtagtataaattttactgtgtaatcagttcatttaaattggcattccagctacgatattcgaaatgctctatttccttcgtatgagattactttaaagagtatcgtttcaatggaattccatttgttaacagatcccaactgaaccgtccagctgccccaatgaattttccatcccaaagcctgtcaactaagtttttcaagttttacacttactgtgctgatgatagctgggatagtagcgccggtggtgtccgttgctctccagcgcgtagaaggcgctcatgtcgctggtgtccagtccggatccgccgccgccgccaagagcagagcccacgcccacgctgctgcccgccgagctggcgccgctggagaggctgtggtggctgtgggccaggctgctaccggcgctgccaaggccgttcgtttggggcgagacgccgcccccattgccaccgcccgaggagccgccgccgcctaaacgcggactatcgtaccagctgcgagcggcagcctccgctgttgaggtcatatccatttcgagtataatcttgaatgtttttctgttctaccggggggcaggaatctgacggttctgtatccctctgcggtcgggtggtcttcgctttttatttagctctttgtttagtgatagctatgcatttttcatatacaaagaacactcaactcaacaactcaactctttctctatctggtactcggatggaccggtttgcacggagtcgggcgtggagtcctttggcggcgtcggcgggaaggggaacgaatgctggccggcggccgtcgtctggtggctctggcccatctggcccagcttgtgctccacctgcggctcctgcgggcaggcgaactgacccatgctccaggcgctggcgggggcgaaggacttgtgctcgctggtcagccagggactcagcggggtgtggaagtgcggccggcacacttgaggcgaggcatgggtggagggcatgcgggatgctgaaaagaaagggaaaagggattaagaatttaataaactctcgctgcgttaagttaaatgctgcattaaatcaattatggcccaaatttataacgaagattaaccgactaagccgcgtccagaagcgatcaaaattcgtaataaatgacgttgattttgaggtgtttttcttttttattttctccttttttcatcctctgtggctgccgcgcaaatttgcggaaaagctgcgttataatttatgaaacaccagccagcgaagagagagaaggagccgcctcagaacctctgaccaccactgcaacgctcagccaatgaaccaccattcattgctcgcggccttcgggccaactttgcatatggccaagaccaaagagctggccaaaatggtggagcaaagggtgctgcggggctgcgactgcaactgcgactgggacttctgcattgtcataaattgtttaatttgtatcataaacaatcgcgttaaacttttgtcccagagctaaaaagatcgatcaacggctcgggccggctcacctcggcttttggccgggctaaaagtgtagcctaaatgtctggcagtgtataatttagcagacaccaagtgagatttatgtgcgccaatgctgccggttactccatcgatccgatccgagcctatcctatcccagtcgcccaaccgaacgcttgggatcgacggatccgacagatccccatatcctcgcagcgggtgttttttgtagtttccaggggtggagggggtaggcatggggcactacccaaagggggcaggcacgttgcaattgtttggggcgcacttattcttattattatcattaatattggctgcagctccccaaagagtcgcaagtcgcttgccctcggggcttgtttgtatgtgaaattatttttgattatgcagcagccgcagcaggagcagcaacatctacggcagcaacatcagcggtccaggctggttggccaacagtaggtcagttc

SEQ ID NO: 20441 - DNA, 3113 bp, DROSOPHILA
aaaaccccagtaaaaacaagcagagtgattgaaacagtgtgcttaaaatatagagaaagagttgagttgttgagttgagtgttctttgtatatgaaaaatgcatagctatcactaaacaaagagctaaataaaaagcgaagaccacccgaccgcagagggatacagaaccgtcagattcctgccccccggtagaacagaaaaacattcaagattatactcgaaatggatatgacctcaacagcggaggctgccgctcgcagctggtacgatagtccgcgtttaggcggcggcggctcctcgggcggtggcaatgggggcggcgtctcgccccaaacgaacggccttggcagcgccggtagcagcctggcccacagccaccacagcctctccagcggcgccagctcggcgggcagcagcgtgggcgtgggctctgctcttggcggcggcggcggatccggactggacaccagcgacatgagcgccttctacgcgctggagagcaacggacaccaccggcgctactatcccagctatcatcagcacacatcccgcatgccctccacccatgcctcgcctcaagtgtgccggccgcacttccacaccccgctgagtccctggctgaccagcgagcacaagtccttcgcccccgccagcgcctggagcatgggtcagttcgcctgcccgcaggagccgcaggtggagcacaagctgggccagatgggccagagccaccagacgacggccgccggccagcattcgttccccttcccgccgacgccgccaaaggactccacgcccgactccgtgcaaaccggtccatccgagtaccaggccgtgatgaacgcgtttatgcaccagcaggccacgggctctacctcactaacggacgccagctgtgcgttggatatcaagccgtcgatccagaacggcagtgcgagcggatcctccggcagcggcaccacccacacgtcgacgcccaagcagcgcgaagagggacgcgagtgtgtgaattgtggcgccacatcgacgccactgtggcgacgcgatggaacgggacactatctgtgcaacgcctgtggcctgtactacaaaatgaacggccagaaccgacccctgatcaagccaaagcgaagactgaccctgcaatcgctgcagagtgcggccaaaagggcgggcacatcctgcgccaactgcaagaccacaaccacaaccctttggcgacgcaatgccagcggtgaacccgtgtgcaacgcctgcggattgtactataagcttcacaatgtcaatcgtccactcaccatgaaaaaggagggcattcagacgcgtaatcgcaagctgagctccaagtccaaaaagaagaagggtctcggtggtggctgcctgccaatcggtggccacctgggcatgggcgacttcaagccgctggatccctcgaagggattcggcggtggcttctctgcctccatggcacaacatggacacctctcgagcggactgcatccggcacatgcgcacatgcacggcagctggtacaccggcggcatgggcgctttgggagcctcgagcggactccagggcggcttctccaccgccggctctctcagcggagcggtggtgccccactcgcagccgtaccacttgggtctcagttcgatgggcacctggcgcactgactacacgtgatggagcgggaacaacctgaacaacaatctgttcagttagagccgcaaacttgcccccacgccggaatcgactttttcgagtggcaaatagatcgggacaaaactaatcaagacaacaagaagtaaactgacaaaacacaatgccaaactgaggactccttggccagcaattgacagtggcaccgaacccttgacatcccagcgaaaataataataataattcgatggagtgtgggtggtgtgccaactggacgaacgctggctattcctaattgtaaacattgcgtgcaatttttaattatttaagctttgtcgctgttgttgctgctgatgttgttggcgaggcaagagccaaaaggcgagagccggcagcaataacaaaagccccattaaaattaattaaagggctgcacattacttttattttatttttcctttatggcttttctgtgagtgtttgtatagtgtttccttatgtttcatatttcgcttaattaatttaatttctcgccgcaaattcagcgtatttaattgtgctttatgaactgccataaaacagaatgagggaatgtgaggggaattttcataaatatttattgtgtacatataacggaaaacgagaatcaagcacacagagaactaaaattattatatacaataaacaaaaacagttacaatgcacgtccaaaagtaaacatttttgtataaattaataaaaaaaagaaaagaacgtagaagtaagtgaagttgcttgtcctaattcgcaaaatgcaattgaaaattgcacaaatactttagagcgtatgtctactgtaaactagttaaattattagactctaaacaaaacagacgtgataaacaaaaagtaaaatctatatatacataaatacatacataaacataacaaatttcactagagcgcgccataagcaattgtaaaataaataataacaaaactaaaacagttaagaagaaggaatatctttttgatgtaaagcaaaggccgccgtcaacttttaaaactaaaaacacacacttaaatgttcaatgttaatgcctaagtcttaaaactatacacacataaacatttgaaagccgtacatagacttaaaggtaatgtaataaatttaattaaattaaatgttaaaggcaatttgtaaaatacatttgttagcaatttttgtataattatagtaaaaaccagagatgaaaaaaagcacaaaaaaaagaagatagaattaaacataaaagtaataccctaagttgtgtgtataaagccagattagtcctaacctaatttatgtatgtttataaacagaatacgatatgtaaaactatatatataaatatgatgtattatgtgctaagtgtaaacgataaatgtattgtaatttggccatattgatagttgaatatatataaatcaaagc

SEQ ID NO: 20442 - protein, 486 aa, DROSOPHILA
MDMTSTAEAAARSWYDSPRLGGGGSSGGGNGGGVSPQTNGLGSAGSSLAHSHHSLSSGASSAGSSVGVGSALGGGGGSGLDTSDMSAFYALESNGHHRRYYPSYHQHTSRMPSTHASPQVCRPHFHTPLSPWLTSEHKSFAPASAWSMGQFACPQEPQVEHKLGQMGQSHQTTAAGQHSFPFPPTPPKDSTPDSVQTGPSEYQAVMNAFMHQQATGSTSLTDASCALDIKPSIQNGSASGSSGSGTTHTSTPKQREEGRECVNCGATSTPLWRRDGTGHYLCNACGLYYKMNGQNRPLIKPKRRLTLQSLQSAAKRAGTSCANCKTTTTTLWRRNASGEPVCNACGLYYKLHNVNRPLTMKKEGIQTRNRKLSSKSKKKKGLGGGCLPIGGHLGMGDFKPLDPSKGFGGGFSASMAQHGHLSSGLHPAHAHMHGSWYTGGMGALGASSGLQGGFSTAGSLSGAVVPHSQPYHLGLSSMGTWRTDYT

SEQ ID NO: 20443 - DNA, 3663 bp, DROSOPHILA
caactgactggtttctttttgttgtgtgtcgtcaatctccatgaaggcgcgcagtgagtcaacacaagtcagggattggggaagctctatgtttagtttctcaaatgcctgcctcagaatgggaaaatcgaagccccaaccattgtgagccaccaggcaaaccggactcggcaagtgctttagaaaactgacgatgagttgcgcggcatccgtgtctagctgggactcccgctccagcaagtagttgctcagacctattgggtgataaaatcattatgtgaatgactcacgggtgcattttgcagctaacctgttattctctccgcttccgggtccactaccatggacggctggaagagcacattcaatttgtgcagcacccgcggtgccgctggcagctcctgctgctcatcctggtcctgctccttctttttcttcttaaggagcgcggcttcaaaggcgtaaatgcacaactccgtaatgctcactcggttgttcctgtaggcaggcaagttggtggtctctaggtccagaacggcaaatgtggaaatctttggctgctcctccgcgtgctccgcaactgcatcgttcggagccattaagagcgcaactggtggctaaaagtgcatgtacatagtatgtacatatatttcgttttattcaaaatgtttgaggaccaacacggagttctcattacatttgccaacactactgttgccttgaaaacatagagatggcacagtgaactatcgtgacaaacttataaactcagtgtgtgcactaacagaattgttaatttaaaaaaaagacggttgaaaaatataccagattattgcccaatctagtcaactataataaatgattggcaagaaagcgcgctggcaatactaaacttaaatttgacactaggctcccgtgtcacgcaaagcaggccaggatttgctgtctctaactcagcggatgaattacacctaattcctcacttttgcagcaaacgtcgacaagtgcagttaacattttgtgtgagtattagaactaactagaataattagaaaatggaggccacctaccgccaggaacgggaatggctcaatgcccgcgctcccatgaatggcaatagttccgccaactatggcccttatcgcggctatgacggctttttcggccaattgggccaatcacagatcccaaatcagacccaaatgggtcaaactttgaacggctctgcctcctggtcgttcccctccatgtcctctgactaccaccaatcccctgctgccccgcaggccaactctaactggagccgcgaaagagtcaactggaacaacgaaatgcgtcgcgacccctcgtatcaagctgagccaggcaacaccatcaatcgctcgtggcccggcaacggcggcccttccgacgggagccattggcccactccgaactcatccatgcaggtgacatcgggtgaaaggggactgccggaacacattcgcaaggagctatcgctccttggccccgccaagcgcaagtggttctttcgctatctggacacgggcatcagcaatgaaaaggcccttatgaaggcctcggaaagacgcaccagtccggtacgttctgagtggtacgacaagtcagtttcggctgaccgcggacgcaggcgtccggagcagccgatttcggatgatcgcgttcgcaagcgtgcgaatgatgataactcgtcgggcggtagagcccatgaggatgtaaagaagcagagggtcccagagccgtcatggacctcgaaacagaatagtattaccatggcaataatggcggaaacttatccggattgcgagctgactaatcagcaattgcatgagatcgaagccggccttgtggaggagttgaaaaagggttggaagtccagcatcaattttgggggcattcaatttcttactggaatgatccaagttgtctgcatggacaagaactcccgccaatggctggagcatgcgatttccaagatcacggcgttaccggaaactaaactaatttgttgtccggaggatgatattccggccacaaagggaatcacagtcagagtaccacgttcagctgatgagcccgataaggtcacgtttcaacttttaaaagaccagaatagcgaccttctgtcgaagacttgggaatttggccgtataagccagaccaaggatggcaaggtggtagtaataagctgtggcagtaagtcttacaacctggtgcagaagaagggcttttgccttagctaccgttttaaccagctcaattgccgcgagataagtggcaaggaggccctcaaggcggttcgcagctcagaggctaggtccaccgccgagttatctgaaattgacctaaccgaagaggacggcgaagagttcatttctcatcttgatctgaccgttgtggacgaagtgaagggagatgatgatgatgaaaatgagaatgagatgactgaagatcatgatgaggtggaagaggcagctgaagagcaacacgatgatgtggagttcattgaagaggagccgggcgagaagagcaatgatgtagaggtcactcctgaagcggagggcgaggagtgcgaagagcctcatcaggaggaagagaattgcaacgctgaggtggttaatgaagacacatgctccttgtaagcaagccgatgggtaacgggattcatggtaacgaaaaacttccttgatttataaaatgtgctttatatatctaactcttttcttcttcaatacaataggaacattttaaactgaataacacaccctaaacatatttgacatacgaaatgacatgacaacggaacaaggacagcagtatcgtgcagcttcacaagtgaattctcactgcaatatcagttcatactgcctcaagtcgacattaaccataaggatttcatattataaaatacaccaaagaaatatgtaatatacttctcaataaacactcactaccacatttaaaaactgttttttatttaatgtgtcacatattaaacatgatcgggaaatctcatgtgtaattttgcaacaatggaaatacgaacgttaaatatcgtaaaagacgaaacagcgtttacatacatgcgagtcataccaacaatcgtcttatcactactacttaaggatttcgaatcccatcgtcattggagaatattacattttaaaatacattggttaagatgcatggcacgcatttcttctggcacaagcgaactaggaaccggcgctggtcacagatcgactatcctccgacttggagtcaactggcccatttccccgcttcactgaaaactgcatgtagtcctcacgcgtggctgcctcatactcttgcaccaggcagtcaacagtttcgcgagattcgtccagctcattgaggtcgtccttgaagatgtcctcgcgtcgaaactggtcaagaaaggcgccgcgcttgcgaagcttgtcatactggttgagagctcgctcgaaaagcgagcaaatgctggtgtggttggccagcatcagtccggacactcgatggttgctctgcacgtagggcgatgagcgggaaagggctacctggatagaggtggggccccagggaatgaactgggccatcttgcggtcgcggatgcgctgcagtgacttgtgcacttgagtggga

SEQ ID NO: 20444 - DNA, 1663 bp, DROSOPHILA
acaagtgcagttaacattttgtgtgagtattagaactaactagaataattagaaaatggaggccacctaccgccaggaacgggaatggctcaatgcccgcgctcccatgaatggcaatagttccgccaactatggcccttatcgcggctatgacggctttttcggccaattgggccaatcacagatcccaaatcagacccaaatgggtcaaactttgaacggctctgcctcctggtcgttcccctccatgtcctctgactaccaccaatcccctgctgccccgcaggccaactctaactggagccgcgaaagagtcaactggaacaacgaaatgcgtcgcgacccctcgtatcaagctgagccaggcaacaccatcaatcgctcgtggcccggcaacggcggcccttccgacgggagccattggcccactccgaactcatccatgcaggtgacatcgggtgaaaggggactgccggaacacattcgcaaggagctatcgctccttggccccgccaagcgcaagtggttctttcgctatctggacacgggcatcagcaatgaaaaggcccttatgaaggcctcggaaagacgcaccagtccggtacgttctgagtggtacgacaagtcagtttcggctgaccgcggacgcaggcgtccggagcagccgatttcggatgatcgcgttcgcaagcgtgcgaatgatgataactcgtcgggcggtagagcccatgaggatgtaaagaagcagagggtcccagagccgtcatggacctcgaaacagaatagtattaccatggcaataatggcggaaacttatccggattgcgagctgactaatcagcaattgcatgagatcgaagccggccttgtggaggagttgaaaaagggttggaagtccagcatcaattttgggggcattcaatttcttactggaatgatccaagttgtctgcatggacaagaactcccgccaatggctggagcatgcgatttccaagatcacggcgttaccggaaactaaactaatttgttgtccggaggatgatattccggccacaaagggaatcacagtcagagtaccacgttcagctgatgagcccgataaggtcacgtttcaacttttaaaagaccagaatagcgaccttctgtcgaagacttgggaatttggccgtataagccagaccaaggatggcaaggtggtagtaataagctgtggcagtaagtcttacaacctggtgcagaagaagggcttttgccttagctaccgttttaaccagctcaattgccgcgagataagtggcaaggaggccctcaaggcggttcgcagctcagaggctaggtccaccgccgagttatctgaaattgacctaaccgaagaggacggcgaagagttcatttctcatcttgatctgaccgttgtggacgaagtgaagggagatgatgatgatgaaaatgagaatgagatgactgaagatcatgatgaggtggaagaggcagctgaagagcaacacgatgatgtggagttcattgaagaggagccgggcgagaagagcaatgatgtagaggtcactcctgaagcggagggcgaggagtgcgaagagcctcatcaggaggaagagaattgcaacgctgaggtggttaatgaagacacatgctccttgtaa

SEQ ID NO: 20445 - protein, 535 aa, DROSOPHILA
MEATYRQEREWLNARAPMNGNSSANYGPYRGYDGFFGQLGQSQIPNQTQMGQTLNGSASWSFPSMSSDYHQSPAAPQANSNWSRERVNWNNEMRRDPSYQAEPGNTINRSWPGNGGPSDGSHWPTPNSSMQVTSGERGLPEHIRKELSLLGPAKRKWFFRYLDTGISNEKALMKASERRTSPVRSEWYDKSVSADRGRRRPEQPISDDRVRKRANDDNSSGGRAHEDVKKQRVPEPSWTSKQNSITMAIMAETYPDCELTNQQLHEIEAGLVEELKKGWKSSINFGGIQFLTGMIQVVCMDKNSRQWLEHAISKITALPETKLICCPEDDIPATKGITVRVPRSADEPDKVTFQLLKDQNSDLLSKTWEFGRISQTKDGKVVVISCGSKSYNLVQKKGFCLSYRFNQLNCREISGKEALKAVRSSEARSTAELSEIDLTEEDGEEFISHLDLTVVDEVKGDDDDENENEMTEDHDEVEEAAEEQHDDVEFIEEEPGEKSNDVEVTPEAEGEECEEPHQEEENCNAEVVNEDTCSL

SEQ ID NO: 20446 - DNA, 2660 bp, DROSOPHILA
cagcgactacgagcggcgcacgcagacctgaggagtcagctctgggggccgactgtcgattgtacataaaacacttagacttaagcccggctggcgggccatcgtgtcctggccagccactcgacacagtaaaaccaacccgcatacagtacgttaagcgtagctccatacacctgtacaagtaattcctagcagctaactatacttctataaatgactatacatccgatcgcacagagggccggcattgcatcatccagggtttagtggcaatacctgcaacctaatcttagactttccgtgtataaatcgtagcgtaggctttaactcgtccttcatcattgcggaacatcgtttttatactggccaactgcacggaagatgcggctggctgcgaatgcatgctgtgtggtttattaggtggcccacggtgcgaaccagtcgttcaaaagcttttaaaccaacaacaaattctcactatatttaaacactatcatcatatgattgtaagcacgaaagcaatgggtcccttgaagattcgtattacggttattaaagcaagcagcagactaatcatttgtttaatgtctccattgcattcgaacttttataagacgtttaaaaataaaaaaaatcagtgaatgatccagagaattgtaatctagttaaaattaattatacataaatatttaaattacgttgtagtgtctgagaaatctattatatatatatatatatatatatcaataaattataaaatatataaattgaaccctatgtgttatcataattctaaaagcatccccctatatttaaattgtttacagaataaaattgcccaaattcagatttttctcgttccattttcgaaaccaaccttacggcgctatcttgacccgacgcacatgcatctgcggctcagctgtttcgaacttcgaaaacatttgcctccgcgtttgatttgattgctgcggattaattacaaaataaccacgaaataatggatagcgagctgaacggatcggaacttggcaccaaggaattttgggagtccagctacaaccgggagatacgaaactacaagagccacggcgacgtgggcgagatctggtttgacgaaagtgcccaatggcgaacgatcgactggctgcttaacgaggagaagatcgacaaggaggcgagtcgagtgctggacctgggctgcggcaatggcatgttcctagtgggcctggcaaatgaaggcttcaccggagacctgaccggcgtggactactctcccaaagccgtcgagctggcgcaaaacattgcggaggataacaagctgagcatcacatacaaggtggcggacttaacccagccgcagaacgagctgggccaatttgacgtggtgcacgacaagggaacctacgatgcagtcagtctttgtccggataatgccaaggagaaacgtgctctctacctggacacggtggaaaagttgctgcgaactgctgacagcctgtttgtaatcacgtcgtgcaattggaccgaggacgagctggtggatagctttgccgagaagtttgtcaagtactataccattcccacgccgacctttaagtttggcggcaaggtgggcaatgtggtaacctcaattgttttcaaaaggaaaaaggaataaacatgttgtatctcaaagtgaataacttttttctccgggaaagctggttggactggacacttttatacaaatatacttattataaaaatatttataataacacattaaaaatcaattattaaaatcctacattataaaaaatataataatccattacattttaaaatgaagttcatgctggaatagaatttgttagattgcgctcttttttcgacaaacaggagagccaagtggcaccacttgctggaatggaatggcctgctcctcggcgaaggccaggaaatcaatgccgtaatgctgtatcagttttgtggtcatgactacatcagcctctgcctggtgagcactaagtgctggtatcttaaatattctcgtgtagagactttccaaattataaactccgcgggggggatagcgtttgttctcggcacacttgcatccactgaacagctggcgtcgtgacctaaactcatcgggtttccgcttgggaggggtctgctcctccaagtcatcctcatcgccgtcgcgtaataacttacgcttggcgaatgcctctgtaggctttaaaattggacgatttggagtggtttcgtttctggttcgccaatcgatgttcacgaccgcttctggctccttgaggcaagtttcagtattctgtttgggtttcagctccggaatgatttcctgcacatcgttgggtactttcaactgactggtttctttttgttgtgtgtcgtcaatctccatgaaggcgcgcagtgagtcaacacaagtcagggattggggaagctctatgtttagtttctcaaatgcctgcctcagaatgggaaaatcgaagccccaaccattgtgagccaccaggcaaaccggactcggcaagtgctttagaaaactgacgatgagttgcgcggcatccgtgtctagctgggactcccgctccagcaagtagttgctcagacctattgggtgataaaatcattatgtgaatgactcacgggtg

SEQ ID NO: 20447 - DNA, 660 bp, DROSOPHILA
atggatagcgagctgaacggatcggaacttggcaccaaggaattttgggagtccagctacaaccgggagatacgaaactacaagagccacggcgacgtgggcgagatctggtttgacgaaagtgcccaatggcgaacgatcgactggctgcttaacgaggagaagatcgacaaggaggcgagtcgagtgctggacctgggctgcggcaatggcatgttcctagtgggcctggcaaatgaaggcttcaccggagacctgaccggcgtggactactctcccaaagccgtcgagctggcgcaaaacattgcggaggataacaagctgagcatcacatacaaggtggcggacttaacccagccgcagaacgagctgggccaatttgacgtggtgcacgacaagggaacctacgatgcagtcagtctttgtccggataatgccaaggagaaacgtgctctctacctggacacggtggaaaagttgctgcgaactgctgacagcctgtttgtaatcacgtcgtgcaattggaccgaggacgagctggtggatagctttgccgagaagtttgtcaagtactataccattcccacgccgacctttaagtttggcggcaaggtgggcaatgtggtaacctcaattgttttcaaaaggaaaaaggaataa

SEQ ID NO: 20448 - protein, 219 aa, DROSOPHILA
MDSELNGSELGTKEFWESSYNREIRNYKSHGDVGEIWFDESAQWRTIDWLLNEEKIDKEASRVLDLGCGNGMFLVGLANEGFTGDLTGVDYSPKAVELAQNIAEDNKLSITYKVADLTQPQNELGQFDVVHDKGTYDAVSLCPDNAKEKRALYLDTVEKLLRTADSLFVITSCNWTEDELVDSFAEKFVKYYTIPTPTFKFGGKVGNVVTSIVFKRKKE

SEQ ID NO: 20449 - DNA, 6614 bp, DROSOPHILA
aataaatttttctaataaatcaaaacgttttataaactaaatgctttaaagtttctttatcactacaaaaagattaggtacaaattaacacagaaagcgttatcaaaatagcaactggactgacaagatggacaacatcaccatctgctctggattctcttatcatttcgatggcttttgtttttagttctcgaatgaccccgatgattacaaaaccaactagctaccttcccgacttacaattatacgtcttgccgggcacatagccgttgggtccatcggccacaattaatttgtatccattgtcgccgcgtgtgcgtcgaccgtggttcaagtgggtgggcgcccggggacatgcggtgaccatactaattgtcagccagatcacaacgatgaggcggatgagcagcggcagcgattgccccatctccagtgctttatttcccgcgttatcacttgactcgattacaaagctcaactgcagcaacgaccgtttccagcgaggctcaaaaacagactaatcaagccggagaggcgatagagctatcttcaagtcgagcgaccgacccgatgccggatgcttcgggaactctgattacaagcattactcgcgagatggtcttgactttcatccattggctcctccaataattcctctttactctcgtgtcttttctattccgtatatatttcatggtataaattttgccgtacaatttacaaataatattacaattatatatttccatatcatcggtaacagagctcactatcgtagtttgtagttcataaatttgtaggtttgctttccgctcccgaaatagtgtgaatcgtgaggattcgccttaggaaactcaacattggtcgagaacatagcatatatactgataaatcaaactgggactgatcacacagactggtcacacattcgatcgataaatagggaatacatgtgagaactataaagcatataaatcacaattgccagataaagttaatactaaaaggtcagaataggcgtttcccggtgatccaagagatctgaaaaaaaaagtattttacatcagaatggcgaatatttttgaggtaggtcttcaagtagctcaccttttgcaatgctccaccagggcagtgtcacatatgtgaggaatgcatttagcggcgttgactgctgtcttctattctccttccagaaatgaaaagattgcgtaaagcctcgactggtccataggggattataagcgccatcgtcgagctctaaaagtagataagaggctcacggaattagtttatgttagtcggaattattgaaatgtaagtacacgaaaatcgaagtacaaaaaaattaaatatagttgaagtaaaaagcctaggaaataaccttttattgcctttttgggcacatcgcaccaatagtagatgttagtgccatcgggtgttctgcgcttgggaaccaaatgcagcatcttgctgacatgagcttgcttggctgttctcggaagagtagcactattggcctccccgttgccattggccacatccagcatgggtgtaagttccgtgggcgatatcacgtttgtaatatcgctctgctcgttctcattgttctcgtccggctgcagcagatgactctccggctccacaggcaagctgacacacttttcgaatcgttttggcggagtcttgggcgaatccacgaccggcagctcttctcgtccacgcacactaatcattagcttgctgtcgctctcacttaggataaccatcttggcggctccaactggttccgattcactaccattcagggaggtagcatcatcggcgatctcgtactcctccgatttggaaatgtcaggctttggattgttattattaacagcttttttcttagctgcatccattgccttgaacttgtccttttccttctccttgtttccatctttgtccttgtccttctctttgcctgcttttagccgcttgggcgacatcttggccagaaagttggtagctgagccgttgaccttctgatttgaagacttcttgtcgttctccttgtttttgtccttttctttctccttgtccttctcgagatccttggctttggccgtgcgcagtcttggaggtatgatcctcttggtggccactgggaggctggtcctgcgatcagcagcactcagggaggcactcctcgtaatgctgccaccctgttgcttgcgtttgatctctgatggcagtcggaaactgcttcttttgcccacgagcagctcactctccacactcaggatgctgctttttggcttgagacgggtgggccgcttgtcgggcatcttggccagacaggcgggcgactcgttggacggatcctcgcaactggggcagtacacctcggacatttccggggtgtccgtgttcttggcagacgcccagcgcttcttacactttttgccaccaaagcaattgcagcccgtagttgagctatgtccagtaacgctgacgtccccggaaactgtgacctccacggcggcactcaatggaggcggagtaacagcaggaacagcgacttccgctggagcagaggaagtactctctctaggagattcttgggtcaacttttcttggtcaccagtcgcgagtttatgtgtctcgcagttcggatttgggtgcagttttgccgctgaggccgagaaagcaggacgttgctgatctacaagtagatagatcggtttttgcgttttaaaagcatatacatcgacacacatgtacaaccgatgatcggcccaagcaacttaatcgataattggcaacagaaagcagtggaaataataaaccagaatagggaaacacaaatataaactaggcgatcgatcgataataggtggatgaatggatgtctaatgaatatacagtcaagccaccaaacaatttctaaagggaattgggaatagggacgggactacggaatgtggtgaacgattcccgtttaaagcgaaatccagtgtcaaacaataagccaaacgaaatataattttggttgtccttagtgtattatttgtcctgctttctcggcaatgtctggtgttctctttatatatatactctggagtcgttcttaggggcacacttaaagtatatatataaattcgatagttggaagttttaaaaggaaaatcaatggaacgacaacacattacgagaagtaaatcaggaatatgaacggaaaatgaaaggagcaagcggaaaagcagctttaatttaactacggcaacaactgtaagcagtaatacaattctaaatatcatgcaacttaaggatgctcaaatgaataggaaacaaggataaagaagtacatgttcagactgaccgtcgcgcaaatctccagcctcgatttcggacacctcgctagccagcgagtccagtccctcgttctccgatcgcgccttggctcccacactggggctggtgccactgcccaccatatcctggttattcgagttcttcgtgcgccacccgtaccgtgagaagttattgagattggcactaggatcgctaaggcgtctctgatgtcgataggtgcaatagtcgtcgttctcttcctcccactcgtcccacatgtcagtggcgcagaatcccggctcgctggtgggtgtctccacaccggatccttttggcttggtcaccgccatctcggcgtgtccctttccctgaggtcccttcatccggacaaactcgcagcgcgtttggacaccagctccactgctgaacaggccaaaggacatgcgctgcgccaccttggaactcagactagattgctaagttgcaaaatgtaaaagttaggatagaaaaacatagagcaattcagattggtcataccctggcatcgtacaccttttttagggcatcatagcgtatggaccccaaaaagatcactccttgcactgctccatctttgtcgttagccaccagttcgacgcacaccatctccccgtcgcgcaccaaaatgtcgctgaacacctcgtcgaaattatcgaccatgaagcagatgtgcggatacgtaatctcctcgccttcgcccttggtgtccatcttccgacgactggggcttgcgtagaccctctgcgaatgtcttctcagcacttgcaactcctttggcgacgtccttgtacaaatggccagtgtcaacgtgtaatcgaactgatgaatgaccatgttgagataaaccgtctcctcccagtccacatcaggatcaccgatgggcagtttgcgcgagtccttgcggaatacctccacctcagtctgtttaaagaatagaatatgttcaatgggtgttttatggtaattcctgatgctcacctcaaattttggcatgtgacgagaggagctcttcacgtgctttttgcgcacaaagaagagcaagtcgtctgagtcgatgctgtgcacgggctctgtctggaagaggaaatgacgcacaaacaggtccgtccagtaggtggtgccctgtaggacaacgaaaccgccatctaagagacatataataagaatattaactttctgagcttcagcgtcaatgttatgaaatcaaatgcctaagtgtattacataatttgttatatagatttattatgaccaaaagcgttgctaagcttctataaatggaacgtattaaatcccaaacttcaattgcatcataaaaataattaactatctatgtatattcaaatttgagaatttcgttttggcaatcatatttctaggaaccttagcttcggctctatcttttcgattttgaggacttgtgggaaactgggggatgctgatgttgaccgacaggtgaacagctgtttgcggttttcccatactgccatttgggccgataaaagtaaaagccgcttatgtaaaggaaaacaaagaggttggccaaaagtggggcggaaaaggcacgaacacacaaacacaagcgcagcagggcacacacacaagcatacacatccttaggggttgccctttgtgataaatcgataaagtgcaaatgtagacaaattttccctgctatttgaaccgaatcggggagctgcggagtccggattagagctgtacccaccatccttgagcagctgacgcatctccttggtgcgctggaagttaatgtcctccaggagctgctgcagaggcgtctgcgaacccttcaagagggcggcggcggcactggcgagggccatcctaaagggggattttcacggctccgcgcttccggatgacgaatgtcgatgtagaatggtgagtattactatttcacaacgtccaacacattacggcctttgcgggggtggcggcaacgttgcggggacgcggctagtgatgtatatattgcagcatttgttgttgctccacggttggaaattttttgcagtcgcagaatcaagcggtgcagaggagcaccttatctccacggcacatgcaaatcgcaactgagcagcaaaccctcgtttttttcccacttgggggttgttttatcccttattcgcggtgcataccccatctgtattatcagttatcagctgttcccataatttcactgcctctttgtgttatttattcggaaatgtcgaaaattccacggttaactcttttgtctagctgagcttttattgtttaatgcaaaaaaaagataaataacaataaataaactcagtagtgttgcaaaagcggtaaattaaacgataacagcaaacgtgcggctcttcgattaaagctctatatcagttatcgaatttaaattgatttaaagtttcattaaaaagtaatgcaaactagtattatttcctattgttcgtgaacattcctaacaatttcggtttgatttgatttgaaatttagctcagttaatattgtatcctctttttttttcaaatttttaatcaacaagatgaatgctatacacatgaataagtcattagttaaacatgggaaacaatgcttattgaattcaaataccagttttaatctgcaaactcgcagatcttattgatttaccacatcgtcatcggattcccgaagattttttatatcatcctgcagctccttcagctctcgaagcattgatcgcgtcagctggccctctggagtggccagtggctcaaatagaagcattcgcagagactcccgcagcatgacctcaactcgttccaattccgcctagaaaaaatttcattaatttgacattaaggaataaatccaggactttcccaccaggaggtcattggcactgtgctccatttcagtatacatttttctggccaattcggcctgtgtgttagccagttcatagagggcgatagccttcaatctggagattccaggagttacgaccttaagtaccaacaatatctcctggcacaaacgaatcttccgctcgtatactttcttatttggtcgggttcccatattctgaagaatctgtcgcaatatagaggcgatattttgctttagatcgagcattaggaaatgattccgatgaagtaggcgacttagcttggccaagagtagctcctgccggtatatatcatcccttgcgtgaaatatttcctccttagcacgttccagcatattcgagacaa

SEQ ID NO: 20450 - DNA, 3068 bp, DROSOPHILA
tggaattttcgacatttccgaataaataacacaaagaggcagtgaaattatgggaacagctgataactgataatacagatggggtatgcaccgcgaataagggataaaacaacccccaagtgggaaaaaaacgagggtttgctgctcagttgcgatttgcatgtgccgtggagataaggtgctcctctgcaccgcttgattctgcgactgcaaaaaatttccaaccgtggagcaacaacaaatgctgcaatatatacatcactagccgcgtccccgcaacgttgccgccacccccgcaaaggccgtaatgtgttggacgttgtgaaatagtaatactcaccattctacatcgacattcgtcatccggaagcgcggagccgtgaaaatccccctttaggatggccctcgccagtgccgccgccgccctcttgaagggttcgcagacgcctctgcagcagctcctggaggacattaacttccagcgcaccaaggagatgcgtcagctgctcaaggatgatggcggtttcgttgtcctacagggcaccacctactggacggacctgtttgtgcgtcatttcctcttccagacagagcccgtgcacagcatcgactcagacgacttgctcttctttgtgcgcaaaaagcacgtgaagagctcctctcgtcacatgccaaaatttgagactgaggtggaggtattccgcaaggactcgcgcaaactgcccatcggtgatcctgatgtggactgggaggagacggtttatctcaacatggtcattcatcagttcgattacacgttgacactggccatttgtacaaggacgtcgccaaaggagttgcaagtgctgagaagacattcgcagagggtctacgcaagccccagtcgtcggaagatggacaccaagggcgaaggcgaggagattacgtatccgcacatctgcttcatggtcgataatttcgacgaggtgttcagcgacattttggtgcgcgacggggagatggtgtgcgtcgaactggtggctaacgacaaagatggagcagtgcaaggagtgatctttttggggtccatacgctatgatgccctaaaaaaggtgtacgatgccaggcaatctagtctgagttccaaggtggcgcagcgcatgtcctttggcctgttcagcagtggagctggtgtccaaacgcgctgcgagtttgtccggatgaagggacctcagggaaagggacacgccgagatggcggtgaccaagccaaaaggatccggtgtggagacacccaccagcgagccgggattctgcgccactgacatgtgggacgagtgggaggaagagaacgacgactattgcacctatcgacatcagagacgccttagcgatcctagtgccaatctcaataacttctcacggtacgggtggcgcacgaagaactcgaataaccaggatatggtgggcagtggcaccagccccagtgtgggagccaaggcgcgatcggagaacgagggactggactcgctggctagcgaggtgtccgaaatcgaggctggagatttgcgcgacgatcagcaacgtcctgctttctcggcctcagcggcaaaactgcacccaaatccgaactgcgagacacataaactcgcgactggtgaccaagaaaagttgacccaagaatctcctagagagagtacttcctctgctccagcggaagtcgctgttcctgctgttactccgcctccattgagtgccgccgtggaggtcacagtttccggggacgtcagcgttactggacatagctcaactacgggctgcaattgctttggtggcaaaaagtgtaagaagcgctgggcgtctgccaagaacacggacaccccggaaatgtccgaggtgtactgccccagttgcgaggatccgtccaacgagtcgcccgcctgtctggccaagatgcccgacaagcggcccacccgtctcaagccaaaaagcagcatcctgagtgtggagagtgagctgctcgtgggcaaaagaagcagtttccgactgccatcagagatcaaacgcaagcaacagggtggcagcattacgaggagtgcctccctgagtgctgctgatcgcaggaccagcctcccagtggccaccaagaggatcatacctccaagactgcgcacggccaaagccaaggatctcgagaaggacaaggagaaagaaaaggacaaaaacaaggagaacgacaagaagtcttcaaatcagaaggtcaacggctcagctaccaactttctggccaagatgtcgcccaagcggctaaaagcaggcaaagagaaggacaaggacaaagatggaaacaaggagaaggaaaaggacaagttcaaggcaatggatgcagctaagaaaaaagctgttaataataacaatccaaagcctgacatttccaaatcggaggagtacgagatcgccgatgatgctacctccctgaatggtagtgaatcggaaccagttggagccgccaagatggttatcctaagtgagagcgacagcaagctaatgattagtgtgcgtggacgagaagagctgccggtcgtggattcgcccaagactccgccaaaacgattcgaaaagtgtgtcagcttgcctgtggagccggagagtcatctgctgcagccggacgagaacaatgagaacgagcagagcgatattacaaacgtgatatcgcccacggaacttacacccatgctggatgtggccaatggcaacggggaggccaatagtgctactcttccgagaacagccaagcaagctcatgtcagcaagatgctgcatttggttcccaagcgcagaacacccgatggcactaacatctactattggtgcgatgtgcccaaaaaggcaataaaagagctcgacgatggcgcttataatcccctatggaccagtcgaggctttacgcaatcttttcatttctggaaggagaatagaagacagcagtcaacgccgctaaatgcattcctcacatatgtgacactgccctggtggagcattgcaaaagatctcttggatcaccgggaaacgcctattctgaccttttag

SEQ ID NO: 20451 - protein, 889 aa, DROSOPHILA
MALASAAAALLKGSQTPLQQLLEDINFQRTKEMRQLLKDDGGFVVLQGTTYWTDLFVRHFLFQTEPVHSIDSDDLLFFVRKKHVKSSSRHMPKFETEVEVFRKDSRKLPIGDPDVDWEETVYLNMVIHQFDYTLTLAICTRTSPKELQVLRRHSQRVYASPSRRKMDTKGEGEEITYPHICFMVDNFDEVFSDILVRDGEMVCVELVANDKDGAVQGVIFLGSIRYDALKKVYDARQSSLSSKVAQRMSFGLFSSGAGVQTRCEFVRMKGPQGKGHAEMAVTKPKGSGVETPTSEPGFCATDMWDEWEEENDDYCTYRHQRRLSDPSANLNNFSRYGWRTKNSNNQDMVGSGTSPSVGAKARSENEGLDSLASEVSEIEAGDLRDDQQRPAFSASAAKLHPNPNCETHKLATGDQEKLTQESPRESTSSAPAEVAVPAVTPPPLSAAVEVTVSGDVSVTGHSSTTGCNCFGGKKCKKRWASAKNTDTPEMSEVYCPSCEDPSNESPACLAKMPDKRPTRLKPKSSILSVESELLVGKRSSFRLPSEIKRKQQGGSITRSASLSAADRRTSLPVATKRIIPPRLRTAKAKDLEKDKEKEKDKNKENDKKSSNQKVNGSATNFLAKMSPKRLKAGKEKDKDKDGNKEKEKDKFKAMDAAKKKAVNNNNPKPDISKSEEYEIADDATSLNGSESEPVGAAKMVILSESDSKLMISVRGREELPVVDSPKTPPKRFEKCVSLPVEPESHLLQPDENNENEQSDITNVISPTELTPMLDVANGNGEANSATLPRTAKQAHVSKMLHLVPKRRTPDGTNIYYWCDVPKKAIKELDDGAYNPLWTSRGFTQSFHFWKENRRQQSTPLNAFLTYVTLPWWSIAKDLLDHRETPILTF

SEQ ID NO: 20452 - DNA, 9539 bp, DROSOPHILA
gacaactgtgggcgtggaatggggcggcgatgtcctgtaattgaggatgatgtcttcgattaaagtcacccatcccaattggatggataaaaaaaaatggggaaaatgtgcgatataaaaaaatattactagtgttctgattatagtttctacggatacggtataaatacaagagttgtacttgtgtgattatagtttgtgaagggatgccaaataaaaacaaaaaaggaaaaaagtttagcttgaccgaaaacttgtgcattttcgatttcaactttttcccccgagtatcctggggcgacaaagagtccccttgcgttttttcactctatatttcttccatatttccccacgccaccacaaagcctttctggtcaatcaagtcctgtcgatggaatcgaaaacaaaagtttaactgccttcggggcgcttaagttctatgcttgcttgcttgctatgcactggtgttgctaatttctgggccagataagccatgacaaccgcagatactttaactatgtatgtgtggcaaaaagcagtcgaattaattgcacagctactggaatttatggtcatgcacacaatcaatccaccaccaccaccaccgccgccaccgccaccgtcaccaccaaaaaccaaagccaaagtcctaaattcagagctgggaatcggaatctccttttccacacacccatatatgcaaatactggcggtttgggggcggttgttgggctatttttattgttccctggcatttggcaaataaattaaagtgcacagagattggcattcgcggcatgggcctcactcctccggaacgagcatatttgcttatctgtccaaatgtaaataggggattttcacttgcactgagaacaattaatgaagccgttcggcatgccgaactgagccaacttaatgggctaaataaagaggagggaatatttattaactcaactaagctaatcccaaactgttctctcttttttttttcttacagattccgactccacagagaacgatgccgtggccacacaggacatcctcacgtgcggcgcctgccagaaggcgttcgccctctcggacattgttaagttcatccagcacaaggtgctgcagtgcaacaaggagaactatggccagtgcgccacccagaatccgcagatggatcgcgacgcggaggaaggtcgcccgctcagccttgtcaaccgccgcccctcgatctccgcccccatatccggccgcaaatccgctccagcgtcagcggcagcagctgttgcagcagcagcagcggcggcagcagcagcggcggcggccagcagtacggccagcggatctaggatacacacaccaccaccgagtccggcggaccttttggccgacggagccagcagcacacccaaacgcttagtagacggtgagtggtcaatcacaagtttagcaagttagttttttatagctctgctctccatttacgagtagtagtagttaaatgtattggtttctctcagtgtactaataagctgacccctttaatgcttcttacagagaacgacaataccacgcccaaggacagcgagacgggcgccaccaccctcgattcgaatgccgccccctccagtccagcggccattgagcggcaatcctccggcgacagcagctgcgaaatggaggagcagcaggatcggcaggataagcagtcgcagccgaaacaggcgaaggtcaagcaggaaccctacgatgaggagggcgtcaaccatcatcaaaatcaggatgatgatgacgatgaggagatggaggagcgctcgctggccaagcggcccaaaatggagctggtcgatgccgaggccaacacagtccacacaggtgagtccacccaactccggtctagggtagccatactttcccattctgccaaaatagcatggcgcatatttgggtggcaaaattaaaattccctccaaagcagaagcagggtcgaataaaaaatgtgtttgatgtgatgatcgggccgcgggccctcggcgataagctgcagctgcattaaataaaaaaaaacaccgaacgaaaccaaaccgaaaaccgaaccatggcaaacccaaacccctggttcttcttcaggggcaatgggctaagaaaaaagtacacataaataataatacggggaaaaaagcgcggacactgcgggctgtggactatggacaacggaatatggagtccggacagcggactgcggacttcaaagcgcagctctcaatgctgataaactgcagcggctgtggcagtggcagcaggacgaaaaaggacactcggacagcggcgacaatcgaagccccgactctctacttctctctctctgtgtgtcgttctctttccctggcctttgactttgacatttcaatgcaaatgatgatgaaaagccaaagacagcaatacaaaaaaacaagcaaggactatggcaacggttaagggtaaccaggcaggacaataaagccgcagctctgcagcgctgtagctcggaagctgccctcgagggtaatttgaatgcctcaaaaacagcagctaaggaatgccaaagggggtgaaaggccacttgactggacaaaggacatcgcactggacttgacacacgcacaaaagcgggccaaaacaacaagggatatttaagggaataaaaaacaaaataaaataaatataagtacaagaattccctctacttgaactcactgaaagaggtgccctgtccgttgctttttgttgttgtcgctgttgtttgttaactgcccaagagaggtcagcatatgaaatcatcgcgaaggtcgtgtgtcagccgaaaagcgattgactcacaacatcaaattggccttaaaaattgggatgaatatatatcgcgatatatagatagacagaaacaatagatagctagggggggaaaggcacaagctacacatacgccatttaacccttgaacttttgcgcttttgacacgaacagcgaacaacaaaagtcactgacaatacggcaaaaagttgtttgactctgacaatgccaactgacaagtcacacagatgcacagatatatagatacagatccagatacatctggaaatacagatacacagatacaactcgcacagagctgcgttaattacgcattgttctgccttttttctctttttttttcctttcgttttttgtttttttttttttctgttctgttctgtactttactttactgggctgtccaacctaactccttccatttgggccattgttggccatttggtaattataaatacgccatggcaaccaaccaggcagccacagtgctcgttgaataaaagaaagccaactgtcaacaaaatggatatttgttgcaaaaatgtaaatgcaacatgtccttgccacaggacttttcacctgtcagcgcgccgtgttaattatcaatttcgaggctcagcatgtcgcgaccgcagcgacaatgaaaccccatcaagggttaagggttaaggggttaagggtcacagctcagatggggcgggtgggttatggctcagaccgcaattattgactcatgctggcactgagccaaaaagaaaaaaaaaaaacagtagataagagaagaggagaggagagaaagctgagtgtataaaacaccagcgaatggtcgagtggtcgaaatcaatggctaatgccttcggttcatgcaactccacgtcctgcggaggattagaagtcgcccggtggtgtcccacgtccttttttgtcctttgtgcggaaaaagccggaaaaggattcacacagaccgactggctggcttaggatgctgacagttggcgaagctgcaacaattatcccattacgcgcgcaaccctttcattttctgatcgccacccgctggtaaaatcgctcatacgcactgtgagacgagtgcacttcctggcggtcaatttgccatttccggtgccgggatatccgcgctctttgtctgcgagaagtgcagagtgaaaaatagtaaactttttgaaaaggaatattaattaaataattttgatgcaaacctagcaaatcattttgaaaaaaaaaagaatattgaaacagcagctgaaaattctacgcacaagacatgaatatattattgttttgaaattttctcggcctaataaccttatttctgctttaataatgcaacctttttcacattttttttttatgttgccaaataataatataattattatattataccaaaatataatataataatatttaaatttattttccgtgtcgaaacttcccgcattcgacagctgacagaatcagaacgtgccaaacccgcgccttttgtgttttacccgctcgctcttctcttccttttttttttatctatatgattatattgaagcgcgtgcgcatcgcgagctgtgcgatcaaggatcagacaaataatgcctgatgtttttcgacaacttttacctctttttttttggtggctcggcgatcgcacaaccctttccgctggcagtattcaagggttgctccttgtgttttttcacggggatgaggcattgaaaacgtattatctgtcaaattcatttgcatttcctgtggcatgcgggccagcgatccctgatctcaggatcccgatcctgatcccgctgccaaagggtcgcggcgaaatcatgttaaacacgactcacctttgacagcgccaggaagctgtttcagttctctgccccctgccagcacaagtttaatgtggattcccataaaaaattgtacaggaaagaaaaaaaaaaaggaaaagtgtggagaatgcgtgtcctgtctcgtgcctttccatttccattcatttttatggataattttcggaaaatgttcattctgtgcgctttaaaggcgtcatttaaatgcagagtgcgtcctcatcacgggggtagttcgttcgccatagtttcgatggcattaacaccttgttgtcctcggtggcgacatgtggccagatccttagccctcttcgccttggctttcaatttttatttattagaaattttcgtttttagtggcgacgcaaactaaaaaaaaaaaaaaaataaaaaaaacgggagaagcgaacaggaaaagtgtcttctttgcacatttttcataaattttccaattttacatctgttgcgcgaggcggcacatgtgtcgcaggacataggacataggacacaggacacggggcacaggacgcaggacatttggtgggtggtttttagggctgccatttccgccatggcaaattaacaaatgtcgcgacaaaaccgcagcaaactaaaggacacacatgtgtgtgcgccagtatgtgtgcgtttgcatgaagcaatatcctacgctatattggcaatctccgtcccgggtttcatgcgtgtcctggcgcattttggcatgccaaccgcgcgcgctgcaaaatcaataaataaataaatactggctaggatccgcgcctccgcaaaatgctcattaataattaataacgaaattgccaggcaaccaaaatgtgcgcgtccaaacttctagctaagctggtaatgcaatttaaagtgctcggaaattaaagtttcttttaggctagtttattaatttactccaattatttatgtactgtgtactaaacgtcatactgctattgttgtattttacagaacccagcaactatacgtgctccacgtgcaaaacccgctacacctccgcctggcgcctcatccagcacgtccagcactcgcacggcgtcaagatctacgtggagagtcccggaggaggagccacattgacggtggccacacccgctgccctcaacaacagtgctctggccttggccgccgccgctgcagcagcatccgcttccggtctggcgagtccacagccagcggtcagtcccaatcctgcagttacatcgtcggccaagaggagcagtccgctgggagcagcaggttcgaccattctgtccacctccgttagctccacctgctccaattcgctggtgaacaccagcggtggcagcattagcaacaccagcagcattggctcaccgcaacagcagcagttgcagctgcagcagcagcaggcacagcagcaacagcagcgcgtgcagcagcaacaaagagaaaatctggcttcggccatggccgctggcatgcgtcatcatccactgttgccgccgccagaggctatgcacgccaatcccttccagctgctgcgcatgccactgccaccagctttggcccaggccggaaatgtagttcctacggtggcgccgctctttggacgcccctcgcccgccgatcactaccgcatggagcagttggtgagcgagcagttccgccaccatggtttcaacctggccgccgccgctgccgccgctcaggcgcagttcaatgccaatggtcaggtggtgggtggcgtggtctccggttcgggtgagccacgtcctccatcgtcgagcagcagtggcagccagaggggatcggtgcccccggctgccctgccaccaccatctctgagctcccagcagcagcagcaacagcagcaggcggtgcagcagcagcaacaacaaggcgcccagcagcaactccagtccgcacagcagcaacagcagtcccagcagcaatcgcaacagcaacagcagataacacccggtctggttggtggagctggtggctccctaaaattggaaccccagcagatggatttttactcgcagcgattgcgtcagcttgcgggcacaacaagccctggagctggcagcactgttaactcgagctcgccgagtcctcgacagaagcaatcgccgcatttcgcgagcccctcgccctcgcagcagcagcaacagcaactggccacaatcccgcgaccccattccctcactcctcccgagaagctgggcgatgccagctctgaaaatggcagcttgggactaatcttggccagcaccccgcgttccgcgagcacgccaccctcgaaaacgggagatgtgtccttgcaggaaccaattgcccactgctactcctgcagctactgcgacaaaaagttccgcttcgagaacaatctgattatccaccagaggacccacaccggcgagaagccgtacaagtgcactgcctgcgactttgagtgctcccacatccagaagctgatgaagcacatgcgggtgcaccgcagtccggcggatgatcaggacaaccaggataaccaggacgatggcagcaatgccgattcgctagaaacgaatgaggccgacaacgacgaggatcccaatcccgacgagtcggaggaggagttgggcgacggggataacgatcccgatggcgatggtgacctcgatggcgaggatgaagacgaggatgagctggaagagtgtgaggacatggactataaggcagaggaccttagtgttagcaatcgtatcgatggcaagagccagagtcccaagacgacgagttcaggagccacttcactggtcggtgaattgatggacaagttcggtttgtccaacattgcccagtacagtgaggcctacaagcaggcgctccaggagtcgggacgcaaggaggcagccgccgccgccgcagcagctgctgcagcagccgacaacaataatcgcggtggagcgggtgctccgttgagcgacaagctgaatggtctgcctgtggccgctctgcgtttgcgggatgagttcgccaagaactgcaacatgttccagcagccgcaggatggcggtgctccctcccaagtaccgctcttcaatcccttccccaatcccttcgagctaagcaagcggatgaagatggacggcggagattggtggggcatgtcgcaggctctccaccggaatgaggctctgttcgaaaacctgaagctgaagcctctgggcctgggcggagccaactcgctgatccagggtcctttgctcaagaaggagagtcgccagcgcaacgacacttgcgagttctgcggaaaggtgttcaagaactgctcgaatctgacagtgcaccgcagaagtcacaccggcgagaagccgtacaagtgcgaactgtgctcctacgcctgcgcccagagctccaagctgacacggcacatgaagacccacggacggaccggcaaggatgtgtaccgctgccgcttctgcgacatgcccttcagcgtgccctcgactctggagaagcacatgcgcaagtgcgttgtcaaccagggcaaggcggcggcggctgcaaatgcggtggccgccgctcaggcggcacaggctgcagcgcagcacatccaggccgctgcccagcaggctcaggcggtacaagctcaggcggtacaggcccaggcggcgcagcagtcgcaacagcagcagcaacaactgtcgcccatgggcgtcgttggctatccgccgcagttcgtcagcggtcacaatctctcactgccgggcagcgtgagcggcgacaatgactcgaatgcctcctccagcatgaccggcgtccatcccatatcgcttaaggaggaggcatgacttttcagtggttttcccgtgccgctggcgccaccaccgccactgcaacagcatcagccgcatctgcagcagccgcagcagcaacagaccagtcgcagtcgcatcatgtcgcgcatcttctaaaggtgttaaaacgatttagaaagcaaaaaatataccaagccccctgtaaatatgacttttttgaaaaaagcccccatccagctccttccaggcgacgaaaaaaaaacgaccagaggcatttaataccaaagcaataaccgttatgtaatataattttaaagattcgaaccttttttttgtaacgaaaacaaaaccacaccacatttttttccaacatttttttttcgtgcttgtaatttatatatatagtatataaatatacgtaaatgtaataatataatcaattagtgagtacttgtgtggacacacattttccagtgtattttctaggactaagtaagaaaatgagaaaggatttgtataaaatgaaaaagaaacctactaaacctaaacgtaaaaaaaaaaatatgcaaaaattctgctcccagcgagccacaaaaataagcaaaattatactctaaacttaaaggcattactatatgaatattaccgatatgggcgagcgaatgaatgaatatttttttcatcgatgtacattttttagtaaatctagacccctagcactaaagacgaacacttgtaaaaatcctaaatctaattctaatcatgattatcgtatatgtattcgttttattcgagttccccttgattttatttcctttcctctccttacctttttttttgcatagatataattctattattaaatgtaatttaaacgaaaaaacgaaaaataatcaaatttttttacatacataaataaatataaatgtaaaacacaaattttttttaaacaattttagtctaagctgacaaggaaaatcatgcataaattttgaagcagcagcaaattgaaaaaagatgaagatgcaaattt

SEQ ID NO: 20453 - DNA, 1596 bp, DROSOPHILA
attccgactccacagagaacgatgccgtggccacacaggacatcctcacgtgcggcgcctgccagaaggcgttcgccctctcggacattgttaagttcatccagcacaaggtgctgcagtgcaacaaggagaactatggccagtgcgccacccagaatccgcagatggatcgcgacgcggaggaaggtcgcccgctcagccttgtcaaccgccgccgctgccgccgctcaggcgcagttcaatgccaatggtcaggtggtgggtggcgtggtctccggttcgggtgagccacgtcctccatcgtcgagcagcagtggcagccagaggggatcggtgcccccggctgccctgccaccaccatctctgagctcccagcagcagcagcaacagcagcaggcggtgcagcagcagcaacaacaaggcgcccagcagcaactccagtccgcacagcagcaacagcagtcccagcagcaatcgcaacagcaacagcagataacacccggtctggttggtggagctggtggctccctaaaattggaaccccagcagatggatttttactcgcagcgattgcgtcagcttgcgggcacaacaagccctggagctggcagcactgttaactcgagctcgccgagtcctcgacagaagcaatcgccgcatttcgcgagcccctcgccctcgcagcagcagcaacagcaactggccacaatcccgcgaccccattccctcactcctcccgagaagctgggcgatgccagctctgaaaatggcagcttgggactaatcttggccagcaccccgcgttccgcgagcacgccaccctcgaaaacgggagatgtgtccttgcaggaaccaattgcccactgctactcctgcagctactgcgacaaaaagttccgcttcgagaacaatctgattatccaccagaggacccacaccggcgagaagccgtacaagtgcactgcctgcgactttgagtgctcccacatccagaagctgatgaagcacatgcgggtgcacagtcgccagcgcaacgacacttgcgagttctgcggaaaggtgttcaagaactgctcgaatctgacagtgcaccgcagaagtcacaccggcgagaagccgtacaagtgcgaactgtgctcctacgcctgcgcccagagctccaagctgacacggcacatgaagacccacggacggaccggcaaggatgtgtaccgctgccgcttctgcgacatgcccttcagcgtgccctcgactctggagaagcacatgcgcaagtgcgttgtcaaccagggcaaggcggcggcggctgcaaatgcggtggccgccgctcaggcggcacaggctgcagcgcagcacatccaggccgctgcccagcaggctcaggcggtacaagctcaggcggtacaggcccaggcggcgcagcagtcgcaacagcagcagcaacaactgtcgcccatgggcgtcgttggctatccgccgcagttcgtcagcggtcacaatctctcactgccgggcagcgtgagcggcgacaatgactcgaatgcctcctccagcatgaccggcgtccatcccatatcgcttaaggaggaggcatga

SEQ ID NO: 20454 - protein, 486 aa, DROSOPHILA
MASAPPRIRRWIATRRKVARSALSTAAAAAAQAQFNANGQVVGGVVSGSGEPRPPSSSSSGSQRGSVPPAALPPPSLSSQQQQQQQQAVQQQQQQGAQQQLQSAQQQQQSQQQSQQQQQITPGLVGGAGGSLKLEPQQMDFYSQRLRQLAGTTSPGAGSTVNSSSPSPRQKQSPHFASPSPSQQQQQQLATIPRPHSLTPPEKLGDASSENGSLGLILASTPRSASTPPSKTGDVSLQEPIAHCYSCSYCDKKFRFENNLIIHQRTHTGEKPYKCTACDFECSHIQKLMKHMRVHSRQRNDTCEFCGKVFKNCSNLTVHRRSHTGEKPYKCELCSYACAQSSKLTRHMKTHGRTGKDVYRCRFCDMPFSVPSTLEKHMRKCVVNQGKAAAAANAVAAAQAAQAAAQHIQAAAQQAQAVQAQAVQAQAAQQSQQQQQQLSPMGVVGYPPQFVSGHNLSLPGSVSGDNDSNASSSMTGVHPISLKEEA

SEQ ID NO: 20455 - DNA, 15155 bp, DROSOPHILA
gtgatcgcggtgaggaacatgttatagggagctgcccgctccagctttttggccattcctcccttttcgattaccacaggaatataatctctgatgttcttggcatttagcttctgttttttggccagatttgaggtgtcttgggaagcagctggcccggaggctgacgatccactgggattggtatctagggacccagaactcgaggatccactggcaaccggagcagttacggctggttttgagctagaggaatgtgcttcctgttccttgttggttgcctgcttgggaaacagtttctccagcagcttcaactgggtgtgaatcatctcgctggagtaattggctggtatctcatagtcccccgattcatttcccttcgcataaatggcatcaactgaataaatagacaaatatcatttaatgctacattttattggaatttacttacggtgggcatgggagaactcgccaaaatgaatgggattcttcctgtagcacttttcgccataaggacactccttcatgttgctatttattatttgataacttaaacgaacacaattaacacaaatagaatttcgcaaatgctgtgcaaataaaaaacacaaagcgcgctcagctggcgatggcaattaatcgattggaaaaataccgttggataattaaaaaatatcaaaagtttgcatgacttcctgaaattaaataaatacaagcgaatataattaaagaaaaataactcactcacattacagttcccaaaattactttactcataacatcgataactcaatatatatttagcggagtttgtttcgaattgtttttgggtataatatatatataaagtaaaaacaattttaaattcctattataaacgatagtttccggcaaggcgatagtcagaaacgtacatctctacttatgatataccgtaaggaagctggtatatttcgccagtcatggtcacactgttttcaatggtcaatgttgtgtgtgttgcatttcgtgataaacaattttgaaaaacaatttacgcacatttgcgtgtcgaaaaaccaaacaaaatgtcaaaataaacgagcagttagtgcctaaatccacgcgtgagtagcttccaggccgttttcagcgattttccccacagaatattcggtttttaagtgcaattacgtttgtgtgaaagagaagaaaaaatgtttgcctgtatttgtgctgtgatgctgcttcttcttcatccatagctacgaccgccacacatttgttgttattcttgttgttgttattattgttgttgtgttgggggcaaaaacagaattggctttgtagttgtttttctttgcagggacgatcaccgttgatttcttcctataagaatatgctgcaatatgtgtgtgcagatgtgtgcgcgttgtgtatgtataagtgcgtgcgcgccattaattcaaccaaaaacaagaagaaaaacaaaaaaaaaacaacgaagaaaaagtagcatcacttataaatacacacaataaaattaaatttttattatgttttgaaaatacttgaaattcttgtctgaacatttcccttccaattccacttgagcctctgccgctgcctcggtcggcgtcgctgccgacggcacaggtgcggaatttctaaatattattatgcatttcaagtgtaccaaaacaaaaagcaatcgaaatgcgctgcacatctgggtgaataatcgaattagaaagggaaccttgctctctcttctcacctttatgactcagcttttgggcttaatattgataagtgcgctctccaccctctggctttcaaacggtaaataataaacagcgcggcggcgctcgaatcttatcagaaccgttgccgccagtgatgcccagctccaattggaagcaaaaggggtgaaccaaaattaaaaattttggtatttatatgttgatttgtatgagttagctaaaaagtattttgtttaggtcattaaatatgaacagtttttattatttattcatttaattttgtgtgtatttagtgtgcttatctatgctacgccgcgttggttgcgtttttattcgttatcagcgggggagaaaaatgagcgggaaccgtgtgcattggaattgaattgcagttgctgtcgaaatagctactgcaacagcagttctgtccagaaattacagctaaaaactgcatgtttcggcttcagttgggaataaaactattatattgtagagaaacgaacatatacatttgtatatcattaatccctcatgcaatgtaaggaaagtacttaaatattctcaacattgttaaaaatatcataaataccttgagctatccaagttgtgggcggcaagccaagcgcacatcactgcacttgcagccaaagtggttccattgtcgaatgcaactgaagcgaatcgcgacacaagacgggaatatttgcaatgtgtgcactcaattccacttggcgaaccgctcgtcatgtgggtgggtgggtttgatttctgtagtggttccgatctgggttctcttgggttttcctatattccatttctgcggcttggttcgttgatttaagacagtgagcactggcttaagatgcattattattatatgtgaatgaatatgtaatgttagatttgaccaactttagattacttggtagcacctcaaatctttttttgcacgttgaatcactttaacatttccagctaatctgatttgtgacttgcattcgctatctgctgtttggtttttcaatcccactttagttgtcgtgttaattcccggggcaagaccacaaatcatttggcgaaacgccgcaagaagttctcaataagacttatggttggtctgaagtaacgcccccgatctaaagtttctggcgcccacgcaggacaattgggtttgccttatgcttaaaatgcttttctaatgtatgtttgcatattgtttagctagaaatttaccttcaacttatcgtccctctctttgattggcaatgcaaatttgccaggccgaaaattaagtgcgcaaagtcaatatttcaatttaggcataaaccaacagtgggaaaaataaacccaaaatgcatatgggcaatttgcatacgacgctggttggttggttggttggttggttggtccaagtaactggtgatttggcggtttatgtgcctcagctcggcctacgcaccacaaaaagtggcaaatgcagtcgctaactcaacggcggcctcttgaaatgagcttcgtcgaatgcttgctgcgttttgcttgccaaataattatgttattaattggatttatgcgcagtttgtgcaacaagcaacatgcaaattttcatgtcagtaactcggcgaaattaataaaaacctaaatcaaatgtgatcaagtcattacaatatttatgacgcacaactgtggggcacaatgtaatagttattattaaacaataacttagttaagctcagcatataagcatataatatacaatattatttaatttttttacattcggttttgatagttatttttagcattatattcaccaaacttactgcaataatctggctttggcttatcgccggaaactaattttagatctatcgaaagcgtgatttacgcttttcggttttgtattcccattttgctcaaccagagtctgtgggcggagtgtgcccctcttgttattttttgatatccacataaatgtgtgtgtttgcccctccatccgcctatttggtcctcctgcttttgatcttcttgtcgcgataatccgttcgcgcaatggtaataaaacggcaaagcccaacgacagaaaaagcaacctaaaaattgtcaacacgaatttgaacttatttttagaccccgtcgcaataggattttctctttgattgtcataatacaggcaacaactttattaagaagtactccacagcagatctcttatcaacggcttgctggctttggttttggcttcaaaaactcacagcattggcttttaaatcaaagatcaagagtggctgccttgagcgcagatccgaagtattgtatactcttttctgttaaataaataatataatttataacaagtgttaccatttatggaatcactttcgaacacttagtacaaatgtaaatccaaaattatttccaattacatagcttattttatggagttcttccataaaccagcaatgctaatattaataaataacattgtaataaaccctaaaaatatatatattccccgcctaactcgctcgtagcccgtaaaagtgccacattgagggcgcgaaattgaagctaaaagagacaaactgcgccaaaacttatgaaaacgcaactttaaacagcaataaagtgggaaattgcagcgcataaatctctgtcgccgaactgtcatgggaatagttatgctttgggtggtgggtggttggaacggggcctaaaggggctggcaaggcggcgaagtcatgcaacagacggtggagccaacacccacgcaaagtgagctcgtcttgaatgaaattagcccgtaactagagtttacagtttggcagctactggcgatcgctgttggccagcttgcataccaaatgaccgtcgtcttagccacacaccgtgaactggctaaaactgattcgatattccggcgcagtgctcgatcggcgcttcattgcccatataatgctaataattattgcatttaaaatctaataaatttgtgcattgacaacgcggagttgactggctggcgatgggcagaaccaccattcccagccgctcctattttaatggtgtagatatccatcaaaggctggctaagtggcagcaaagttgtcttgcaactagttggatactctaacttagggatttcacttcaatttaaatgtatatgaagtgaagagtttagagatcagtattaagtatcaacttgctgatcatccatttgttgttcaccttcctgctgctgaatccccaccagcttcggatttcttggcgctcgtctctagtggatcgccgtccagctttgaccataattgtggtgcttgtcattgtttgtgtcgcattggcaacattgaagtacagactgccccgtgcgtgttaaatacatgtaattagccatgtttgtgccatttaatccactcgatagtggactactccgccccaaactgcctgtttttttttttttgctcagaagccgcttggtcgcgcggcgacgcttttctaagaattcttttacgttttgttttggcgcacgcattaggcgccacactgaagcagcacgtttaacccgcaggacaggcggaagggttaagacttggcgttggtttggcgggtaggaaggtaggaggagaagatggacagagggccgaggggcgggtggagccatctcggaaactgtggcgcatactccacatatttatggctatttaagcgaaccgaacgaatcgtggatgccgatgacgatgacgaacttgctgctgctgcagttgctctgctgcacgttgcactttaggaccttttccccaccacagacgagttcagcagaatagtgacgagaggtttgcaataaaagttgctagtgcatttcacatatgtgcaattagtttctgtcgcaatttcatttatgttgaggcccgcagtataaaatgagcaagttagtttgttttacaccaatatttcgactaaataatacccatcattttggacgcaagtgttgctcctgattcctgccactgctgctgtggtccggcagtcattggcattgattggcagttgaacacgcaacaattgttgcatgtttaggcgtcggcagtgacggtgagacgacaacaactgcacaacagcacaacgatgcaacaatgcaacagaggagcagtgcaacaaacactggggcataggaacaaacatcacagcaaagctgaagacttcagctactggcagttgacttttgtcacatgtttagcgagctttaattggcatcgaaatttgtcgacttctattagaagaactgccattctatttgatgttaggatggagcagaagactagaggtgtcatcatttttttgaaattgaagagaaatgctgtttattattcacagtagtatatccttcttccaactatgtttggcgcgcttcgttactactcaacttgcatactactcataaatgtgcatcaatgttcataaacattgaaattatttcaaatcaagatggaactgaaagctatttatttgaaagtagtgtagaccacccaccaccgactggcaatttttttcatttttgcggaaaagcggtggtgtccccgtgttgacagctcaattactcacatgacacaaagcctctgcgtggccccctgcaattatcgcggcaattatttgcaattagaattgagttaatttacttaaaaaaggattttctgccgtgcctgcgcatttttgccccttgacgtttgcacttcggcacgtgtgtgttttgagttttccgcttttgtgcaatttgcgtgcataaatttttattgttccaaagggactacataattattttgttatttttcgtcgttttcacttctgctttcgaggagagtgcgcttcattactatttcgattttactgcgactgtataatgctacccatgtttgcaataagttcgcgtttagtagtgttaaacacgcaataaaagcgaagggagggaggagcgatcgcacataaacatgctcgcattctaagcacacgtacagtccgggccaagaaaataggttcgcttgacttcaattcaaaagatttcgtaacgaaaaaactttagtttcgttgctttacccattaaaaaaaattggcagtgcatttgcgaatagaatttcgatttgtttccgcttattttcgtaccgaaaacactctgccgaaggagggcttcatcgaattttaggttcaattactcgccggtcccacgcacgaaaaaattcgttgacgctgccttctcttaaactcctcccctgaaactacgttcccttcatttttgttgtggttgcggtggggtgtttacagtttgattgtggctgtgggttgacgccacctccaacaccaccaaaggccatgcactgcaaacaaattagtgtgcatctaaaaacagcaatgtctatttaattcgaaaaagagttaagtaaaagagtactcaaatgttaaatcttagttcttcaagtaacattgttatttgaaatacaaatgttgcatatttttctcgccgtgtgatctgctgcacacaaacacgttcgcgctcacgtgctggcgcccccaactgcagatagggcatttgatttgtttaaaacaaaactttcgttgcctgtatgggtgtagtggtgtgcacttggctgccccaaacgcacactgaaaccaattacgagcacaggaatacgaatacgaatacgtcactcagaggtcttcagaaatcagggctgcggactagctggtgataaagaagggattcaatagggatacatacactagatttatactctcttagggctacaataagtacattactaaatagataaatattaagaaaatggaatataataactcaattttccagtcttaaacttattaataactgtagaaagtagtttgtgttacctttagatactttaggatggacctgctgcttcgcatccctggcgaactcacaccgatacacaatacgaatgcagtttgggctgcgttcagttcgtcactcactcagtcagtcagttcgtcagtcagtcagtcagtcagtcagtcaatcaacactcggcgcactcagtttgctgggcaacccgttcggcattcgttgtcgatcggtcgtgtcgtgcagttgacttctgattcgcgctcgctgccatttccactttgcgtaatttacggcgaaaataaaaaataatacggcaaaaggcttaaataaatgaagttattacggtgataacgattgaattgaagactcgcagcggaaatgtaactgctgaggcgactggattggatgcccgatcgtcgtggagggtcgcgtttgcgatttgcatacgaataaaataacattttgatgctgaattcttgtccgtgtgtgtgtgtgtgtttgtgcgtgcaataaaaataaataaaataatatctgcaatctcaacatcatcatgtgtaggttcttagttcgtacatagttctcgtttgcctcgagttgctcgatttttgagttttcctcctcgcatcaaatcgaaactttggcctgtttggttttggtctttatcgcgctgcgtttttgtgtgtgcattgtttgtttatttttaaacatgggtccaagtccctattttctctgtctgttcgtttttttcttgttgttttgttgttatttttgtggcactagtcgtagtaccctttaccacgctttttgcccgctttcaatggcagcggaagtgcttctgtacttctgtacttgtgtacttgccatccatccaccttgatttctacttctacctggctcccatgatttacgccttattgtcactgccgcatttatgattgattatcgattggaatggtatgatacgcatgcgcgaatgcgtgcctgccataaaagtgcctcgatatcctcgctcctccgtttctccagttgagttatgatccctgactagcgatgcactgaaaagaaactcacaatggaatcactaaccagaagaatgtacacagccgatttgaaatgcaattcttcaatttagttactctaaatataagactaaaagtagattcactttaaaccaagaaccatcaattgaatttgctttgaaagcaatgaagaactttccttcgagtgtggttttcttgaaagcagaaagaagactgggccactttgggcgggtacgttgggtacgtgatctcagctcgggtaatatgtaattgcgaattacgattattgatctttaattgatatggggaatgtcccatatgataatggatcataaaggacttattatatttatatttagtatcgttcaactcgagatgcattgagagacaaaacaagaaaatcgtttaagtgcctaaagaaagccactttgttgtttggaaaaccatcaaatctccgaataaacatcataaatatgttgaatatgttgttatgatcgtgtaaataaagtttttatgtaattcctgcgaattaatggggtagtttccccttttgaaaaccgactgattatgtcgaaaacctcacctgcaatcgagctttgcacaaacaaaacgggggcattatcgaaatttgtatgcctgccccactcaaatcaatcgaattccactagagcaccattgccacctaaaaacacacgacactagtcagctgggtaaatacgtagggtagagttctctatctccactaaccccctcgataagtctgtccgccaagtgtcactccgtttgtatcctgagttactgagaaggagagaccatgtgaactggtactccactgtatgtttaattttgggattagttataagcaaaggtgtaccattttcgataaggtaccgattgtttgttcgtaatcctaatcttttggaagaggtttttaagctagttttggtaatcaaaatggttgtgtgacttatcattaatttcaatatattcttgtaggctagtgataaagttagagcattcttagagcaatatatctaccgccggaggctctggttgactttgggcaattagaaaagtgactgcccccaaccactggtcctcgttgaccacgcccccttccatgggcgacaacataaaattgtcaatgctgcgaaaaaaaaaagaaaacggcaacgccccaaaatttttaggcccgagttgagcgagaaaatcgaaattaattcacgcaacggctaatttggccagaaatatgcgccatttggtctgtcgggagcccaatcgagaggtgttttcttgttgtccaagtgctgcacttgttgatttatcgccggcatttaattgcttttgaaattggatttaccagcccgtttgcttgccacaaaaatgggtggttcgcctagcaagttcgccttgtgtggctcgccgatttttgctccagcttgcacaaattaattgctactacaaattttcattcaattaggttttgtcacttttaaatttaatcaaacattttttgacaccttgagtaaagcaacgagattgaggctaagacagccaactggagcgcagccacttggccaacggagagaagttcctcagaaatgctgttaacattgaaatgtcataattcaaatggaattgttgtctttggtggggaaaagtatggaggggggggggcgtagaaaacaggggggaatacccacaattgtggcgctgacaagtcgaacaccatttggttatcatttgcgctcattatgagatgcagttctcgccactcgactcgaatattactgcagtacagtggagcctaactaaatagaatgaagacagtgggtttttattgctatagtttagttttttctgttgataaaccaatttcttaatgccaattttctaagaatcgataaggcagcccgaaaaccagcacatgaaactattatctgtgcttcataaatttacctattattcatatatttttgcagaattgttgtgttcgaaaactaatactatttataacgttgaaaagtgcgaactcttttcgttcgcaacctttgtggttttttggaattcaaagaactgtcagacctcaaaaataccccccttacaatagaatcgtttcacaattgacgtcagctgcgattgaatacgaacaataaccatatttaatagataaaaataagtttccaacgaaatcgagattcgattaatcagctagttggttaagtgaagcaataatggccattattctcaatgagaaaatgttgcaggcaatttgcatgcaattggccgccaacattgaaagtgggaggagtccgttcatgacaggaacctcccaacgacttcattcactagccagaaacacgatgcactgccaggccccatggatactcactcctcctccaatttctgctgggcacttggccaagcgggtaaagacactcgaagaaaaagggtcacataagttgctgacttccccttttgttacgtataaacatttgcttgaattagatgcaaagttttctataacatttctctcagtgcattcgaattttgcatgcgttgtgttgtgggcgttgctgagacaatctaagctcgatgatgaatgcctgcaattctatttgtatttattatttatatttgctttttacttgctcttttcacagactatccgcccgctgatagttataccggttatcgggtgactccaccccaaatcaacggcggcaccaccaccaccaccaccatcagcagcggcagcagcaacaacaacaacatccaccacatcaacaataacaataaccacatctgcagcagtggcagcagcaacaacctcaatttgacgacagcaatcagcggcagcagcaacagaatggacaccgacgatgtggaatcgaacacaagcagcgcgatgtccacactgggctcgctattctccttcacatcgccggcggtgaagaagctgctgggctggaaacagggtgacgaagaggagaagtgggcggagaaggccgtcgacagtctggtgaagaagttgaagaagcgcaagggcgccatcgaggagctggagcgtgcgctctcctgtcccggtcagccctcgaagtgtgtcaccattccacgctcgctggacggacgattacaggtgggtcacaagccacatggccagctaagtaacagatgattattaactcctatttccgaatatcaggtctcccatcgcaagggtctgccgcatgtgatctactgccgcgtgtggcgctggccagatctgcagtcgcaccacgaactgaagccactcgagctgtgccagtatccgttcagcgccaagcagaaggaggtgtgcatcaatccgtatcactataagcgcgtggagagtccggtgctcccgccagtactcgttcctcgccactcggaattcgcgcccggtcactcgatgctgcagttcaaccatgtggccgagcccagtatgccgcacaatgtgagctactcgaacagtggattcaactcgcacagcttgagcaccagcaacacatcggtgggcagtccgagttccgtcaactccaatcccaattcgccgtacgacagcttggcgggaacaccgccacccgcctacagtccctcggaggatggcaactccaacaatccgaacgacggtggccagctgctggatgctcagatgggcgatgttgcccaggttagctattcggagcccgccttctgggcgtcgatagcctactacgagctaaattgccgcgtgggcgaggtgttccactgcaacaacaactccgtgatcgttgacggtttcacgaatccttccaacaactcggaccgctgctgtctcggccagctgagcaacgtgaacaggaatagcaccatcgagaacacacgccgtcatataggtgagtcgattttagcacttaaattaacttactcacagagatttcccatcagcaactatcttaaagtggttaataactaagattacacattggtaatcttaaattagaaagcgacttgtgtttatcagttataaaaataggcattgagtagagtagaaagctatggacttcaagaatccaactacctgtctttttaactcaaaatgtttcttcttccccaggcaagggtgttcatttatactatgtgaccggcgaggtctacgccgaatgcctatccgactccgccattttcgtgcagtcgcgcaactgcaactaccaccacggattccatccgagcaccgtgtgcaaaataccgccgggctgctcgctgaagatcttcaacaatcaggaatttgctcagctgctgtcgcagtcggtgaacaatggattcgaggccgtctacgagctgacaaagatgtgcacgatccggatgtcgttcgtgaagggctggggtgcggagtatcatcgccaggatgtgacctcgacgccctgttggattgaaatccatctgcacgggccgctccagtggctggacaaggtgctcacccaaatgggctctccgcataatgcaattagttcggtatcctaagcttaagatgaggctcgagtcctcaatggagacggaagagaaggaacacaaaaccggtagctaaatgatgagtgcgtgtgagtgaaagctaagtgtgaaaagacgtagagaacacaggacaatggagagagcataggtctgtaggcctgaggatggaggtccatgccactcagtcgcagatttatatagatgatgtacggcagctactccaatacccgccctttgcccatattttatagtttatcgtatgattttctatgcgaatgtcattcctaacgctaaaacagagtaatgaaaatggacagcgagctaagaaaccaattacaaaatggtataactatttacaatgatctacatgctataatattaatgatctatgcccattggcaaaacagttcttgttcaagtctatttcaagtgctaattatgtgtcattgcaaaactgctttaaatataaaaacacattgaattaatcctaccaactttaattacataaggaacaagtaacttacgtagggatatgaaaacacttattgcaatacatttcttaaaatgattttgaagaagccctagcttatgttttatttttctcatttgcggttcgccttggatcaacgaattcaatgttcaatatagttgatttaaatatatatatggtttaactaattttaagttgcaaacaaatcgaaaacatcaaacaagaaaagataccagcgaaatttaagaatggaaaaatgctactgaatcaatacgttttcccagacaatgatcttttgttatcttaagtaaaactaatattgtttagaccacgagaaaattgcctttttatataaatatacatgtataactttactctagttatcgtaagcttatgattttctctgattttgttttgaattacacttttgtgcgcagaaaaataagtagacgataataaaaaaaaaaacaaacgaaatgcttacttcttaaataaaacctgtttttgacttatgagttctttttttttactttttacgctcggatttaaataagatataaaaagatataatgtaaaaatagctgtatattagaggcttgggcaaaacttgggccttactaaaaaaaattaataataatattgtaatatttgtgcctgttcgatattccacgtcggcctttgatgttgtgcgaattgtgtggagcaaagaaaaatttaataatgtcttaatatccaagcagcgatactgattaccaaacgaacaagaaacagaaatagttgccttgaagtttactagtttttgaatgctataaattgccttaaatacgccttgcatgcctcttaatgttaaacgtactaatgtaatattaaaaaatgaattcaaataaaaggaaaaacataaaaccctggcttgaacttgagatatttcatcatgtggacaacatttttcatcaacgttttgaattcgtttatttttggtttgttatttcggttagttagttagtggctagttgaatatttattctgattttagtgcgcgagtgaataatttgtagtttccaatataaaaggaaccaaataaagttggcaatgtgcaatacgtgtttgtttatattatttaaattatatacaacttacgttttaaataatcgttacggaactagttcagttcgcacgctatcgatagctgagagttctgccagtgacatcgctaactgcgttagttgcccaccgctattgtttttcatcctatcaacatgagtgccgtgaacgatccgctggaacttttgacgaacaagggcacccacgagccttctttcctctcgccgatatggaatccgattgcctgcggtgtggccggcgtgggcgcggccattttcatcaactggggcttccgtaagcccgtgttttccggtgagttttcgccccgcttccatgtgacgtaacgattgtttttgtcgcctataactaactaaatcgcaacgtattccaggcat

SEQ ID NO: 20456 - DNA, 2654 bp, DROSOPHILA
tgcatttcgtgataaacaattttgaaaaacaatttacgcacatttgcgtgtcgaaaaaccaaacaaaatgtcaaaataaacgagcagttagtgcctaaatccacgcactatccgcccgctgatagttataccggttatcgggtgactccaccccaaatcaacggcggcaccaccaccaccaccaccatcagcagcggcagcagcaacaacaacaacatccaccacatcaacaataacaataaccacatctgcagcagtggcagcagcaacaacctcaatttgacgacagcaatcagcggcagcagcaacagaatggacaccgacgatgtggaatcgaacacaagcagcgcgatgtccacactgggctcgctattctccttcacatcgccggcggtgaagaagctgctgggctggaaacagggtgacgaagaggagaagtgggcggagaaggccgtcgacagtctggtgaagaagttgaagaagcgcaagggcgccatcgaggagctggagcgtgcgctctcctgtcccggtcagccctcgaagtgtgtcaccattccacgctcgctggacggacgattacaggtctcccatcgcaagggtctgccgcatgtgatctactgccgcgtgtggcgctggccagatctgcagtcgcaccacgaactgaagccactcgagctgtgccagtatccgttcagcgccaagcagaaggaggtgtgcatcaatccgtatcactataagcgcgtggagagtccggtgctcccgccagtactcgttcctcgccactcggaattcgcgcccggtcactcgatgctgcagttcaaccatgtggccgagcccagtatgccgcacaatgtgagctactcgaacagtggattcaactcgcacagcttgagcaccagcaacacatcggtgggcagtccgagttccgtcaactccaatcccaattcgccgtacgacagcttggcgggaacaccgccacccgcctacagtccctcggaggatggcaactccaacaatccgaacgacggtggccagctgctggatgctcagatgggcgatgttgcccaggttagctattcggagcccgccttctgggcgtcgatagcctactacgagctaaattgccgcgtgggcgaggtgttccactgcaacaacaactccgtgatcgttgacggtttcacgaatccttccaacaactcggaccgctgctgtctcggccagctgagcaacgtgaacaggaatagcaccatcgagaacacacgccgtcatataggcaagggtgttcatttatactatgtgaccggcgaggtctacgccgaatgcctatccgactccgccattttcgtgcagtcgcgcaactgcaactaccaccacggattccatccgagcaccgtgtgcaaaataccgccgggctgctcgctgaagatcttcaacaatcaggaatttgctcagctgctgtcgcagtcggtgaacaatggattcgaggccgtctacgagctgacaaagatgtgcacgatccggatgtcgttcgtgaagggctggggtgcggagtatcatcgccaggatgtgacctcgacgccctgttggattgaaatccatctgcacgggccgctccagtggctggacaaggtgctcacccaaatgggctctccgcataatgcaattagttcggtatcctaagcttaagatgaggctcgagtcctcaatggagacggaagagaaggaacacaaaaccggtagctaaatgatgagtgcgtgtgagtgaaagctaagtgtgaaaagacgtagagaacacaggacaatggagagagcataggtctgtaggcctgaggatggaggtccatgccactcagtcgcagatttatatagatgatgtacggcagctactccaatacccgccctttgcccatattttatagtttatcgtatgattttctatgcgaatgtcattcctaacgctaaaacagagtaatgaaaatggacagcgagctaagaaaccaattacaaaatggtataactatttacaatgatctacatgctataatattaatgatctatgcccattggcaaaacagttcttgttcaagtctatttcaagtgctaattatgtgtcattgcaaaactgctttaaatataaaaacacattgaattaatcctaccaactttaattacataaggaacaagtaacttacgtagggatatgaaaacacttattgcaatacatttcttaaaatgattttgaagaagccctagcttatgttttatttttctcatttgcggttcgccttggatcaacgaattcaatgttcaatatagttgatttaaatatatatatggtttaactaattttaagttgcaaacaaatcgaaaacatcaaacaagaaaagataccagcgaaatttaagaatggaaaaatgctactgaatcaatacgttttcccagacaatgatcttttgttatcttaagtaaaactaatattgtttagaccacgagaaaattgcctttttatataaatatacatgtataactttactctagttatcgtaagcttatgattttctctgattttgttttgaattacacttttgtgcgcagaaaaataagtagacgataataaaaaaaaaaacaaacgaaatgcttacttcttaaataaa

SEQ ID NO: 20457 - protein, 455 aa, DROSOPHILA
MDTDDVESNTSSAMSTLGSLFSFTSPAVKKLLGWKQGDEEEKWAEKAVDSLVKKLKKRKGAIEELERALSCPGQPSKCVTIPRSLDGRLQVSHRKGLPHVIYCRVWRWPDLQSHHELKPLELCQYPFSAKQKEVCINPYHYKRVESPVLPPVLVPRHSEFAPGHSMLQFNHVAEPSMPHNVSYSNSGFNSHSLSTSNTSVGSPSSVNSNPNSPYDSLAGTPPPAYSPSEDGNSNNPNDGGQLLDAQMGDVAQVSYSEPAFWASIAYYELNCRVGEVFHCNNNSVIVDGFTNPSNNSDRCCLGQLSNVNRNSTIENTRRHIGKGVHLYYVTGEVYAECLSDSAIFVQSRNCNYHHGFHPSTVCKIPPGCSLKIFNNQEFAQLLSQSVNNGFEAVYELTKMCTIRMSFVKGWGAEYHRQDVTSTPCWIEIHLHGPLQWLDKVLTQMGSPHNAISSVS

SEQ ID NO: 20458 - DNA, 4350 bp, DROSOPHILA
cgcgacccagagtcatgtccagccatcaatcaggcgaaattacagcattaaagtcactgcttaaatgattgataaatatgccatatatataatatatatatgcttgtggtatgcacacacttaactgacacacgcttctcgcacacacacacacacacgtacgcccgtcaagaattctcgatcggcactcggaattatgtccgattatatgggttggttggtgttatctggcactatctttccagcgggccaccgcttgacgaaccgtgcgaactgaaggctgaacgtcgactgtccggatacgcacgactaacggtatcagtacggcggagaacgaccaatgccgtagagtatgcaacaactttcgagttccgccggagccgcgaagtccattcaacaggatatgtcgctcactaggcggaatatatgcgctgcgcagagcaagagagagacttggagcaaataagcatgagagttagctgtattgagggaaagcacctgttgttccaacgacgcgttttcccagcgtttcactagcgactccgacgcgactttggccgccacctctatttgttctcattacgaaactgggaacaacgttgcgatgtcatttgggctgagtgaatgcctcaactgcatgcaaatggaatgcaattgctgtctttgacaaatcgccgctggcagatctgctggccgatgcaatctttcaattgagatacccttacataaagtggggaccacaagttttgttagttttttgtacatatgattttctatatgagtatttcagaaatttatcaaatataggcatttaaaatgtgaacttaggtaattgcttactttagtgataaaaacctccaaagctccatataaatactattaaaatcaactttaacccctttagttatgtgtggataggggtaatgcaactgtcacttttttaaaaaattttgtatcttttattttggcacttaattcaactaatctcttgtataacctatcaaaaccacatgctactgagcagccactcgatgtgcttggccacatccgtatagatgacaggcagcgtcagattgcatctgttggtcattcgctgtccggctgagacgacgccgcgcagcatccagatgtcctgctcctggagcatcagtccaccaccggaatctccgctgcagggaccggacgcctgggcattgctggcacagatcgtgtgcgaggtgataaacttggcgttctcctcggacagatttccacgacattcccactgggtgatgatgtccgtgtctgtcatcttggccagtcgcgtgtttcggttccccttttcatcctcaccccaaccagccacataggacttgtgacccgagggcagttcgagcaaaaagttctcgttccacaaacagatgggcttgatgtaatcgccaatactaagtgtagttacgatttaaaagttaatcaatttgacaaaataaattaatcaataaatgtacttactcaacgtgattagacaactggagcagtgctaaatccgcatcggtgtatacattgggattgtactgttcgtggattaatagtcgcgctacacctagtgtagctcccgacgaaaaaagatccaaggagttacgccccagcgaaacaatagtccgctcgcccggcaaattccgactgccaaagcggaagcagtgggcagccgagatcactgttctggccgagatcagcgttccgccgcacaaaaagttatagtccctgccaacgtgctcgaaaagagcggccatccagggcagctgaccccgctccacttcaattccgttgtggataaagggtgtctggatgaccttttcacgcccacagattccgctcagttgaccaattgtctggggatagaacttggatgcttgcgcgggcgtattcgacggatgaactgaaggtctggctgacgtctggaactctggttcttgtggcaattgaggcacgggttgcagccgtggtcttgacggcgcctgttgtggacgcggcctcgaaggacgctgttgtgggcggcgtctttgaactggctcctcttcctcctcctcctcatatacagtgtagttggtctgaggggcctggggccattggtgatcagtccgctgagacggcggtatagctgccaaaggcacagaagttcgcagagttcgcgacaaagatagccttgtgctaggagctccaactgcaagagcattaaaaatgtatattaataaaagcaaaaatcagttgagtaaattattctaattacatgcatacataatacaacttggcatctttcctcctattaaattgcacttgaattcatttttttgcacgctggtatgactcgtttgagtcttggatatatcatttaaaattggttttctttttacttacaaggcacagcctcgcacgcaacttttccattaaccgtaacctttgtgagtttgggcaccacgcccggcgttggaaagtcaattctgtagttgatgggctcattgttagtcaagcgatgcctcagcgaatcctcatcctccaagaagttaagagtgcccggagtcgactggaacaagaatagagagttcaaaagtagataatcagtccgcatcactataggataattataaattccaattcagttgtcagggggggggggcttttttacctatgtaaacttagctgaactggcaaaaccgatgctttggcagaacaataacaatataagcatctaagctgaggcggctgatctctcggcaaatggcaaacctgttccgcaactttaaggaaagcggtagagaatcgagctggtgagctttatggtaggggggttttcccggacgcgacttgtcttatcagccatgcaattcccctgataatcaacttgatcactgaactcgcccagatcgattgcgaaatatcggacatccaatctgagagcgaggtcaatgcttgataacactatagtaaccaaagactaaactttataaaagagttgacaattgggaaaacttaccggggtgtttctgccacgctgggaaagttcaacgcgcacaacgttctccgtatttgtactatccagggttagctgcaagtgtccaatgaactgattgtcgtactccaggtaccgaaatatcatcggacactggatatatggcaagttttgggcacttatatagctgatttgcagtatggcgatcagaaaaccaagcaactgcagttggcgcatggcgatcaccctttccggaacagtaaatatttatggaaaacaaatgcgactgcaatcgcacagcattcagctagacgcgaatttaatccaatcgagaatcagaggttaaaccgcactgattgagagtcgcgcgatgaatgattggtattagctcagccaattcgcattagtttccgatctagctgaatagtccgattcaaaacaaagctgcttggctctcccaacctgatcagaataagtgacgtagttatactcttcaaaaaaaggttttgggggactaatactatgtttgactcagaattattttttggggcttaagagcatgaattgggattttataaaccaaaataaccaaaataaatgttcatggaaacaaaagatccaaaaaagtttgcagtgtattcaagatgcgccgttttgctttattatttcaatgattaatggatccacttagaattacccataacgcaatagtaggcagtaatacatggatcttccgattacgtgattttacattcatcaatgggaatctcttcaagaagggggcatgcttttcatgttcgcaatcttcattttgtgttcaattccacattttttggcgaacccattcaatgtgcttggccacatcagtgaatacggatggcttggatagctcacaggtgttttccttttcgttgatcacacctccggagatcactccccgcagcacccaaacgtcctgttcccgcagcatcaatggtccaccaccatcgctggcacaaggacccgctcccgttttcttggcacacagggagctcggctggaccagaacatgtggcagctccagggcgcagttcgcttcgctgactatattaaggtcagtaaccttggatacttcagtgttgccggtgccggtctcatcaggtccccagccggcaacatagctcttgagcccctggggcaaatccatgcggttgctggtgctccaaaggcaaataggtactatgtagtccgtgtaccttattatagtataagcagtagttttttatatttaatatatttatataatttatagactcacctcacaggttcgtccaatcggaccagcgccaaatcggcctccgtaaactgtttgaattggaagt

SEQ ID NO: 20459 - DNA, 1639 bp, DROSOPHILA
ctcaatcagtgcggtttaacctctgattctcgattggattaaattcgcgtctagctgaatgctgtgcgattgcagtcgcatttgttttccataaatatttactgttccggaaagggtgatcgccatgcgccaactgcagttgcttggttttctgatcgccatactgcaaatcagctatataagtgcccaaaacttgccatatatccagtgtccgatgatatttcggtacctggagtacgacaatcagttcattggacacttgcagctaaccctggatagtacaaatacggagaacgttgtgcgcgttgaactttcccagcgtggcagaaacaccccgtcgactccgggcactcttaacttcttggaggatgaggattcgctgaggcatcgcttgactaacaatgagcccatcaactacagaattgactttccaacgccgggcgtggtgcccaaactcacaaaggttacggttaatggaaaagttgcgtgcgaggctgtgccttttggagctcctagcacaaggctatctttgtcgcgaactctgcgaacttctgtgcctttggcagctataccgccgtctcagcggactgatcaccaatggccccaggcccctcagaccaactacactgtatatgaggaggaggaggaagaggagccagttcaaagacgccgcccacaacagcgtccttcgaggccgcgtccacaacaggcgccgtcaagaccacggctgcaacccgtgcctcaattgccacaagaaccagagttccagacgtcagccagaccttcagttcatccgtcgaatacgcccgcgcaagcatccaagttctatccccagacaattggtcaactgagcggaatctgtgggcgtgaaaaggtcatccagacaccctttatccacaacggaattgaagtggagcggggtcagctgccctggatggccgctcttttcgagcacgttggcagggactataactttttgtgcggcggaacgctgatctcggccagaacagtgatctcggctgcccactgcttccgctttggcagtcggaatttgccgggcgagcggactattgtttcgctggggcgtaactccttggatcttttttcgtcgggagctacactaggtgtagcgcgactattaatccacgaacagtacaatcccaatgtatacaccgatgcggatttagcactgctccagttgtctaatcacgttgatattggcgattacatcaagcccatctgtttgtggaacgagaactttttgctcgaactgccctcgggtcacaagtcctatgtggctggttggggtgaggatgaaaaggggaaccgaaacacgcgactggccaagatgacagacacggacatcatcacccagtgggaatgtcgtggaaatctgtccgaggagaacgccaagtttatcacctcgcacacgatctgtgccagcaatgcccaggcgtccggtccctgcagcggagattccggtggtggactgatgctccaggagcaggacatctggatgctgcgcggcgtcgtctcagccggacagcgaatgaccaacagatgcaatctgacgctgcctgtcatctatacggatgtggccaagcacatcgagtggctgctcagtagcatgtggttttga

SEQ ID NO: 20460 - protein, 504 aa, DROSOPHILA
MRQLQLLGFLIAILQISYISAQNLPYIQCPMIFRYLEYDNQFIGHLQLTLDSTNTENVVRVELSQRGRNTPSTPGTLNFLEDEDSLRHRLTNNEPINYRIDFPTPGVVPKLTKVTVNGKVACEAVPFGAPSTRLSLSRTLRTSVPLAAIPPSQRTDHQWPQAPQTNYTVYEEEEEEEPVQRRRPQQRPSRPRPQQAPSRPRLQPVPQLPQEPEFQTSARPSVHPSNTPAQASKFYPQTIGQLSGICGREKVIQTPFIHNGIEVERGQLPWMAALFEHVGRDYNFLCGGTLISARTVISAAHCFRFGSRNLPGERTIVSLGRNSLDLFSSGATLGVARLLIHEQYNPNVYTDADLALLQLSNHVDIGDYIKPICLWNENFLLELPSGHKSYVAGWGEDEKGNRNTRLAKMTDTDIITQWECRGNLSEENAKFITSHTICASNAQASGPCSGDSGGGLMLQEQDIWMLRGVVSAGQRMTNRCNLTLPVIYTDVAKHIEWLLSSMWF

SEQ ID NO: 20461 - DNA, 2556 bp, DROSOPHILA
atgctactgaatcaatacgttttcccagacaatgatcttttgttatcttaagtaaaactaatattgtttagaccacgagaaaattgcctttttatataaatatacatgtataactttactctagttatcgtaagcttatgattttctctgattttgttttgaattacacttttgtgcgcagaaaaataagtagacgataataaaaaaaaaaacaaacgaaatgcttacttcttaaataaaacctgtttttgacttatgagttctttttttttactttttacgctcggatttaaataagatataaaaagatataatgtaaaaatagctgtatattagaggcttgggcaaaacttgggccttactaaaaaaaattaataataatattgtaatatttgtgcctgttcgatattccacgtcggcctttgatgttgtgcgaattgtgtggagcaaagaaaaatttaataatgtcttaatatccaagcagcgatactgattaccaaacgaacaagaaacagaaatagttgccttgaagtttactagtttttgaatgctataaattgccttaaatacgccttgcatgcctcttaatgttaaacgtactaatgtaatattaaaaaatgaattcaaataaaaggaaaaacataaaaccctggcttgaacttgagatatttcatcatgtggacaacatttttcatcaacgttttgaattcgtttatttttggtttgttatttcggttagttagttagtggctagttgaatatttattctgattttagtgcgcgagtgaataatttgtagtttccaatataaaaggaaccaaataaagttggcaatgtgcaatacgtgtttgtttatattatttaaattatatacaacttacgttttaaataatcgttacggaactagttcagttcgcacgctatcgatagctgagagttctgccagtgacatcgctaactgcgttagttgcccaccgctattgtttttcatcctatcaacatgagtgccgtgaacgatccgctggaacttttgacgaacaagggcacccacgagccttctttcctctcgccgatatggaatccgattgcctgcggtgtggccggcgtgggcgcggccattttcatcaactggggcttccgtaagcccgtgttttccggtgagttttcgccccgcttccatgtgacgtaacgattgtttttgtcgcctataactaactaaatcgcaacgtattccaggcatccagaagcacatcgccttcggagctatcggcgtcggcgcaggagcttatttcgatcagaagaggaacgagtacctggccaaaagggacgccgtcctccggcactacatcgaactgcatcccgacgatttcccggtgaagggtaagtgcggcatggatgcaagctaaccattacttaccgtttttgccccttccagaacgcaagacctatggccaagtgctggagagttgggtgccagtgcgctaagtggatctaaatctttgttgtcaaacgaacgatggaagtagttaataaaacagctttaattgtaaaacatatgaacacgaaaatggagcaaatggattgggcattctatggttttttattcgaaaggaattgcatgcatattatggacttacagcatattggcataatgttatggtttaaattgatggaatgtacctagggcttacatttttcgcaactatttagttttgaaataaatttgttaagctatgttttggtttgagtctcagctagcgattagcgcacttctgtacctgaaattggtgcgcgatacccgggagttatcgattgctccaacggtccaagtgccatctccagaaagaggctttggcgagcaaacgctcttttgtcgcggtgaaaaacggatcgaacttttggtaggatgtgtctgcgcaaaaagtttgtccgcgaataaattaccatttttgaatagcagccaggaagctgaaagaacgcgctaaaaaatcaataaaaaaattcgaaatccaaccagccagagattggatttaaatatatatacacaaaaaatctctatgaaataaacaacgtaattttaagcccagtttgtgtgcgtgtgtgcgtcttcgttttaccgttacaatttacgaaaaccgaaataaagtgtaatcagtgaaaaataaatgccaacactaatagtcaaacacagcgaaacgaattattgttaattaattggcattataagattgttttttttttcgacccagtaaaaggttaagcaactgaaagtttggcgaaagttcaccgtcggctcagttcacctgcaaattttcttatcatcagcaaacaacgattatggcgaaggtaagaaaaagccgagctcttaattttattaccaacttatttatttatgaacagatgctggtcttttctcttccacggcaaatgtttgtcaatttggtttttatttcattgcttgtgtgtgggtgggtggttcctgcgggtggatacgtttgtatgaattatgcatgttcagtgcggattcgcattgatttccctggattgcggcgaatc

SEQ ID NO: 20462 - DNA, 422 bp, DROSOPHILA
atgagtgccgtgaacgatccgctggaacttttgacgaacaagggcacccacgagccttctttcctctcgccgatatggaatccgattgcctgcggtgtggccggcgtgggcgcggccattttcatcaactggggcttccgtaagcccgtgttttccggcatccagaagcacatcgccttcggagctatcggcgtcggcgcaggagcttatttcgatcagaagaggaacgagtacctggccaaaagggacgccgtcctccggcactacatcgaactgcatcccgacgatttcccggtgaaggaacgcaagacctatggccaagtgctggagagttgggtgccagtgcgctaagtggatctaaatctttgttgtcaaacgaacgatggaagtagttaataaaacagctttaattgtaaaacata

SEQ ID NO: 20463 - protein, 116 aa, DROSOPHILA
MSAVNDPLELLTNKGTHEPSFLSPIWNPIACGVAGVGAAIFINWGFRKPVFSGIQKHIAFGAIGVGAGAYFDQKRNEYLAKRDAVLRHYIELHPDDFPVKERKTYGQVLESWVPVR

SEQ ID NO: 20464 - DNA, 39536 bp, DROSOPHILA
ttaataacaaaaacggaagggaatggcactggcaagagttgcggcatccgcaaataaccagaattgaaactcgagtggcaaaaggggtaagagtaactaagaaacagaattacaccgacagaattacttttaaattttaacttagaacacacacttcaaaatttcttaaatctcctgggttatattttatctatctattctgctaaaaaaaagtatcaatatgctaacaattctaagtagaataaataaaggccaagcattttaagaaattaattaccaaaattaatattacaaatttctttaaaatactttttaattatccttcggtcataaagcagtaagttcgtttcctggtaattgattgatttatttccttgcccaaacgttataaatcacacaatttttcccctgtgctggcataatttttcattgtggcgtgaagagcaaactgtttacatttgttttcccgaatctgggccagaagacaagatacttgccggctggggaaacgaaattgggccaggggcaacatgttcattattccgccgactgatagctgtgttttcgcaggtgccgctcattaaatcatccggtaatcggaggatcaggttgcggtagccaaaaaggcttctcgggttaacgtctcgaatgtttttgtttgccggtgtcaatcacagttggcttaattaacattgtggaacagatttcaacgcataaattcaaatcagtctgcaaagtttggtcgtaaaaacgtgctatcatcgtggcactcgaactaaacataacatttatagtacattggggcgaagggccgggcattttacagcttttgctctctgcccgtaataataataacaacaataatcattttgcatgatttacgagtgcagctggcagccctgttcgttcaatggccataaattctcatcaataaatcaaatgtagagctgttcgaatatgagggcgccgcgatgtatgcagcgttttctttcttttttttcccatgtatctgagtgttttgttgttgtgtgcgtgtgtgtgtttgcttgtttgtttgtatgggtgagtgagtgagtgagaaatgtggcaagtgacatgtgtcactccataataatcgcatttgcatggagacaaaccgccatgaatatccaaacagaaacttaactagaagctctcttaggtgccgggttgaagatcttagacctaatcacgtttcggtttggttttcgattttgtttttccgatttgtattctttttgctagtgggacttacatctagatactagtgcgattaagtatacgcatagttgattgcttagtctcggggacgcgctgataatacttacaggtttccatatccactggatcagtagggtagagggctgggattgcttacggtttaaactgtgagacatcgagttggttttaggaacccatttgccggcctacagcagctccgtctccatctgcgcggcctccacggtctccacaatggtggcggtggccgccgtgaccgaatctcatggaacatatcgcgtggtcagcgctccatcgtcatcgtcgtccacgcgcagaccgccgcatccgcagggcagccatgtggctccaccgccagtgagattcagacagcattttggtcaaatcgcagacacctgctccagttcggcgctcgagcggcccgagttcatcaccaccacattcttggcggcatagtccgtgatgaagcgatcgctgttccgcggatgaatgttgcccacatcctgggcacaacaccacggattgcgcatggtcaggatgcgcttgaaggcgtcgcgaaactccttgttgaagatcgaatagatgatcggattgaaggccgagttcgagtagcccagccaggtgaggatcttgaaggtctgtccgccgatgcaggtcttgcagaaggcggccgtgatgttgacgcagaagaagggcacccagcagatgagaaaaacgcccatgatcacgcccaccgtgacggccgccttgtggtcggatacgtgatacggcgaactgtgggtgtgcagattgcgcaccttgaacttcttgggctggttcttcgggcgccggatgctcttgtaccgctgcttctcggccacctcacctggtcgagttaccgccttgatggacttcacgtgcttctgggcatagcagtatagcctggtaaatcggggatttaaaagttatacaaaatcattactagtacttacaatagctctattcacctaatatattcaagccaatagacaattaaattaaatcatttggctaagaaacaatgaaagatgccaagtcaatttgaacaaatggaaatgtaaaatcagtgtcatcgaaaagtttcgtaatgacagcataacattacactttaatgtttattgatgtttcttgcgaaagcatgatatcaaatttttatcacctaatgaatgactcggctgttgcctcgacacgaattctgcttattttgccactggttacggactatgtagttactggttactgctggtaattgatatgataattattcacttgggccgcttggcatgtcaattaaatggatgccgacaacaatggctctgtccacatcaataaccaaaggaaacacattgcgtatacgcaatgtctgactatcatatccaatcttccacttgagtcgctctctaagctgtttcgcgcccactccactttctcctcatatgccgcatacacaaataaacaagcatatgtgcctgttcctatgagtgtttactcgttggtcgcataaaaaggataacaggacaagagcaggccatgtcaggcacaaattatgacgataaaagtatatttattctgcaatttaaccgaaatttgatagaaaattccaatgccaaccaacaggggatccatttgatgagcgtatacagggatttgggatgcgggtgacaaggtcctggccaatggctgcaaatctcgttaagctaaaatggcaacgtgccgctggccgaaacgttgatgagcagctatcgctataccgttgatgtggtgtgagtgtgtccttgcttagtcctttcgcacacgccccagtcttttgccagctcctggggattacttagacggacactaatgcgtgcgcttatttgttcaacccaaaaccccttgcccacaatcagtttccgcctccccagttctttctcgtgcctggaggccatcaggggcgcaggtccttgcggcatttttctgatatattcagcagtgcgatagcagcaaacttcgtcagtttttacaacattttattatttactttttactacttctgccacgacttcctttttgctttgctagccgtttttatttgccctcgcagagggtattcaacgtaatatcaggttctaaaacaaatagtcgtctacgtttatataagaattgtactaccaaaataataataatattcactaatattatttttagaccttaacgaaatggtctcagaaatctaagagctaaccagtagttattcgtttttgattctgaagttgtttatagaaattgttcatgcttacaaaatgtgtagaaaaggatgttgtattttcatgtgtcctttgaaaagagtatataaacttggtttggaataagaaggcatgcattcatgccccaaactttttttttttgagctcataaaaatatttgagttctcgctttgttttcatttggagagagattttggcaaaacttttgtttgcctgcggaagtttctgtgttgttctgcgacagccctgggctatttgtatctacataattgcagctgaaggcgtctggaaatatcttactttatgtatttcatgttttatgcacgcgaaacggacaacttttgccgcaatctggccagcggaatcggccatttcagggggttattgtgcctttttgacttaccgacagtagatgccaatcatgaccacgcaggggaagtagaaactgatacagctggacacgacggcgtaggtgggcgtgaggtccagagcgcatgttggatactttttgccattgtcctcgaaaatcagcggctggtcgggccgatggatgcccaacgagatgggcacaaaggagacgaacgcggccagcagccaaatggcggcgatggtgatgacagccacgcgtcgtgtcacccaacggccgtatctgcaagagaggagtaaagggttgcatcaatttgcggcaaaggaagcggaaatacacgcgccatgcctgctgttcctccgcctcttccagccttattcccatcccaacttcctgctcgctgatatgttcccaaactgctcctggcgtatccctttttgtccttttgcccttgcggtaacagcggcaaagggtaaacatacaccgccaccagacacactcgggaaaagttttacttaaagttcgaccatttaaagctcgtgcttaattaatcgaaaagtttccctactaatccccatttcaaaaaatactgtttgcaaattgatagccgctgcgtaaaagtaactctatttcggagtaaatgtttgtctaacaaaaccgctgttatgcaaatttaaaaaaatggattaaaagataatcgccgacgtgtgaagacgtttttatcgtgctccgcacaaaatcggttgttttgagtgaagtgaacgccaaataaaataaactaaataaaaaatctgaaagcgaaagagacgctctatgcgatgcaagatcgcttaaatacatagtgaattgttatcttaaataataaaactatgagtcagaatgacactcgcgcccagcgtcagcgcgagcatgacgaacgccgactctcaattcagcgcaacaacgcgtacttctcctacgtctcaccgacaatcccaaacgcagacatcgagcggtcaataacccatagcccaggaaaccttcttctaccaacaaatcaagaaagagcgcgctcctgctctcccgctctattggctccgacagaagccccgctacctccaacaacaacagctggagagggaccggcagcccgctctgcctcgtcatcggctgcacccgctcacggtctgactaagtcagcgaaagcaaaaccgctagcaataaacggtactgctgcactgccagcaaaacaaaacgaaaacgtaaacaaaaaagctgggtcgacctggcagactggaatggaccgctacattacaataaagcgaaagctcagcccggaaaattcagatttgggaaacaagccgaaaaatacaccgcgaataactctaccttgatcaaaaatgtagcccctgcaaatccaacagatttgccttgctggtagataccgctgaggaccgtgccgctgggatccgttgatatcgaaccgaagaaaacaaagcctccgccaatatacatccgcgagaagagcacaagccgtcttgtaaatactttgattggccttattgggaaagatagctttcatataattcccctcgtaagaggtactatcaacgaaatcaaacttcagacgaaaacggaggacgactacagaaaagtcacaaactattttaccgcacaaaaaataggcttctacacctaccagcttaaaagcagcaagggcctgcaagtagtcctgaagggcattgagtctgatgttacgcccgaagagataactgaggcgctaaaggaaaagggattttacgccaaaaacgtgttcaatatcaaaaacagaaacaggcagccccaaccactcttcaagattgagcttgaaccagaaaacaagcctcctagaaaaaacgaggttcacccaatttacaaactccagctccttttgcaccgtaggatcacggtagaagagcctgcacaaacgcaacgctcctgtacaatgtacaaactgccaagagtatggccacacgaggtcatattgtacacttcgcccggtgtgcgtagtctggggagatctccacgactccaaacagtgtcaaattaacaaagaaaatgcatgcgagaaaaaatgtaataacctgcgggggcaatcacacagcaaactacagaggctgtccaatctacaaagagctgaaaatccgtcttcacaaaagaatgaacaccggcgcgggcacaccaaggatcaagctccctgataccatcagagacaaatcctgaagtaattttctcgaaagcagctagtttcgctccctggcctacattcaacactaacaagacaacatttgctaacgttttaaaatcaggtatgacgccttcaacccaaaactcccgaactccacatgaagtgcacacaaaattagacacacaacaaaactatcaccccagctgcgcagcaggaaacaaaaactgaagctatgatgcaagccttacaacagagcatgatggaatttatgacatttatgaagaccaccattcaagacatgatgcgtaatcaaaaccttttgatacaaatgcttgtagcccaacaatcaaataaataatggctaccttacgcatagctacgtggaacgccaatgggcgtctcacagcgcaaacttgagctagctcaattcctacatgagaagcatattcgacggtaatgcttctttcggaaactcatctcacaagcaaatacaattttcaaataagagactccatttctacggtacaaatcatcccgcggaaaagcacacggtggaccgcccatactcataaggaaccgatgaagcaccactttacaaagaatttgcggaaaatcatcttcaggcccatctatcaacattcagctggatgacaacactctccttacactagcggccgtatactgcccccccccgtttacagtattagaagctcaattcctggatttcttccaagcactagggccacacttcattgcagcaggcgactacaacgctaacatactcacttggggatcgcgacttgtgaacccaaaaggaaaacagctttataagacgataataaaagccactaataaacttgaccatgtttcccccgggagtcctacatactgggccatcagacctcaataagctgccagacctgatcgacttcgcagttaccgaaaaatatttcccgcagtttggttaaagctgaatgtctgccggatctctcatctgatcactcgcctgtactaattcacctccgccgatacgcagaaaacgtgaaaccaccaaccagattgacctctagcaaaacaaactggctaggtataaaaaatatataagttcacatattgagctaagcccaaaactcaatactgaatctgatatagagagctgcaccgtgtgcattgcaatccatccttactgcagcagctcttactgcaacacccaaaataacaaataatacaattaattcaaaaaagaccaacgtacaaatcgagcaactcggtccacgtaaaacgtcgcttcgcagagaatggaatcttccagatccccaactgcaaacaaaagctaaaagtagcccacggaaactggccaacggctctgaaacaagaagaggacgacgatcagcgccgatacatagagcaactcacaccaacaggcacaaaacaaaagtcactgtggcgagcccactcaactcttcgcccaccgactgaaacccgttttgccgataaggaattcatcaggggctgggcccgtagtgatgaagacagagccaacacatttgccggctcacctacaaaatgtgttcacggccaaaccaggctactagcacattcgcgctaccgtcctatcccgtaaaccgccatcagcaacacaccccaatttgtgtttcgtcctaaagaaataactaaaataatcaaagacaatctcagcccgaaaaaatcccccggctacgaccttatacaccggaaatgatcatccaggctgccacattctgcagttcgctacataaccaagctctttaatgccatcaccaaacttggtacttccacaacgatggaagatgatgaagatcataatgattccaaagcctggtaagaaccccacagtcgcttcatcttacagaccaataagtctactctcatgcatttcgaaactatttcgaaaaatgcctgctgatccgacttaatcaacatctgatataccacaatataatcccagcccaccaatttggatttcgcgaaagccacggaaccattgaacaggtgaatcgtattacaacggaaataagaactgcatttgaatatcgcgaatactggacagcagtatttttagacggtatcccaagcattcgacaaagtctggctcgacgggctaatgtttaaaattaaaacatccctacccgaaagcacacacaaacttctaaagtcttacctctatgacagaaagtttgcagtgcgggtgcaacactgccacttccactgttcatacaattgaggctggagtccccaaggcagcagttcttgggccaaccttatacctcatctatacagccgacatccctacaaatagtcgcttaacggtatccacatttgccgacgatacagctatccttagccgttcaaggtcccctatccaagctacagcacagttggcactgtacctcatcgacattgagaagtggctctctgactggcgaataaaagtaaacgagcaaaaatgcaagcacgtgacgtttacgctaaacagacaagactgtcctccgctcttgttgaacagcatacccactcccgaagcagacgaggtaacggtaccttaggagtacacctagacagaagactcacatggcgcaggcacattgaagccaaaaaaacccaacttaaactcaaagccaacaacttacactggctcatcaactctggttctccgctcagcctagatcacaaggtcttgctctacaattctatattgaaaccaatctggacctatggctcacagttatggggcaatgccagcaacagcaatattgacatcattcagcgagcacaatcaaagattctgagaaccatcactggggcaccgtggtacgttcggagtgaaaacatccaaagagacttaaatatcccatcagttaccaacgcaatcacggaacttaaggaaaaataccatagcaagcttcacacgcaccccaaccacctagcgcgaggtctaatccagctcagcagccgttcccgtctccggcgaaaggacctaccaacccagcgaataaattattagggccgtttaaacatagaacagttggaaaaataatacaactgttcaaaaaatacttgttatagttaagatttttaaacttattgttagttcttatacaagaagattcaataaataaaagcaaagtaaaataaaaaaaaaaaaaaaaaaaaaaaaaaaaaaaaaaaggataagagttggtaaaaacattacctaaaaaggttttatttagtgctagaattttacttcaaaaagttgtttaaaccttttttatagatttttgaaatggttaattaccatataattttatagcaaggaactctaatggctttatagttaacatctaaacgcatttaatgttttcatatttcagctctacaccttctctaaaattggttaagtgtacgtaagctggagcaacacgttggatatgcggaattaggggcgcggacaacaagagcatggaccacgtagcgatgtcctgattgtggctttgcatgtccctggcaatccctcagtgcccagcagccattaggcacatcattttcgggtgtgcgcgacaagtgttggtccggcccactagaaagtgggattcccaggcttgaactgggattcagggatcaaggataccggatcaggtgctcagggtcagtccgcatgtcattaattactcgacttggtcgggggcgacaaatcggccgaaaacccaaagacaagccgcacacgcattgcggcgagtggcatatgcaaatcatcctcgatgcctgactgtttcaagcactttgattttgcttctactgcaggaaatgagcagtctgcagtgaacacaaaaaccaaaacccgaaaacccaatcccccagccaaaaattcacaaggcaaaggagtggtgtgggtatcggatccccgcttctgttgccatatgccgcatcgttttggcttgtgcaggaaatcaaacagaataattcgatttcaatacaaggacgcacttacacacacacacacacacacacactcatgctcaaggatgatgacggagcggaaacggaagtttatgtaattgtattcacatacaaattcaatttcgttttcggcacgaaaattgatttccatgtgacgaaagcccgcagcttgagttcccgcaccgcagatccactcacctgtgaacagtggtggtggaaataataggaacatctattatttactcaaaaaaggtaaattataaatataaagaatgaacctgctgaatgattttactacttatacctacccaaaaaaaagttaaattttggttaaatatcatttaaaaacctccctacatataatataattttaaacactacataaatatttctcaagtggactttatcttaggatatatttatagattcgtggatttatgtcacctgagcagcgtagctgcccagcttaccctcttttccccagtcctgcgttcgcccttttacgtgcactaattcagtgtctttgagtggctgaggtatacgctttgatatatgcacataaacctgcagccattaggtgacacacgatttgctctggccttgtgttggtaagtggaggagccaatcagccatcgatgggccaggctaattgaaatcgtgtgtgagagtgttccaggctgaatatttgtatgtgtgggtatgacagtgggtatggatgaggatgaggatgttgtggtggttgccaggagcaggccgctccagccgaaggacatttgcatttaacgctcgcatcgaagctgccggcttgactgcctgcgtggcatgcggtggcttttgtgtttgtcccacatgcactcaagaaattaccgcaaggcacgcacgacgatccttccgcaaaggatcctctccaccctccgctttttgtgccgtcatttgcatagttcgagtcgctcccactcttcggttttgacctcctgccatgtcagcttggccgcttttgttttggcatgggaaatttaatggctctttatgagcgtttttgtaactgtcattgctagcacgtgcccatcgcactgtgggtcgaaaggttgagaaagtggctagatttcttgtaacttcgggtttaaacaagaaatatacttaatgtaagcgaagaaatttaagttactatctaaaattagagtcaaattgccaacactttaaccactttgtatcatttgtaaagaaaaacttgtaaacatcttctgagtgagtttaaggaaattcgaaggacttcccttacagaataaaatgaacctctgcttgttgtacatcattgatttatcaacccccccatcaattttcaatcttttacaataaaagcgccctaggagtccccaatgatttctcaatttttttttatgttggttccaaccccatagttcggtattacatttcctcaaccacgaccaggacaagtgaaaaaatacaattacaaaaagttcccaggtgcgtcattgttgctggaacaggtttttcagtgtgcgtttaagtgctgtgccttcggttgttgggcaaaaaaaaaaagaacccttatagcattcaaaactcctcctaccaaaccgaaaccgcccccttgaatccttgcctgcggcaaagtttcattgttctttcagtttttattgcagtttaaaatgaatttcacatatgcgcctgacagttacgatgatgacaggcgccaaagtcaacggcagtgccaacaaaaaaaagccggccaaaatacgaaaagaggcgaaacggcagaggcatcaacttgtcacataaaataagaaaatttctcatttacgttatatttggtttgccccttcatcttcactttgtctgttctctactaattaaatttgcacgcgctttttatccaaattgtttttgccaatttcccggctcggaaaatccagtcgcgcgcaattaaattaaacgcctgcaattattctaaaacgctaagaaaacacgctgaatcagcgatttcttctgtcttcttccgtcgagcgacaggtcctagatgaatggtcctttcttgggtgttggatgatggagctggttgcttgccatgttgggtggtggctctcgtcgacttctaatgagacgcctacgcgtgaactttgccccttgtcgagcggtgcaaaaagaaatgcgctgctgcctctactttgacatgcaaataaatcagatttacataaagagggagatctagagttggagttggacccggcatagccatagatatatatataggctaggcacaacccaaggaactcagttaccatttctcacaagacacaaaagctggcaactgtgcgctgcgctgagttttccgtgcaattttccctgccctcagttcagctccttgagattcagattcagactcaggttcacaaagagagagaagaggtgggtatgagcgacgtcttgacatttgaagtgtaaaatgtctcaggcacctgaatagtcgaggtggcgggggaaactgctgatcccgcccatttgcctcaggtgcgaatggaaacgagttcaggtggctaaactcaatttccaggcaatggccagagggcacaaagtctgaggggctatgcaaatgtcattaacccaagggcttgaattaatatcggacagcattaggcggcgtaagtcagcgactgaaggacaccatttagattgcagaacacatttatcagtgagtctatgtatatggtaattgaatttgatttgactttgaaatatatcagtgattcatttaagtacttgaggaaaaaggatgatggggaaaattagttgagaactttttgatttacagattaatattctgattttattcaataattatttgcataaaattgcgagtgttcgacttttagcttgattattatttgcagctgcttgattttgcaatgtcagcaaatcccaatacatcaagatcaatcgagcgttctgtgttgttcactcttcatcaaccattcgatgtcgagcatgaagttttctcctcctgtgaaaaatctatctgctcgccgtgcttaatttcactttcaattccttctatctatctgcatttccttacccgctcccccaaaggacaaacggaattcagaatcaggaaaaatattccatgaaaactgtcatttgctagactaaccccaccaaaatccattccactcggctcccccgtgccgtgctcatttaaatccttttgccgtgccatacaaaatttgcaatctgaattttcaggtcgcctcgacatcaacttgccacatcaatgaagcgttatatgctcgccaactcgttacgtgaactcggctacacaaaagatgcacagatagatgggaaagctgggtggaaaattcagcaggtggagccagctgatgcctcacacccacccacacaaatgtcgtgtcgttttccataagcgaataagcttaccccaggtggcaagcagaacagcaaaagcaacagctagaggaagcgctacagccaacggggcggtgtggaaaaaatatttttctacttttggcttttggctgaaaatagcatcaaaggatttattatggttctttcatgacatggtgctatgggttagggctggcaactgtctcgatttgccatagttgccccctgttgtccatttttccctggccaacaaaagggatccaatagggatccattctgaaatcatttcgtcgggactccagctctaagccaactccccgttttgcgactgccagcgacttgaccaacgtcatttttaacacaactcctatgcactgacaaaaaaaatggtattttaatcataatattttggtaggattgctagaatatactattattttttatggcttcgaaattgcgtttgcaatattcgcacttcaatatttcaaggaaacctaaactctagtcattttctcgcagtgaacatgtgaaaaaataaaatagaataatgtgcagacaatcgtttgcccactcaaagagccaaatatgaaggaattcagttgtggctgctgacacataataaatttgtgcgtttgttcttggccacaaatgtaatattcgtattccaaaaaacatttgtaggattgcacttctgggaaccgaggcattgttgaaaatttaattaacacacaattgttgtggtccagccggaaaaaggtggggggagtgggtgttgttgggttggggaatggcttgataaactagtttcaagtttaccgagctgactttcgactgactgcttttgtgagaattgctcgccactggaaatcaatttcaactgctgactacaaagcagactaacatggctgactggcagcgttttaggccacgacgacagcaggacaagctcattgtcattgtcgcagtcgagggagcgtacagatacccacatccatccacccaccacaggacacccagtacacacacagacacacatagagcgtacacaaggacacacagcacctgaggcagcagaatttgattgtctctggagcttcctgccgggatagcgcagctggagcaacgtgccggatatacaaggtagattgaactgcgataatggagcatttggacagccttcggcccgctgacagatgatgtcatctgcagagggtgtgaaaaagctatatttaagacagctggtcaaaggttaaaatacttgtaagtatgttatcttgaactgttagccaattattgatacattcatatacaaaaatcaacattgattttaaaaactaaaagcccgcaacaatatatgaatctattaattacaccattttagtttggcttcctcctagaattcatactccttttcatgccaatcgttcttactactttatataaccacattattggggcgtaacccctacaatctgcatagagccacccaaaatgccacttcaccactttcaccagttggtaatgacacttcctttgttactctccgttgatttgacccagagactcaatgagcatgacttgcctgaactttgttggctaccacaaaaccacagctgaaacgctgatacaaaagtgcttagccaacaacttgaagatgaagtcttcggagaagtgcaaaaactctcgtaatgcgccataaatctgttactaatgaaacaattatgagcgtcgattaatgagccccttttgccgtaaagaactcgagtcctcgcagcagtagagcaaaaacgtgacaggcatgacaacgcggcgtatgagtaacgtgcatacaaagcacctgcaatggcctgacattaatgaatcgattcgaggacgaagctccgcagtcacatcgtcgtcaaactccgacagcccggacaattagttatggattggatattttatgtttatgacacaatcctgacaatcactcacctgagcggatccttgatgtgaatgtagcggtccatcgagatggcgcacaggttcagaattgacgccgtcgagcacatgacatcaaaggccacccaagtatcacaaaattgcgctccaaagatccaatatcctgcaggaaaaaaaagtggagaagcgtgttgaacgagtgtttgattgcttgtttaaaatgcttaataagtactttctgtctggacgtggcggaaattgccatgttgcggccggacggggacaaaaaagttgtttcatttgcacggcggtagaaacaaatgcaggcgggaaaagcggaaaagcaacagaaagtgcaaaggcaaccagtgtcgccatgttcttgctttatttattcacgacgtaaattgagtttaaatgatttcataaattcatttccgtttcctgtgcttcccttttccgtacacatacacatacacaagcactcacacacatgcacgagggtctcctttttgggccgttcgctatttaaaattcatttcgccccggccaaaagtgaaaacaaataatttattttttcgggcgcttgccaatttcataagtgtgttgcaattacgtcctactcgattgatgttccgtgcgtgaccagaagcggatgtcctttgaatcctgggtaggtagtgagtggtatggtgaaaaacatcaccgctgtacacataaattcaataaaagatttgccgcatgaaaagggtatttattcgtgctgtggcattcaactcatgatttgggtcgataagaatatgcatatcatgctcgttacagctttcatgccagttaatcaaccgtgcggcaggatatggctcttaaatgccacaggaaatgccgacgcaactggtcaaagcaaagcgacccagctcagtcttcattcatcggaatatcaaaagacaaggctatcagcatatcaaagttggccaagccagtcagcagaaatgactttcagtgggtaacgcttaattgagtgatttcaattggggtaattatagggatatgtaccaatgtatcaaatatcctttaaaaaaaagcagtcaaaattccactataagccatataacattttggtaagcatcatttgaaacggctgatctctttaaaatcttattctgttaagaataagaatttgttccaggatttggatttgattacactttgaaaataccaaatttgcactccagactcctgagccttggagtgattcatattccaacttcccttggcgtcaaattgagcaagcttcgcatttccaaaatgcccatagcatcgcaaaaaaaatctatattaggtgggaaaatactggcagtacgaagaagactagaagcttgtactcaagctagcaaataatttatgccgttttcaatatacatacatacacacacatacgcatatgaatggctcttggccaaaaagtattccgtatgctatatgttttttcgattcctcgggctgacagcatctgttggatttcgccaagtctgttgttgtttgaatttgtccaattgcgtaccatgtttatttgctgatttgcctgtcttcgagcgtgctaaatgttgccttggcgaaaataatttgcctccatgtgtgccaccttgtgtgtgtgtgtgagggtgtatttttgcataagtgtgggtgtcgcaggaccccaggcatctgtttgtcttgagcagctgagcgtttttatttattttttcacactctcgcttacgcggcactcgtctcctcagagtgccaaagtcgtttattattttcacacacccgcgagggtaagtgggtggtcgcagtggcgtatgggggagtttctcgagggggtttaagaagttgaagagtttttggggcacttcattttgagaaaattctaaaactgctaaatatcttttcttaaacgtattttttcaatatttaaaagtttcttcaacgccaattaacatttttgggtagacttatatcagttcgtctatacgttgaatatcctgtagcctaaagaccccttttatcaatcgcagttttgcaattctgacacatgtcacctcaactcatctcccgttttttcccaacttcacttcaccgcatcgctctggattccgctcacattttcagactcatatgacaagctcgcagttttcttcttttgtttgttgtttatgattttccacttttttgccgcgtgtgtcagcgagagtccttatacattgatgtcagctgcatgtttcctgaaccggaacacgttgttagcccggctcctcgatcccccaattacccatgtgccagctgaaaagttttgcccggctctcgactaattttcgtcttatttacttagccaatgttggcccgtcaagtccccatctcgagtttcgcatatccgctgccgctcgaattaataaaatgcacccataaacggcactcaaattggtttgggtatgaaactgggtcatttcatattctagacttgcaactaggcgaaactttgtcagcctcaatggcgggaaatgtatcggaatggggaagtatccactggcaggataactcaaggaatgactgccatggctgcactcggaatggctaatggaaaataatcagaatgtgtggttgcactcggcatctgcatgttagccatggcaccagatgtacaactggtttaaaatgaaattcctgtttggctgactccaaccattcgtccaacgatgaggtgtcgagggtcagtggtagagtttgaataaatacagtgttcacacatgaacacgaatatatttaaagacttacaattttgggctccgttcatatcttatgtaaatgaatcgagagcgataaattatatttaggattttgttatctaaggcgacatgggtgcattgctcaaaaacatgtaatttaagtgcacactacatgagtcagtcacttgagatcgttccccgcctcctaaaatagtcccttagtgggagaccacagataaggtcctcgccgctcaagataggcagatgtgcccgagcgtgggacctcgataaggcggggactatttacgtaggcctctgcgtaggccatttactttaagatgcgattctcatgtcacctatttaaaccgaagatatttccaaataaaatcagttttcttacaaaaactcaacgagtaaagtcttcttatttgggattttacatttggtcaatcgagcctttaatcgactctgcagtttccccctaccaaaggtaagggactcagagaaaggccagctcctttaagcattgctaagttaatcttgcagctaaaggtagcaaaaataagtgactcttgtttccccctaccaaaggtaaggaacagagtataaatataaaaagcaaaaagatacaaaagaatcttttatgttttaaaacaagccccttatagtctatagctaaaggttgctttgtgtaccattataaattgtggtaaggcgtgcttgaggccatacatcagcaattgtgaaattaaaaagtgcataacaacaagtgccttataaatgctctaatagcattaaatcagctcataaatagagtgcagtgtatatgccataagagcataaattaaataaaaagtgcctgaaaacagtgccttataaatgctctaatagcattaaatcagctcataaatagagtgcagtgtatatgccataagagcataaattaaataaaaagtgcctgaaaacagtgccttataaatgctctaatagcattaaatcagctcataaatagagtgcagtgtatatgccaaaagagcataaatgccgaaataaatggctaaaaaacaaaaaatctgactggactacaaaaataataaaacgtgcaaaaaaaaaaaaaaatcatctttaaacatcgacggagccttaaagaagagaaggaagtcaaattcaaaggagcctctaacagcagcagcagaagcagcaacagcagtagcaacagcagcaacaacagcagcaacagcagcagcaacaacaacgacatcagctaagtcaaaacaagaattttctgtttatccaaacacaccatatatatataaatacatataaaatacatatacacgtcctatatatattaagaaattacaaaaaattttcaaaatgatgtcagaaaagactattcaattccttaagaagcagtccgaaattattttggaaattagaaagttggaagtaaaaccaacattaacagatgtagaaattctaaaattaaatgagcttcaaaaaatgtttcattgctaatcatagcaatttgttaaagatcggcgttgtcgatcatgaatattttaacgcgaagcagtatgatttaataatgatggtgttagaaaaaattaaaaataaaaatgaaaaaattaagggccgagtcggtagaaaacactttccttaaatcaaacactgtccttaaatcaaaccctccccctacattaaaccttgaaatgcgtggtcaccctgaaaaagagggtatagcacaaaacaacgctttaaaagtagagcaggcatttcgtaataatgttggccatttcgagtatatctagaagatacgtctaaactaatagacagtagtccagatttccttaaaataaggaaaaataaaattgaatttttatggcataaaatagataacctgatgaacaggtgaatagtcattttgagagttcgctattcgaagaagaaattagcgaacttgaatttgacaaacaaaatattcttacagccattaatagtcgactcagtggcacaataaataaagtgaaatgtcgcggttgttaaggcggaggagttaccaaccctgcctaaaatacagattcccaccttctttggtgattccaaagaatggggatctttttaatgaactctttacagagctcatacatgtgagagaggatctcagtccttctctcaaatttaattatctaaagtcagcattaaaaggagaagccagaaatgtggttactcatttactgctcggctctggagaaaattatgaagccacttgggagtttttgaccaagcgatatgagaataaaagaaacatattctcagatcatatgaataggcttatggatatgccaaatttaaatttagaatccaataagcaaataaagacatttattgacccgattaaccgagtcaatttatattataaaattaaaggcacaattaccagaagatgtggatgcaattttcgctcacataattcttcggaaattcaataaagaatcactcaatttatatgaaagccatgttaaaagacaaagaaatcaggcactttctgatgtcatggactttttagagcaaaggctcaattctatatcatcattctacaggaagtaaaacctgtaaagaaaatgattaataataacaagaataaaaattatagtgacaattgtgcatattgcaaactaccagggcattatttaattcaatgccataaatttaaaataatgaatccagcagacggtctgactgggtaagaaaaaatgggatttgcctaagatgtctgaggcatccgtttggtaaaaaatgtataagcgagcagctttgttcgacttgtcgtaaacctcaccacacagttacttcactttgcaggtcataatccagaaaaagtgaataccgtgtagaacaacaggtcaagccttgttggccacggccttgattcaagtaaagtcgaggtatggaggctttgaacaattaagagcattgattgatagtggctctcaaagcacaattatttcagaagagtctgcacagattctaaaatttgaaaaaatttcggtctcatactgaaataagtggagtatcttccacagggaacgtgcatctccaagcacaaagcggttatttcgataagaaattctccgaaaaatttagaaattgaagcaattattctcccaaaacttatgaaggcaccttccagtcaacacgattaatggtgatcagaaaaaatggaagaactttaaattagccgaccacgattttaataaaccgggtcgcattgatttaatcattggagcagacggtatatactcccattctgcaaaatggagttataaaaatagacggtctccttgggcaaaaaactgatttcgggtggatagtttctggatgtaaaaaatccaaaggaaaagaaaccattgtagccacaccaatagaaataaaagagttagatcgctactggggaagtggaagaagaagaaaaagatgatatccgagtctgaaatctgtgaaaataaatttatcaaacccgacaaaaaaagattcagatgggcgatacattgtgtcaattccattcaaggaggatgtcaccttaggagattcaaagaaacaagcgatagctcgttacatgaatctggagaaaaaactaaaaagaaatgaaaaacttaaggttgactacactaaattcatgaatgaatacatggatttaggacacatgattgaagtgagtgatgaaggcaaatattttttaccgcaccaggcagtgattagagattcaagccttacgaccaaattgagagtagtttttgatgcttcagcaaaaactacgaataacaaaagttttgaacgacataatggtgggttgggccacgagttcaaaaagatatttttgacattattattaaatggagaaaatgggaatttgttgtttcggcagacattgaaaagatgtaccgacaaattaaaatagataataatgatcaaaaatatcaatatattttatggagaaattctccaaaagaaaaaattaaaacatataaattaaccacagtcacttacggaactgcatctgcaccatatttggctaccagggttctggtagatattgcagataaatgtaaaaaccaagttattagtgcaataattaggaatgatttctatatggatgacctaatgactgggagctgattcggtagaagaagctaataaattaataacattaattccccatgaattgcagaaagttggattcaacttaaggaaatggatttccaacaattccaaaatattaaccactgtggaggacacaggggacaataaggttctcaatattatcgaaaatgaatgtgttaaaactttaggactaaaatgggaacctcaaaaggatttatttaagttcagcgtaaattgtaatgatgaatcaaaaaatataaataagcgcgttgtgttatcaacgctagcaaaaatatttgatccgttaggatggttggcaccagtcacggtttcaggaaaactttttattcaaaaactttggataaataaaagtgaatgggatcaggaattatccatagaagataaaaattattgggaaaaatataaagaaaatttattattggtagagaatattcgaatcccaaggtggattaattcaaacagttcttcagtcattcagattcacggatttgcgggacgcctccgaaaaagcatatgctgcagtagtctatgctaagtagaccctcatgttaatataatagctagcaaaagtagagtcaaccctataaaaaataggaagacaattcccaaactcgaggctgtgtgcagctcacctgcttagtgaataatccaaagactaaaaggatcaattgacaatataatgggagatctatgcttgggagtgattccacgattaccttagcatggattaacagtggtcaaagtaagatcaaatttataaaaagaagaacggatgacattcggaaattaaaaaatactgatggatcatgttaagtcagaggataatccagcagatttagcatccaggggagtggattctaaccagttgatcaactgtgatttttggtggaaaggtccgaaatggctagcagacccaaaagaactttggcctcggcagcagtctgtagaagaacctgtcttaataaatacggtattaaatgacaaaatagatgatcctatttacgaattaatagaaaggtattccagtatagaaaaacttatacgtataatagcatacataaatagattcgtgcagatagaaacaagaaataagcctattcatcaattattttcagtaaaggagataagaatagcggaaacagtttgttattaagaaacaacaagaataccagtttaggcaagagataaagtgccttaaaatcaaaaaggaaatcaagacaaataataaaatattgtcattgaatccatttttggacaaggatggggttctaagagttggaggaagattgcaaaattccaatgcagaatttaatgttaaacatccaatcattttagaaaaatgccacctaacaagcttattaataaaaaatgctcataaggaaacattgcatggagggataaacctaatgcgaaactatatccaaagaaagtattggattttcgggttgaaaattcgttaaaaagtatttaagagaatgtgtaaccgtgtgcaaggtataaacaaaatacagctcagcaaataatgggtaaccttgccaaaatatagagtgaccgatgacattcccgtttcttaatactggaatagattaccgcaggtccttattatgttaaatgttcaaaaaatcgtggccaaaaaacatttaaaggatacgttgctgtattcgtttgcatggccaccaaagccatacacttagaaatggtaagcgatctaacttcagacgcatttttagcagcactcagaagatttattgctagacggggaaaatgttccaatatctattcagacaacggaacaaattttgtaggagctgcaagaaaattagatcaagagttatttaatgcaatacaagaaaatataacgattgcagcgcagcttgaaaaggacaggattgattggcattttattcccccggcaggacctcacttcggaggtatttgggaagctggagttaagtcaatgaaataccatttaaagcgtataatcggcgacactattttgacttatgaagaaatgtcaactcttttatgtcaaatagaagcatgcttaaattcaaggccattatacactatagttagtgagaaggaccaccaagaagttttaacaccaggtcattttttaattggaagaccacctttagaaatagtcgaaccaatggaagatgaaaaaatcggaaatttggataggtggagacttatccaaaaaatgaagaaagatttctgggttaagtggaaaagtgaatatttgcataccgctccagcaaaggaataaatggaaaaaggaaattcctaatatagaagaagggcaaatagttttattaaaggatgagaattgtcatcctgcaagatggcctttaggaaaggtggaaaaggtgcataaggggaatgatgataaggtccgagtggctaaagtaaagatgcaggaaggatatatcacctagacccattactaaaatttgtcccttggaaggaataaagtctgttgacaaaaatgaggctgaccaagagccaaaaagacgaactagagcgacatcgggaatgtccaagatcggaatcattatggcaatgttgttgtttgtgttaagttgtcaagtttctagcgcattacctaaagatatagcaccaagatattctatagacaaaataaataaaacctcagcaatatatctagacccgctaggagatgttgagattgtgagtacttcttggaatttggttatctattataaaatggatccatattttaaaatgttaacaaagggtaatgcgcttatacaaagtatgaggaaagtttgcgaaagacttcatagctttgaagagcaatgtagtctagtcttagataatatgcaaagtcagttatcggaacttgaagaaaacaataaattgtttatgatgcagtctagatctagaagcaagcgtgctcctttcgaatttatgggttccttgtatcatattttatttggtataatggatgaagatgatagagagcaattagaagaaaatatgaagaatttgttagataaccagaacaaccttgataaactaattcaaaaacaaacatctgtggttgattcacttctaatctattaaagagaacaacagaagatgttaactccaattttagaagtatgcaaataagaattgagaacatgacagaagttcttaaagaaaattattatggtttataaggaatcaataaaattctttatgattaccgaaacagctacactcattgattgaagaaggcgaaaaaattcaagcaggcattataagcctgttgattgatattaatcacggtaggctaaatacaaatattctcaggccaaatcagcttaaaaaagaaattgccaaaattcagcagagtctttcggagaacctagtaattccaggaaaacggtcaggtacggaactaaggagggtgtatacactgttacagccaggggttattcattcgacgataaattgatcattagtgcaaaagtgcctctgtttagcaggcatccatccaaattgttcaggcttatttccggtgccaattcgaaatgaagatcggatataatggtgcatacaacgtccgaatatttaatttataattttgagatagattcctatcacataatgaccggaagcccattaaatcaatgtcagaaatggcaactaaataagagaatatgcaaaggaagttggccctggaattcagccgaatgataatgcatgtgagattcagcctctaaagccagataaagcggcgaactgcatctataaaacagtagtcgactctaaaagttactgggtagagttagaaaagaaaagtagttggttgttaaggttcctgcgaattcaaagtcccgtctgcaatgtactggctctcaaattgaattgtttgatttgcctcagcaaggagttttaagcattgcgccatattgtacggcaagaaccgacgataaaattctagttgcccaccataacattcagtcccgaaagtgaagaattattatcaacaccttatatagggagaagttagtgaagcgccgaagattatttttgggatccgctgaaacttcaatattaaatcatactgaggaatttgaaacgatctgaataatgaaattaaatttatgaaagagaaccatcaaaaattgaaagatttacatttccatcatatttccggacatgctggattattattgctttaatactaattgatagtattaataatatatttcatcgaaaatgtgctgggcaacaaagaatgcaagcaataacctttgcaggtccgttgccagtactataaatattcaatagtaaataaacaataaaataatataacaaataaaaatatacagtccactatattcgttgtttaatagaaaatgtacttctacatagaaaaagcaaaatgtttaaaataagttaattgagtacaaattgttgaattaaaaataatataaaccataattgtaatccaataaaattaaaagccagaaaaactaggcccattgaaatcttagttgcaaaataaatgaacatatatcaaataaatacagtccactactggtataaatgcaactaatatactaatgtacatctcagctttgctggccctttggcagaatgttcacacatgaacacgaatatatttaaagacttccaattttgggctccgttcatatcttatgtaaatgaatcgagagcgataaattatatttaggattttgttatctaaggcgacatgggtgcattgctcaaaaacatgtaatttaagtgcacactacatgagtcagtcacttgagatcgttccccgcctcctaaaatagtcccttagtgggagaccacagataaggtcctcgccgctcaagataggcagatgtgcccgagcgtgggacctcgataaggcggggactatttacgtaggcctctgcgtaggccatttactttaagatgcgattctcatgtcacctatttaaaccgaagatatttccaaataaaatcagtttcttacaaaaactcaacgagtaaagtcttcttatttgggattttacaacagttttagaaattgtaaaaatcaactgacttaaagcaagattttaaaagccttgaacactagtcacaactcgaaattaaaatatatacttcggttatgaagttttttttttaacataaaaggttactccaatatgcgtaattgaaacacttaagctgtacttttgaatgtccctgtcttagatatttcaaaggatttcaaataaaacatggcttattggagctttgagtccgaaataagccaagtgtttatttgcttaaaaatgcaaaggcagccctcgtttttagtatatggcataggagcaaaggaggaaatcttgtgcaatcacaatggacgctcggtcgggaaactcggaaaagtcgggggaactcgtgcgtcgacttgtgcagctgacactttaaaaggcattgacaaagccacataaaatccggctttaagcgctgccaggcatgtcaaatgggctcgagtggtgcgcggatggttgagtggagcaacaccctcgtcgttgcccatatacccatattcgcatattttcattttttattttcgttagcactggaaccgcctgcagcattttgcataaatttcattgctgggctaacgcgaatttcaattgcaatattccattacgccgactgaaaagctaccgcatggcattagggatacgcaactcacccagcaaatcgttgacaccggcaaaggtcatcaccagcgaggccacgaagagatccgcaatcgctaacgaggccaggaacagattgccgatccggcgcaggctgcgctccgtgtagatggccaggcacaccaggatgtttccggccaccgaaaggaatatcagcaccgataggaagatgcctgcggcgagtccaagtcaaatatcacacccataatcgtagctcaggcgaactatatgatatggcatacttatgtgggcgggtgaacatcgagggatgggtgtgcgtgagggggtgtgcgtgtgcgtaatatttgtgtttgtgtcacatgcaacatgcaattttacagataattgtcgtgtccgtgtccgtgagagcggtgaatgtggtcaagtgttggttgggtggtgcagatggtgggtggctcttgctgtacattcaacgacatttactttaccaacaactacaattgacacaagtgacagcggctccggttcctcaccaactattgtatccatttcagacgcatttgtccagctgctctcattgtagaacgatgtcaactgcaatgatacgagtttcgaatgggttgttaaatggtagaaaatatgttgcccgagcttaagatcgtcaagtgtggcttacaattgaatttttatttgatggtggttttaaccaactttctttaatattccataattaactgaaaaactatttatattaatcactgaaaacttgtacgttttcctctctccctggttaactagctgaattgttgctttcccacatgtctttgttctcctctcacaaactaattaaatttgtgaaatatttttcggatttaattagctggcatctgctttagtttaccctgaactttgccccattcattttccttcgccgttgtcatcctggctgtttgtggcacgcacgtcgtggccatacaaaaaactatcaatcatttgtggcatctgtggcaggaccgcaagcggcaatcctcttcaagaagcccaccaagcggcatggcattattcataattaaaattgacaaaatttcgagaaaattgccagggctgtaatgaaattaatttgtttcactaagcgctctcccggcccaccacattatgcccaaaaaatatatactcatgcatgtgtgtgtctgtttgtggcaactttgagttgaagtttgtcttgtggtttcttttgcttttgggcaaccagacatgttggcattccggcggttgcctttgcctttggtggctccaactatttactcgattgaacaattgagttctgtaaattaatttattaattaatacgaaaaggtacatcaccgcgtacccagtgcaattactctggcagaaggaaaggattcgcagaattcaaaggatacgaaatgccgccagcttggtatcctttgcgcgttattgccaagagaataaataaccataatgaaggccataataaaatgctcaaaagcagacccgaaaccgctgacaaatgcaattaattaattcaaacataaaactgccgacgccatataaatattttcctcgttggtattcagacttttgcagcttgtacctggaactttttgtttaattaaatttgttcttgctgcacgtgtgtgtgtctgtgtgttgtgcgtaagctgcttaataactttaaaattgttaattgtttgaaatggaaactttattttaatcggctcaaatgtggtcgtagaatgccacaaatataaaatacttacgggctaagcaacggggcgtatgcgcaatatcatgtatatccattatacaaaagttaatttattcatgcttagattaaggttaccataggcacttcgaacataactcaaattgcgtaaatatttaactggaccaaagcaacaagcgctccaggcggcaatataaatgcactgaagtgcgattacttattcataaactatatcgattcgccagctaaatatgtatgtacacaaggatagggttaccaaagggatttccacgtgaaatgcaccataagtgaacagtaaacaaaattaattgatgctcaacatcacgagcgaattgcgccggacaataaaaaacacttaagattataaaatttacacgaaatgccatctcatgtcaagtgaattttcattaaactcaccatcagctgctgcccagattcagaacattacactgatgttaatgtttatgttcatgtcgctgattctttggcggcagtggcatcattaaaaagcagttaacagtccggaagtggaagcgtgactctgcgatattctccaccggagatggccagaaccattaaaaaaatgcccgtttccacttaatttaaggtaaactttaccaacatctttcatttaaaaattgaaagtgccccaatggaattactaaataaaaaattttagttgctgtcttttccacattctcaatgtatatttacacaatccaaatacaatatatatgtatatatttaaacaaaaaacatgcgaacgcgaaaaatccatgccacattttataccagtaatttgattcatgtatatttaaaacatttttttaattttaattaaccaaagcctattgttacacgtaatattctattctaaatcttttaagtgattttgaacaacgcaattatattttaaagaaggttaggtgtacattagactgttttcacaatttagaaaatttacttaaagcacatcccatttgagtcccaatgtttcattccataagctataagctttaatttagatgctttcaccgagcatcgggcaaagtgaaagcataaacacagcatctgccaagtgtgggctaaaagaaatttaaacagttggggaatgggaaaggataggaaaacagaaggaacaactgtgacaccagttactgcatttaattggcaataaaagtggacaacaaatgctcgcgatccgcgcttcgttccccggaggcttccataagtcaacaaggacctctgcctctgatccgcagttcccaggaaggaaaaaggatatgggtggtgggacgtgaaaaataccaggccagctagagtcgcacttgggtgctttggctttgtttgcagagttaaatggcaaaatgcgttgattaaacgtcaacacacatacacagacccacacacacacggagaacacctggaggccgtacaataataaggctcaaaacctgttggcaggacaacaaggtaaaaggtggcatttttgccaaccatccgactgtctgttctttgtctggccgtctgggtaggcggaagtagtgtgatttacaagtggaaaaggccgagccgacaggctgaataataaccgaatggtaccaaaggactcgtcgagtattccacactttacagtgtcatttgagcacttccgcctacggcaacacgagttgcaaggataacaaacatcagagccagtgccacatgacccagggcacagcatagttgttaattaagtgctctgtacaattactagaccgaaaactccttaacaatgctgaaggacctggggaaaacatagctgctatgcctcagtttcctattcagttcgacgagcatttctgtacgtataatgagattttcctgtcgaacatatagaaaatttgcaatttttacattgacaaaaaattgttgaagaaaatgaaaatgtactatattttgatgagtgtttagtacttatagggcaatattcttttgcaggctttcaataaaccttttttaattcccttcgttttcgttcagtgccatgataaattttcaatttccctgcactatgaacttcgaaagcccacggtttttggggcgcattgaaccccatttggttgggttgccagtaaaagccagtaaattcgctgcttcgtgctgtttagcatatatttaaattcttacaataaacaagaaatgctgtgggcgtctcttggcaggtcgcagtaagaaatcctcagacacaaggatgggattctcacgtagaagcgataattctagagcctagacagctgatttatgcgcccaacaaatatttgttctttgctttcgcaaactttcttcgagaactttaagttttgcttcagctaaacacagttgctgcctcgttatgcaatgtgaaaatggtggaggtgatgtggccaaggaacactcgagcagatgctaactgcagtgacaatttcgagactcggatatctctcatctgttggccattgtctggactgtcaatgcccgtcgaggattgcaaggacctccgtgcagcaaaagaagttgaggaagttgctactgcagacagctgtcaacaggaatgctgatgtgcgtcgtacgtctttgggttctttgttgaaatttcggcttaattaaacgaagcagaaagtaaagaaagggggaaaactctcgcagacacatgtgcctggctgtcaaaactgtcgtaattgaggccctcagcttctatctatgtatgcatggccattaaatgcaaatgagcgcctgatggcgcggaaaagtgtgtgacattaagtagggattttccttcttcagttgagcgcctgccaagatgagcagcgtcctcaattatgaatgaactaattagattcccccgtctgtcgatgatggataacaagtttattctccctcgagcagggttttcacacttgtaccaagtgtttggctggcatttttcggacgtgctaaagacacaacctttaaccacaaggcagccacagacaagctcctgtcgaacttgccgacggataaataattaaaataaccccaagatggacatgaagctggtacaccacatcccattctgcccccggctgtggcaagttgttattaaaaattcattttatttggggcatgcggaacatcctgggaaaatactcttagttgattgctttttcgagatcgtaaacccgttaattaccgcaggacgatgagctagctgaccagagcttggaatttcatatataaattttagtttcaattttactaatttaaataaacttttacggctcaaaactttcaaacatcaattaaattgcttcttgctgcgaacgtctttcggattttcaatcaacgtttttaatcttgccttttaagtttgcttaatagtcaaactttatttaatagactacgaaatttagtcaacccaccgaatacactcaaaagcaatgataattatcaaaacccgattgttgtgctccgattggacattgtgtgtgttcctgggcacttggaaggtaaatcaaatgctgcagcattgtttgccttatcgctgctctattgcctgccaattttcggaggaccggcgattgtttgttttggcagctattcagcagattgccatgttgatttgcccgaggcgtattgtcaacttcgggataattagctgcaacagaagatgacgccgccgggtggttggtggttgttgatgtgcaatggtaggagcaggaagggaagctctaggtaggttgctcttaagctgattgtaagtgcagtatctgcagctcccatcgctcaacctatccaacttaatcttcggcatgccatttccatccgcatcttctatttcctataagagcatcgattttatacttttttttactggcatatcttttttcttttgcgatctcccatcgaagcgaagtgaaaaacttggcaagtgaacgatgtcagtcagtggcgttcagttgtgtgcttaactcaaacatcccgttaactcgcacaagtgtcgtctgcacacaaacaccatggcagacacacatacacacacacttacacgtcactggagtgtaaatacagatacatcaatgcaactgcacttgtttcaattgaacggagaaaaaatggcgactagaatggctgagagagaaacatatctcacggatttctcttagccaagtgtcaagttcccacacacttgcacagtggtctcaatggcagatggtctcattttatccattgctatcgaaaaaattcaattgctcgttcttttcaaaagcaagtacaggccaaaaaaaacattaagctactactttaaactattaagttgcagaataaacaactttcctcatttatatcttaagcaaaaacataaatgtgtatattgcccttgctaatatgaataaacttttgtaatttctttgtttcgataactttactgtcgtaattatctagaagtaacaaatagtttctcccagtgcttaagaatattctcccagatagagaagtcagatttctcagcaataaaaatgtagtcgattatcttgattgtgttttggcaatggctggcaaacttgaacacccggcgcggatgattgacatgaccctaggaattttatatggtcgtggccccattaaattgacttgtcacgagtaatcgttctgcacttttgtgtcattggcgaaccactgataccaggggctcaactcgtggaggagagctccataaaaatggctgcaaaagggcaacatacaaataaaaaggacccaaacacacacacacacacatatggactagcagcagcaaatataaactgggtttatggtcaatcagcagcgaacctttttgggcttactgaattctgaatcccactgactgctcatcgtgaatccttagccccattcacctggccctaaaatgaaagaggtaaacgaaatgcagacaacataaaaatcacgaataactcgctattttcatttggttttttcttttcccaaacccaacagcgaacagagcaaaaaatgtaagtcactgtggcaaagagtggagggtgcaattaaatggggaacacctagacaaacacattgtggctcttgtggccaagattaatgtggaatggtcgtgatggtggcttccgaatcgggattgggatgcacctccattcggtgggttactgtgttccttcatgtgtgtgtcccatgcggttttcatatatgtacatatgtaccccatacatacatatgccgtgaccctattctggtggaatggcagcattcagctcatttatattgcggctagcctcgtgattatggcagccagctgtcacacacatttaattaggcgaaattgctgaaatttatacagcaccacttctctgattccttgttttatgtggccatgatctaattgaaaattaccgcgcgagaaagcatcaaatttagatgcacgcttaaaataaagttaccagaataatggaatatttgttagagatctaagttccgaatgcctcaaacatctatgtcagaaagaaaccatcttaattaaatcgaagaaaataaacagaccactgtagtttcaaactttaatactttggcaacaaagtttctaagaaaactttaaatgtatatgtatgactttcttaatgcaaagccatataaaaattttatttataaaacagtttattattgcatgtgtccgacttataatttaaaatatatatttttaagtcaatcaaaattgttggtacgttacatttttattgtgaaaatgttattcattatttttagcttagtaaaattattttggtgtcaaattcggccatgtaaaccccaaaggaaaatgttgcaattaggcttaaggatgtttttcaaacagcgtactatttcactccaataaattgtggagttgccaaaagcaaacaattacagttataccgaataagctcgatttcaattggccagcctatcgatagcaatcgggccacgcccctcccacttgctgcctactgatttggataaattgccggcggaaatttgcgcaaattccagaggctctggttcgattcggatatatatatatatataagaatatatttgcgtttggataacaaaggaaggcgatttgctgaatggaaagcacaatccacatggcagcggcaataacaaataagtctattaatattttagtattattgctatgcaaagcctgcgaacaatggcaagccaaagttttttccttgcgactagaaaatgcggaatcccatccaagaacgcgaaatcacaatggattcaaggaggtgatgcggcggatggggatttggggactattcatgaaaagtacgagcataaacccgctttttatgcatgcaggcaagattcgacgagcgcaaattaataattcaattagaatgcacaacgcggcgtatgcgtgatgcattatgcaaatgccagagaaaagaaaagcgtgcggaataactatgccccaaaagacaattttctgctgacagatgatgggcacaaatgtcagtgtcaacctgtggttagttcacatcaattgagactggtctcaagttgtctggtctataaaaaaaaccaagtgcactcggtataaatgcataatgtaaatggaaaaatgtgaacttttcatcaggcaattagcttaaattgacccagttagcgttcggtaaatcagggtagtaaatacgccctctcaacagtttgtaaattagttgaaaacctatttacgtggaaaatgtgcggcacatgaacatgatgacaacgtgatgcggcgataaatgtccttgctccacccaacttacgtgatactcattatttacattcgattgaaagttaaacgtgcgaacagatgagcacaactttgccgttccacacaacaagtatttagatctatatctatgtcatcctcgtctgcgtgcgttgcctcatatcctttactgttgccacaccaagcacgtaaattgctcgttctcccaaaaaaaaaagcaaaaaacaaaaaaaaaaagaggaggaggaaaaataaaatacacacgagtgaaaaaagggttaaactttggttttggtatacatccttggcggagttcctttgaaaaccggattatgcatcgatggaggtgtgtactcgcatcctagcaaaagtttctccatgtgctggctgctaatgaggctcacattcattttcatttaccagctggttggctagaagtgatataaattaaaaggaatgcgaacagagaaaacttttgctaactgccaaccttttgttataatttaaactttgtattaaatattatgaaggcgtgcgggatgtgtgtgataatcatgtgataatcacccatccttccctcattggataactttttgcaccccttttgtcttgacaaatcattaagcaatctgcgagcggattgcgtatacgccccataaaccaccgaatcacctagaggaactctactacaatgttcgggaaatatgccagcacgtaataaaactgaaaagctcatgaaggccaatatcctacaacacccgatcggagacaaagacattgtaaattatagtggcgatatggatacctgagactacactgaaaataaaatcgtgattcttctatgtacatatatagttcctgtgaataacatctattatttaacaccttttattcattcctattattgtggaactgcaaattgaatgccacaaatatttgattgcttgacatgtaatactatggttattgcaatatccttttttgtataggacataacattattgattgcacgtttttaataaccaagcacaattctaataattctacttttttcccccgtgttctgcgcattttacgagctgcacattggacataaagccaaagctaaggccgcatccaaagccaaagcccaatgaatgcctcgttggcagccacataaatacaatcgacccactccgggcctcgtttccgcccggactccccacttctccagcccttttccgcaactcaccgttgtgccatcgtagccatttgtcagcagttggatgtcgatttcaatgtccaggtccaccttggcggtcgtgagctgcagcggcagatgatcggcgtccagcagcgtggaattcgtggagaatccggtgctcccactggtgtgattcccgccgatggtagtggcgctactggtgttgatgatggtggtgctgctgctgatggaactggtggtgctggttgcgaccgtggcggccactgaacccactcctgctgcgattgcagcaatcgcccgcattgcatttgtcattggaacgaggatgattaggaaaccaaatgggtgtggtgtgtacatgaatggatggttggtggatggttgcttcctcttttcagcgagagattcttagttgcgggtacggcaataaattgcccgactacggcaatgcagcattctgctaatacacttcttcgatactaaatgcggcaattgaagcatgttcagacgaactgagaaactcgctgggtttcagattcaggcatcgcggagaacgcgacccagagtcatgtccagccatcaatcaggcgaaattacagcattaaagtcactgcttaaatgattgataaatatgccatatatataatatatatatgcttgtggtatgcacacacttaactgacacacgcttctcgcacacacacacacacacgtacgcccgtcaagaattctcgatcggcactcggaattatgtccgattatatgggttggttggtgttatctggcactatctttccagcgggccaccgcttgacgaaccgtgcgaactgaaggctgaacgtcgactgtccggatacgcacgactaacggtatcagtacggcggagaacgaccaatgccgtagagtatgcaacaactttcgagttccgccggagccgcgaagtccattcaacaggatatgtcgctcactaggcggaatatatgcgctgcgcagagcaagagagagacttggagcaaataagcatgagagttagctgtattgagggaaagcacctgttgttccaacgacgcgttttcccagcgtttcactagcgactccgacgcgactttggccgccacctctatttgttctcattacgaaactgggaacaacgttgcgatgtcatttgggctgagtgaatgcctcaactgcatgcaaatggaatgcaattgctgtctttgacaaatcgccgctggcagatctgctggccgatgcaatctttcaattgagatacccttacataaagtggggaccacaagttttgttagttttttgtacatatgattttctatatgagtatttcagaaatttatcaaatataggcatttaaaatgtgaacttaggtaattgcttactttagtgataaaaacctccaaagctccatataaatactattaaaatcaactttaacccctttagttatgtgtggataggggtaatgcaactgtcacttttttaaaaaattttgtatcttttattttggcacttaattcaactaatctcttgtataacctatcaaaaccacatgctactgagcagccactcgatgtgcttggccacatccgtatagatgacaggcagcgtcagattgcatctgttggtcattcgctgtccggctgagacgacgccgcgcagcatccagatgtcctgctcctggagcatcagtccaccaccggaatctccgct

SEQ ID NO: 20465 - DNA, 2539 bp, DROSOPHILA
ttgacgggcgtacgtgtgtgtgtgtgtgtgcgagaagcgtgtgtcagttaagtgtgtgcataccacaagcatatatatattatatatatggcatatttatcaatcatttaagcagtgactttaatgctgtaatttcgcctgattgatggctggacatgactctgggtcgcgttctccgcgatgcctgaatctgaaacccagcgagtttctcagttcgtctgaacatgcttcaattgccgcatttagtatcgaagaagtgtattagcagaatgctgcattgccgtagtcgggcaatttattgccgtacccgcaactaagaatctctcgctgaaaagaggaagcaaccatccaccaaccatccattcatgtacacaccacacccatttggtttcctaatcatcctcgttccaatgacaaatgcaatgcgggcgattgctgcaatcgcagcaggagtgggttcagtggccgccacggtcgcaaccagcaccaccagttccatcagcagcagcaccaccatcatcaacaccagtagcgccactaccatcggcgggaatcacaccagtgggagcaccggattctccacgaattccacgctgctggacgccgatcatctgccgctgcagctcacgaccgccaaggtggacctggacattgaaatcgacatccaactgctgacaaatggctacgatggcacaacgttgacatcgttctacaatgagagcagctggacaaatgcgtctgaaatggatacaatagttggtgaggaaccggagccgctgtcacttgtgtcaattgtagttgttggcatcttcctatcggtgctgatattcctttcggtggccggaaacatcctggtgtgcctggccatctacacggagcgcagcctgcgccggatcggcaatctgttcctggcctcgttagcgattgcggatctcttcgtggcctcgctggtgatgacctttgccggtgtcaacgatttgctggggatattggatctttggagcgcaattttgtgatacttgggtggcctttgatgtcatgtgctcgacggcgtcaattctgaacctgtgcgccatctcgatggaccgctacattcacatcaaggatccgctcagatacggccgttgggtgacacgacgcgtggctgtcatcaccatcgccgccatttggctgctggccgcgttcgtctcctttgtgcccatctcgttgggcatccatcggcccgaccagccgctgattttcgaggacaatggcaaaaagtatccaacatgcgctctggacctcacgcccacctacgccgtcgtgtccagctgtatcagtttctacttcccctgcgtggtcatgattggcatctactgtcggctatactgctatgcccagaagcacgtgaagtccatcaaggcggtaactcgaccaggtgaggtggccgagaagcagcggtacaagagcatccggcgcccgaagaaccagcccaagaagttcaaggtgcgcaatctgcacacccacagttcgccgtatcacgtatccgaccacaaggcggccgtcacggtgggcgtgatcatgggcgtttttctcatctgctgggtgcccttcttctgcgtcaacatcacggccgccttctgcaagacctgcatcggcggacagaccttcaagatcctcacctggctgggctactcgaactcggccttcaatccgatcatctattcgatcttcaacaaggagtttcgcgacgccttcaagcgcatcctgaccatgcgcaatccgtggtgttgtgcccaggatgtgggcaacattcatccgcggaacagcgatcgcttcatcacggactatgccgccaagaatgtggtggtgatgaactcgggccgctcgagcgccgaactggagcaggtgtctgcgatttgaccaaaatgctgtctgaatctcactggcggtggagccacatggctgccctgcggatgcggcggtctgcgcgtggacgacgatgacgatggagcgctgaccacgcgatatgttccatgagattcggtcacggcggccaccgccaccattgtggagaccgtggaggccgcgcagatggagacggagctgctgtaggccggcaaatgggttcctaaaaccaactcgatgtctcacagtttaaaccgtaagcaatcccagccctctaccctactgatccagtggatatggaaacctgtaagtattatcagcgcgtccccgagactaagcaatcaactatgcgtatacttaatcgcactagtatctagatgtaagtcccactagcaaaaagaatacaaatcggaaaaacaaaatcgaaaaccaaaccgaaacgtgattaggtctaagatcttcaacccggcacctaagagagcttctagttaagtttctgtttggatattcatggcggtttgtctccatgcaaatgcgattattatggagtgacacatgtcacttgccacatttctcactcactcactcacccatacaaacaaacaagcaaacacacacacgcacacaacaacaaaacactcagatacatggg

SEQ ID NO: 20466 - protein, 216 aa, DROSOPHILA
MYTPHPFGFLIILVPMTNAMRAIAAIAAGVGSVAATVATSTTSSISSSTTIINTSSATTIGGNHTSGSTGFSTNSTLLDADHLPLQLTTAKVDLDIEIDIQLLTNGYDGTTLTSFYNESSWTNASEMDTIVGEEPEPLSLVSIVVVGIFLSVLIFLSVAGNILVCLAIYTERSLRRIGNLFLASLAIADLFVASLVMTFAGVNDLLGILDLWSAIL

SEQ ID NO: 20467 - DNA, 5079 bp, DROSOPHILA
cagccgctaacaaactgtgctgcgacacagtggcacaaaaagctgccagcaaagggttaagtgtgggcctactaatacatgtaaaaaactaatttttgtaaacagaatttaaaaatggtttccaagtagtgcgaacatttgtcgactttgggtttatgtttaaaacaataatctgttgttggcagatagctaacaatgttttagagatagaagaatttgaaacgcgtttcacttattgactcgatggcctataaattgataaagggttttttaattattaaagaagaagaaaatgtgttatattatctcgctgttaaaaatgttatcttttgatttgttctattccatgtttttaggtatcatataatattttttttattttttatataaaaaaaagccatacgaattggtcccactgtgcggttcgcggtgtttgtcagttagtcagtcagtcgggtgactgtggcaatcgaaaagagtggacaaagactgtggcgcacagggacgggggaatgggttgctccgtcccatgttgtccattcggtcccaccgtgcacacaactcagcacagcacggcacagcagcaacaaaagcgccgcaaaagggaactggtattatggcatcccgctcgcacttgcactccaagcacgcacacatgcaagcgcagacacctcgcgacacgattgtcgtcagtttgtctgcaatgctcagcttcagcgccatgcgctctctctctgttgctcgctctctagctccccctctcactctctctcccactgctgcacgcacacgaacacccacacgaacagcagcaacaacaacagcagcgcacagcagacaggcaggcactttacgcctgtgtgcgtgagcatttcagagtgaaccgcagtcgacggcggcgccggcagcgacgccggccgaggcgaggcagtctagaacgtatcttcgaactagaacgccgagggcagaacaattgtgttttggattccttgccgtgcggatcgcaaacgcgagttatgagaagagcgtagtaaaacgtacgagaagtagctaacaagaaaaggaaaagagcagaagaagcaacagcacgcagacatatattttttttaactgtgttttatttatccgatctataccaatcgaaatatacacaactatatagatttgaaacggattttgaaaagtgctttcaaataaactccaaaaagtatcagagcgagtgtgtgccagtgtgtgtatgtgagacgcgtcgcagtcgacgtcgctgctttggggacagagctgccagatcgcgagttatgaaagcgcaagcgtcgcacgcaagtagcaacaacagctacaacaaaagcacctaaaacttactacctactactactgcaaaacacacttgtttgactattatttcgctacattaaaatcaacaaaaatacacacaaaactgaccagaatcttgggaaaataaaaacaatctttaaagaacgccacgaaaataaaccataatcatggatagcagcagcgaacagttgaacggatcgggagctttgaatttcaagcggcccaaggattcttcggagaatgccacaaacagccacacaaataatggcaattcttcgggcagccccaaaatgggaagtcgtcggattttcacgccccactttaagctgcaagtcctcgaatcatacaggaatgataatgattgcaagggcaatcaacgggccacggccaggaaatacaacattcaccgccggcaaatccaaaaatggttgcaatgcgagtcaaatttgcgatcatcggtggccaacaatcagcaacagcagcagcagcagcaacagcaacagcagcaacaacagcagcagcagcaactactcccacagcaatcggtatcgccgacaccggcggtcaaggtgttccatcagctgagccatccgctggtgcaccagttgcatcaccatcacgccgccgcggtgggtcatcatcatcatcatgccgcccaccatcatgccgcccatcatcatcacgctgcagcagcagcggcggcagcagcagcggcagcagcagcagcagcagcccaccatcatgccgcccaccatttgctggcagccaatggcatggttccacaccccctggccgcccatccccacttgcatgtcccggtggcaatgcatcctcaaatgcagcatcagaaggagcaacagcagcagcagcagcagttgcagcaggagcagcagcaacaggatcagcagcagtcacagcaggagacacctgcaaccattgctaccaatggcagcaatcagggatcctcgaatgtcctttcggcggccaaaatagccgctgttgttgccgccgccatggccaccagcaatggcaatcccacaccgacagcaacaatccccgccagcagcagcagcagcagcaacacattgccgagcagcaataacagtagttgccacaacagcagcagcagcagcaatagctgcaacagcaaccaagtgccaatacaagtgccaatcctgagcggatcccctgggtccacatcgtcagccagtcacattccacatgtgccctttgcctaccatcacaatctgcatggctatttggagaatcgactggaggcggttgccacaccagcccccatggacctctctctcggatcctctgcccgccgtcaaatgcagttgcacgaaaaggatccatctggtgtggatctcactttccgcaaacgtaaggtcatcactagtccgatgcagccggataagattagtaagctggaggaggtgatcaagaaggagcccgaaacggaaacggagaacgaggatgtggaggtggacgtggagacggagcagccggaggagcacaagctgccctctaaacaggtcaagctatttaagccctatttgctggacgatgatgaggagcaggatcatcatcatcatcaccatcaccatcggcaggaggatttggatgagggagctgccgaggaggagcaggacgacgaggaagagtcccgctatgccgacgatgatgaggtggactccaaggaggcggccgacaagaaacagcgtcgcctcaagaaaaagccatcggcaatcaacgaacaaagggaacccatcatctggagcaaccatccgtatcccggtggctgtgtatcgcccggcagttcgatcaccagcagctttcagtgccccaccagtatgcaacagcagcagacatttcccgtcgccggcgggagtcctaatcagcaatttcaggacaactgcagctccagcaaagccaccacgcccctcagcccattctcggcgcccgccctctcgcccaccggcttctgttgccccaaaggatcgcccgtttccggttacgagagcagctcatccacctacagcgacagcggcagcaactacagcctcaatctccagctgcatgccgtctacaacgacaatctgatgtacatgcaacagcagcagcagcagcagcaacagcagcatcacctgcaacatcagcagcacctgcagcgctggctggatcaggagtccttggccactgcgaggacatcatccgtcaaccgaccactgattctcgtggcggatactgcgcccacaaacctgaccctggtggcctaagaacacacacacacacacacacacacacacacacaacaaacaacacacacaatagaaactaaggaagcagcaatcccaccaatcggatgttataatggcagtcactgggcctggccttttagttccctaagccatatttaagcttaataacgttttttttagccctaccacctaagtttaccttaataaaaaattgtatatctaagcgcaaacatatatcttccaagcatatcagcaaaaaaaaccccaaaccctaggtataaacccttcttttttttttggttacacactaagaacaaattaagcttaagttcagatttttctttttttttttcttgtattagcttgtgtaaataattgtgtacaaaaagtgaaacaaggcgaaacaattgaatttgcttaagaatttcaacgcttcatttcatttgtataacttgtgggagagtattttaagagagaaaatgtgaaaaatgcaactggaaaaactgagaaaattgttaagagtaaagctttaaaaacgaaacaaatacacacctttacaatacacactttttttatttggaaattgaaaattgaaaattcttgtgatatgacaacaacaaaacaaaattttaataaaattgttgaaaactgaagcttattgaatatacagctatattatacataaatatatatttacaaacacaaaagagagcaagaaatttaacgtaatattaagggttacatttaaaagttaattataatgatatacaatatacatatatacaatatatttatatacaaacaagaggagaacgtttttttttttttttcattgccaagggaaatattaaatgcgcctatacatagagaaagagatatatatatctaaatgtatgtatatatataaaatcagtatttttatatattacatttgacaacaacaataataataataataattgtgtgaccatacaacaaacaaacaacaaaatcaaaaggaaaacgaattgattaaattaacaacagaaaactaaaaaaactttaaattaaactggttttatcattgcatttgcgttgggtttcgaatgaagtcattgcttttcagatgactgcaaatatttcagggatctatctataagatcttttttggtttctgggttcaaaaaaaaaaaaaatcaatatcaatacacccccgccgcatcaattgggataatctagattcgagaaaaatcgacctgcctttagctccgcaattcttcttagctgtcagtgtgaggttaaggccccatttatagaaccgatcgccgtttgatctttgcgatcataccgaatgtgccattcaaatgtgtgtgcgttatttgcgtgcctcattgtgacaactcatgggttgtcagtcagtcagtcagtcagtcactcaagtcagggcatagcttaaggctttggggctttccatttcgagtgctgtgccacgccccctgcc

SEQ ID NO: 20468 - DNA, 3642 bp, DROSOPHILA
atcgcaaacgcgagttatgagaagagcgtagtaaaacgtacgagaagtagctaacaagaaaaggaaaagagcagaagaagcaacagcacgcagacatatattttttttaactgtgttttatttatccgatctataccaatcgaaatatacacaactatatagatttgaaacggattttgaaaagtgctttcaaataaactccaaaaagtatcagagcgagtgtgtgccagtgtgtgtatgtgagacgcgtcgcagtcgacgtcgctgctttggggacagagctgccagatcgcgagttatgaaagcgcaagcgtcgcacgcaagtagcaacaacagctacaacaaaagcacctaaaacttactacctactactactgcaaaacacacttgtttgactattatttcgctacattaaaatcaacaaaaatacacacaaaactgaccagaatcttgggaaaataaaaacaatctttaaagaacgccacgaaaataaaccataatcatggatagcagcagcgaacagttgaacggatcgggagctttgaatttcaagcggcccaaggattcttcggagaatgccacaaacagccacacaaataatggcaattcttcgggcagccccaaaatgggaagtcgtcggattttcacgccccactttaagctgcaagtcctcgaatcatacaggaatgataatgattgcaagggcaatcaacgggccacggccaggaaatacaacattcaccgccggcaaatccaaaaatggttgcaatgcgagtcaaatttgcgatcatcggtggccaacaatcagcaacagcagcagcagcagcaacagcaacagcagcaacaacagcagcagcagcaactactcccacagcaatcggtatcgccgacaccggcggtcaaggtgttccatcagctgagccatccgctggtgcaccagttgcatcaccatcacgccgccgcggtgggtcatcatcatcatcatgccgcccaccatcatgccgcccatcatcatcacgctgcagcagcagcggcggcagcagcagcggcagcagcagcagcagcagcccaccatcatgccgcccaccatttgctggcagccaatggcatggttccacaccccctggccgcccatccccacttgcatgtcccggtggcaatgcatcctcaaatgcagcatcagaaggagcaacagcagcagcagcagcagttgcagcaggagcagcagcaacaggatcagcagcagtcacagcaggagacacctgcaaccattgctaccaatggcagcaatcagggatcctcgaatgtcctttcggcggccaaaatagccgctgttgttgccgccgccatggccaccagcaatggcaatcccacaccgacagcaacaatccccgccagcagcagcagcagcagcaacacattgccgagcagcaataacagtagttgccacaacagcagcagcagcagcaatagctgcaacagcaaccaagtgccaatacaagtgccaatcctgagcggatcccctgggtccacatcgtcagccagtcacattccacatgtgccctttgcctaccatcacaatctgcatggctatttggagaatcgactggaggcggttgccacaccagcccccatggacctctctctcggatcctctgcccgccgtcaaatgcagttgcacgaaaaggatccatctggtgtggatctcactttccgcaaacgtaaggtcatcactagtccgatgcagccggataagattagtaagctggaggaggtgatcaagaaggagcccgaaacggaaacggagaacgaggatgtggaggtggacgtggagacggagcagccggaggagcacaagctgccctctaaacaggtcaagctatttaagccctatttgctggacgatgatgaggagcaggatcatcatcatcatcaccatcaccatcggcaggaggatttggatgagggagctgccgaggaggagcaggacgacgaggaagagtcccgctatgccgacgatgatgaggtggactccaaggaggcggccgacaagaaacagcgtcgcctcaagaaaaagccatcggcaatcaacgaacaaagggaacccatcatctggagcaaccatccgtatcccggtggctgtgtatcgcccggcagttcgatcaccagcagctttcagtgccccaccagtatgcaacagcagcagacatttcccgtcgccggcgggagtcctaatcagcaatttcaggacaactgcagctccagcaaagccaccacgcccctcagcccattctcggcgcccgccctctcgcccaccggcttctgttgccccaaaggatcgcccgtttccggttacgagagcagctcatccacctacagcgacagcggcagcaactacagcctcaatctccagctgcatgccgtctacaacgacaatctgatgtacatgcaacagcagcagcagcagcagcaacagcagcatcacctgcaacatcagcagcacctgcagcgctggctggatcaggagtccttggccactgcgaggacatcatccgtcaaccgaccactgattctcgtggcggatactgcgcccacaaacctgaccctggtggcctaagaacacacacacacacacacacacacacacacacaacaaacaacacacacaatagaaactaaggaagcagcaatcccaccaatcggatgttataatggcagtcactgggcctggccttttagttccctaagccatatttaagcttaataacgttttttttagccctaccacctaagtttaccttaataaaaaattgtatatctaagcgcaaacatatatcttccaagcatatcagcaaaaaaaaccccaaaccctaggtataaacccttcttttttttttggttacacactaagaacaaattaagcttaagttcagatttttctttttttttttcttgtattagcttgtgtaaataattgtgtacaaaaagtgaaacaaggcgaaacaattgaatttgcttaagaatttcaacgcttcatttcatttgtataacttgtgggagagtattttaagagagaaaatgtgaaaaatgcaactggaaaaactgagaaaattgttaagagtaaagctttaaaaacgaaacaaatacacacctttacaatacacactttttttatttggaaattgaaaattgaaaattcttgtgatatgacaacaacaaaacaaaattttaataaaattgttgaaaactgaagcttattgaatatacagctatattatacataaatatatatttacaaacacaaaagagagcaagaaatttaacgtaatattaagggttacatttaaaagttaattataatgatatacaatatacatatatacaatatatttatatacaaacaagaggagaacgtttttttttttttttcattgccaagggaaatattaaatgcgcctatacatagagaaagagatatatatatctaaatgtatgtatatatataaaatcagtatttttatatattacatttgacaacaacaataataataataataattgtgtgaccatacaacaaacaaacaacaaaatcaaaaggaaaacgaattgattaaattaacaacagaaaactaaaaaaacttt

SEQ ID NO: 20469 - protein, 704 aa, DROSOPHILA
MDSSSEQLNGSGALNFKRPKDSSENATNSHTNNGNSSGSPKMGSRRIFTPHFKLQVLESYRNDNDCKGNQRATARKYNIHRRQIQKWLQCESNLRSSVANNQQQQQQQQQQQQQQQQQQQLLPQQSVSPTPAVKVFHQLSHPLVHQLHHHHAAAVGHHHHHAAHHHAAHHHHAAAAAAAAAAAAAAAAAHHHAAHHLLAANGMVPHPLAAHPHLHVPVAMHPQMQHQKEQQQQQQQLQQEQQQQDQQQSQQETPATIATNGSNQGSSNVLSAAKIAAVVAAAMATSNGNPTPTATIPASSSSSSNTLPSSNNSSCHNSSSSSNSCNSNQVPIQVPILSGSPGSTSSASHIPHVPFAYHHNLHGYLENRLEAVATPAPMDLSLGSSARRQMQLHEKDPSGVDLTFRKRKVITSPMQPDKISKLEEVIKKEPETETENEDVEVDVETEQPEEHKLPSKQVKLFKPYLLDDDEEQDHHHHHHHHRQEDLDEGAAEEEQDDEEESRYADDDEVDSKEAADKKQRRLKKKPSAINEQREPIIWSNHPYPGGCVSPGSSITSSFQCPTSMQQQQTFPVAGGSPNQQFQDNCSSSKATTPLSPFSAPALSPTGFCCPKGSPVSGYESSSSTYSDSGSNYSLNLQLHAVYNDNLMYMQQQQQQQQQQHHLQHQQHLQRWLDQESLATARTSSVNRPLILVADTAPTNLTLVA

SEQ ID NO: 20470 - DNA, 89024 bp, DROSOPHILA
gattatgatttgttgctgtggttcttgttgttgttcttcttctcctttttgttgttgttgtcgttcgtattcgcttttgtattttgcttgcaaaactaaacaattgtcagtgacagcgaacgtaaaaactaaataaatgcacaataattaatgcgttaatccgattttgattcttagccatggaagaagcagttgagtcaagcgaaggaaatctcgaataactctaaaacccaagtggaaacctaaattaatgtacaattgctttctcgttgacgaactattttcaattcaattcatttccaattcaattttaatttcagttttcagtatcatttcaataaatattcgtggttttgtgttttctagaaaaaagtagaaatagtccttttcatttcaattctgtttgtttttagttgccaggaaggttcacagtgttcataaatctgattttttcttgatttagtattcgtttttcgttttttctttttctttttgtttttgttttgtttgttttaggaattacactaataattacatagtttcgcttatgtataacttaaaaacatttatgcatcgatttccgcttgctgtgccgctttcattggatttcgtttgacaaatcgattgttgaaatgaagagttaagtgtgtggaggttcgacgagggatctatagagagttgagagataatcgtgatgtatccaattcgctttcgttattcagctaacatatataatccatacatttatattcaatatgcacgaaagttgccttttacatctatgtagttggatgcgcgtgtgtgtgtgtgtttattattatagttattattcaattttctcctgctctttctgcttttgctctactcgtaattcataattaattcgcttaattttgcccgcccttatattggtttcactatttatatataatatattattcatatatttaatttcgcatgatttatttgcaattatatttgatatttttgtttgtttttgtcgcttaaaacttacttaaatagaaaagtcgcgtacacacacccacatacgcagagtgtgtattttgcattaacttacaggtaagttttcctttttttttttttgtttttcctcgttattatattgccgatttgtgttcttttcttgttttgttttaatttaatttacccctcacgaaaaattgtgtgtgtttgaaaacgtttgaaattttcatttgtttttgtgttagttttgtagctgctgctgcggatgattaatccttgtttcagtggtttgccgatgatgctgcacccccaccactccgcacagtgtattcagttgagccaaaccaaacccagtcgctccgccttcgtccagtcatacgcacaccgttccgtccttacgcacactttgttcctgcacttgtggtcaacttaatacctgcgcgacgtgccattatctcaggcgtagaactcgcggttattcgcatttttcgcatacgaattgttggccggcgatctctttggctcgtccagcgcataggatccctcgtcctttttcctcatgcggtacacgatgaacatgaccacgagtatggcgcagagcaggccaacgacggcaccgccaatgacagctggaaaagaaaatgatgttttagtaagctctggatatatgtcatacatgtcgtatgagtgatatttcttgaagcaccgcatagtaccagtcgtacgtggcgtatgaatgatatttgatgataaatcatatcatttactcaccagccagaattccgggctgcgagaagaagctcgacgtgcgatcgtcctcgctcatgatgaccacttcgttgccgttgggcctgtgatcgatgccctttgtgtcggagggctggctattcacgttcgtattggggtccaattcgtgcacgttgctgccacctgcacccgctgttccggagaaagagaaggcattatggcgatgagaaagagatgcaaagtgacaaaaaaaaaaaaaggtccatttatgcccatgacgtgcaagcaaaatcaaacaaaacagagagtgagacagagagttgctgttttgttttgttgtttcgtgtgttggatattcaattaaattgattcgagtgtaaatatttgttttagtgagtgtatacggttgtgtaaacaaatgtgtacgttgtgcgtgtgttaatgagctgttatgcagtatttacaaggcttaatgttagtcgagcagcgttgactacataggagtacttatatcaaatgctagttcttaagtagttgtatttcccagaagtgtacactaactaactaccaaactaatctcttaaatagtaagggacaaaagatgctagttaactttaagaaattcaatgtattgcagcattcatttagtctaatttttagtagtttacaaaaaccattgaagacaccgagtggcatggaagtatttgcctagaacctacaggatattctggatgttaaattacaacatggcacatcctgccaaagtgagcaaactcttgacagctaattttacggtaatgagcagcgctctccagcaaagtttgttacaatatgaaaaaagttttccagctgcgagtgccaaattcggttcggaaatctcaacatttcactttggctctaggacaagtgcaattatttcgcttccttgatattgacaggagcgtacagaaatgtaatgccaattgattgtcaaagactgcgagtttacatttaatttaattggcatggcagcacacccattacccaaactctttccctaatccctgcatatgtgtgcgtaagctccttatttttggagagctattgtttgatactcaccccctccccaaaaagagctcaagataaacaaattgcttgtttagcccttgtactcgcacttctttgcatatcaaacaaacataccgctgctccctccaggggcggcatattaattaggaaatgcccatgagggctgctccttgaattgcccctagaattgattttatatgcgcattgcaaactcgagcaaatcaaggcaatacgtaggagtaggaggtgcaggaagaatcgagagttctttgaattgcttcgcaactataaatatttgccattttcaagagcaaatggatttctcagcttcagtctttgagattgctacgctgtcttgccatcacattgattgtctgtctgcttttctgcaagacattctgtttgctttgaaccaataaaggtgcctgcatcatgtgtgcgtctgcgtttgatggcaaaatgcactttgttgccagcgattttgtgggggggaggaggggcacggtggcacgttgggtttgattttctgcttccatgtttcgtgtggtcagctgcgcgcaattatggcaaaattattgccagcactgtttgtcacccgcgccaaccaaccaagcaagcatattgattgtgtttgtgttcggggtcgaggcgtggcaattccaaagcaaacatcaaagccacaagcccacagaagcccatactgccgctcgccattaggccatgtttcagtttgtgccggcttctgttgggtccataaacagtgattgtgagagatggacgtacacggtaatagaacctaaattctaataattaattttatcaataccgatgttctcttgaagcttagaagcaggtgaatttcctgcttattcctttagagttcctattttgaaagactagtttatttttctctaagtgatctccaccccacacaaatccatatcaggagcaacaatgcctcaagtaagcggctacagttactcgcaaaaggcaatgtagagtgggcggcagatactggagccatgccattgccaggactcggtgatttttcatttgaagtgcctgcgaagcacgccaagtgtttttccccagcaacgcaaagcgaaaaatcactgcgcggcttagtgcgattttccaggcgattttcattcacgaaaactgcaggaggcggagcagtcgatggtacagtgttaatggaactttatgcctagggcaagaattgcacaatgtctaacgacgccctctaatccctgatggagtgctttccctgctgcagcttaatcgattgtttgactttggttttgctacggttgccctttgtttgcttaccatttgtcacgataaaagctttcaaactatccctaaaatattcgccttaatctagcttaaggttaagtctaaacactaaaacggataaggttcaagtgcgattgttgtgtttggctctgcgtgagtttttccaattggatgagcgacacaaacagagtgaacggaaatgattcaatgaattggttatgaattgcaatgaatgtgttcgaatcgtgtgctgaattggtcagttcatgggatgtggcagagactgagattgagtggaatttgttgaacacccgcagcgttgaccgtagactttcagagcgcgacaaataaaccaaatcatatgtattaacacacaccgaatgtgaaacttaatttgactaacgaatactggaaatttaaagtacataaagtgcataaccgttgaatagacaatagactacgcaaaaataaatcaaactactttaatagaaataaggagatgtatcttataataaaaatgagccacttttagctattgagtttcaagataagaatgttaatagcaatcggcaattaaaaataaaacaaaaacccaaaacaaagcagtgtgttccaagcaaggccaggaattgagtacatagctgcaaaaaaaaaacaacacaaactaaatatactttgctttagaaagcagtgcaaggaccaaataaacaacaaaaggatgtgcaataataaaaacaacacaaactgtatcgtgtacaataataacacaagactacataaataaatataaacgaaataaaatgttgaaaagtaagtaagttaaatgatgaaaataaaaaccactgacgtccgcgctctgtaatatctccatcgttgccaccgatccgcggaccatcgatgtcgctatccccattgtcatcctcatcgccgccatccacatcgatttcatccgtagtgggtatgtgaccagtttcaacggtattatgatggacaactggcggcagatgtcccggctcgggaccatcgatgtcgatttctttgtccagctccttgttatagtcatagtccttatcgtcgccatcgtcctcatcgtcatcctcagcatcagcatcgatgccatcgccgctggactccgtatccagatccttgtcgaatggcgggaacagcggttgctgcggttctgcgggaatcgtgggagccaacgtggtggtggtggtgctactgctattggcaaaggacgatatctgggttgctgccgccgttgtggtggatgcgggggttgtcgctgtgggggttgttgtcggcattggtgtcgaagtcgatgttgttgggattgtggatgaggtttgtgttggtgtatgagctgctggatatagagatgcgattgttggtgttcttgttgtgtatgattcggggtggggcttttcgttattgctactaccattgctactaccaactaaacgcgaacgatccttagccaatactctaacctctatggctgttgccctaactggtactgtatctgtttctgtttctgtttctgttgtggaaagtggtagtggtgtgttggttgaagttaaagttgaaggagaaggagtagaaatagtggtggcaggtgtggaggttacaccaacgagtgttgcatttacatgactagcttgatctttaccgattgagttaatgccagtgctatggccaccgatatcactaccactgccactgatgatgccgttctggctgttgatgttgatattgtggttattattattgttcgctgtggtgctactaccaatgattgtgccactattcgtttgatggttattattgggattgagattgatattctggctgttgtcgatctgattgtgattattattgttgttgaatctactcgagatgaggtcgctgttgctgttcttgctgttcttgccgtagttctcgttcgagttatgcttactgtttatgccggagttgctgctctgcgagatgcgcgtgttgtgcgaactgtgcgaatgctgatcgggttcggcgtcctcgtcatcgggtccaaagccggagccagaatagtccggatctttctctagatcttcgtgtatctgcaatgggaataagcgcgagaatcagattgcttgctgtcctaaaacatcagtttacttcagatattaatcattctgaagacgaatcgttgttgtgtccaagaaggaaaaccacccatcgtaccattagacatttctccataacaaagaccgcttttgggcgcaacaaatggcagctattcccattgaaaattatgtacgaccccctgtgtccttgagttgctttagattcgcgtttgagatgctaaaatgaatccagacccttgggtcatgccctccgtccttgggggaatacatttcatgtggcctattgtctgtcggagcttcgactgtgacgctgtttttgcggttttctcgcaccaaaacaagtacaaaaaccccacacaactgtgacaggaggcgaaaggaggaggaggatacagagtaccacaacaactgtgaccgaaaccaattggcccagagacggccgtcggccaactgaatggcagagacaattcccggccgcagacgccagctcttgtttattgactttaatttcgtttgtcgcttatttgggccataaaaacagtggccaaaatggcagacagtggcagcaaacttaattgaatttcttcacgcgttatgaaatgccctataaagaaattggcagttggccagcgacacttgttgacccccggataccataatttcaaacccacatccacatgcattatatagacaaggccgacaacgagcgtgagtaatgggaatgagctcaaattgagtgattgtggccgggggtttagcaattaattttccgatgacagagaattgcattttcttcttattttgccacaaatttaatttcccagcagagcttgaagcatttgtttccattgagtcggcggggatttacaaataaattctgtcccaattccaagccattcataaacgaaaaattgaaagcatacaacccgggggccgacttttcaacaaatatggaaatttaaatggaagcatgttggactttgaggatacctattagatcaatatttcaaaataatttcagagctaaaaagattggagaaacagttgcttgaaaataattttttataagtttaatttcctgtttgttcgctttgataaagaaatatttttaccttaaattcattgccaaataatgtttacctatgcaatgcaaatcggagagtgaaataaaatccgggcatcccatattatccccaaatatcctcaagcatatttccataaaaaaaacaacacacacacacaaacattttcgctgcaaagtacattttcattttcattttcgctaccgtttttgttgtttgctttcgcttcggtttatatcctctcgtttcgtttgaaatttaattaaaatatttgtgcattgcgtatacgcagcgttgcgcattgaaacccacaccgcagcatatatcatcctgtgcaggacagttggcaagcaaacgcttgaccataagcactcataaatatccttccagcgggtgctggctggatgctctagtgggcgatggttgggtggatacagtatggatgcagtatgtgggataggagcagtccaagtggccataaagcatgcggaataaaaatggagaaaaagcgcctgtgccgccgcttgcaacactttcgttctggccgagtttatttaaagcgttcttctcagcgcttccctccccatccactctttcattctgcaggcccgcgctgttttgccgcttgatttatgcagcaattagcagtcagccaaatggggcacgactataagtagaaagtggcgagtggcagcctccacatgactaaacagaacgtgctcgtgccacaaacaccatgttgttgcccactcgttggtcttaaatgaagtcctgcaaaagttgcagtttgcacgagaaacaaacttcaacgccaaatttaaacgattatggacaaaaactttttgccccaaaatgtatgggatcgattggacctggggccacaactgtggccaaccaaacgaccaagtgcaatgtgaatttatgcaataaattgctttgttaataaaacacgaggcgaacgccaaggagccaccgctgctgagttgggctgttggccagatggtctgatggggcaaaagccagaaagcagatgcagctgcaacgttcgtcctctgaggtgcaatgtgggtcatgcatgaatttaaatgatgtcatttcatcgggaccacctgctgccaggcaccgaaaatgcggaatgggatatgcttttccactctgcacggcgcattaaatttgcatttccagccagccagctgatgccttttgccgttgcagcttctttggccggccaacatggcgtatgcttgacaccattttgatatatgacagcgaaaatgaaatattccagctagctgggcgagcgtttctataaaacggaaattgtttcaataaagcatttaaaaacttcttcggatggcaaaaacttggcaagcgaaatgagaaaataagacaacgcaccgagcaacctttgcagtttccgtaatgagcgaaaattgtgtcagtcaactaggaggaagaaccataaaggaatttgcggaaaagcggaaaagtggaaaagtggagttcagaatggctgccaggcacgtttcatgcataagcaacaaaaaggcaagtgcaatgttttgacattttcacaaacacaacaaaccagttgtcatggccctgaacaactttccactcacattcttggccattcaacataattaatgcttgtgaatgctgttcaggactcaggaacaatccacccacatgccattcgtttatcctcaacaaatccgggccaaatcctgtgcgattttatttcgtaaataaatttcaaaactaaatacaagaagctttcaatttgggccgagccacagcagttgctgtttgctggccaagtttcttttctaagcaaaaagttctgttaacgagtaaattgtcgatttgacaatgttcgcaaagtgcgtgacttggagttgaccgagttgctgcaaaacatttggatggaaaaatccttggccagggcaagttttggtttttagcgtcggtggggattttccacttggcaccacactcactctccacccctctccccacctcaacactcaccaacaattttacgtaaccgcattgaccctgtgttctctcataaaatgttcgcattgtgaatgctacatttcgagtagccaagtggcctgctaaacatttgcatgggtatttctgcaggaaatggccaaagtttgtctgggccaaaagggaaagcggatgaccggcggtggggaaaaagagcaggaaaagaaagcacaataccaggaaaattgatagccctagtaaatcccagagttctcggctttgtttttccgagcattggcattgctcaataattgccaggagtggaatctctggggaagtcctaatttatttacatgcacttgcaactttggcctacgggataaaagtgaaaaaggcgtgtgcaggggaagaaaagccgactcagctcaactcggggaaactcaattttccagctggaagataacttacggctttatttagacaacgaaattgaaaattcgtttcgttactcttttgttttcctttcgagctatctcgtggtccctttctggaccggatagaacttttccagttacatagatagacaagtttttgagctggttagtattttattttctattctatacccctttccagcttattattttgcaattgcccatttacatgtagatgtgggggaaaagtacttcatttagaggatggcaaagggtacgcaaactacacaaatactcgttagaacccacacttatatttttgggtctgccatcaaaggattaacaaggacatccactttaaacaaacatcattaagaatgctttaaatggtcaaagatagtaatgataccctttaatcatgaaacattaaagtttgcttttttgcatatttatttattcgcatttctttgctattttccctcggggagctgttcattgcaaatgattgctttttaaatgcaacaaatgagcaacactggattttgttcatttctttcccttctcctcagcagcaaattgaaaaagttttttggcaaaacaccgtgatgttgttgcctttgaatgcctctcgagagttttcacaacttttactcgcaaacaaacgcgcatatgtacgtacgctcatacaaatatattattgtacaaagaaaattgtgtcgtggccttgccgaggctaacaattgttgtttattgttattcggcttttccctttgctatctgctcaactcttcagcgaaggagaaaaggcttttgttgcacttgcattgtgcaaggccacgcccgcccaatgccgctggcataatttgacacttaattggcagctgcattgcggcgtgaaaatcgcgggaaatgcgggaaaattctgcgagaactgcacatttatcaagctcaagtctgtcagcgttgaaatcgcgacttttgcttaattttcgactcctttttttttggcgctctttatcgcgttacctttccaggatgcggacacagatccggcggacacaagccaatttgtatttccctctggtgtttttttttttatcagccgtcggagatttatttacgagcattttttttttttgccagcacggctttaatgatttttccatgttcaagtgacacaaattctcgactccccgcggttgggagtaaccaaaaatttgccaacgcgacaaaacgcagtgaggcggcatttgccttggacaccgcaaccaccaccaccaccatcatcatcatcatcatcctcatcttcatcgttattaagatggcaaggcaaaagttccagctcatcaagagaaggaaaaatcaatagccgcacccagccgggtgccttttttgtatttttccctacgcgctcttttcctctcccatcttcacattttttataacattatttttttctgcgcagttctcgcacaaataaattaaaagccgcatcatcagcattagccgacggaaaagtaaatctgtgttagctgcggaacaacccggccatgtgcctccataaataataatttttatatttaaagcggcggctaacatcctttcagttttttttgcatttctttttttttattattttttgttaaacctacttttacggctggcaattaataaatgagcttttggctcgcaacgtcaagcccacaattcatttgggaggcggttggaaaagggcttgcaacatttggtccaggttccggattacttgttacttatgctaattgcaaagaggctgctccgccagcagcttatgacataattaatcctttttcgagtcctttttggcctaatcgaaattgatcagcatggcaatgcgggaaatatgggtgaaattagctagatatactgacattatggggcccctaaagtaatttgcatatgaagtcgctgttctggtgaaacattttgcgggctaataaggcaacattttcattacagccacttggcgggacccagaagagctaagccttaaccaagccataaactgctgctaaaaggtgcatttgcactgcgaaaaaaaaatgtttctctaaagttggtaaaaccaaattatatatttaaattggctcgatttttcaaaagagccaccaagacgccgggcgcataaatatttaactttcaattaggtccaagccaaaagcaaggtagttgtgtattccactcactctctctctggatttttacgagttttcaactgtataaaattaataacatttgccaagcgactaatataatcagtcgaaaagttatcagacgtaggatattcaaactgaatagtcttggcatattttctcactgcaggacatggcaggatcttgcgtaaagtttctgcattttaattgcacgagcagagaggggcttcgccagaggagctgctgcaaccatatcaggcttaatgtgctgatgctagaaaaggacttggagacgtcgaaggaagcaaacgaagtgaagctcaagcacacgcacacatgcatttactggtatgtatgtatgtgtggctggatggcagggaactttggaaacttgactgactgcatctgctccaacttattcagccgcgcccacatcaccgttgcacatcattaaaattttaatgcaactcatgggtttttagcccctttagacgcgcgacaatgcttgtgggcgtggcccgaactgttcttgctcagtcaattgcgaaagcttagaaaatggcaagaaaagcgacgtcgcaaaatgtggaacggaaaccgaaaagaggttttgtgaaaacgcttgctaaaagttagtggatgggttgcaagctgcgatcgcctgtgcgatgagctgcacataattgttgcctaagctgattgctagggaatttatttagcgaacgctggaataacttttgcagatgcaagcagaaagctaagtaaaataaatacatatttaaatctcgaatttatatctatatatatttaatcagtattaaatgctctttcctaaatgccgaatatcaccttgacctgcagctgaaaaaggagtcgaacaagtgctgctgattagtgcctcaaatgtacaatcgatatgcgtgtatatgcaacacctgaactacgtgccacagaatgcaggaatgcacagaatttgctggcaactttgttcttcgcttggcgggggtgcaattaacatgaaaattgaatgctttgacaagcgtttcaattgacataatgttttccatttaatcaagctcatattgtgacactgattgattaagagaccgcaacgccatgcagcgacctcttaaccttgccacatgctatgtaaacatggcaatcgaaataaatattcatgggtatggagttgaatgcacccccctgcaaccacattcgaatcggaggcaacaaagaggatgcagctgctcggaaatgcaatcatcgccaacagcacgtagcagcaaatgtaattaacttgccagctgctgtgccacgccccaaaaaaaaaaaaaaatgtaagtaaggaagcagctggcaaggaattccaatgctgaattattcatggcagtgccagttgcttgacccaggccaagaagagcaaagcgaaaagaacatgaagaactcctgtcaggttcaacaaactcgccccacgttgcgcctaaaagcatgcaacactcaagagtgcggttacaagtcaaattgccggcaggaagagagccgcatcctcatccgtttccccaccgccaaagaggcctgacaaacgacaaatggcagttaaaggagactccaagatggcatgccttcacgagtatacggcaagaaaatgtcccagaaatctttggggatttgcggataataatttatgtgaacagagtaagctgcgctgtatttgaatcagaaataattaataagtgatatagtttgtacatagttatctaaataaaataaaaaagaagatattggctgacttaaatgtgcaagtagacaaaaaataaaactcaaaagaaaaagctaaaatgtgtattttatcaaaataaagtttatgttttatgttctgttaaaataaatggaataaaatcattttcttttttcttttgagaataattttaaaaggagcatactgttttttttttttgtgtacacaatacttgatacttttaatttgtttgcctggcagagtaacgcagacatttgaacgttcttccatccaccaggcaacagtttctcgaccagaacctgcccaagacgcatccatccatccgtccatctatccatctccttcctctgtcagttctagccgcctctttcttcgtctgtcagtcagtctcccactcagtcagtcagtcagtcagtcagccaggcaaccaagcagttttgggttccaggtccagcgagagcaacataattgaggcgacccctcctccacctggtctgtgtacccagcaaggaggagcggttgccgttcgccattcttcgaccaggatttgcaattcaaaatgctggcggccttttgaacagagatgccgaccaagccaagccaacccaatccggcattcaaccctctgctggtttgcaatttgagttctgctgaggtgcttcgagtgcagttgtggtgcacgaaccggtgctctaattgaagcacatcccgtaacaataacaatcgaagcgagaactggagagggctggtagatgaggaggtctaatcaaattcggggataatcgctgaaatgtatgcagccacatcaaagatacttagggccgaaaaccaatttgtgctcatttctggccgtggacgaaatcaaattatggcttaaagcttagatccatatccctatgccccgcacatttttccccccttcttcaaatgcctctcgtaatctgaatttaaaacaagtgaattttatggcatggtttgcagctacaaattgtcgtaaagttaagcgaatttattggcatacataatgcatgaaggcagtcctctctcttaacattctcacatctcgaaatacaatgcgcatagcgtttgagacaaaacagagaaacaaaatggcgacaacgcccccatcatcatcatcatcgtcgccatttccaaccccaaccccaaaacaacaccctagtattttcctcacatttcgcgtcctcgtcttcaactttgacaatgacttttcgcctgccagccaaatgttatgccaccaaagtctcacttttatcacccaacacccatttttccaccatattgccactttctgttgctgtctactgtacgcatttgtatgcgacgggcaactttctttgcagatattctcgattcgcttattgtgggctgcatgtggctggattcctattgttgtgcaaggtgatatggcaactttggcacgaagtttgcattgccaagtaaatagcagcaaagtaaagtcccttgattgcgcaactaactcatatgggttattaaatatttggacaagatgcttcgagttgaatgaattattcaattaaattaaaatacagcagaataaactaaacgaaggtagaataataacaaaagaactgcataacatatgaacggatgtaggtccagtacagtgcagttttcaattaagaacttttaggaaacgagttctttaataaaacaactcctttgccgttttaccaagggaatgtcctaaccgagtatcccattacaggctaaatgctagccaaataggccacctccagtggctcgtgctttgggcgtttaattcaataggcattccggtttgctagcgacaacgcggcgtatgcgcaataaccaacaaaatagatagcggcagagatgtctcataaaaatgagctatacatccagcatgccccttggaaaagcgtttggccccatgtcctcggattactgatgttgtgctttggggtgatattcctggaactgagactcatttggtttactttgggaattatgttatgtgaaataatgcagcatcatttgtatactcgtatgttggccgaaagcagcagcacgacattgagtaatgaatgcaagacactagagcatgtcggtcgctttgtgcggctgcttctacccctttcacatatctcgtatcttggcattaaaaagtcagatttttctgcatttgccagataggagaaaaccatagccataaactcatttgcggctgctggtttggcgctggcgagcacatacagtctcaataaatttcaatgtctatcggctaagaacccccattttctagcagttgacagctgcgggtggcatgcattatgtattatgtgagctgtcaccaataaattcccatgtaagcaactgatattgacagcttgagtacgacaacgtagcgttggaaattatatgcacgtacttaagcacaggcatctgggttcctgggcccaggatacaggatacaggataatgggcagcatatttcgcaccacccagccacatcatcgaaatggcgaagcactggggggcgaagtgggtgtgccgagtttagctgtttacacaacacattctgtggcacactttttcggtctgcagaccccaactcttgcattattccattctagccatgtcaatcgatgttaatttattgtcaatgcccatttctctgtccgtctccctcgctccgaaactctatgcaccacgaataccgttgcagggggattacccgtttgactgtgtgtgcgtatgtgtgtgttatgcaaaaaggcttttcctcttggccatccacaaaaacacgtgcgccatgtgcacgttattaatcaacaaggacctacgacaagctcgttttcctaccgttcgctcaggctttgtccgtttcggaaaatgcatcgagaatgctcggtatgtgtgtgactttgtgttggtacactgagaacaaatgttaggcaatgaaactttgcataactttggcataagccttaaactctgagcgaaacaagctctctttcgattgcatactttaatataagactaaggagtgcctgaatagtagagctatttcataagtaccccctcatttctctcagtgcccttgtgtgtgctcagtggtgctaagctgctggctgcgtgcatcgcttgcagcttattacatacgaccaaacaccacaaactgaactgaacattacatatgcatgcataggttctcacatgtacgcctcccaaaagtgcacaacaaaagttcattatcttgttgacacgtcctgcaaaaattggtttaaaccacaggcgcttagaccgaatgtctttaaatattaaagattcgtccaatcgcaattgtcgagcgatgggtatctcattaatatcgtgcagcgttgattaacttgatgccaggcggaatgacatattagtattgtgactgaataatctgcgaatctatcataattcagaggcagcagagagaaaccattaataacaaccgaataatgaatccccaaggaggcatgactcaacagcgggaaagagagccaaccatgcgaatccatcaagcatcacggcactggcctaatcactttaaagagccagctgtggcagtagttggcccaaaagatcaacagagcgcataataaattgcatttggtttccttttatctgccagctatgttttttttttgcgagcagagatagaattaagagcacatgggagacgtttttacgtttgtcagttgcataaaacataaaaatgccaacacatgaggacggacatgagccatgatggcacatgccaagagcaggcagcatcctacaggctactggctacaggctgcaggattcaggattcaggatccaggaccaccgcagcggaaatggtgcaaaaagcggaacgggaacggttgtcggaatggaggacggggcttgggggaaattagaaaaaatcagggtgcgaagaagatggagatgctaaaaaaaaagggccagatgaaagcatacaatcaaaggacgaacactgcaataccctaactaactaaatattttgataatcataagcactccatatctacaaaatattataataaaattaacaagaaaatatgaactattatttacacaagtatatagataaaaaaaaaaaggtaattttgttcgatagaaacaaatgtattctaaattttgtaactaggaaacaagttagttaaaaacaaacataacaatgcctttttgtgaggatacgaaaacgaaatccgcttgccaggattttatttacatattttcggacaaagctgactgaaatcccggctaaatgtccagcaacaacgttcttttttttttctttttggctgttccacttcgttgccatgcaacattaatgccaaagtcaatagctttcgagggattgttgatctagtcacagttactcgaaaaagtatgcaacgtggcccgaatgtaggagttcgctgattgaattccgcgaaaaagtttctctcaattttctatttatgttggtccttggttcgcccctttttcagccgtcaaaagagcgcaaaatgtttaattaaattcacgcggcaataggaaggaaatcggaaaccagcacgggccaaggaaaataagcgaaaaagtatttaattaaactttttctatttttactcgctcgagttagccctcccttttttctcttttttttgccgcagcaatgtcagccacgcattttaattaggtttttttttttgtgttccaaagtacaacaatatgagtgagcggaagtcggcgcatgtgttctaaaaagggatcacaagtgtgggccaacaattgacgcttttgggcggaacaagcgcactgctgtcgaaaaactttttaacaaatgtcgctcacatgccaaatgcacacaaacacacacagagacacaccacacacagggacacacacactattagcacaaaaaaggtgttgaacattaacatttcaggcacataaacaaatgagtttttcccacatgaagttttgattatgtaacaggctattcaacccagttttttgcacactgatgttctgcaaacaaataaaggctatttaaatgcatcgttttacaatgctggtatgtcagtggaatttctgataacacttttgcggttaaaacagtttattaaattgaataggtttttaaggtatcgaaatagttatttgcggctgagctttcacgttcaaaaatatatatatatatactttcgtttggaaatataacaaggaatcagcgaaaatttaaagctgaaaaaagtgttaagtaaaatgggtgcactcgttgagatggaaatacaataccaatatttacgttaaatctgcaaagtgaaagagtgcaaacgcttccgatatgcaaatgggtaaaagaaacccagctgcagcgacgctttcccaacgataagtttactaaattaactcggcaaacttttggggcatgactaaaatttaattaactaatttatgtgtggtgggtaaacttacaccgccgcgtccgccggatccctcgatgctatcatcgtcgatatagatttcatcatggggccgagaagctgctgctgatggcgctgccgccgatggtttcaccgatttctgcaaataaaacacatttatgagtgagatgagcgttttttttttccaaaccatataaatcggagcctttgtgtgtgtgtgtggggacaatgggaaacttttttaattttgccaggacatcatggaacttatatcttgactttcgttgaaatggaaatattttcatttcattaattagagcgccagcgagcagacagccgaaacttttgaaaagttcgagtcacagccaccaaaaaaaaaaaatggtgagaaaggaaagaggaggcgctgaattgcatttatattgccatccgtaaaattccgtgaccgcaacaattcgcgatccttccacacggctcatgccgcatgaaacaattaattaagaacaatgctttaagtatttttcggttcgcgttaaatgcatttttaatgatgcaatggaaaatcaatgagatatgtaaattgtatgtggtcaggggtcaggactcccactccctccgcccgatgagctgaaaggggcaagtcgccgagtttctgaggctttttcggttccagtcggacattgcataattaatggagcaccacggagtccgcatccacagccacttgcccatccggtcctaggagctgtccgcattttatgaccaaacataaaaagcagaagcagcagcagaagaacggagggattggatgtcggggtgggggtgggtcgcctgaccatgtcccgagttgcctcattaagccacggggaaaatcgggcgactcttctcatttttatgcccccttaaatgcgaattgatgaagactttacgagcaactgaaaaacaccaatgctttttcgtttctatagctttcatttcaactcaattcaagagtataggtacattcaagtttactttgtgtgaacatttcgcacaatttcattaatgatttatttgatatttatttacttcgttaccaatttatacatataccatttatacttattttattcaactgttttcatttctgtaatatattttgccaaaatctgcatttagctgatatcacataaaattgaatcattcggctatgtgcagataaagcaagaaatgtgtataaatctgtgccaactttctgatccacaaaatcctaatgctttttctcatttatttttcatcgcgacaaaatcctttccctccgcaagccaagcgagtcataaagtttggcataacattttcattttgctgcactttttcgctggccaaaatgcgaagcgaattaagttatctttgtcgaggcgtttgctgttttttttttttttttttgcagattagcaacagaaaagcagagcagcagaacctgaatgtgccaacttgccaagtcaaagttgtcagaagagagttcagttcgccgagcgtttaagaagctgctggcattcagtttttggcgggttgtcaagccagccagaggctgtcattcattcgagttgtggctgtattgcggttgaggctgctcttcttttaacaatttggctggcaagcaagccataggtgtgaataaccgctacagataaactcgaaagttttcgcaaagctagccagggaaatggaaaataagaaggaacagtttctcattcagcttttccgccttacgggcggctatttatagcgtcttccgaggcttgtggcttagagcccggcgtgggatggagtgcatcctctccctccttcttcacttttagtgggaagtcagtctacactattgatagatttgcttgtttttgtccgtgcctttttttttttttttttttttgcttatctttctcactgttgtcataattgaaaattccactcttggcagtcgacagaaagttttgctgcttctcgtacataaaacgattttccggctggaaaacgtgcaaaatattccatggggaaatgttttgccagctacaatttttacattattttatctctgtattttctggacaaacgttttatagtatattttcccttggcatgcctggctcgtttcatattttaaaatggcaacaatttgccaaaaacgttaaattgaattgcagcgggccaaatcctctcacctattttattctgtgacaaattgtggcattcaaaatagttgtgcgccttttcgggatgatgaaaaaaaaagaggccaaaccccggccataaatcaatatacatatatgtatataaaaatgtatgtatatgtatatatggacagtttgttcgcttgaatgcgcgttgttatcgggggaataaaaaaccaaaccattttatttttatgacaaagaaaaatatatatattttttgggttttgcatctgtcaatatttatcgcttgcaaatattttcactgtggggaaatctataaaatacgcacataaatattttaatgctattgaattgcgcaactttcctggcacttaatgcccttttgtccgctccgacagattcaaataactattcacagtcgactgatctggaaagctggcaaaaaaaaaaacacttttcaaatcgctcaaacgaggggaattatttagtgcggaacagtggacagatgaaaagcgataaagggcgaatctaccgctgattcaattgtggcaggctcatttaatgtgtcaattgcattacgcaaaaactcttcgcttcaacagttgcaacgcgcaaaaagcagtagaaatggttggctgttaatgcgagaaatgaaaaggacttcaactgacagccaatgacagatgctaaagtgcgcaacgaagcgtcagcaggggcaagctgacagcccgggttttatcttgaccggccccaaaaagtaggcaatacaatttcagatcaatgccagaacaagtatacgcagcgtggtacccgtacagtaagtcagcaaagggcaggtcagcaacacaaacaaccaacccacccacacgaaacatattccagttgtctgcactgtcattatgttgatgacatggcagccatttcttgtttcctcgattccatgctgagttcaccatccttttcagttccatctgctcctgccaagttgcgtattttcggttggcaccccggcaaaccaaagcgaacacccaaccaatgccaaaccaatgactgccaaggcatttacgcaattccgataaataccctcgcggggatatgagatagatggctttttcctggaagtttgttagcaatctttaaattgctcaccattatttcttatatttcaaaaataaatgaatatacgtgtgcaatcttaatgaagtatacatttctagttaacatccaattaaagggtattcaaaatgtcattattctttactacagtttcgtttgttttcctgtcttttggcttcgaatataaataaaccaaatgcgtttcctggcatttctctcgcctttcccgtgcgtgccctttgtccattgaggtgtcaagaaggtaaatatgaaggccctcgtccaaaagagcgaataaaagcaaatcaaaacttattatgcgaaacacacacacatttagaaacgggccgatgctgtgagattgtattttattgccggacatatgagtgtgtgtgtgtgtgtgtgtatcttaggggaaaacttttatgtttatagtagtcgtaaaaaaggaaacttgacttttcccatttgttgctgcctaaaacctaattgaacagcaaaattattgcccttccttgggggcaaataacaaaaattcaactgggcctaaaatagccaaaacaacaatgccaattttctagccctacacagccgtgcgcattaaattttcatttgtcctggccaaatatttaaattatgcaccacaaacatttgtttcacatgcaaaataacaaaaagctcgacaatgcaattagtctaaaacctgacagttggggaatttgcaaattttttgtgctccaccagttgtggaaacatcaagaacgcactcaaatgtaaatcaggctgcaaggtcttcagagaaaagcgtttacgaagtgatattaaattagtttcaacaaaatgaaatatgtgaaaaatggcacatagaatgtaaaaatgtctattccacatcatatcattaaagaaatgcttaaatcttgaaaacattacaaatcagtgtaataaaaactagttctcgtacaacaatttctctctgtgttttgcgtctagttgtatttgccgagtgacttgacataaagccaatggcggaaattgcaaaccctccccactcacaaactgacacaattctgcgattctggctctgagcctgaatcctgaatgctgtcagacagtcatgcaaaatcgtggcgctcaaaagtgtgccacaagcactgaaaagcagtcagactgcgaattgttataacactgacctacagagggcacgaacaggtaaatttaacgttttcccaccacccatttgaatcgatggtgtcagcgttagtgagaaaacggattttcgcatggttctttaaaacaacaagtatacgcaccgttgccacccaggggatgtccttagtgttggcaaaaagcaacagtaacgcaaaagtgttttagcacagcacaattgtcaccatgggagggagacggccagagacgtagattatgaaggagcgagccaaagtgctcgctcgtgccaaaataacgaaccgaacacttcaccagaaagtttcaaactgacaccaaaacaagctggaaacctcaaattaaatgttgtgatgaaactctcactcacacaagcgcaagaaggacatttggtccatgagtttttagattgagtttcggaggctggcactgttcactgcgcatgtggagcttttctgctctagaagttttggttcctgaacttaaagctctgaccggaaattaaaaatataagctttcgctgagagttacgaacttttgttgtagaaacgaatgttcatgaatttgttttaaaatctcctttttttgttgttgtagaaacgaatgttcatgaatttgttttaaaatctcaataagcacaaataatatgcattttatagattaatcagccaaaactgttctaaaagaacctaactacaaaactatcataacatgttaacgtaacattctgttaacttataaaaagtcctcaatatatcacaggattaaaagttcactaaagctcttatgagctttagggaagattcaaaatcaaggtgctataaacttttaagtttaagctggacaacgatgttcaccacatccaaagctaaaatctggtatttattcaccattaaagtctaaagtgtccttgaaaagcttttcccaaaactccgccagatgtcgctgttgtatgccgttcaaattggtgaacagaaatgatggcaagcaattaccgaggcattctaccaaaactaactaacgagtctgcaacttgacaagtaacaagggccgcagagaagcgagactttaaaaattaagaaaaattaacatggctaaaacggtagcaacgaagctcaggggctcacaaaaacggcaaaagcaacagcaaaagagctacagcaaagttgtcctggactcatttccgttgattcaggcgctgtggcaccgagcgcataatgaattacaagtgtccatcttcataaaaccagccagcagcggaaggtgctgtcaaaaaggacatgcccaggacgatctagccacactttttcctattagtttcgtttaatttggccataaattatgctttttgttggctgttcttttacgggcgtgctctccttggtcaccgccgtaatactttttaatgattgcgtcaacgaatttaagatcctgcgactttgtgagccttgaatttcgaaaaaactttcccagctgcacgcctagcaatatatcatttatgattgtccaaggcgtcagagcgtgaacttctggcatagtacattaatgaaaaataacaaagagagggaagttcccttggagtacggacccagcttaaattcaagccaattaaatgggacgcagaaaattaggcaaaccacaaaaggtaccgcgaaaaggagctaagacaaccttttcaggtgccctccaacattcctgcagccgagtttaaagcatttataattaaaagcccgctacgcggcttttcttagctaatttggaatacgagggaccaacataatttgcagcctgacaaatttgttgcctcttattctaagtggtcagcgaagaagagcatggctgaaaatgaatagtaataaaaataaattacttcgcctaattacacaaagagaaaccagagacactcctcgcacgcgtgtgccaaaaacttgtccagtagaaaaagagaaacagacgcaattcctacagctccatcgccgcaaaaaagaaaaaaataataataaacggaatatatatggcccacagtgcatttgactggagctgcgagctgtctcgacaccataaatcaattttaattgctctgaaaatgtgcaaagtgggaaaaaatttaacaaacaaaaaaatcgtggcgaaaatcaacggaatggcaggcggcaggatttcgcaggaaaccgcagacggacagtttatcaatagccaaatgaaggccactgacacacaggagccactcaaccagttaactcatattcacagccaatgatgatgagtcaatgacaaacaaggcaaaattaatgagcttccaaaattcaattgccgaattccaaataaagtccccacctccccatctttctgcaattcccatcgtgtgccaaccaaccaatgtcagcttaaattcaatcaacgcgagttttcataaattatgcaattaacaatgatttagagagagagccaggcacagcgtcagcaaaactaatttgtaaatggcagtgggaatgcggttcagacagaaactcatacatttttcagtcacctgataaatggaccatgcaaggatatatattttagccatagattgttgcagaacttcggaaattactgtggtttacaaaccattgacctgcatgcaaacatcttttttttttagctaacaaaaaaatatgtgtaaaatctatttgttttccattttctattttagcttccgcaaaaaatgcgtaaccaacttatacgttaaaaataatttgtctgatttttcaattatcattctggacaacctttcaaataattacaattaccaattgatggttttcctttccatcatttatcatattttccgcaatccgcttgacttgtttttttcccccatttttgttttactttccaatcgaaggacgttaatttgacgcaaattaaaatcaattaaagtgtcgcattacagcaaattgctggttcgatacacaggtcaaaggtcatctgactgttattacacctttcattattggcaggacatttaattggacctgtgttatgatagcatgagcaaaacgcagaacaaaaaaaaaattgaggaaacccgtatataaatatatgaaaaacaaacaatttgcataacaaaaatccaattaaactataattaaatttatgcggtatatcaaagctgaatgccgaaagggtcaccgacttcgttcgcatcgaaatgcgttttaattgattttattatagcccttccacagcacatttgcaaaccagccatcgggagtcatcataaattagatggagatagaagcagtgggaattttcgctgaatttcgaccgcagtgcgtttgaaaaatatacatatattttcacggcaaaatatgcgaaaatgccacgcccaccacgtacgccgcccactttgcgtgttcttggttacatttcggtatccgtttcggccgtttaacgcttacgctaaaataaagcgaggcagcgcgttgcgccccggctggcatagaatgcactttttaattaagttaagcgcttgcgttgagctcagcacgagttcattatgcgtgagggtgtgcgaatgccggtacgccctttttttcgagtgccatgcactcggcggcacgcccacagcggataatatgcgtccagcttattagtggatgcaatggcgtccacgtgctgcttctaatgcgaatttatgacccacaaggccctgcggatcctgttgcggcgcagagctaacgggagcgtgcggtgttctgcggccggcgagatcctcccgtttcacacgtagacactaatcagcgattatgcacgccccgctcttggccacaaagccgacgttggccaaaagccaaacaagccaaaattatatgggcaaattttattctacgcttctcgcacagaagaagagaaaacattcacggcgaaacgttttagttctttatgttttaatctggtttcccccataacaattttagtttcaaatctgcttcttttcattaaggaaaaccaaaaaaaaaacagctttaaagtgactactgttgtttgttcgaatccagaatcgatgggacaagttcaaggggccggctaagataatcataatttactttttattgaggggcctaatatccacatcacaaggacacggcctaatgcttctcaaggatgcttgaacttgaaaccaaacaaagaaaaagaaagtaggcaggcatctaaggacgcaacacacaaaacatgtgctcaacccattttcctgtggcccttgacgcataaatttccaaaacgattatggaagactcgtgttggaggtggggcaaccagtgcgtatacgtattttggatgagactctggaatacgtaatgcgactgttaagtcctttgggtatttacgcttttgttgttggcaaactttcagggattacctgaatattgtggggtcaggtacgaaaaagaggttattcagggttagttagccagtttgtcgagtctttagtaaaaataatatttgcctcacaacaaagtgcatttaattacgaatgaaatgcagttggagcaaaattctacagatgcctgagtgaagggagatgcttttcttattatttagcagactgattaaattaggaagtacttgtacgtaaatagagagagagagagagagagagagagagaaagagatagaaagtggagagtggacggagctactagaaatatttaaatggaaattctccagcacaacgcaaggacatcgacaacatttggttcgtttccagcatggagacgaaactgttttaatgagtatgcaattagcataccccacacacacccactaacactcgagtaggctcactcacacacacactgttgtttcatgcacacatttatggattattttagcatgattgtttctctagagcatatacatataaggatttctttgtttattttttaagaaacattaggttctgcaatatttttaatatttgaccaacaaacgtgtataaaatgataaaaaccaaatgaataactttttaatctgtgcaaacggaagatttttaagttgaggtgtttaagtgccaaatagaaagtattataatctacaagtttttccttggtgtagcaaaagttaaaatccaaagagacaaatgcatccgagcagcaactttgctgttctcaagtgtgtgcgtgcgtgtgagtgagttctgtacatgtgtccgtgtgcacgtgtgtgcagttatattttcaagcgtcttaacctcaaaacttttgcacttgtaagcagcaccaccacagcccccgaaaaacccgtaacacaacccaaaccaaacttaacggaaaaccaaagcccacagagaaaccacgtcgacataaacgttttatgcaaaaatttgttattgtttacacactcggctgggaagctgaagaagaagaagaagaagatggtactcgacatggttaaaaactatacctaaaatacagtaaacaaatgcaaaaattacaactagccttcggctcgaagtcgcattttttattacaaaagtttacagctcacagcttgttgtcttctgtcacttctggccacttgagtattttcagcttaggtcgaatataaacgaaaaacgagtaaggtcagcaaatgtttgtcttatcctgcttagacttaaatagcttacacaagacaaggattccaagaattagcacgaaatgtgagcaaaccgaaagaaatgcgcctgattaatatgccttggattccattttctgtacaagtagacgtgtgcttatctatttactgtagctgctctaaccgaatgtttctattttgattatctccagtgtcaatttgagtttaactaattaatagcctggcaatgtcaaagtcaggtgtgtttgtctgcgtgtgtcggtgtatgggttgtatggttgtatgggttgtatggttgtgtgcagccgcaaggaggttgctttgactgtgtgagtgtgtcgccgcatatcgcatgccccgcccgtatctgtgtgtggaagtggaacgggaatggataacattttaattagagcgtggcaagtcgacaatgaacacctcgagcaaaggcggacgcaactttccggaaggcggaaagcaagtggaaggacgcagttcatgcgtgacaattacacgaattcgggatgaacatgtatcgtggtggctagggaaaatgaagtgctcaaatatgcagtcttgaattcagtttaactgaggtcgagatttatgcattcataaaagagtaattcatggtatttataaactaaacattaaacttacaaaaaaaaagtccaacataagacccaaactttcggtacgccccagtgtatttatcccacgttcatgtgcggacgaattaaacaagttggaatttaattaaaactttaaagtaaacaatttgtgactacgtcgggagcaataaattgtttgtaaattatgacacaagaactaaatgaacttaaacttaaagaaaatataagagcgaaaaagagagccgaaagccaagctaaatatttggcaaatccattcgaagaattcctttaggggatttctcaacaatttctttcgcgtatttaccttagttttcctttctcttttcaacaattccacttgcgatttttcacggctcttctgttattctctcttctcgctatttatcgcatcatcaaacattttgatgttgatttatggaaaatatattttccagcgccctgccaacaataacagccaaaacagtgagaagagaaagctgggagctttcggccggcgatagcagtcaagtgtccttcgggtggggcaaagatgggtggcgggaaatatgggcggaaaatgaggtaacgctgaacacaaacatacacccaaataaacagactaggccaacagaagaaatggtctgggaacaatggcgggactacgattgttggtctgcgtctgtcattttccttgaagttttgggaattgtgccggagatttgcgttaaaaaacgaaatcatcatcatgcggttcaatactcttacgcttatattataaaagttcgttctgtctcactgccttggtttggttggtttccattctttctttgataatttattttcattgcgttcgcttgagtttcctttggaaatcttggtgccagcagatagatatatatccatttgaaatttgatttttatttgacatgtcgacagctgcgtttgccttcggcttttggaacacgtcatttcgccaattggggaaaatcggacaacattcccaattgacagtttggccattttttctgccacttttttgtaggccaaactttcctcattaagcgctaaaactttgccgagactcgctggcaggcgagttcatcatatgaaaactaattaatatgtcgagctgtaagccgtgccaacaggaacaggaaacggaagtgggttttcgggtggcaggtgtttgtgggccggcattgaagcttaacgcctgcttgcattacaaaatatttctgcattaattatgcgaaaactttatgctacccatttttatgctttatttgtgtgggtatgtgcgtcctttttcccgccctgctagcttagcgattataatcccagtgtgtgtgtgtgtgtttgtttgtgttccttattcgatttcattaattaaaatgtgtttttgtttatcgacgcgtcgatgcgttcatctgtacgtgtttaggtacacacatgtaccataaatacagagcataacatatgacaatatatagccaagtaggtatataacaattaattaaatatcaagtgtaaatttacgccccagcgataaacaacaaacttaatacttaatgagttgccctcttcagttgaggcccccagacaaaatgtccatttatcacaatcaatgcggattctgtggccctcagctgggtttcgccaagtcccttctacaactgcacatacatcactcgctccttctctcggttttccgttgggtttgagttttctgtgcttacacggatcattgagcaacgcggatgcggaaaacgcgcacaagagttccagttctgctccaaccccatttcgaaaactccccccttaaagctccggaggagcccgtttcactggtggtcataatcaagttaccactgctatatgccagagaatatcgaggcactaagtgcagccatcgaactgcgagaatatagtgtacagaaaacatggcaatcattggctttgtttttaaaccgaagccggaaaggatgaacaagaagagcagaaacacttggagaaaaaagcagcacagctaaaaatctaataaactcgtcgaaacacaacaaataagtgaagtataaaatatttaaactagattatctgacagacagccattgttgtatataataaccaatttagaaactaaactaactaacatgacaggaatagtttgcacttgattataaaatatattagaatttatcgtatttgtggtttatggtggctctttaaacgaactgtcagtagcaacaactatttaaatctgtttgccaaccgtagagaccttcagtcgccactggcttcctgcctaatttctcaatttaattcccccttgtcagaggtcaatctttttgccatcccactctccttggataaactttaaaatattccatctcctaggtactttcactcccccacactccagccgtccgtctccctggctacttatgcaaaagttttccctgtcggttctcataagccttctcgcctgtctgggcagaccaacaaagctgaaaatttcattaaaaatggctttcttcgcagaatggcaaaaacaaaagggccttttggcctttgaggggctgttaaaattgcccaacgatttcgccgcaaaacatgacagagacataaattacccactaaccatgtggcaggctgctgaaattcaattaaaactactaacaaaagccacaatgaaaaaaaccaatgaaattcgtcggagttacacgtgcaatcaaatggcaatggcccaaagtcacagtcagaacagtaagagtaggggcagcttaaatcaacagttttggcttcggatttagctttgacagtcgctgaccgaccctacagccacattgcgcatacgccatgttgcgcctagaagccatttgcaattggaattgtccatgtgtatccgttggctttgtttgcttaactaggatattgatgttgtcgagtagcgccgatgttcctaatgcgaagatcgactagaaagggcaacattttcttttttttttttttttgtatttcgtaacacttgtgagagtatggaaattctatgtaagctgctgactggcaaatatttttcatttacctgcgtaacaaagcagacgtcacagcaggagtttttccaactgttgacctgcaggcggtcggcatacgttgcgtatgagcgatgcaatgaatgaaattgattgcgagcagggtgggcattcctgcagaacctgcagaagccgccagcctggcaccaccaactcgagtgccaaggctggttatgacaagctgctgactgccaacccggctacctcgctacctggctacctgaaatatttcccagcatacgaggcaattggacacggccctgaaccctagagatgtgtgcttaaaactcgcgcaggttgaagttgccctgggaaagtgtacgccagccagctatttgtttgccaacagcgagatgagtgctgctggtagcaggagcgttgaaaagagccctgctgtcagctgacacctgcctcaagttgtttcgcaacttgtcaataaagttcttatcaggcagctgttggaaattgcaactaattgacatggaaatgcaggcatgatgataatattccactcgctgtcgctcagcgaattgcagcagcttaaattaaggctggctaaaaatgatatgacaatatgatatgtgcagagtgcatgttgttaacggatacagggaaactcatttttatatatatagatacacacatagatgcacacacatgtatttatttgcatttcctgcagcatccatcgcatcgcatcgcactaatgtaagcgctcatctgtgcggcagaaaacgattcagctgctgctgtatctgcggggatatgcgacacatatcggtgtggagggaaaaagtgttacaatatatgcaaataaaatacaaactgtcattccctctttcgcaatagaaggagcaacaggatcgagagggaaatgcctgactgcctgcctgcctgcctgccattagatgcctttgttgttcctcgttgctccttgtgtctgtttacttttgatttgctcgatttatacatctgctcgggtctggctccacctcctatgtgcacatgtgagctgcttatttgcctgcgattttgccaatgtttgcatattgaaataagtcaaggggcacaagttttcatttcgttgccgccctttgtgttttgccatcggataatttaaaagttacttgtctgcgggcatgcaaatgttgtcctaggctgcctttcctttccattttctgagggcatctaaagtacaatatatacatactaaaagccaggcccaatggtaaagaatcacatcccatcagagttgattagtttaatgcttcaaaatggaaaacatatttaaaagcagatgaggtgtttcgatccttaaaggagtatacaaattcttatagactctagatgaactagcattgcgccctaattaataacttattattcctaaaattggtgcacacaaatcatgagattaaatttcgattcacgttaagcccaaattagttgggagtttctaagcaactacacctgctgccccgtgtttagttcggcttattgctgtttgcctgcaccgtctgaagttacaaatttccacctaaggcggctgtggatttagctgctttagcactcgagaggaaaagccctgcccacttacactcgcatgcattttataatttcccattaatttgcgccgacttttgcacttttcgtgagcacatatttaaatgtgcaagaaaatacagcgctcctttgcatgcaagcaaaaaaagcggggtcagcgattttttttttactccggaatatttaaccaaaattgtggtacgtgagaaggcaacttttctgacggaagcaaaatgtattattagattgtgtatgtcatctccgtaaatattattattttggccgagtcgaaaaagtatgcaacattaaatggtgagcaatttgcgtgtgcctgtgctctcacttgcaactaaaacgattttcttttaacgctttgctgctcaccttttgacttggtttagttgtacgtaatacttatgcgtgtttttcccattttccgagtatgtgtactagagaaaaacaaggcaatttttcgctgcactgaacactgagcgacataaaaaaaaaaaagaaatagtagtgtgtatataattccgctgccggtgggtgacccaaatttcgtggctgcctacttgactccagctgaaccgccactattatacagaagaaaaaacttgaaaacataaattcatgctttttgattatttttattaaacattatttaagaatgtggacaagcacaaaatgaccttttaaaacctactgggatcagttctgttcaataaaagtggaaggaactagaacttaaaccactgggcatcaaatcaaatgtaccttttgttctattatattttataaaatcatcgattaacgaactagcgatttcatgtattcaatctagtcagatttctacgctttctgccagtgcagtacatttttttctgcaactccctcatcgctcagagctcagtcatgatgaaaaattcataaagtacctgtcctggtctgacctgatgtgcataactaacctggcggcggcggctaatgagtttaagttctcaactgacacaaaacccggcacccaggcagtctggctatggaggcatggaggcatggaggcagtgaggctgataggcggagcggagcaacatgctgcgtccgcacaattgacagttttcccctttgggccaatacatacacacacacacacacacacacacacacacgcagtagtacatatgacaagtgtcttgcattttacacctgcgagcagagtctaacacaattgcacctgcgggatttggacggtccttggctggtacatgcataatgcactgccgaatatgggcaacaggtggatgcagtgtttttgctaggcggacgacattccctaattaagtggacagaacgatggtggtgacgaagattgctacgtctatttcggcgtgtccttttcttctatgcttaatgaaattacactgacagaagcggaataaaggaggcctgttgatggcagtcgagggtgggagggaggtaagctctcgacaggatgttaatagagttgcccgtttccgtttccgcccacttcgcgcacattcaaattgaattaaaattccatttgccgttgtcgtttgcttaacgttttatttgtctccgccgccttgaatggattgaaagccgaagatggaaaaataatcgaatgcaatctgcgctatcgaatcgtttatcatttcgccctgggctataaaaccagcaaaacgtgcactaattaaagttggccagcatggcgctttcgaggggaaaagggaaaagctttgcttttgccattattttgaaaaactttaagtttatttaccgtccgccaactggcaggcaaaacaagagcagtagtaatctgcagaaaaagcataaatttatgacaaaagttggacatactgtgcctgttggcatatttgtttattgttaaacttactgagaacagcagcaaaatgttgcaaaaacgagttggtcaaggcaagggctaatggaaaatttggtaaacttcttgctcagctctatcagtcaaacgaaaggagtccgaaactcattagaaggcgagcggaaagcggaaaggaaaacattaggccagcaatttataattaaaagggagcaacagcagcagccgttgcagaaacaattaaaaagacaaacataaagtgccggggaaaacgcgtcaaaatagacagctagccagccacgccacgcccccttttcgagccgccccttttagcacaccccaaccatttatcatttgacatcactcgatgagttattcactttcatttgtaatttccttgggttgttcttatttaattagcgtagaatgttgcctatcttttggggcattcgtttcatttcgaccatttacgttgttcagcttgagaactttaaaatattaccattaaactaggaccaattttaatatttacgcataagcagcataaagttaagctacttttgggtatccagaaaaaaaaatcgtggtaatcgaattcggttgagtcaaacgctattaaattggtaaacttacgtaaggcgattactttacactggcgtcgatgcgatgcacacgaaaccgagtgaaaatcccattaaatgcctttcaattccagccaaatcgctcaactgagcgtcgttgtactcgctcctcggcaggataatgaaagtaatgagcgtctttggcccgatgtgagcatttagataaagttttatggcacacccgcggtatggcagtgtggcaggcagcagcaagcagcttgggagttcttttttttttctctttctactcgacggcttcgattgacaaactttccagcgatgccagggaaagtgggcgcagcacatcgaaggcgactgccgaacctcacctggtggataggtaatcgataagatgggcgacaaacagcacatccatataatgtaatattataaagttgccggagcaacgccagaagcatcctgcggcgatgagagtgaaaacttttcactgaaaaataataaaggataattttccatagcccaccatcctttgggttttagatagctgacactgagcctgagggcggacgaggggtagagccaacatccggtcgatgggcgtgactggaaaatgtcgccgccccccctttgcggcattgcattcacctcaacattgtctggatttccacggaggcgcggggtggggcgtaaatcgttcttagagagagggctggagttttcattaagtttactttttgggttgggggaaactttaagcttaacaagttttggttgaatttccgctcttaattcaagccaaatacacgaaatactccaagtcaatacacgacagacttaacattgttatcgctgctcagaagttttggatttcgctaaaacgatcataaatattttgcctaaaagttggcaaaacccaatgcacatgtacataacatatacttgtgtgttaggtggtagtagtagttctgggccaaaagtttacaacattttttgtgctcactgctggttgggcagatttacacatttgttgatagcaaacttttaagccccgcaaatagctggccaacttagccacatacctgtaacgaaaatacaggagaaactactgccacagcaaaaagggagagtgagcatggtgttttactggtcgaggacctgggccagcaccagcaactttgcaaaacgctgtccaaaacttttaacgcgactcagccaactaatcataaagtttctaattgcgaacgccaaaagcaatcagccagcgaaattgcaactttcgagtaaaaaaaaaaaccccaaagaaacagccgattttcagtgttttacattgccgcgttccggaaactggagtcccaatatttttctgtctatccgctgtttatgggtccattcgagtggcgccactgaattcgtaatttatgtccacacaacaacacgttaaattgactccacgtgccaagcggatacttttatcttgtcaccagcaaagcaacccgaaaaaaacacacggaagcggaagcggataatttataacaaacgatttgagtggacaggtcaggtaggatcgaaagtaaaaaaaaaagaacaagagtgaaaatgaggaaaattgtttcaaagcccctagaatacttgtactttagtttaattgggattaaaaaaagccttaagtgttaatatttaatcacaactaagcccattaaaccgcaattcagtagtacataaaacctgcatatataatcagtgtaagcacttcttccctggagtttaataaaaatctaatgagatttaggggttacctcccaccaccaatgccccctcatttccttcctgcaaaacgcacaagcaacacagctttcaataccttccgcagttatttccttagttatttgcatttttcaatcttccgccattcatcaaaatgtcagctttccatggagtaaggagcatggaggagccaggagcagctcagctgggatgacaaaatatttgacgtttaggagcatcacgtaaatttcatgtgttccgcgccacaaggagcagagactcgcaacggcagtcattggcaatgctgtggcggcattattgtatagttgtacccacccagtccggagatccttcggtttctagataaacgagctaaaaatcaccgcaaaatggttggaatcgtgaaaagtgtcgttgtagctgctgatgccagatgccagatgcctctgagcacttcctgtactcgttgtgcagctgaatgtcgaggaaaccgaggcactggcagtagatttagtttgacttttagcgatacactttctccgtgactggcatcaatcaaacacatgcgccaccggcagcagtttgaaagccagaccgccacagttgaaaaccaccgagcgagccaagcacattagtctgattatcgatcagttgcagtttggccgtgcctccggtactcagcaattctggctgaccattatccgcaattcggccgcttttccgtctgaagagccaattataaagtgcacagcgatgctagccagtgccggaattgatgtaattattgattcgaatctgttagtttttcctgccaaattaacatcgaaaaaggctcgctcattaatgacacttggccacgccatggtcaacaattctgtattcaactggccgcagaccgcagtgccaaagaaatgtaacatgaaatgttcgttaatgggcaaatgtgcaaaagtaagagctaaaaaataattctcttgttcaaatattgccatcatacacatcagcacaaatcacaatatttaaaactatttacaactcattatatttagatattatatttacatttcagcaaatattcgatatcaaagtaaataagcactacaaaatcgaaatatttatcttacatttttttttaatgattttgcaattataaaactttcgtgcgactgcgcatatagaaagttgtatctttttgtgtaagtgtatcttttttctgcacgagtttgtcagaatgtaaggacactgccttatgggctgtcatttatttgacccgactcactcacacatacatatatatatatataagcacgcatttgcctaagtcaaataaatggccgtcgttcttttataccgttcagcattttatgggtttttccgttttcatgccgcgtgtgaatggtgtcagaaatcgcatattaaatattgtatgtgctgtattggccattcccgcctgccttctgccttcctggctaataatgtttgcccatgcatgctgtgtgtgtgcgtgtgtgtatctgtgtgtgtttactgcttgtaagttgcttaattacattgggcagatgacgactaggacggggacccagcatgtcctattcgagcattgttgtaatgcattactcgtggccaactgaagccgcgacaacgtggccaaaagaagaggcaaaagaacagaggctagtgggcggttgggagttggtaactttttcgctttaactcaattttagttggcatagtttttcaattttttgctacccccagtttggctgagctctaatgcattttgcttgtcgctacgtggtttcatcagcttcagctctacagtttcagtcgaagcttgtttagttcttggccaagaaacttagtgctgaaaatgtccatagttatgtggcttttggtcaagtggtgtcaaacaacggcgactgctcagtcagcttaagcttaaatgcatatacaaacaaattgatattaaattaaaactaaattttcagcttagaaaactaaaaaaaaaaaacaccctgacatcttcaataaaaattagaccaataatggcccttttgaactatggtcaagaactgatgtttgacattggaaaggccagtttatcacctttgaagtgtttgcaacctttgcagcattcgaggaaagtcttcttcgactaaaaagcttataaaatgacaaaatcagctagccacaaaaataaacagcagcaggagcagcagggccaacagagtcgtgtaaacttttgtaataaaatgccagaacacactcacaaaagctattggaccttgcctggccttcactctctccatttcccatttcccatttgccacaattccacttttccaacccctagccccggttgcatcgaaaatttagtttttcagctgtctgcagcacacaaattttctcgtcagtttttgctgtttttctctatgtggtccaaacagcacaaattatgcaagtttttgttattttatttctactgccccgcaaaatgtcattcagtgtatattgggttacatgatcgcatgtgtgtgtgtgtatattgcttttcctgcaaaacatttaccaatttgtttcaccttgttgttttgcagacttttagtcattttacaaagattttttttttccatatgcaaaaattaaggtttttagttctttgtgcaaagatttgctaacacaaaggacagggtgttagagttattaaactaaaaataattgaatggttttctgtgaggctacaagaataaggttgaagctaccctttaattaacaaaagatacgcccgttgaacatggtttgtgttttggccacccattacccaaggtaagccccgagcacggatgtccccatttaatagattaataaattatacgcatcttaaaaaacatttcccactcgatatttattggccaatttatgggcattaatttaacacgcttccattcgcttcgcaacccgcagcacactctgcattaattccacttacatacataattgtaacgcgccgaatgcctgaaacatgaccattaaaaaggcctctggaaaatggctttcattgaggaataagcagtcgatacacttgccatcggatattttcgctggcatattgaatcgatcgcattcgcaatatttgtatgtcaaatggaggaatacatcgtgaaagccacttaaacgatgccaccctttattattgttgttcaggccaacgaagggtgtaaatgcagcttaaatgtttaacactttcagtgaagccgaattcgacacttcactgcattccattaagtatatgaaaaatattcgaagagcgaaaatgtatactacatagaaaagaaaaacgcgaattctttatgatatataagatgtacttttctaaagagaaataaatctatagaccgaaagacttgaattccgcggagagaacaattcttctgtcactactttctcccatttatttttgtactctccctgattgaaattcccacagcaaacaacgaatgacaatacgaaaataatcaaaatacccgacacgcccccttcgccgttgaacaaaccatcgtgtgtttgtgttcttaattaaaaaacaactccatagacaggcgccagtgtacaaaacaccatacagtgaataaatgttttccttatggtttaagtggatagtcgagtaagtaaatgttaaatttatatagcgcgcatttgggcgccgttaaaatttgggcaattaaaacttttcgtctcggacttgctgcaaaatgcatgcactagtgaaatgttgatttatgagaaatctatttgcggagaaatcctgtttcgcttggcagcaatccaacgaaatgtgggccaaatgccaggaaataacactctaaatggtttgcatggctaccactactgtagagccctcatttagctgctccagcacaacaatgcttggccagaattatgcctggaatgttgcccagtacttttgattcgtttgcaaaaggactcgtgctgggggggattcgctgaagtgcgaacatcaaacacaactggagatggcaacagtttatttgcacttaaattcaatatgctgattctacaatccagtttggcttgccttcctcatcttctgctacttctacaatatatggaatcaatttcgttcacgtaatgtgattagaaaaccaaatgcatcgctgcaatatctgaaatcaaattaattgtggccgggatgcactttcaaattgtttcggccttggggtggatctcctctctggattttccgctccaactgaaatcccgagatacttgtcatttgtgtggcgtgcaattaattatgcccgagtgttaattattttcccattttgcttttcccctaattacgtcttccgtttgccatctgcatctctctctctctatctctctggctttttctctttctcgctgcaggagtgcaaacttccttttcagttggttggcgttggttcccatgataatttcgcctgccaagtaaaaatttccatttccgtttcctttcggggtttccctccagccggagatagagtgcgcaaaagggagagacagagagaagcgagatggagatagccagccgaaaagaacatgctaatttgttgcagaaattccccattccgtgctgaataaatggtcaaatgcatatccatccgccaataaacgctactgacccgttgtgtcacttaaaaaaaaatgtaggattggcacgattgctaatgatccaaaacatgaaagatcaatatgtaaatcaagagactaatgatttcaaaacttctatgttaacgaattaatccctttttttttgcgactgcacacattccaaattcccatcattcgagcgcatcgcaaatttcgctttcataattgcccaagttttgattattgctgccaagagcaactggccctgctactggcaacattcagtcagccattcattctgccagtcagtctgtccgaagatttgtggctctgccataacctgcagcccatggcaaattgcattgtgcttgctatttgttagctgcagttcagttggctcgaacctgagagcccgcctggcacacacttgacacttgacagccaactgaatgatgaaaaacttttggagacgacgactacgacgaccgtgatggggagatgatgacaagttttgccagtaattaaaaatttacgtcatttacctgcaagtagagaagagagaaagttttttaatacaaaacttgagcggagtatttcaggtaggtaactaacttaagttcactcgaaaccttttgccaacgccaccacaaaaagctatcagcattggctgtatccagttaccatactatgtcggtcgggtttttcggctgcaaactgcactattccgttttattttctcctcaaaagtttgccttttcacttttacacaatttcaagtgttatcctacccacccagtcgcccttttatttgccacgctctaaagtgccgcgtataatttctcattaatttctgctacgtttgcacttttcacgtgctcgtaggcgcgctgcttttgagcagcaagtgcaaacattttgattgcataacaaggcataaaataaatagcattttcaaacagttaaacattcagagacaattgaatatttaagcgccaggtgagcgagccatttcatgaacaaaaacttttcgccaagcaatcaaatcaggattgccaaggaataagttttcgagccacaagaggcaaatgttttcagctggcgaaaagctttataaaccaaaaaaaaaaatattttatatttgtagactaactcgtttttatttcaactttatattgaaatttaatgagttatttcgatttttgttgaattctgataaacgagtttcttcaatatttattggtggcttaattcaatggctatttaattattgataataatgattttgagccttcaagtattcaaaagatttaatttcatgtttcagcaaccaaacactttcaaagcagccagaaacatgaatacaaagcgaaatgaagacaccaataacgagaagaggaaataaagtggaaaatacttttttggagcagtcattacgatggacttttccttgcacatcgttctttatctcactctgtttaagttgcaaattaagtgagcccaaggtaactgacgatgacaacaacgattctcaatctaatctcgattgaaagagggaatcgcctgcatactcgattaccagagtgcctaaaacggaagcactttcgatgccgggggcaaaagaaaatctaagccacgatgagtttctcatttttgcttcctttgctagtttttgcccatacagatcttttctatttccgcttgaagtagcagaactgtgtagaagaaaacaataaattgtcgagatgaaaaacagagaaatagaaactctgctacattttttttttttttttttaaatcgatttaatttatttcctttcattttttttcgatttgagttcgattcctgttttgttttttcactgcttttgtgtgttttccctccgcacaaattgaattgtacgctcacaaaatgcaagacaattgaaacacatttcaggtctgatttacctaaaagctttttataattgaaaacattttacgactctcgaggagtaggagcggaaaaaggactttgccaggcaattgggtacataatcaagttagcaggagaaagttgctgcacatgctcttcggtatatcggtatatatgtcctgggcttacaacttgttttcggtttaatcgcattttcataattgaaattgcctgtaagacagaccggcagcatatcacgcatacgccctgcagcacactatgcatacatatttttcgactgacccttttgcatatttcaaaagttcacttactttttaccataatccccggcaatttcctttatagaagcagcccctacctctgtgtttggctaaatattgaaataaacaattggcagctaagcgtacagcacttgtcagacttcctatttagcatttgtcaattatacggaagtttttaacccttttttccagctgccagggaaaactttgcaatgcaaagccaagtttccagcgaccaacatcaaaaggtgaaacacaaacagctgcaaagcggcttagggctgagaaaagagagccaaaaccgacacggccaaagggtttaaaattgtccgcacgacgtggctaataaacaggcgcaacccgaaagtaaatttaagaaaaggacaacacacacaccttcaagaaaaactcttgaaatgagagcgagcagcaggaaaacatgcaaataaaacgagacaacgcgaggcaagccaaaccctgccaggcatttataattaaaaatgcaaaaacaaaggggcaaaaaaaacttaaacaagattcagccgggggctgaacgcctagtgggcgtggcacgcgtctggggcggcagacagaagtcaaacaataaaagcagacaacaataatttgcacaataacatgacaaatgttgatgcagcggaataaaagttgagataccagaagccaacgaaggaggctagaaaacgctgcatactttcaggcgccgcctgtgggcttggaaaatgaaaagctggcgctggtaagtggcaagttgagtggaggagccatggaaaacaactaagagttaagtgagtaaagtcaacgtttaatgaagcacgttttaaataatatataatacatagttttcagtagcacacagcaatgagctttaagaactttggccaaattgagacataaaacggtttcgattttttgcttttatttcccagttttacccaatgctcgactctcctgcttgccactcgtgatatatttgattgcagcatgagcatctatggccgagcattttgtaacattttagtagtcacccgcactcaaacataactcagcatgaaaagccctgctctcggtcgctttcataattttagtttttcgacgcttgccggcgacataaatcaattttaatgctcgcagaaggagaaatgcacgtaaaaagccaaaacacatgaaagtaatgctcgaatggagggagagccaaatagagcgcgcgaaagagacggcactgtatggcattcagaactgtatgaatatttctgatttatggcaacgattcgacttcaattttcagcaaaaagtttgtacgctagagtctacgaattgcaagcaaatgacttgaaagaaaaaaagaaagaaaaactaacagttttgttcgtaaaaaaaataggtgttccgagaggacagaatttaaagcccttcggggaagccctacactcagtcctaaagccattcaaataacatccttttgcctcgctccgaaatcacttttcatgtatttttgcacaaaatgcttttaaggctttgatttccgcacacacactttgctgcgttgccacagctcacttgtttaaccccctgctcaatttggtttgcttctggcttctaaggacattgaatgccatgcccggccctaagtattatatttaagcgttttcaaatgaccagcaataacaacaacaacagcaacagctgctactgcaaatctgtatctgtgtaagtggctttcatgcaaccatttgccgagtatgtgtgtgcgagacgaccagtgacttaaaaaaaaaaaaaaaaaaaacaaacaataaaacataatgaaagtgtaaagcttttcagggagccatggccacagctaaagcaaagccaaatccaaagccaaagccagagccggagaaatgaccactgctgctaaccgaaaaccagaagcgggtcaattgccaactcgagtgccacaaaaatgcacataaatgtgatagatgtggagttgtcgcgaatgctcacagctcgtccttgctccatagtttcctgcgctttggagtccgtttgcggagcgtgacaatcccgacaagggatcttgcaaaacatacatacatcttgtggtctaaaccgactcaggggcatggaaaaggggcttgattctagtttaccctaaaaattgtatacatttttatacactttcaattgtgatctgagaggtaactgttaaatataactacttaacctctaaaacaaaatatttttaccctacgcctctgcatttctattgttcttcccattctttatacttgtctgtcatttaccaagctagaacataaaaaatagtcgcatttttttcccattccctcgtttgttaaacgcttcttatgaccaggcacttgaaaccatgtttcctttacccaccttccccctgcacgctgcccttaagcaccgaacatgtggagtaaattttaacatttaattatgaacatgtcattgcggtaagaggtttatgaaatgagccacaaataaacacacacatatacacgagctcagtcggggaaaagctcatgaaaagcgcataaaaagtcgtggagtgggtgaaacgagcgacggggacagccacagttgccattaaaaaggtttttggggtcagcaattttaaaaccaaaatatataaataaaatgtcaacttttatgacagccacagacacacacacacacacaagcagcaacagagagtccttttaatgctaccgcatatatcaaagtaagtatccaaccagagcattgctcatacgcctcattgtaccgcaaaaggtagacgacaaaaacgagggcaaaaaggcaataagcaatggataaagaacgaattggaggagggatagccaatcgcaggcaatttttcatgccaccgccgcaatcgataattcttttgttcattaaggagtttataaatcacgtaaactactacttcgagtagtgggcgggaacgcaaggaattttcattttcatagtttccgctgttttggctcgccaaatggcaatcgagttcaggtgccagacattggaatgttgtgcaactttatagacttccccgtaagagttcaccgaacaactccagccactgaaaatttcattgttaactgtgtttcaaagtaaatatttcaatacattaggcttaaatgctgggaaaaccaactcaactcaatgaaaattagccagaagattttgctgcggtaaatgaggtggttctgccactgcattcagtcgcaaatgactttcgagtggcgcttaaagttgcttaattgcacatccgctgaaagagagaaacacagcagccaagttttcgcgaatgtttacatatgggcgggtgcacctcaaaaccacaaattcccagcgaatttatttcaacattttatatttatatttatccatcacttgaacccatttaaatggcaacgctgtgggtactcttttcaacccagttcagctcattggcggttgcaattaaagtttttggcctcgaaatgcgtcggcccaaatccacatccacatactccatatgcatttgcataatcagttctggtttttctgacgccaaaactctaaaatgtaaatcgatttaaggcaatcaagtgatcgcattaagcactgacagcaattaacgcaacaaatcgtttctaaatggctgtcgatttggtgcccaaatgaccgagttggttccaggtgccatcttccaattccgtttgaaatcgggctccctggtcatttgcacttttctcgaaagttgcaggcggggggcaggtgttgcaggtgagaggctaattcagaactgagacacggccgatggcaaagttaaaatttcaagtccatttgaatcgcagaaagccatttataattgtcatctacgcaaatgcaattagcactggctaatgggcaattagtaggactaagtgcattagatctagtccaaaatcaaggtcggtcttcttgtttccacaatgcctcgatgtgtctcgattttgcctcaacataaatctcactttgtatgtcttgagaaactataaagtttctaatttgaatcggtaataaaacgtgatcttaattccgtgcagcaatcgtgtctcgaataaaattagttcacgcacagaactaccgcttttaaacttcattgtgaaattcgatttgctattttgccgttcattttcgcacttttgcagcaactctctagcttcttattgccgatttaatttcgtacaattgttttccaagctgaagaactaacaaaaaaaaaaaatgtttcctttcaactggcagcattggctcattaaatgaaaactaaaatgttgctcaattcggggagccgttgataattgtgtgtcagaagttgcacagcatgaatccaatttgcatcacaaaggagaaatgtggcattgtggcaagtcagcatttaattagccgctcaaacggagaatggccaacgaaatgaaatggaatgagaatgcgaatgtggaataaggaatatggaatggcaattggaatggaattcaaaatggataagcacaaatatttgcatatttcactgagcacatcaaaaacattttctatgcgggtgggggccaaaggaaaatgcgggaaaatccaaaagggtgagtgttgagtgtgagcgaaaacaatggctgacgataaactgctacacatgttaacaaagttaggcagttacagttacttcactgctgcccccattcaaaaagagctgaaattggctcaaaccaagctaaaccatggcaaacaaagcggaaatgggcgagcggccatttttgttatcgcgctcgccgccattttcaatgggcattcacaatatacgtcgcagtgtgcgtgtgtgtgtgtgtgtgtaaacgatacattttcatttttttttttttttttttttttttttgttcctattcatttggaacatagcaaaaaacgagttccgtactaaaaacaacaagtgagttgttgggttgacagcggaaacggaaacaacagcagcacatcaattcaacaagagcaaattaaaaatgccgccactgttgcatttgagggaatggctagggttttcgcgtatattttatggatatatattgccctactcacccagctgccagcaactttgactttttgacaaaacgcagctgttgaaatagtttcttttttgccccagcccccctccatcacaaccaaaaatggcgtcattttgcaagacatttggccgaaacatcacgtacactgcgcaagatgaggcatctattagggagccaaaacttcacacacacacaagccacttgcatgcgagtgccaatatcaaaagtttttggtggtggcagcgacggggttctaatgtcaaatattctggcttaccctcctgttgccacatttcggattttggctgacaatggctggcgtttatccctgtatcgaagtgaaggaaacactttcagcaagccaagctgttgagcagggggatttttttcgcagattagattcaactctggataaaagtggcaggcacttgaattgcatttgaaaattattcattgctgtgcgcttatcatataattgatctgcaatttttagggttttttttaaatatttataaataatgaaattaagtagtgaacccaacaattgcaattacagtgccattatagttattattttactgccacttaaatttcaagtttggtgtgcgcataaaatatgaaattacttcgagcttgcaaacgtaataattactattgctgaataattatggaccgctgacaaaagcagaaaaacaaaaaacaataaatgaaaacaataaaactttctgttgcacttaagcaaagtaccgcttttaagtggtcacaataaatggcattttaaagaggtcataattaaatcccccaataattcgcatgcgaaattggccgaagcattcattatcggtggcagcagctgttggccaactggcaggaggcaggaggcaggcggcaggaggcattaggccatgcaggatttgcatttttaacaccccatatgagatatgtgtgatacgaacacagaggacaccgaggagaagccagagaattttgctcttcattagctgaatgccacttccggcgagcaatggaaactgatgctgaaattatgacagctgctggaggaaagcaaaacggagacggcaagtcaagtagcccaagaccaaattggccaaaagcatgtatctcgttcagtcattgggcgaccgcattttagccatgagtcgcccatccacttaatgcaattcacatgctcaatggcccattctggttggcttgtggtttgtgttttcattgtgccacatccacatactcacgacatccatgactgcctgctaggcatctaattgtgaaatattttcattattttcggctaacgaactttgtgcgaggcactctttgccaagtttagctaactttatatatttaattaaaaagttcaaatcatacacagaaactgaaacagaaacagaggaagcgccgagagtgcggtgtacaaatttgatacatttcgtggtttagaatgttgattaaaaagttcggctcaaaaaatgtgatgatgaagccgcaacaggaagtaaaacaagacccgcagctaaataacatgatttttaaataatattcaagtgctgaagatgggctgtttgttctcctttgaaacaatatttcatatcacatccagctggaccccaaaaatgaatgagctcatgtgcaagcatggaaaatggctttcggccatattttcgtaagagtttatcatgcatgcttcagtgatcttatcttttcagtgcacttgccgctgcaacggtaaacttaattacttgctgctaagttcaaagtaagatttcttaagatacatttattatgttaaggattctttggtgtattaaaagttagccatcggtttatgataaatcaattgaaattattcggaataaatgcgatttattgctacttatttatttcaattgctcagggtttcctgtcgtttgctcatttcgcggttgccacgccccctctaggctcttatccgcctctctatccggccgcaaatttgccgcgcggtgtgtgacagcgcaaagcccttcgttgatagctggtacgccaaaggaagcccccggtttatatatattttttataagatttccgttctgatgcggcccctttgcactttacattttatgcgccgtctgctgctgtttttcttcttcagccattgctgctggtttttatatggattattttttttttttttttttttttttgttgactgttctggctgagccatataaaaaatgcaaataatttgctagcgctttacagcgcgacaaggcagcacaagtaaagcaaggatccccgagtcctcatcttcgttcgcgtcctcatcctcgtccttatccttatcctagcccgctgtcctgttcgcatcttatagaactgtttccatagccacccacgtggcccgcggcaaaaaagacgcaagcgcgtaaagtcaaaaacgttttaatatttatggcacattatatggcttgtgggcttactttagcatcggctacagctacagcatcagtttcagcatcagctttggctttagctttcgctttggatgcgatatccgaagaatccatgtttgtgtaatgtatatattgtatgcctaaatatgtgcctcatgcatgttttatggcgacggggcaatttggccatagcaaatcgtgataaatgcttatatttgccatttgtaatccaagaaaaaccccagtgcagtggaaaacttttctatagcatacattttggggtttcacaaggcgttcaagtgggtgctaaaaatctcatttatcgttcgctctcttcttgagatagtgttattagccgaggcgtttgggctacctctcctaattgaactttttccatgtctctctctctctctctggtcgcgactccccccctgctctttctcgcatagaagttgcaaaaaaaaaaaaagaaaaaaaacgcttactgcgccggctaagtaccgtaatcaaagtttaattacacggccattgaaagaggagcgaaagaggaggcaataaagatggcgaaagagacggctggaggacaggaagggagcattttttgcgtgctttatctcggctgctttgagtaatcatgggttgactcaaatatttcgaggcgttcaaccgcttaattagcagcaaacgtggagctggcgaaaaattaattttttttttttagcacattataattgacttgcgttaagatgaatctatgcactccataaaacacaaaaaaaagtttttaaagatggtgtttagaaagaaaaaccattttaaagctcgtgctaatcaaattcttaataaacaataacgaataggtggatgatccctaacatgaactaattgacatacaccaggtatttgtagttaggcagtgtaataaagtgaataattaaactttttgccaactttcatgtgaatgttcacatttcgaaaattaaaactcatctctaaccgagcgagcatatgaaattcgcaatatgcaaaccataaacaagtgataaaatgaaattgtaaagtaatcccgaattaggatcaacggcaaatgttcgtgtcatggtctggcaaggaattatgtttaatatgtgcgtgagttgcgtgtgtgcgtgtgtgcgtgagaatgcaaatatacgcaggaatacatatatccctgaatgtgtcagctattgtgtggaacgtaatttgtggcctggccgcatgttacacatttgcaagctgacaatttcatttaaatttcatgcaagacatgcggagacgtcgcaacaacaacaaggttccaactgcctgggccgaagccatatgtctttagtgtccgtccgaggttatatctgtcccttggccaactaaacatgacagcattttgaaactttacgtgatttattatcacccacgcaaacaccacacgcagcaaaccacacacacttgcacgcacacaaatgattgccgaaccacaaaacattggccagatattagaagcacttgcattcgattggattgcctgacaaatgccatttaatgaacagcaaatatagacgataattcagttcacataaattaatgaaactattgatattggtttggtcgaataaacaaaatgattgctgacgccttgattggttctattgggttagtctttgcttggttacggctaataatgacaattgattaaacgtaatgagcaaagatgcaacttgttaaaaattgctaaaacacccaatcaatgagttttatttgcttctcaataactcgttgtttcggcacatgacttctcttagccaactgacctgttcttggtaaaaacgatgcatctgtgaaagtaaaagacctcaataaagttcacagcgtgtgctagcagtcagttagcactcatacgcagtatgggacaacagagagcaacgatgactgactgtggccaataaactgctcgttatttgacttttccgcaagtctccgcagggagatggagatagttaaactggtacgaaatgctgggagactggaagactgggtaaaagtagaaggattgtaattgccaactgggtagcggatcagggaagttaaatcggcaaggcgaaaagtgcaaggctaataggggaaatgggcaaactcctgctgaatgcgagatattcaatgtctgtgtggtaaacatgattcaattgccaatctgcagatattgtacatatgtttgtaacaagcccatgcacttgccgaccattcagccctgcaatctgggtgcattgggcattcggcattggacccaaaaccaaaagcttcgaccatctttgaggtgggcacaaaacggtgtaatcgaatattgattaagtgcagttagaacctgtttggaattcagaattcaggagctatgtatggcaccaccatgatacgttgcagttaaacgttgataatgcaccccgtctgtggctgctggctgcttcactctgttctggcttggcaggccggaaaattgaagcacttgcctgaaaccgggcgtcctggatcccgatcctttgtcctgccccatccgcatgctactacttttgcttgtgctgctgctcctgctgctgctgttgcacgaaaaacaacattgaaaatgtaagcgagacgaggcggcagctgccggcccttttttctccagcgtttttttttttttacaacttttcctttttgtccgttttggcaatgagttttgattgctcttggccgggacccgtttcgggtgcactgaccccgtttccgcttgttatcgatttgacaaggggcaaggtgtgcggtgtggcgtagagtggacgccaccacctcgaggcaattgctggttacctcctttggcacttgactgccagttcagccaggagttcgtacctcccactagtattttttgctggccgttttatttctgtcgtttcttgtgtttgctctgctcggatttacccagatgcccagatgtacttgcatatatacaaacgtatgtatgtaatacctactggtggttttaattgatatttcccgacattttttgagctgcgaaatcaaagtttaatttattttaattaaacacatttgtcaaaaaagcattctggtttttcggtttcatacaaaatgacgatgacagcattctgaacacacaagcttcaattaaatagttatgtgtatgcgagtctatgctatgataaaaattcgcgcacaataagctgtgaattttcgcttgataaaattaaactaataaaaaagggagcacgaaagatgaatttcgttgaccgcaacaattgggatattgggatcgttttaactagcctggtttgaatgaaatgaaatgcctgttctaacattaattttctactaacgagtcgcatattattatgctatattcctctagtgaactgtaaccccatgaactatgaaatgacgtgaactcacaaacctgacaaacctgacaaagtgccacatggaacgcgaatagaaatatgaatcgcagagttcgtgcccaagtgccgtcggcattcatttcaatttagtggcgttgattgctggcgacactgtcagatgtttcagtaattcaattgattagtttgctgccgattcaacttgtgccatatagtcaaacaccaccgcaagcttaaattcaaattgaaaaacatattttcgtacttgagcaaatgttttcagttgccatgcaatgcaatttatttggctaaatcttttgcagcatattgcatattgtgcggcatgcaactcgagtgccagacaaaaagttaagggaattttcggtcatcccgcaaacacacttagtggcgaaaattttgccacttgtgcacgaagaaaatctgaaaagaaatttgcttgagtacgattttatgcaaaattaatgaaatatgcagctctctctctctttctgtgtgcagcaatctgcagatggcgttgacattatgagtggcccgcttcatctcatctccacccttttctaagccacttgagccatctgagttttgtggctttaacattcaaagccactctggcctaatattcttgttgtttagttccagaaacttttatttgttgttcgtcgttgttgttgctgttgttgttgtgcagccgcttgttatcattgcatttcaatgtgtgaaactgacagcatcagcaaggctagagagatagagagagatagctagatgcggtgcgaatgagagagagagagagtgcgagtggtaagatgcaattgccaccatatggtgtcaagtggcattttgaaatgctctcaatccgtttgtttgtcgatttgtttatctacgcaacaaagcccgagcagcatcaataagctgcaatgccttacagatgcacaaagcgcatctatccggattgttacgcctaattgaagtgcaaaatcaaaaatggccaacatctgttctgggtcagccagaaataacgcatgacataagcgcaatgtagaaaaataatagatatttaattgcaatgacgttaatggcgaaataagctcatacttctaaacaaatgattgcaatgttttacagtaaaaataatcataataatctcttttgttttatgtttattgattgatccagacaacctgcgattgaaactctagttccgtgacaataagcaaggccaaaaatgctggcaaagggaataaacttttaattaagtgtacctgccattttcgtgtcagtttcatgtagcatattgcatgtggcacgatgcagtgcagttaaacataatgcataatgcaaacggatgcaaaaacaaagtaaacacgagggcagaacaagcgcagccaagaaaaacaaaacgtgaacaggccaagagcgaaacaacaattttccacggctttggtgcaattaaaatgaaattttcataataaagttaaagccaaggggcagcaaaaatgcactgaaatattttgtgtttcattgtctggacgtacttacagtgccagccacaattgtgtgcacactaaacattttaaatgtaattttaatttgttttataacttccttagaaaagttgcgcaaccaaccaacttttgatatcgccagcctccagggcaaaaaatttacgaaatcaaatggaatggcaaaccaatttcaagtacaacaaaatatcaaaatcaaaacagaaagaggggagtgcggggattaggtttatatgggtgttcaaactttttgctagagcaaaatgtaacacaaatcctcaaaagtgggaaatagaatgaaaacttcggaatttttcccaacacaacgtgctaaggttggttagggggttgttgttaaactcatcatcaaatgagattatttgatcaagtagcttcatctccaagtatttttggctgtaacaaaacaaaaaaataaaataaactttttccaggactggcacttcctcgcaggcgcccaaaaccgcagtgggtaaaaaacttaatagaaatgaggcgggtttcaagttaaatcaaccaaagctgggatgtacgatgtcctgggcttagattgtaaaaagtttagaggggaaaggggagtgggagcctctaaagagatctcgacacgatagaagaagtgtatttggacttgattttttatgacctgttttggcgccgccttctaatttcccaaagatacgcgcgccccaaaaccccaagcttataataataataggaagaagcgaagctgccaaaaagtttccaaaaaggtactaaaaaatcaagctaaaatatttaagtcgactatataatacccagtggggcaaataaatctctatgctttttaggaaaaaaaacttattttattagttcatattctaaggcaaaacgaattgtaaataaaaacttctcatttccggtggctaaatttgtacattttacaggataccatatagccttgaattccattggtatcttgtttaatttttaattcatttccgtgtaattttttcatcaagatagatggtaataagtggaaaaaagagaaagatatacacacatagcaccacagcaaccacattctcttcatccgcgttgaagcctcaaggttgaatcactttacggttcgttacatttttggccccaaaactttttccccggttttcgctgcagtctttccaactaatttcgactttcactctctgctcaagctcgctcctggggcttctccagtgttcctggcaatttacggggatctcgtcagcattaattttcattacgcgtcgtcctaacgattcggttagttgacctgaccattggcaattttgtagcgccaactgcgcttgaacttgtatccaccagctaaattgccagcgactagccgctcgttcgttcttgttctactgcgtctacggctaacacacacacacacacacaaaaaagaacccttttcaaagcgcccgtcctaatgggtttgccatcccttttctttattcttgaagctttaagctgccatgaaaggacctcagattgtcataaacggttgccatagttcgcaaaagagttaattgaaccgcaagatccttttcctactgcccaaatgtatggcacactagaaaaatgagggcatttcttgttgtgtactatatttattttatgggcttctattaaattgaaaacgatattttaagaaagctcttgaaattaaagagatatttgttttaatccaaaaaaataagtttaataatttgtttaaattttccctgattttttcgctctgtgactcttggttctttgaaaaccatcagaatggtaatcaatagcattttattttgagtttgaaaacaaatttcaaagactaacagcaaaaggttcaattaatattccattcagttttatgcaatataatgtcctcctttgtggcttttaaatcgatgcaaaaagaagcgtaagtgaatttgaatcgctttgcgtgcaatttgcttcgtcataaatcatattgaaatacataaatacagagatgccgagaacagagaaacaaaaggtggaataaaggcgaagtttgctgaagaagaaaaaaaaaaggctaactgaggtggtaactttatttcagcgcgttttcgattcacgtgctatgtgcagcacctgcaacacacacacacacacacacacactcacaccgttacggtgtgtatgtatgtgcaactaacccaatttatttgagtgtgaaaattggctttcgcccattttgaaattctaagctgttgatggcgtcgttcaaccacacagacaccgacacacatgtatgtacacacacacacatacacccagtctacaaacgaactgtatgcgtggccattttgttagaaaaaccggaaagtgggagaatacatcgttatgtactcacccacacagacatcgaatgaatcgcagaggttgagacttgggcagggaaaatgtgtaaaacgcacggattagatgaaaaatcaaacagaaaagaaagaggatgaacgaaaaaaaaagctagtagcatgcaaatgaattccgtttggattggctgcctatggcaactactaagccgcatgtgtgcctgtgacttttgcagctgtaaatgttctccagccgtttacaattacttaagcttcggcaaaagagccgaaaatcaagcacactttctgcatgaactaagattctttttcatgcatatccatcacatacatatatacagtgaaaaacattaaagattgataagcagcgccatcccgaaatgggtcacacttcaactgttttcgtgctgtgatgatttaagcaggcgaaatgaggatgattggcggttggcaatctttaattgatttggtgctccacttacacacatcacgtcacgaagaaagcaaataggatgatgctgccgcaagaaaaccaattaagtttattattcatcaactgcatacatacatatatataaaaaatgtatctggactcaacttcttggccggcagcgaaattaaatgaaacgcaataaatatgaataataatcgagcgactctggcaggaaaatatgaggagcgaaaagcgtatatgtccatgcatatacatacatacatacatacatacatatgtacataagtgtacacatgacaacaggagccgtaaattcagattgttggaaaaagtcaattcaacgcttgcgcttcgaggaatcgaaattgcaaatttaatcacctgtaagtctggcagaatgtgcccatggcaacactgtgacaaattcactggaaaaaaatcttgaatagcattaatattccaaatataacacttttccgtcgagtcatcctcattcgaaacgagtcaacagctttagtttatgaccctgtctcaactacaatataattttgcctaaatattttttcgcgtgtgtggtccatgtttgccatcggcagacatcggataatgtctaatatattatatcctattaactggaaatacaagcttccaactaaggctaacaagcctaacacttttcccttcaactgcgcactaattttgttgcagtgcgttctggtcctgtttgccttcggcagacatttgatcatttgtaacgcattttcttatcaattattccaatgcaagagacttctgccctcagccttcctggcatcctgcctcctcctttgctccgatctgccgctgagttcacttccgtttttcatctggtggtaacattccacagccgcaggcatgagactcgaccgcaagtcgggctcgaaaggcgaaaggcgaatgccgtagcatctagctaggcaaactaacgaggccgtagcagtagtaacagcaggtggcacccacccacagttggcacttcaccaccgcccgctgccgggtttcaagtgtcataaatgagaatttattcagccagacattgtcattgtcgccatggagcagcggcgccgaagaacatggaggagcacatggaaagtggagagcctgtggctgtgttgacgcgctcaggtggcaaatttgccatccaggtagcccggattctgttattgtcaactgcaactgccacccaatgggggtcatgaactctgaaccataaatttcattaacagctggtcggccggcgcgactggcacttctgttgccgtctgcactgcggatcacacagattagcttatagattatataaattataattaagcgagcatacaatgtagtccatttgtttgccgcctttgttggccggcttttcatgtcctttgacctgtgccgaagcagagttacagggttatgcacagagagaaaaatcaggaagttggcatttggtcaaatgaatacatcttctagactgatgtcagtctaaaaatcaatatgctagaaataacatatttaaagtatttaccatttcaaataatttaacgatttttccgaatttatctatggtttagataaagccgatatttttctgttagaatataagataaacctaaaaaaaacattttatttgaaatgcaccaagttagaaagttagaaagctagctacaaaaatatacttattgttttgccgcacattttgcggtacattttacgttgacaacagccatgcaataacaataccaaatacttgaactgtgttcccgccccattccgcccactttttctggcccactttgtgtcgcatgttgtctgaggtcgagggtcgggcaggcgggggtcgaaaggtcgtgggttgagcgaacgagatggccataactgactgttgtcaggagttgcaacaatgcaaatgccaaacggtcactggaccaacaacaacagcaaagccatctaacgattttctaatggacaaaagagtaggacagtcaacacaatatgtgttgacaatgcaggaaaaaagcagagcacaaattttaagaacaaatggcgagcatatttttattccagtttaatattctgtatttggatataaaaatgtactttgtactcggaaaatggtagtagtctgtgcttaataaaatacctacttcaaaataaaatgagtaaatattttaagcccttttaagctgctaaaaattctctttaaaattgtgatatttgaccgtatttatttgcaagcttcaaaaaaaaatatcacgacctcctacagcattaagcccaaatctgctggtttctgtgtgcactttcaatataaaataagctgcaagagctaaggggctaaagcaaaaggagagcacaatcaaatcaaatatttatatgcgggcgaaagacacagaatcccgagtttggccaaaacctggaataaactgcaaaattcgtggaggccgagagcaaacttggaatgagctgctgccttttgtgtgaataatactatgctgccgtgtatatttcttgttcgaccatcttgttctacagtttgatctagatttttcactgcagcaaaagttgcgaaactttttctcggacaattcagcttaacagcgccataataatgcggagaaacaaaagttttttttacgagcccatcgcttgtttcgaacattggaccgaaattaaaaaagattgtttcctatgccgaacgcgtttcgccaaaaacaatcagaatacaagaatcattcgaaaacgtattgcaagagcctgtgtttttggccgggaaatcaatttaggcaacttgaaaggccctaaaatgctggtagtagtagccagagccttcacttcgcatcgcttaccccccccccccccaggacacgtgatgaaattgatgtgtatgtaaatgtatgggcggcaaagcggaaaagacttgcactcaatacaatcagggccgccaaaaacagaatcaaatgaaattgatttgtttcctttttcctcttttagctcaatttggtttcaagtgaatagggaaggcggaaaaggaaaagcatccatcgcacttacacacacacacactcgcactcacacttctatcgcaagtgcgtatttttcgccccctttttttccttagcacactttttggggttttccgattcactcgcatttttcgctcatctcaactgttggcaaaaggattttcactctgcctttctcccgctttccatttctccgtgtcactccacttttgtaagtttcgtaagcgggataagcgcactgagcctggccaaagcataatgtaagctccctccaaagctgcacttaaacttttgatatcaataagcaaaaaaaaagagaggaagaaaaatttccttttaaaaaaaaaaaaaacgaaagtgaagaaataacactgtataaaaaccggaaatgccagtctacacaaacgaaaacaacaacaaacttagcaaggaattgagatagtgagcggagtaaatcagtgacaacgcgcctgaatgcaaaactgccagaaagaaattttggatgcaaagttttctcgaaagagcaaacgtatagcaaaaaaaatagctggccaagaaaaaatacctaaaaagtaaagcaaaaaaaaatataaaaaaaaaagacgagagttggaagcaaatctaatgcaaaaactgtcatttagagttgctcctcttatttattttcatgtcagttgcacgtgcgtcagattctcattccttttcacttgctcaaactattcatctctctttcctcggccattttaccacgcagctaaaaaaaaaaaaaaaagaaagaagctaaaatgacacgctcacgtttttcttccacgttccggctgcaaagaaaatgatgatgatgatgacgatgatgctgattctgatgagcacaatgaaagacagcaggacaaacgctctcagacagctgctaactaaggaaataacgatggcgtgggtgaagtggcaggaaggtcaggtgaggagatcacctgctgcccaccacccaccgacagcaggcctcatcatcattccgctggcgttcgtcaacttaaactttgcacattacttcaaacagctgaggcttctcgggcatctgctgccacaatataccatggagaattgatggtccactcgggggacatatgataaatttatttatttaaatatatacataacgaaagaaaaatatgacaatggtatttattttaaatgttttaaattttggagcagaccaattcaacgaacttacaaaatggaaattacaactcttatcagttaccaagtcttcgaaattttcaatttccgagaaatgccaatgctaatcagttacaacaaagccttggtatttaatgctgcttttagaataataaacacattatactctttcgcccgtcgattttattatgcaataacttattctggcttaaccggttttactttaatttcatgcaaaatgtcgattgtgtgcaaaaagtacaaaatgtcctgcaatgcaatgacaggctggaaagagatggccgattaagattgacggctaacagcgaaagagatggcaagtgacaaagagacagggacagatgcaaggacatcctcagaacgataatcaagtacatgccactggagacattttggcaaactgttttcgcttgattgaattgaatttggaaacaaggcctaagctaaaacaacacaatatagctgaatagagcagcagtcagtcagcccaactcgactgtcacaaaatcaataaaacttttgcgacccccaaaaaggagcaagtgaggcagcaggacaacgacgaggacgaggacgaggatgcggggcaaaaccaaaaacgagaaggagaacgacgacgacctctgtaattccgatccaactctcggcgggcacattagcaacatgtgttgccctccagctggagcagaaagtaactcaagccgtagaaaaatttgttgcgatgcggaaatcatagcagaatgtttgtggccaacataaaatagatataccaaatggatggctaaatgtgtgttttggcccaaggaccaagaaaccaagaatgatgggtggtggggggttggaaaattacttgggtgtgcttgagtgttgccaagaaaagagcgccagctataaatgacagacactcgttgagatttattgtgtttgggggccagaataattgggtgttggcgctgcttaaaggattgcgtagtgcggattgcggattgcggattcggattcgggacatcgaatttcagattttgcggcctccgaagagagcaaggcaaatttgcattgccaacccgaaactactcgctggctggcaaccaagtttctgcgattagagcaactgctgtgggatcgggattgggagacgggaactcaggattcaggatttaggattcgcaagcggcaagcgcggatggctaactaaatatttgatggcgaaaatggcatcagcgcagctcgagtttccaacgcttttccgcgattgcaatcgaaacgcaatgcgcgggaggtgtttatggggccagaaaactcgacagcgaaataaagaacatggcaagcaattgccaacaaaagggattcattaacaaagtaaaagatggctgaagtgtgcaccgccagcgaatggaaaattgcggaggaaaattgcgagggaaaggaaagaaccgaggcatccggttggaagtttatagctgcacaaaaagaagaaagcaattcaaggcaacagaaagaacaagaatagaatttcatctcacactcgtaagcgcaagtgtaggttttctcaaagggaaaaaattgaaaattgaaaaaaagtaaaatctatgtatgtaagaatcattggttcttaagaaagttgttcgattttgagaaacataaagatagagggtttctcgactaacagatacctgttatcagcttgcctgttacatactatgtaacgaatccagtataccttttactgtatgagtaatcatggtaagtaagtaacatcacgatagcaagttaaatatatataaataaatatgtaataattaaaaggtaaccatattcgctaacaaagtttttgtgtagacaacatctttagcaaggacttttcaagtgcttaaacacctgataccatcattacaagctcaaaaaaaatttaattcaagcgcactgtcaaaccaggccacaaaaaaaaatacgagaaatataagagtaataataaacaaatgataaaacggaaagtttcgcattacaaaaatatatatttaagcctgagctcggttccctcgcataaatacgcccactcagatgcagaagaagatgattatgatgatgatgattatctaatgtttgcacagtaaaaacgaaatttaatttctccggtatgaaggctataaaaatatatatgtacgagtatgtgccacatattcagctcaacaattttttggggtagatgtaagtgagatagatgaaaaaaaaacacgaccatttccggacgactgtctctccatctctttcggctactcgcgccgcctctctttcgcacatttatcataaatataccgtcattcggatttgcatttcatggagtgacacaatggcacagtggtttctggtttctggttgattactgtccagcacacacactcctaatcctaactaatccctgaaatatttacttttaattaacaattaaattctagaatatctgcataatatttgtgtacctttatcacattgtttccactattaatcccacatcacacatagctggccattctccacagtaaacttttgcatgggtatgtgttttggccaacttttattttcatacccgtagcatatttattcagcatgcgttcatatggttggtagcttaaattacggctcgttgaaaacttttcacttggcgcatgcatagtggaaaaaaaaagtaaaaaacatcatctggcaaatgtttgcaatttttttttaatacgccccctgaaagcgtcgaattttgtggggtcttgacaaaatgttacccttgactgcgaaattcgcccggagtattcataaatattgacattggcgtcgtgggattttcgtgaatttataaccagccagaaggatgatttccatttgataactgagggaataacttacaaacagttgtggagtggcaaaggctttccaacgaatcaatcattttagacgggcaaacgtacatacctgaaaaacaaacgaacagaaaggatgaatatatagagtgagaattcgagtgtaaataatcatttatgcattgcgagtgtgtaaacaaaatttttgtctgggcaactaatcaacagcacagttcgaacaactttttcaatatgtttgcattgccaagtgttgtgaaaagggaaattccacagacccagacgagagttgttcttagacctaattcaaattgtatgtaacaaaggacattggtaaatacagacaatgttgatcccccccgcacctcttcgatcggcaattgtaaaacaaaagcctaacaatttgtacattttggtcagcttgaatgaactttacttaaaagtttcggacaaatattgaattaaaatgcaggcagactaagaactccaaatacttcattcattcacattcaattgcacttttatgcgaaaaatgagtggtgggttggtgcggggtgagggggggttagaggcaccctggggatataaaattgtttgcagtatttatgatgcatttggcattttaattaaattctttgcccatggcttgatgcgctacagtggaagccatttattctgtgttccatcccacataatacactcttctttcactgcaggcccgtataaactgcgctatttattgcataattaatgtcgattttttgtgtttattatgtttgccttcatcatctgcgtgatgtttggaaaacgcaaatttttgtaaacagcaaaagtaattgaaagtaataattttggtattttggccatctggtttgattaacaagaaagcctacgaaaaaattccaaactaaacagtagggaaattagctctttaagttaatcaatgtcatttattaactcaatataacaaatcagtgcattgattgaaaaaaacgaccttgtgaacttgtactaatagtttagtttagtttacataagactgtcatttcaaatccctcattttaaagggttaagtgtgaaaacaataccctcgttaagcatcaataccatttaatcgagcgctcaacccgataacatacataaaagccgctcctgagctcgcacatggcttattaattagccataaattgaaccaaccgaggacacaaggtccaggaaccggcgcacagccccttaatatcatcgcaatggatggacaatagatgctcattgtttggctcacatcagttcagttcagttgagttcggtttggtttggtttgggattggtttggttgggtttcctgtaaccggagcacaatcctttcaaactaattgcaagacaaaacaaaccatttacaaaatgcttaagcgacacaaccgcaaacatgagaatatgagacgaagacgtccacccagccgtttcccttttgccattcgagtcccagaactgggggaattatctaagaaggcacattatctaagcctatttcctcattaactcttggttgtgtgggagtcatacttcttagccagtttcgccccattccccctccccagagacgacccccttttgtaatatcactctcggcttcgtggctgctcctcttactttcaaacttggcccgacttgactgagtgcagttctatgggcttttgaccgtctcttgtgcttaaagttgtgcgctttttcatggccaagaggagccgaaaagtatgaaaaaaaaataagataaaagcaggggagaggatgaaaaagccagaggtggaccagatattatgacacatggaatagttaaacagtatttaaagaagagggcggcgcttacaagcagcttaaaatgtcacatactcccattactgcttctattgtatacactgaaaacaatctctaatataagcgaagtatgtatactcattcttcatctaacaaagatcatcagataatcgaactttcaaccaactttttcttgcagtgtccttcgcagtgcacatttttataccccactcacacaattgcattagtgggcgagcgcaggccaacagtgtggcacatagcactcattagcatatgccacaagtcagtctgggattgtgttttttattgcaggacagggagacagagacagagacagagagggatgagtgaaaagacagagacagaataccggggctttgtacttcgctttggcatctggaaaagaattttttcttgtctgtctgtcaaacttgttgcccgccccctacccacctaaattatccacacaattaaaatgtttaaacttgtttactcctcacaaaaaacataaaacacacaaccatatttcaaggcacgaattggttgaaatgaatgcaaacattgaaatcacacgaagagcaaataaattttcaccgaacagctgctgtaaattatttgcgattaattgggcgtgcaattaaaatgcgaaataaatgctcaacacaaaaaaaaaagacaaacggagaatttaatcaaatagacatggctgtgcatagagcaaaactcaaatacgtaaaattcagcaaatatttatttcaactttcagcaatgcatcgctcttcatttgccgaagccagaaaagtatgcaacatatgcagttgcaaccaaatgtggcataaaatgcaatcccctcccgacggtattaacattgcaataaaagcaaaaacaccgattgcaaatcatgcatatttgcattgattttgtccattgcattgttgcttgtatgccaccgatttgtgaaatgcacaaaaaccggagtaaatattaaacaaaaaatgcagcataaaatgcaataaaatgaaacattccattgttttaataacaattgcctggggataatatgcaacaacatgcaacacttatataagtaacgaatttaaattttactaaagatcaaaggctaaggaaattcatttgccacacaccaaattcagaaagtagtgccaaacaaatcttaaactggcacaaacatcttcaaagagctaatgaatacatctgaaatgattttcaattggtttgcaatacataaatgcttttggcgctcggaagccaaatttcaaactaatcaaaaacaaatcccaaacaattcacggcgaacagaaaaacaatccgcaatctaggtcagttctggaatttgtattttgtttttatattgtacatatatatatcgcattttaatatcgcaggtatttggaccatgaaatacctacgaaatgccgcaaagcattgattttccttttatatactgcccgtttattcgtgggattttccatggtttttccgacgcacaagacaccgtaattgaatcattgggtatataacaaaagttaaacgcaagcccaccgctgcttgcttgacaatcgattggcgtggaaaaaccctcggaaaagcctcgattcgacatgcaaagctcacatttccccacgaggtcacaccttatccattaaccatctatttttttgttttatattctgctccacctgcgcggtaattaaaaaaaaggggaaagcgaatgcataagccgtttaatatttcaacaaaaatgtggtgccttagcactaccaatattggtattattgaaacttggcactttttaattctgtgaaaatgcaaacataaacaaaagcaatttgctttatcaatattcatgaacgtattgcctcctatcgaatgaccatgaatatgcaataaatgcttagcaaccaaatgcaatttgcaaacgcgacgcacagccgttgcaactatgtatgtatgtatgtcgaatcaagtaataaatggttggaaaatgcacttcgcccaatgcgcattagtgaaaaagtttgccgaatgggaaaaaccaaaggtatctgtcgccatttgcacctgatatgtatgtgtcgcccttcttcagttcttcagttttcccgcgccctttgaacgtgccgaattgtaaatggattcttgtcattttcctcctatctccagttgccttcttaccacccaacacccgcccctcccccttttcccagtccgtggaaattgaaatgtgcaatcggaatccagtgctccaaaagacaaatggcgaatgaagttcgcaaaacgtgtgtatatttgaaagtgagaccgcgttaacaagtaatttgacttgcaatggatcattttctgaatatgggaatcaacgtagcaataaatgcaattaattaaggaatatttgtagtattaatttaatccaattatttttgcagcttagtagagtatgttttattaggcaaacaacgcaattcacaaatatatttataattaatatcggaaaataacttgacatttcatatcgttaaagtgtcacatgttgttttaatcaaaatttgaaaagttaactttgtgctattctacatatttaatgtgcgaaactttttccatttagccgtcaaactttcaacccaatcacatgcacaattttacccgttcaaggaagctcttaaagtttcggtttttaccatttcccattttcaggcgacattttaactgcatctaggaacagaaacagcagcagcagcagcatcaacgtaataaagttgaaacaaagcctcggctgtcgatagtgaaatgggtcgtcataaggcagattcctggctggcagggttgccaggctgcccgcagtcagtcagccggcgctgtgttatcgctgccatttgtgcgcaaaagttctacgaactcttcgtcctacatcttctgcagcccctctgtcatccacaaaccagctccagcacctccgtcgcctattttttttgtggtcctcccgtactcatgactttctatgccaacgacgttcgctgtcaaaaaatcttcaattaaacgcaagcacaaaagctgttgcaacaaaaaaaaaaaaaaaaacaaaaaaaatatgcccatacaaaggggaaaaaaaggtggggacagaatcagaagaaagagtgcagaaatgaggacgttctgagggaaagcacatggcataaatgtgcactgcaagaaatatatagtatgaaatactaataattgtatgaaatactcagatgaaagttcggaccttaactagcttataaagaatttacatggttatagtagaagagctatagtatagttcatcgcttcatttctcccagtgcacccttgtcaaagagcgcagatgggaggtgtttgcggttgcggattgccagctgaagttggagaacgcaatggagacggctgcattcaacagcagcagcgagcggtgcggcatggagctccaaatgagaccgagcgccactcgcatagcaagacaatgatgtcagcggcagtgcgccgagaccagaaacaacaggagcagaccattccagggaacacccggcgcgggcggatcatgcaggccacgagcagacgtggccagaatcaacgtccacatgccgcttgccacatggcaaatgactaaggccagggatttttcgaacatggccgagaacgcgaaacccttgtgagggattccccatactgcaggcaaccacgtttcctaggcatccatttactcagcaaactcaacaggtttgtttctgcttaataaagtgatttacgtagtctgatattagagcatttttggttgttatattaattctttactcaaatggttatctatgcatttcagatagaaatggtgttttatagggtatccagggaagtgtaatgcccaaagcactggacctcagcttctgccggcgacactctctcaatgcaaagttggctcaacaggactcccaactgataaggaacgaaattaactatcgccctacgtcctttaccctcttttccgtatcctttcggacttttcatttcgcatcgacttgtggcatgtgggctagcagtctgctgccgatttctccctcggtggtgctccaaccttatcatttcgcactcgttttacgaccataatttgatctatctgagggctgcagctcaacacttttgcgtttcagaaaactgcatctcaaaaggcacgcggcagtccttttgaacttttatctcaaaggaaaacttgcgatttactttgtggacaaagaagatatcacatccaaaagggggataggtagcaaaactttaagaagtagtgacatggctcaaaacattttgatcattttgtcaaacaaaagtggtggtttatttcgaacagacgaatgttgtttaccattgcggggttgaggaaatgcacccccacgcctgaaactatgcactgacattttagaaaattggaattcccagccatggacaaactcaaagtaaatatgtaactcggccaaacggcaaaaatggcacaaaacgtgctaaaagtgaaatacattcattcaaagaaacaaagaaacaaaaaaaaaaaacaccgatgggctgagagcggaacagatgaacgaggacaacatgcaggacatgcaaacattttggatttatagaatgggtagcgtatgtacacttagattcggaattggaacttgaaaatatatatgtatagctaaggattaagcaaggtgtttaagatccatactaatctaatatttctattggaaaactaagaaataaatcgtgattttattttcttgtaccatttccccataaagcgtagtactttgccgcatccttacacttacgacacgtaacgtgcgcatgcaaaatgaatatgcaaaatcgttgttcatttattgatcgaagcttcttttacaatgcattccgctaacattcgtcacccatacgaattgcacttaattgaaacgatcgcaatcgccaatcgatttatggtctatcgtacgattgacattgaaatgccaaaatagaccattttcgcagctgcccaacgagcccttactgtacttccggtttgtgccactactgtgcatgccaatcgagatggtattataaaaacgagaagatatgttcgtgtgcatataaggaattagccggccaagtacgtggcacatggggctccatttcccaattgggactggcccacaacattgtcgccacttttgttgccgctgtgttattgctgttggcaaataaagctaagtaggcaagcacatgattaaaaatgcacacgcacacacactcgagtgtccagaaaaaagaaaaaaaaaaggggggaaaacatgaaacgcggtcccgctggtcattaaacccttctcaatgcccacgagaagcccaacgccaagcgaaattgaacctttgagaagccagaagaatggagctccacaccccaaaaacttggggcggtcagggtttatcgaaattcgcagtttacttagtctagaaaaatgtgattcatcccctgctttgccatctaatgccttcaatcgaaaatccgattgcctcgcccatggaattagaataattgaaatcatcgcattactttggaatgttcgataagcagtcaataaattgacagaggccacttgaatttctttaaagaaaaagcatgactaaatttacttgagtttcagttaaatctaaaaactaagaattatacaattcaaactttagtgcaagataaacatttaaagggaaaacatgcccctctttagctgtcaacaaagtgaatattaagcaaatcccgatttccaatcagcccttcaattgttattttagccactaaactcggatatctgggccacttgggcagcgttgattgattgcaggtagcccatttcacatttcaaattccacatttccccacattttcatggggctccctgttcattgttttcgtagctcattccggcagatttggatcacacggtgatgtaagtatacaaaatgcagatttattacatgtttagtcagcttggtcgaaagaaaaaaagaaaaaaaaaaaaacaggagccacacgggaaaaaaccttaaatcccatttactcccccaactaattacgaatttaaatttattcaggcacaaaaacaaaaacaacacggcatgttccttccattcaaagtgcataacaaatgtgagttcatctgtctgtctctctctatgtatgtatgtcctttctactcccacccacgcacacacacacacactcacacatacttttggtttatgtttgcatactttgcggttctgggacttccgtaagccgagataaaaacaaaaaaaaatgctacaaaaaactataggggctgatgaaaaatttacataaattacgacagatttgaccgaagctgaaatgaaatactctagcaaaacgaaattatattcaatccaatttgaaataaacatcttgaagataaagatatctttaatagatctgcaggataagatacaattaagttattttttaatttgctgatacgtaaaattaagttaatacaagttttaaaaaatatttccaaggttttttcggtagtaaactaacttacatagaaaggtgtacaccgcttactttaaaattcaaatttgaattatacttataattttaggtaagagaaacttcaccgcagacataaatcaagggatttgcgtgaaacaaatttagctaccaaagtttggcaacagcaacgatgtcagttgtgagtgttttaaaccgcagataaaaacaagccgactgagagtgatttatctatccactgccactgagttagttgattaatttttctgaaatctcaaatcaatttagcctcaagtgcagccaacagcaaactgctgatggtgttcttcccatctttttgttgttaacagcccccgtcccccctttttttttagctccaacggaagtcaagtagcaacaaataaaggtggaaaaaaaatcagtcaacagtcattggcccatgggtaatttgaaatgcaaacattttgctcctctcttggccagcattggacaacttccttttggtttggcctgccgcacagctgctgccaagtgagaattgttggttgttcgagcaaaaacgagcgtatgaaaaaaaaaaaagaagtaatgaaaatgtaagcaacactgcaaatacacgctatatagggctatatacacacaccgactatcagcagcgacaacaaagcgaacgtggaaaattgaaaaatgtgaaaaggcagccccagcaagcagcgcgcccagtgcaaaaaaaaaccaaaaagaaaaaaaaggaaaaagaatgaggaaaattgtgtgagccagggcaaaagcaaacaacatttgaaaaatattacgagtatttgcatatgaaacagcaagcaggttgaggggtaaaaaacgccgcaggctttttaaagggagcaaaatacacggaaagaaacgtttaagtataagcttcaagtccagatgttagtccttcataaggagctacctattccaatcaagaggatactcattaaatggccaagatatcttatctttttatcattaccttcggttacatttttgtttttactagtactcaatggttttttgcagtgcacttaagagaagtaaggatagggagctagcgtcatccacgcagctcatcgtgtggcaaagccaaagcaaaataccaaacgctgggtctccaccccaccagctacccaaccattcgccacccacttactcccacaaactcctctcgtccacgcaaccagcgtaaaattcaaagcaaggcggcaactctggcaagaaaaagaacaaaatcttgctcctatttcgggcgtaaatgaaaatgcaaatttactttgagccgggtgtcgccagcgggatatctacaaggtacatcatataataaacttttttgcaggccaccaaaagttgattagccaaggccaaagtcaaatatacatgaaattggcagacatagaagcatgcaaatcatttatgtcgcaggtttcttggaataatataattattcttttgacattagacaaatttcctagaatatctcatcaaaaatggtagtcagattataaataacacattaagaaaatcataggaaaatgcaatagagaaaccgattgtcaatgtaactacattacaaaataatgctatcagttgatcattcttatttaagcaatcaaacatacttaagcataagttatcttcctttttaatctcgaaaccacgaatatttttgcaagttagcatttccgagttccaagcaccgaatgttgctaatcagcaattgatttgcattagtcattatattacatacacaactaagtgatctatggatcagttttagtgagtcatcagcaatcggatagacgatacccaaatgccaacaccacttgatatttgcatacgtgacccaatcgatgaaaatcgtggggcaagaggagaggcaaacggaaggggcacagagaaagcaggcaacaaatgcgattaaacttaaattaaaatatgacaaataagcataatttaatggctcgcacactgatgtaacgctcgttgataacaattaaagcgtcaatgtcgagggcaaaaacaacaaaacagcaccaaaaaccaaaaaccaaaaatggccagcaaacagtagtggccaaaagtcaaaggcatgaattatgcatgcagtttttcagcggatttgcttaaattttaatggccaacatcagccgcaaataccgtgaaataatagaacatttttagaaaatttgcgctgacctaacattaaaaaacacattcatgggttccacaaataatttatgcgattttattaaattatttaacgttggccgtaacaaatatttacaattgatcgaaaagcaaacgtcagcctagcgaaatataatgcataatttagtttgtaaatgttgttattattcacgaattttcagctaacaatctaattagcttgtgatggaaataggagtgtatattgattaatttccattgaattaaatttgaaatattttttcccaatgtttcacaagctaatttgatttgccttgcgattgagtagtcatgaattagtataatcttcgcagaaatatgtattttattacgaggaatgtctgtatgttctctggtgcaaatcattttcactgctgccatattttttatattgtccaatgacctgcgaaatgcgaaacatttgccggctatcagttgctatatggctctgatgctccccaacatttgagcacttgaaacttgagtcgtgtcaataaacccaaaaagccaaaaatcaaagagcagccaaacggagcaaaacacagcagctgtcagaagtgaaaaggggagtttagtttcgtagggggagggggggaggggcagttgagttttcgcaaactttttggggaactgcaatctgttgccgcaacttcagttgcaacttgcccgcttttcggagtgtaacgagttttaggtttcccccaacgttcctgagtcgatccgtccaatgacaatggcactttgggaggactccaaatgccgggaatgccccagaaattgaatcagaaaaagaccaaaggccaaaagcaaccatttaatattgcccccagtaactatatgattgtatagaaattttttttttataaaataaaaaaacagggaaagtcccagtgttggcaaattctgcagaattgaatgcacctcatatcaattttgcttcattcttgctatcaattaaagttcatattcgtggaatctgtcgcacaaatagcaatgagatcatttaaatgaaataaacaccattacctataatttggaatttaatcgccaggcgagttcaactgacctcagtccggggattatcgtagatcagtcacatcggaacgcgattcgttctttgttccagcgattatttacgactctgtataatagcattttccttatcaaatcggaaactggcagaagaaaaaaaaaaacagattcactgcgaactgagagtgggcgtcaactctggccaaggtgagattattaatcttatggctgatgtgcgcccggaaaatagctcgagatatttgcgcgatattattcacatattttcaaaacacttaattaccaaaaatttttccaaaaataagccaataataaaaattttacggctcgaaagctagagcttaaattgtataattgcgtttgaaatttggctggaaagaggtgtataaattttcgtgaaatatattttcctgcccaggcgtataaacaaatctgcttttgtgtttgtttctgccgcttttccccccactcccctttccctaccgcacgattaccgtgctgcggtgtgtgtgtgcaagaatttgcgtcggtttttgtggccattgcgtgggcgttccaaaacacacaatagggttgtaaaattgctccaaaagctagcaaactttgtggaaaaactattcgaagctctaatacccctaaaataaattcataattatttaattctagtgaagtttataatacttacatatttaacagtcggttatatgtacatatgcatatatttataaaaaatcctacataaacacaattctttggaaaaatgtatctgatgacaaaactgtatcgacgagagtatttcaaagatactacatacataggggtaaaaggtgagagttttcgttttggaaagggaactgaaaacagaaatcgaacagtcggctggaatgtgtgcaagtccattgaaaactcatcgacaacatcaaacaaacaacaataaaagcggaaaagcccaacgaaaaacgcataattatgaaagtatgcgaagcgcgtgggcgaacgggttgatgaagatggcggtgcaaggcggaggtgaaagatatgaagaggcggcagaatagggggcggggcagctactaactgggctcagttgtcatttgacttttgcgcgggggcggttaactctttttcaagcgcttttctgtcggcttttccgtgttaatgatatgcaaacaaacacagaaaaaaaggaaactcaaaacgcacagggaaaagtcaaaggcaacaacaaactagacaggaagtacgcgcaatatacaaaaacacagttgcgaataagggggagaaagggagaatccgagaggaagctaaagaaatcaacagaatattttgcgcgcgatttgcgtcaatgaaaattgaaatggcaaacggaaaaaaaggggagacgaggtggggataaagtacggcagtaggcgcaatcggtattggcacgtcctccatgttatttttcgcaattaaaatcgggggaaaatattccgcacgggggtggggccccaaataaacaaaactcaactgcgaattatcaaaacgttgagtgcgccacatgaccccatcgaaaaataaaaaatctatctttagtaatctgataataccctaaccaaacaactcgtatctaaaataaactctacgaacccaaagttttggatagtatatgatgagttaatgctgaatttaattttatgtacttttagcactattatataataaatatatgcatattttaggacatcctgaagaaacagcaccccccaaatgtaataccctttcataaacaacaagaacacaagaatgaagaggaagcgcaactaaatcagcaacagtgggacacacaaagaggccaataaaaatgaaaacaaaattgtaaaatccaataaaacagcacacgcacattacagcgcggaagaggtgtgcgtaagaggagatgggcggagaagaagacacagaggaagagttgagctaagagtgggagtagatggcaagaagcagattccaccgtacgcacatacatatgtatgtacacgttgttcgtcagtaaaccgcaaaacgagacaagacgaagtcgaacatatgaaacaacaaacgcaacaacaaaagcaacagcacaaaaacaacaatgaaaagcggcaactacgcatgtttattgacattgccttacactacccatctctttctgtgtctcagttgaacctctcgttcactctcttgcactctctctttctttcacacagaacatggggcggttgctgttgttgttgctgtcgcctgccggcctatgtatgtatgtatgtattcattaatgagacggtgtctgtgtgtttgcgctgtttacctcagcagacatgcaacatacaatcaaacatacatacagacagacataccaacaaacgccgcatcagcagaaactgaaatctcgaaatcatacgggccaagaaacccaaagagacggaaactcagccaacgaccaaagacccagcccaaaagactcgagacgaggtcgcgagagtccccttccgaaaccgaaacactggcctacagggggtccggtccgtttcgagccgagaatcccctataatggcactcgtaattaagggatccatcagtcactctctgaaaacctgtccaagacgctctctcgtgtttgcttttcaatgactaaatcgcacttaattggtaattgcttttaaactccaatcaccttaaagaaaatttgttttaatatttattgtcaaactaacaaaaggcttatataatttcactaaaatccctttaaatttattataaatttcagatgtaacctgatgtttaaacacattttttggtaaaccaatttggccgccaattataaacaatacacccaacctgataagataacatccattcccacctaatttgttgcacagtgtagacaaacttcactggcggagttttcgaactccgtacgtttttgtattctgtctcttcttcttcaaagttgtctgctgcctacacacacacgcacgcactcacacatacttttacatgccgccagcgcacaaacattttttatgctggtttctacttcttctttgacttttcgcttcatttacaatttacaacgaattctctttccctctctttgcactttgctcttatttggaggctctcttttattttggtttatgtagcaaatgtttgtgcttgtgatttatttgcgctaagccaaaggttgttattttaattaaattgtatttttgatcaagtgatagcgaaaaaatgctggaaatttattcaaaatgtttttgttacaacaaaattacaagtgcttcccctctctttcgctatgtttttaccactctcttgtgtatctctctctctcttttccacatgatcttgtttgcctgccttaattggcaactgacgcagattacttgtggggattttcaattgaacttagattaccgcaattaatctgctgcttatgagctcatgtgacatttaataaaaaatatttaaaatgacattattcgttatatacgataactttttgacattgtcaccaagtcgccatttgataattgcattgtttatatgcccgttactggtggattgaagggtatactacattcgttgaatagtatgtaacgattataagaactctgtatgcatataaatctagcgctttactacctgagtgaccggtatagtcgattgttattgaacaactcacagccgatacatattttccactcaacatacaacatattgggataaatgattacaactttaagggtatctaaacttcgttttttgcctcttcgtgtaaacataatttacagaaaggtgagacacgacaaaaggcgaaaaggtgggaggaggaatagaaagagacgcagcgagcaattgcaagtgcataacaacaacaacatgagacttgaatgctgatgcaaaggcaaatgaaaaaagacacacgtgaataataattgaaaaaaatgtaaaccgcatatggtggaaaccaggggaagcgagaggggttgataatgaacatatgggcaaggtaatgaacaaagattgaatgaaatgaatgagtggaggagaagtaaactggtatgtgtacggaaaataaatcgtaatttgaataaaattgtgggatgggcttctaagcaagaatcaaagccaaataataatatagattttaaaagattatataatctaagaaataaaaatgtaaatatttaaggataaacaatttaaagaaatatgcaaataaagaatctttgcgtttcagcaactttaatgattcaacttggattcagagcaacgatcaaatctgcaactcaaataaaaccttaaaaaaatcttttattcaaatttccttcaccatctacagcggacaaaaatcggaatttgattacccagttcaaggaagtgtttgttgtttaggtagccagatccacagaatcgatcgaatggaaaacccaatatcggcagaaccttatcgctgtctgtcgccgtctggcaatgtgaatcggtattccaagaaaggaaaataaacacaaacagcaggcagttggtagggatgcggaaaacgggagggagcaatgcaaaaggaggcgtggtacattgggtttccacacctttgaggtgagaggatgcaaccgagtgttatcccttactaacttccacacttaattacagttacattcaaaaaaatgctactacctttatatcctaattgttatattaaaatgtttaaaaaaaaaaaattaaaatgtttttacgctcgtattaagggacattaggatatggccatagataatggatttatgccaactttgtaaatgaggcaacagctagcaacggaaaatagatagtgtggcacttgcagcagtcacaaccattaaacttgcaccctctttccggtgaagttatagccatctctcgccgtgctgctcatcaattttccgggcacgttctcaaaatgttttcgacgacagggaaaggagctacgaaggagccgaggaggggggcataaccacgaatgccaattttggcaaaaacaagtgacaaacaccaaaaacaggacacaagatggaaggaacggcaaaaacaagattacagactgctttagatgggtgagaggggcgggcgggcgtttgcgaaggggtaaaaggccatcgcactatttatgtgcaagtagtgtgtgtagaaatttttcgggccaataagtcacacaccaataaaggcaaacaaaccaacaggcaagcgaacaaacaaacaaacaaacaggcagtgaaagaggcaaacacagccatcgaaattggcaatagccggatgcttttgttggcaacagacgatgccaaagatcatcgtgaccagtagcagaagttgtatcaaaaactggcccagaacccaggcccaaatcaagaagtgctttccagtgatgagctgtggaaaatgcaactgtaaactctttgcggaaaatgaagaaaactggctgttaaatttttaccgtatctcaatagaacttctaatttcggataattaactaacaagaaagcacggaatgtaataaatgtgctaaattacataaaatacttggtgaagataagaaggagacattaatattgccctttgggcttgcggcctgattcattagctggttttattatcagccaataaatcttaatgtgagtaattgcgctagataacaagaaaagctgataagtaatccaactcaagtcttcaaattagtttttagaatttaagtgaaattatgcagtttaaatccaacttttgccttcactaatacataaatgtcaacttggcaattgttttaagcaatttacacaacttgcccattaatttaaccggttttgctaagttaacaccctttaaaagcagagtttacaatcggtaaatctaaattaaactactcaattaatgacaaaaatactgtgtgatgagtggaaaacaccaaagaggccagtttcgaatctgtaaacaattttcaaaacagcacattcagacaccaaatgatctcattgggcagagcaggtgattaaagaaagcacgagagacgaatagaaaggaattcgtcggaaattgaatcatctctatatctccgagtagcattccccatatgaacgtggcggcatatctgtttctgtggcggcactcatctctcatcgctaatgggtaacagtcgacaacatcgatggatggctggatgcgatgcgttggagtcgatgaccatttcggatttgcagccttatttgaccagcagccgcctcgtcctctatatcgatatctatatctatgtataactatctatatatatatattgcacagtgccgatgtctgtgcgtctagttcactgccatatttatgcgttcgcaatgcagacgtttttaatgtcttttctacaagaagccaaggagtggagcaatggagccagaagcttacggcttacattcatcgggacatggaggcctttcctcttcattatctgcagccacaaattgcattcagtgcaatgccttggagattgaccatgcccatgcccgttgcccgtcaagcctctgccacatggtacatgggtatatgacacatgtatccaccttggggctgccgaattttgcatgataagtgcaacaacaagaacaacaagaacaacagaaacagcattggacaaccgcaaaccgcaaaaacaactgaagtgaacaagaaatcgaaccgaacttggagttccgaaccctctcaaggtggcgaaaattgggagttcggattgctgattgaatctgcctcgatttaattggtaagcagttacaagcagcaatgggcttacgcaactatgcttttgaaaggggccacttaaatgctccactttgtgcccaaactggtgggcatgtgtatgtcgttacaaaaggatagcaatgtctaataatgacccattcgtaattaatcaagctgtgtgacgtattaatatgaataagcattcaatggccattaaagccacattaatattatcacaaagtcggctaaatttcggttggccaggtaaacttgaagttggccattgattttggcttatctcaacgtaaactaataacatttggtagtttcgggtgtaatttttgagatcttacctgatcttgagcgtgggtggcggctaccagaactccgatgagaattgcgactagcaatagcggctctacggaaatcttctgctttggcttcattttccccgttggtttcttctgcggttgctgttgttgtgatttcagctaatggcttccagttttgtttattgatttaaagattagaactggcggcggcacacatatataaatatatatattgagctatatatatttcttgcagctttttaaactggtttcacactagaagaacgctgtttaaatacacacatgaaactatgattattatgattatttattttccagacacacactattcccgatgtgttatcaatcgaattgcaaaacaaaagagatagcgttggttggagagacagggtattaattaagcattacacactgtaaaattaacaacaatttatcgtatgcgcgcgcggctaaaatcaaagaaaggaagtagaagagcgggggtaataaacaaaacgtttacgcagagagaaaaacacaaaaataaagaggagacaacagcgcaactactgtgtgtattggtgtgtgtgtgggtgttttaatcgaattcgatttttgtaatttataattttaaaaacataaaatttaacaaatttttcgtataatacactgtattttccttttgtttttctgtttttccctttgaatccagagatttttcaacgaaaaaaaacacgaccgcccaccactacaactacaccatacgcattcgtattcgctctccgtctcctctcgcgccctctctttcccactaacgccgctatggcggcttctttatgtgtctcttttctcctctgcttcgcctgcctcttcttttcgtatctttctgcccgttgttttgctgcgtttattttcgttgcatttatttttgctattttgcgcaccttttcctctccgtatttacaaaattgcactcgcgattcttttcggggatgtacaaatttctttacactcgagtgccgaccaaacaacagacacgaaatcgcgctaaaatccggacgtaaccgtgccttcttcgctccgtaaaattttttcgaatgacttggccaatgttaccagatgcagaaacgactcaattatccaagctgtgcatttcctaaaaaataccaattcttatgcttagctgggtgatgacttaaatagacactccgaaacgcgtactcatttaaaatttatatatttctgttacaatttcgcgattaaaaatgttactttaacatcttgaatttttttggttttattcttatgttactgtttgtttacatgatttgcttaagatattattatagaattattaaatgtttgataggcaaataataattcaatcaaatataattaacattttgaattcatttaaatcggcaagatttcatatttaaatgcttatagtatttttcttgagctaagctgcggttacactgatttacactgtttcggttgctcgtacgttcactgttattctgtgatactgttagttcagttgtacaacccaacatttttttaaaaacacagactggcggctaaaatttcccagacccaatgttaatagatttgtttgaattcatacgcattaatattgaacaattgaagcattcatattcgtgtaggacccgacagcttttacctattattattttcaaatttgaaaaggtgttacggtttatgttaacattgtaacagtaacagattatagagaaagatagaacgagatagcatcataaaatactaaatgagaaaggtgctaatttgacttaattttttttgtctttgcaacactgtttccatggctatttttaggcagtttcttacaatgtttttcgtcaccgagtttttgttaataaattagcgagaagaaaacaaagtaaataaggtgattgcaggtgcttaatattgcttattaaaggcgaatacgtccttgttttcctcattgccttgttatgactatattcgaggtgtgaaaaaggtatgaatcacaagaccgttttttctccacatctttttgtgttgttttttctc

SEQ ID NO: 20471 - DNA, 1967 bp, DROSOPHILA
aagaaggcacggttacgtccggattttagcgcgatttcgtgtctgttgtttggtcggcactcgagtgtaaagaaatttgtacatccccgaaaagaatcgcgagtgcaattttgtaaatacggagaggaaaagtttcatgtgtgtatttaaacagcgttcttctagtgtgaaaccagtttaaaaagctgcaagaaatatatatagctcaatatatatatttatatatgtgtgccgccgccagttctaatctttaaatcaataaacaaaactggaagccattagctgaaatcacaacaacagcaaccgcagaagaaaccaacggggaaaatgaagccaaagcagaagatttccgtagagccgctattgctagtcgcaattctcatcggagttctggtagccgccacccacgctcaagatcagaaatcggtgaaaccatcggcggcagcgccatcagcagcagcttctcggccccatgatgaaatctatatcgacgatgatagcatcgagggatccggcggacgcggcggtatacacgaagatctagagaaagatccggactattctggctccggctttggacccgatgacgaggacgccgaacccgatcagcattcgcacagttcgcacaacacgcgcatctcgcagagcagcaactccggcataaacacagctcatacaccaacacaaacctcatccacaatcccaacaacatcgacttcgacaccaatgccgacaacaacccccacagcgacaacccccgcatccaccacaacggcggcagcaacccagatatcgtcctttgccaatagcagtagcaccaccaccaccacgttggctcccacgattcccgcagaaccgcagcaaccgctgttcccgccattcgacaaggatctggatacggagtccagcggcgatggcatcgatgctgatgctgaggatgacgatgaggacgatggcgacgataaggactatgactataacaaggagctggacaaagaaatcgacatcgatggtcccgagccgggacatctgccgccagttgtccatcataataccgttgaaactggtcacatacccactacggatgaaatcgatgtggatggcggcgatgaggatgacaatggggatagcgacatcgatggtccgcggatcggtggcaacgatggagatattacagagcgcggaccgggtgcaggtggcagcaacgtgcacgaattggaccccaatacgaacgtgaatagccagccctccgacacaaagggcatcgatcacaggcccaacggcaacgaagtggtcatcatgagcgaggacgatcgcacgtcgagcttcttctcgcagcccggaattctggctgctgtcattggcggtgccgtcgttggcctgctctgcgccatactcgtggtcatgttcatcgtgtaccgcatgaggaaaaaggacgagggatcctatgcgctggacgagccaaagagatcgccggccaacaattcgtatgcgaaaaatgcgaataaccgcgagttctacgcctgagataatggcacgtcgcgcaggtattaagttgaccacaagtgcaggaacaaagtgtgcgtaaggacggaacggtgtgcgtatgactggacgaaggcggagcgactgggtttggtttggctcaactgaatacactgtgcggagtggtgggggtgcagcatcatcggcaaaccactgaaacaaggattaatcatccgcagcagcagctacaaaactaacacaaaaacaaatgaaaatttcaaacgttttcaaacacacacaatttttcgtgaggggtaaattaaattaaaacaaaacaagaaaagaacacaaatcggcaatataataacgaggaaaaacaaaaaaaaaaaaaggaaaacttacctgtaagttaatgcaaaatacacactctgcgtatgtgggtgtgtgtacgcgacttttctatttaagtaagttttaagcga

SEQ ID NO: 20472 - protein, 399 aa, DROSOPHILA
MKPKQKISVEPLLLVAILIGVLVAATHAQDQKSVKPSAAAPSAAASRPHDEIYIDDDSIEGSGGRGGIHEDLEKDPDYSGSGFGPDDEDAEPDQHSHSSHNTRISQSSNSGINTAHTPTQTSSTIPTTSTSTPMPTTTPTATTPASTTTAAATQISSFANSSSTTTTTLAPTIPAEPQQPLFPPFDKDLDTESSGDGIDADAEDDDEDDGDDKDYDYNKELDKEIDIDGPEPGHLPPVVHHNTVETGHIPTTDEIDVDGGDEDDNGDSDIDGPRIGGNDGDITERGPGAGGSNVHELDPNTNVNSQPSDTKGIDHRPNGNEVVIMSEDDRTSSFFSQPGILAAVIGGAVVGLLCAILVVMFIVYRMRKKDEGSYALDEPKRSPANNSYAKNANNREFYA

SEQ ID NO: 20473 - DNA, 4883 bp, DROSOPHILA
cgacaatttcatttcaagtccacgaatacatgtacattcgaaatatgtatattttggactatttgaaaaatgattgatgattggtggaaacgagtgttcttatcgccgcctattcgatttccagctcccctaaatttacgcgatagtgccaatcaaacgctgccccaatcttagtacttcctggaatccccagttagaaaggcacaatactgctcatttgctcgtgggccgcattttttattttattttattttatttttttttgcaatccctctaatcatatcgcgcttagtcactagtcacaatgaacgagcgaacggccagcgacaaatggaaacatttgcaaacacacaatatcattcggatatcgatgggctcacacatatagttatgggtgttgtttaaatgatataaatacagatggatacagaccttatccgcatggctggccgaaagttctccttcccccgaaaataaaatgccaaggcaagaacgataaacactcgatatgatgtgcaccaattgtaatcaaatcgttgccatttgaacccgctcaattgctttcacaagttatgcgggctttatggaaaaaaatgatggaatacggcggagctgaatggccgaatgtgtctggctgctggttatgtgatcaatagttttatgggccgccggacacgcgatgatggagatgattaacaagtttccatggcggtggggcaggcagggaaggcccgcctaaaatactcagttctaattcaatcatacgagtacaaaatcatcataaaaaaatgtgaacgatgtgaaaggttaaaaaaattaagtatactatactgccggtccagcagtactaattcattattaatgccagattacgagtcacagcagcgtagagggatgccaattgtttggcatattttctgttcgcttggggattttgatggctgattttttatgcagaactcaagactaatgctaaaacctcttatttccgttccaatcgcagaaatgtctgaccaggaaacagagctgagagtctcaaatgcaagcaagccaacgccagcggcagcagcaaccacgtccaagttcaccaacagctgaagaggaagcggaggagacgagaccgcgaaacagtacagccaggagctgatagagcatccggtgcaccacatatattgacctgggggtgcctggaccaaaacaacttccgttcctctcggcggcaatcgctgagctttcaggcacaaacaacttacaaacatttagtatctttagccagttagccgctggctgactcatccacagtcgtttgagtcgggatcgaacgaacgaacaaacaaggcagataaggatttccgattgcggaattgccagaattgcacaagtctacttaaggctctggaggaccaaagccacttaagttacgttattacacacaaaaactaaaaactgaaaaaacaaaaaacaaaaaacaagacacaacccgcaaaccaagatgaactccaccacaaagcatctgctgcactgcacactgctcatcactgtgatagttaccttcgaagtattctccggcggtattaagattgacgagaactcgttcacgctcgtggatccttggactgaatacggccaattggccacggttctgctgtacttattgcgctttctcacgctgctcacgctgccccaggtgctgttcaatttctgcggcctggtattctacaatgccttccccgagaaggtcgtcctcaagggcagccccctgctggcgcccttcatctgcatccgtgtggtcacgcgcggcgacttcccggatttggttaagacgaatgtgctgcgcaacatgaacacctgcctagacacgggactggagaactttctcatcgaagtggtcacggacaaggcggtgaatctgtcacagcatcgacgcatccgagagatcgttgtgcccaaggagtacaagacgagaaccggggcgttgttcaagtcgcgtgccctgcagtattgcctggaggataatgtgaacgtgctgaacgacagcgactggatcgtccatctggatgaggagacgctgctcacggagaattcggtgcgtggtatcattaactttgtgctggatggcaagcacccgttcggccagggcctgatcacctatgccaacgagaacgtggtcaattggctgaccacattggcggacagctttcgggtctccgatgatatgggcaagctgcgtctgcagttcaagctctttcacaagccgctcttcagctggaagggcagttatgtggtcacccaggtgagtaatttccaatttcctccatttcgttcgctcgatttgtcgtcgaatgagtgggcctttggggaattccgcaaacaactttcccaacggtcttttatcaatcgtgacagctcagtaagctctgaacggaaagcaatctaattcttgcacttacggaatgtatgagaaatcgcaggcatttccaaggcatttgttgtatgtcataggaatgaaatcatacttgcacaagatttcaatcatattatgcccacaaatcgagctacaacttacatatatgtatgtatactaattaatctttattattctaggtgagtgctgagcgttcagtgtcctttgacaacggaatcgacggttcggtggccgaggattgcttcttcgcgatgcgggcctttagccagggctacacgttcaacttcatcgagggcgaaatgtacgagaagtcgccgttcacgctgctggacttcctgcagcagaggaaacgatggctccagggcattctgctggtggtccactccaagatgatcccgtttaagcacaagctcctgctgggcatcagtgtctattcgtgggtcaccatgccgctgtccacgtcgaacatcatctttgcggcactgtatcccattccctgcccaaatctggttgactttgtgtgcgccttcatcgcggccattaatatctacatgtacgtctttggcgtaatcaagtccttttcactgtaccgcttcggtttgttccgattcctggcctgcgtgctgggtgcggtgtgcacgatacccgtgaatgtggttatcgagaatgtggctgtcatttggggcctggtgggcaagaagcacaagttctatgtggttcagaaggatgtgcgcgtactggagactgtctagactattttgtggaactggatgagggaggaaaggagtcatcgagtgcagccatggtcatcatatcgcccacagaaaccaaaaaccaaattaagcaaggcaaaaacaaacgaaatttcgcacaatttcgccaggctcagtgcgttgtcctggcacaatctgattgatttactttatttgtacattttataagcataagagtcactcaacaatcacacccacacccacacatacacctgcacacacgcacatataattgttgtttcgttctaaagtcatggtcattcacaactttgccaaaaagaaaaagcaaatcagatcagatcagatcatagaaatcagcacggaataaacggaataccagggtgaccgacccaaagaacaaatgcaatagacaacgtcttggagcgagatctatgaagtgcatcactcactagaaaatacaactattgcggcaataacaacaattggggcaataacaatgatccaagaggaccacacgcgaaaactctccattaagtgtaatttcattatatatatatattttttttttttgtatagtctgtagtgaaagaatgcgctatatttatataaacgtaaatattgtatgtacattgtagatttattattataattacgattatttaaaaatgtgtacattgatgtattgaaaatctgttaaatgtcattcacaccgaaaccaaggttaaaaaaaaaagcgaaaagcaaacttaaatgtttagacttatgtacttacgtgcgcaaattttgatgtactttgtgagcagtttggcctatgtaaatacgtcattccaccacaggatgtatgccccgaaggattaggatcgaccactttccgcatccttgcgaagatcttcttcagcccagagaagttgtggtgtgaatgatatgatcgtgatttgagaagagctcctcgatcttctcggggagtccccttcgaatttcgttgttcttattttttagttggagtactctgtttttagtcacatttcctttgtttgcctctgtcattctgttaatctgttatcggtgctttgaaacccacgcccaaatcactcacgccccctgaaaatgtggaacacgtgagttgcagtcacctcgtaaatccgaaaaacacaaaagaaaaatggcgaaaaaaggatgtcgcgtcacacacacacacaccacccaacacacacacatacaactgttacgaaaaaaaagaaccaaatacaaaaacaataataaaatgtcaaaatatatgtgcatgtcttttatattcggagcttgggctgaaaatttcgaaaacaaacaaaacaaaaactagtaaggttctaattttataccttggaaaaaaaaatgcctgctttttttttgggaaatcctttttcaaaaaatatacccatctctctcgtaatcatgtttttttgatgttggctgtcgaaaataatgaaatcgggtaagaaaagtaaatgtgataagttaagttattcgaatcatctgagttctgcagtttagcttagatgacccaggaatgaattcaatcaatacagatcaatggattctatattggtaaattataaaacatggatgggtaatacagtcttggttgatataaagttcctaacgatcatttcctaaaagataacgaacatagcaaagtgagtctaatccagctacaagatgggctgtcaggcatttagggactc

SEQ ID NO: 20474 - DNA, 2572 bp, DROSOPHILA
cagaaatgtctgaccaggaaacagagctgagagtctcaaatgcaagcaagccaacgccagcggcagcagcaaccacgtccaagttcaccaacagctgaagaggaagcggaggagacgagaccgcgaaacagtacagccaggagctgatagagcatccggtgcaccacatatattgacctgggggtgcctggaccaaaacaacttccgttcctctcggcggcaatcgctgagctttcaggcacaaacaacttacaaacatttagtatctttagccagttagccgctggctgactcatccacagtcgtttgagtcgggatcgaacgaacgaacaaacaaggcagataaggatttccgattgcggaattgccagaattgcacaagtctacttaaggctctggaggaccaaagccacttaagttacgttattacacacaaaaactaaaaactgaaaaaacaaaaaacaaaaaacaagacacaacccgcaaaccaagatgaactccaccacaaagcatctgctgcactgcacactgctcatcactgtgatagttaccttcgaagtattctccggcggtattaagattgacgagaactcgttcacgctcgtggatccttggactgaatacggccaattggccacggttctgctgtacttattgcgctttctcacgctgctcacgctgccccaggtgctgttcaatttctgcggcctggtattctacaatgccttccccgagaaggtcgtcctcaagggcagccccctgctggcgcccttcatctgcatccgtgtggtcacgcgcggcgacttcccggatttggttaagacgaatgtgctgcgcaacatgaacacctgcctagacacgggactggagaactttctcatcgaagtggtcacggacaaggcggtgaatctgtcacagcatcgacgcatccgagagatcgttgtgcccaaggagtacaagacgagaaccggggcgttgttcaagtcgcgtgccctgcagtattgcctggaggataatgtgaacgtgctgaacgacagcgactggatcgtccatctggatgaggagacgctgctcacggagaattcggtgcgtggtatcattaactttgtgctggatggcaagcacccgttcggccagggcctgatcacctatgccaacgagaacgtggtcaattggctgaccacattggcggacagctttcgggtctccgatgatatgggcaagctgcgtctgcagttcaagctctttcacaagccgctcttcagctggaagggcagttatgtggtcacccaggtgagtgctgagcgttcagtgtcctttgacaacggaatcgacggttcggtggccgaggattgcttcttcgcgatgcgggcctttagccagggctacacgttcaacttcatcgagggcgaaatgtacgagaagtcgccgttcacgctgctggacttcctgcagcagaggaaacgatggctccagggcattctgctggtggtccactccaagatgatcccgtttaagcacaagctcctgctgggcatcagtgtctattcgtgggtcaccatgccgctgtccacgtcgaacatcatctttgcggcactgtatcccattccctgcccaaatctggttgactttgtgtgcgccttcatcgcggccattaatatctacatgtacgtctttggcgtaatcaagtccttttcactgtaccgcttcggtttgttccgattcctggcctgcgtgctgggtgcggtgtgcacgatacccgtgaatgtggttatcgagaatgtggctgtcatttggggcctggtgggcaagaagcacaagttctatgtggttcagaaggatgtgcgcgtactggagactgtctagactattttgtggaactggatgagggaggaaaggagtcatcgagtgcagccatggtcatcatatcgcccacagaaaccaaaaaccaaattaagcaaggcaaaaacaaacgaaatttcgcacaatttcgccaggctcagtgcgttgtcctggcacaatctgattgatttactttatttgtacattttataagcataagagtcactcaacaatcacacccacacccacacatacacctgcacacacgcacatataattgttgtttcgttctaaagtcatggtcattcacaactttgccaaaaagaaaaagcaaatcagatcagatcagatcatagaaatcagcacggaataaacggaataccagggtgaccgacccaaagaacaaatgcaatagacaacgtcttggagcgagatctatgaagtgcatcactcactagaaaatacaactattgcggcaataacaacaattggggcaataacaatgatccaagaggaccacacgcgaaaactctccattaagtgtaatttcattatatatatatattttttttttttgtatagtctgtagtgaaagaatgcgctatatttatataaacgtaaatattgtatgtacattgtagatttattattataattacgattatttaaaaatgtgtacattgatgtattgaaaatctgttaaatgtcattcacaccgaaaccaaggtta

SEQ ID NO: 20475 - protein, 457 aa, DROSOPHILA
MNSTTKHLLHCTLLITVIVTFEVFSGGIKIDENSFTLVDPWTEYGQLATVLLYLLRFLTLLTLPQVLFNFCGLVFYNAFPEKVVLKGSPLLAPFICIRVVTRGDFPDLVKTNVLRNMNTCLDTGLENFLIEVVTDKAVNLSQHRRIREIVVPKEYKTRTGALFKSRALQYCLEDNVNVLNDSDWIVHLDEETLLTENSVRGIINFVLDGKHPFGQGLITYANENVVNWLTTLADSFRVSDDMGKLRLQFKLFHKPLFSWKGSYVVTQVSAERSVSFDNGIDGSVAEDCFFAMRAFSQGYTFNFIEGEMYEKSPFTLLDFLQQRKRWLQGILLVVHSKMIPFKHKLLLGISVYSWVTMPLSTSNIIFAALYPIPCPNLVDFVCAFIAAINIYMYVFGVIKSFSLYRFGLFRFLACVLGAVCTIPVNVVIENVAVIWGLVGKKHKFYVVQKDVRVLETV

SEQ ID NO: 20476 - DNA, 6589 bp, DROSOPHILA
attaattaatttgccgttgacgctgtagagcaaaaaaaaaaaatacacaaataaacaagaaatgcagcagaaaatcagccagcgaaatcaaaaaataaaaaaataacaaggaagatatatacggcaatacacatccattcaaattagagagtaaaagacgaattgaataaaagctttataatgttaaaaaaatagttttttctagttcttgaagttcacgctcttttaaatattcatatgtttttatgctgtaaaaactattcttaatattgcttataccattacgtcaatccgactttcccaaggaatttcaattataataccctatttaaaaatgtttaaaacgttgataaagccaactgagaaaatgtagcgcattcagagtatttgcagtattcatttcaagagtggcgtgaataaaaattcactgggtacccactgcaatgcactttcaaggtgcaaaacgcatacaatttttgattctgattcacctgtgagtttttgtgtgagtgtgtgtgtctgtgtgtgcgtgagccgtcgcatttgtgtgagtgtgtctccagctgtgtgtgtagtggcacttgctgctcattttatgcttcgattaccgctaaagtgcagacgtttttttttgccacagctgaagctgaaaactgcaaacgcaaaactgcagctcaaggcatctgcattttggatcagattttttggttggaaaaattgtgtttgaaaattataggaaatatagtaccagcaattattttctatttgtatataacatacaaatgaaaatgttagatttaaataccgtttgtttttaaaaaattaaatgtgagatataaatcggttttagttttgggtcatttgacatgcattgagccataacaagcaaagcattttatgttctgtaatcgaccgtgatattattttgattagagcgggtctataaaagttcaaaattctgaaaaatccatagcacagttcatcgttcaccatcaaagcaatggaatacagtattttcatttttctggccctgacttgtgtcctatttatgggtcagagctgcttggcggctccctcggccgatgatttggccaaatttggtgaaatggaacgttccatcaaggagctgaccagttcgatcctggccatgagtggagctactaccggtaggtttacatccatacattatcaaatgaattattattattatattatttttattcattttatttgcaggctttagacccggggctaataatgtttggcctgaagatcttcatgcttaagttttggccaaaaatccgtcagctcggtctactaaatcgtgtttagcagttctgcagtttaatattttgcaatactatttttttttcttttggataataaaatattaggcacaacttatgcgtacttgcatacattttttcttccaaaatcgtattattttctatatgttttgtaggtacacaggcaaaaagaaattccccttgataattccaaatctcattgtctttgctccgtttgacacccgcagtttacataagcaaatccgagagaccgcaatccaagtgccgatcgcatttatagaaaattggagtgccatgcaggaggggcggtcacaaattgccgactaaatctaatcaagttaatttacacagtcgcaccccattccttcgacactggaaaatatttcaaatggtctatttgcgaagttacaaataattatttaagagatttaaaaaatcgatcaaatatctttgaaaaacaaacgaagagtgttgatagtttggagctttagtttgtaatttgtgccaaatttttatggggaataatgtaaattatttttaagtgcaaccaatttgacttctatgtccctcgatctgtgcattctccaaggcaaagacaacgcgttggcttaagtgccccgctggcgactcaatttgctgtactgcaaccactgactcaattagcccactgggtgggtgggtgtttgggctggtggctttgcgggcctttgagttgggtggctgtgcatggtggcatgggggcattgggtggtgtttttacgaaagaatcagctggccagtcagctgttgctccagatccaggcaaagtagtagtcgccatcgcagctggcacgcgaaaagtgacgacgatctcgccgtcagttgagtgtgtgtatgtcataatatcattaataaaaatataaaacaataatagtcggtggtggtttttgctgtgtggcaacagcacaattgcacttccatctcactgtgatctggaatctggaatctgggatctgaaatccgaaccataacccaccagtcacctctgatgcgtgcctccgagcggtgcgatcgctgcgattctcttagtttttttctcatttttttctcgctttcttttgtttttttttttttttgttttgagtgaacaagtgaagtgacgggaaaatgcacgtggaggagctgagagccagcctgcagagctttggatggccggattatttggtcttttgcctgatgttggccatttgcgccgttatcggtatatatttttgcctgcaactgcgcttagagtccaggaaacaaaaggccaatggctcagaggaggcggcgagtagtgctgcctcgtatttggttggtggcaggcagatgaagatctttcccataaccatgtcactgatatccaggtgaggaataggttagaattctacgataaatcatttttaaagatattttttattttattttccctttagggggagttaagtaacttttatatccaaaataaatatgatagaaacgtttaatgaaactataaacttaattttttcaactatagccatttgctaagtatattataaagtcgagatggaaagccccattctcttctcactgttaagtgcttaatgtgccggagataagatagaattaatcaaagtaccgcggaaaaccccatttgtcctcaactagagagcttgtctgaagattcatacagccatacagggaaaaaaatgccgacatagtgtaggttgtagtttgctccagttttcgacccgttatagtcgctcgcttatttttagcatacttgtacagctcgctcctatcaacgcaccaaatcaaaatgtttcataattaataattggcttccacgttcgctgacaattcgagctacccgcatatgcagggcattcaaattggcgacggtcaattggcgactacgactgcgagtccacttccacttccacttccccgaaccccaaatgcccgatctccaagtggcaactaagaaatgtatggaaacttgacttggacaccagagaattacgacgacattggtgctaattgaattgtataaaacgcactttgatctcttacagatgatggatgatcggtgtaaggcctttgtcgaaggtcaaggcgactctacccaggaagaaattccatttgattaagcttaagttttaatatctttactaagatcacattttgcttttcagctttatatctggaattacacttttgggtactcccacagaggtttatctttatggtgctcagtacatgtacattatgggatcgctggttttaatgggcttctgcatgtactacttcttcttgccggtctttcacgaactcaatttgatatccacttataaggtaagcttatatcttgtttgtataacgaatcaatttgaatgggaggattttattttagtatttggaacagcgatataaccgaagtttaaggcttttcggatctgtcatgtttattgtggcttcggtgagttaatctcaattataagtaggactctcttttataatttctttttttttctttccaagctactttggcttccaattgtgatttatgtaccggctatagcattcaatcaggccactggagtgaacatccatatagtgacgcccattgtgtgtgtggtttgcattttctatacttgcattggaggtttgaaggcggtggtttggacggatgtcatccaaacgttgatcatgttcggtgcgatggctttggttttgattaagggaaccctggatatcggcggacctggagttgtgtggcagaaggcccaagaaacagctcgattggaagtacccaattttagtgcggatctaagtgagcggtataccttttattccctggttttgggcggtgtagctcattggctcaagtcaaatgcaattagtcagaatatgatccagagatatttatcgctacccacgcttcgtgatgcacggattgcaatatggacatttatcgctggtgttttggcctttttgatgatctgcggatatacgggtcttttgatctatgccacctattctcaatgtgatcctttggaaacgaagttggcccagagaaacgatcaacttttgccacttttggtaatggacactttgggctcatatccgggtttaccaggagtatttgtagccggtgtttttagtgcggcattgtcttcgttatcgacagggttgaactctctatctgcagtcgttttggaagattttgtaaagacctttagaaagagtccactgaccgagggacaaaccgcttttgtgatgcgcagtgtggtcgttgtatttggcattatattcgtagctctcgtatttgccgtggaaaaattaggtgccgttctgcaactgaccatcacactttcgtcggtggcaaatggaccactcttgggtatatttaccgccggagttatgttgccatgggttaattctaaaggagctttgctcggaggattcagttcacttattgttatggcctggatgtgtgtaagtgcccagcgggatctggtcaccggtgatctcgtctataagaggaaaccatattcaacgatgggctgcaattatacgtttgccggagaaccacgcgagtttgccagcctggcattagatggtgccatcaggtaagcatttatctacaaaataatcggactttcggttaaaccctcttaatttattttgtgcagttccgttccaagtgctcccttccagctgtatcgcatatcgtatctctatttcacgctttttggagccctggtgacgattgtagtggcactggtcacaagtctcctcctccgggagacggatttggatggagttgacacacgtctgctcacaccatttgtgagacgctggttagagcgacgtcgccatcgccgatcaaagataccagattctggtcaaaaatccagcaacaaacaggagacgaaaacgtaaaggggatttgcatggcggttcaaggggaaggagtagtagaaggctgaccggcatcatcctggcaaagttcctttcggtagcttagcaaatatttaaaataaaacacaattcataattatttgggctcctgtgtcctcctgtacgaaatgggttcaaagcagtttcctgtgctgctttctctgtaattagaaaaatgcccgcagttatggcccaggtttcgaaaaatgggcaagtgcagaaaggaccaggtctgggtgcatataacctgacccgacaaatcaaaacgccggctgcccaaatagacggaaaatcacaaggaagaaaaaactacgggtaacaaattgctgcttacaaagtcgaagatttctatactcttatcgattcgcttaagaacttgcagaacttgatcggaaaatgttcggcatagcaagtatcacaaagtgcatacggacagatagacggactcggctgatcaagaatatatacatttttcagggtcgaaaacgctttcttctacatgttctaatacatactcttcaacgaatctagtataccctaatactctgcgagcgagcggctattaaaatgaccagaactagagaacccctgtttcaagtaagggtttcgttccgctttcaagtgccaggcacaagtgattgggcagtgaactctgtctggccaaggtcaagtgggttgggtgggggcgcccaacaaggggtgtggctaacccaaagggttccgttttcacattagttttaccctgtgccgttaattgaatatttactgcttttcatgtgtggttcggtcggtcagtctgcatccgagtgggcccaactatttcgttggggtcacaaaacgcccatctttatttgtatgcttaggtcgtttatgcagcaaattgaattgttaatgagctgacaaatgtttgcgaaattagtttttgcctcagtctgtgcaactccttcatctacttacttgcttcaaaacttttatcgatgatgaagacgacatatggtatgttgccatatacaggtacaacacactcccatggttttttgtctcttaattagccgactacaaaaataattttctacaaaggagagacggcggcgaaaatatcatcagaatgcataatgacagtttccgggctgtgtgttggtttttagtttttttggtttttttttttgtttttataaaatctggacaaaagcgtagatgacacaggtgcgccatctcgcggtatattcaaaaactatgctgtatgcatggccagtgacaggggttaagggttatggggctaggggctaagggctaaggggttaaggggttaatggtca

SEQ ID NO: 20477 - DNA, 1962 bp, DROSOPHILA
atggaatacagtattttcatttttctggccctgacttgtgtcctatttatgggtcagagctgcttggcggctccctcggccgatgatttggccaaatttggtgaaatggaacgttccatcaaggagctgaccagttcgatcctggccatgagtggagctactaccgggcattcaaattggcgacggtcaattggcgactacgactgcgagtccacttccacttccacttccccgaaccccaaatgcccgatctccaagtggcaactaagaaatgtatggaaacttgacttggacaccagagaattacgacgacattgctttatatctggaattacacttttgggtactcccacagaggtttatctttatggtgctcagtacatgtacattatgggatcgctggttttaatgggcttctgcatgtactacttcttcttgccggtctttcacgaactcaatttgatatccacttataagctactttggcttccaattgtgatttatgtaccggctatagcattcaatcaggccactggagtgaacatccatatagtgacgcccattgtgtgtgtggtttgcattttctatacttgcattggaggtttgaaggcggtggtttggacggatgtcatccaaacgttgatcatgttcggtgcgatggctttggttttgattaagggaaccctggatatcggcggacctggagttgtgtggcagaaggcccaagaaacagctcgattggaagtacccaattttagtgcggatctaagtgagcggtataccttttattccctggttttgggcggtgtagctcattggctcaagtcaaatgcaattagtcagaatatgatccagagatatttatcgctacccacgcttcgtgatgcacggattgcaatatggacatttatcgctggtgttttggcctttttgatgatctgcggatatacgggtcttttgatctatgccacctattctcaatgtgatcctttggaaacgaagttggcccagagaaacgatcaacttttgccacttttggtaatggacactttgggctcatatccgggtttaccaggagtatttgtagccggtgtttttagtgcggcattgtcttcgttatcgacagggttgaactctctatctgcagtcgttttggaagattttgtaaagacctttagaaagagtccactgaccgagggacaaaccgcttttgtgatgcgcagtgtggtcgttgtatttggcattatattcgtagctctcgtatttgccgtggaaaaattaggtgccgttctgcaactgaccatcacactttcgtcggtggcaaatggaccactcttgggtatatttaccgccggagttatgttgccatgggttaattctaaaggagctttgctcggaggattcagttcacttattgttatggcctggatgtgtgtaagtgcccagcgggatctggtcaccggtgatctcgtctataagaggaaaccatattcaacgatgggctgcaattatacgtttgccggagaaccacgcgagtttgccagcctggcattagatggtgccatcagttccgttccaagtgctcccttccagctgtatcgcatatcgtatctctatttcacgctttttggagccctggtgacgattgtagtggcactggtcacaagtctcctcctccgggagacggatttggatggagttgacacacgtctgctcacaccatttgtgagacgctggttagagcgacgtcgccatcgccgatcaaagataccagattctggtcaaaaatccagcaacaaacaggagacgaaaacaaaaatgcccgcagttatggcccaggtttcgaaaaatgggcaagtgcagaaaggaccaggtctgggtgcatataacctgacccgacaaatcaaaacgccggctgcccaaatagacggaaaatcacaaggaagaaaaaactacgggtaa

SEQ ID NO: 20478 - protein, 653 aa, DROSOPHILA
MEYSIFIFLALTCVLFMGQSCLAAPSADDLAKFGEMERSIKELTSSILAMSGATTGHSNWRRSIGDYDCESTSTSTSPNPKCPISKWQLRNVWKLDLDTRELRRHCFISGITLLGTPTEVYLYGAQYMYIMGSLVLMGFCMYYFFLPVFHELNLISTYKLLWLPIVIYVPAIAFNQATGVNIHIVTPIVCVVCIFYTCIGGLKAVVWTDVIQTLIMFGAMALVLIKGTLDIGGPGVVWQKAQETARLEVPNFSADLSERYTFYSLVLGGVAHWLKSNAISQNMIQRYLSLPTLRDARIAIWTFIAGVLAFLMICGYTGLLIYATYSQCDPLETKLAQRNDQLLPLLVMDTLGSYPGLPGVFVAGVFSAALSSLSTGLNSLSAVVLEDFVKTFRKSPLTEGQTAFVMRSVVVVFGIIFVALVFAVEKLGAVLQLTITLSSVANGPLLGIFTAGVMLPWVNSKGALLGGFSSLIVMAWMCVSAQRDLVTGDLVYKRKPYSTMGCNYTFAGEPREFASLALDGAISSVPSAPFQLYRISYLYFTLFGALVTIVVALVTSLLLRETDLDGVDTRLLTPFVRRWLERRRHRRSKIPDSGQKSSNKQETKTKMPAVMAQVSKNGQVQKGPGLGAYNLTRQIKTPAAQIDGKSQGRKNYG

SEQ ID NO: 20479 - DNA, 59967 bp, DROSOPHILA
tcacgataaacggtgtggtgcccaatgtgatgctgattctggctggcgcaaagattttatgaacggcaaaggccacaacaaaggtgcttcctgcggcaactttctccgcaaccgccgatgaacccattccaaagtattccagtacgggcaccaggtttattccactggaaacaagtgcataaaagcctccaagagaaatgacggaaatgaccacatgaaagacaacaatggttgctccatactccttgaatgcccgcttcagttgttcccttttagttatctttaaggtcgttgcggtccccgtggaggcggattcggtactgtagttttgcttaaagcatcctccatgtttcgtccagttcatgtcttgagatgaatatttgtattcccgtttttctctgattgaaattggttttcttgttccacttatgtagttttgcattaaggcagtcgagtgaaagagatgaacaggtgacatcgtcttgagttgattaaacgcaaacccataaggcaaacgggctgcaagaagcgcacatgtcttccccgactttgggaacattttttcgtagtttgtagaaattcctaaataaagagtagtagttcttagaaattccctaagttttatctgtgaacgaaaaaactaagaagccctgaatgacttatgaacgaagtagtacatgatgacgagtattttagtttcaatcgtaatcgaaatgtaatgtcaaaattccctcttatctatcacgttgcataaagttttccccttgatataattttctcccgcttttcctaacgtgtacgtgcataattagctggctgtgtagtaatgcccccgtaatgatataaattcattatacccacgacgcccctgtttttttttcatccccctcgcgctagcataaacagttcagcgcggccataaagttcttccaaaagtcgttgctccttttttccttatttgattaaaatgcaattagctatgaggggttgaaagggatatatgtactccacaaaaaagggagctgttaagtttcggtgacatcagcaaaaggattttggctttttgggagagaaacaaccccgtttcagggatactgctttaaagtgcgttgaactggtgccaagtggaaacgccccactgaactactttgcaccatattggccactgccaaaaagtctgagcacgtgctgaatgcggattgctgaacagatctatgcggcgccaacgcgacaggctaatacacaagaaaaaaaatcaaagtatttgctaataattcataatactaaagaaaatacaattaatcgtcttcaaatcgaatattattgaaaaatgatctgagaaactttatataccttcggtttaatatatttaaagaacaccattttttttcaaagtgtactaagtcgaggtcattgaaaatccttgtgaagggaaatcaaacgcatagggcgcacaccatctggagtaatttgtgtgcagagagcgtctcttctgattttgcacttaattacgtgttttctcttttcttacaggatccggccacaactcgcattccccgcctggatggcgtctcccgccttccgaagccgagtacttttggcctggccagcagcagtggcagcaccaccaacagaaccaccaccaccaccaccagcaccacccagcacattcgaccaccgacgagtgcacccaaggccactcagatattccgagcacccggcgatcctgccaagccgcgtcccgccagctcgtatgccccatcttcggctgctctgcgggatttgggcagcagtctgaagaagagcgccagtggagaacggataaacaatgcggtgagcctgctcagcaagcggaccaccaccgtcctgaagaagtactttagtcccaagtcaagcgcaagtgcaaatgcagtgatgtccagtccatgcgatatgacgagctcactgccagttactccacttccggtggggaagcgtggaatggtggcaaacgatcagttgaccagcagcacgccgatgcccctcttgagatccgagacctttgtctgcgaggacgagaagcagtcgaaccgaatgaaactggagagcactcgattgtccacatttggacgaaccatggacatcgagtcgccagtgccaaatgaaaccaaagtcctgatcagagacggcacgagaattatgaagggttcaccctcgacggatattactcagatagtaagacccactcagaaaacaccattgatgacattctgctcattggataccacacatgaaatgacagtgtgttcgagaaataatgcaacgcactcggttaactcgtcgggaataatgggtagaacaatgccagttattccggccaaggatgccaccagaacaatatctgccaattcttcgggtcttggaaatcttacgaaagttgtaaggggagttggaaatatcaaccaaactttggaggcagcaggaaatatcacaaaaacgtttaggggagctggagatctcacgagaacggttgaaaaagaagctaatataggtaagacttttgaggtggcagcaaattgcactcaaacatttacaagaggagtaaatctcacaaggacaatgaatgataagaatgaagaagtctctaggacaatagacaaaggacgaagtactacgaaaaccatagaagttggacaaaacttaaccataacaatggacgcagcatccaatctaacaaaatccattgatagaggagctactttgacgaatcgaggggcgaatctaaccaaatcggtcattgaaccaggtgacttcacaaaggtaatccaccaaggagccaatttaactctaagcatggatcagttacccctgctggaacacatatccatgccatctggcttggacattctgagttccaagtgttctggcaacgtcgagagaccgagccaggaaacggacgacacgctggacgtgacgttaaccagtttggcaccggacaagaccaacatgaagttgccgttgaactccacgctcaacactgaaagattgttggacatcagtgcgttgcagtcgccaaggcacatccaattgttgaacttaacccaggaactggagagaggaactccaagcagggtccaccttcagtcggggcgaagatccatgccgcagcactcactgctgtgcctttccccccagtcggccaccacaacgccgcatggaatgaggatgatgggacaggctactcctcagccagttcatttactctcaccgctgttgaagcaggcacaaagtgctctggtcttgcccactcgaacgccggatggtgacatcaccatggatggcaatggtgctctggacagtacactgacctccacatcggttaggggtcggacccgctacagtttcggactggatttgccagataccactctggactgctccatcgaactggtggacaactcgttttcctcatcaacccaactgcagcaattgcaacagcagctcctgaagaaacagagttcattcgatctggacgagagcttgggcatccttacgcccgatcagatgaaggatttcctggactctccacacaacaatcttatgcacaatctggaaatgatcaggatgcatcatccgaatctattgcagttgaggatggagcagacaccatcgccggaggaactgcctctggatcccattgagattaagtccgagattgtcaagcaggtggaggcgtcccagaaccaggtgaacacctcgcagcactcgaagctgagcaacagcttcataacgagcgtgaccagtgtaaccagcttggatacgggctaccagggcgatggtgagatgtcgcgccccgcttctcgcggagcatgtgatcattccccaagcaatggaccccatttgggccgagtgagtcgtcagcccagcttccctcccccaaatccggctcctttgagacgtcaggatcccatgacagactcggatttcttcaccgagtccgacgcggatgatgtactgcatcgcggcgatcgccgtgcccaggtgatcgatggccagttgtatggtccggacatgatgcaaccgagtgcctccgtgccccagatggaggactcctgcatggaatcatcgggtattttcacggacgttgagaatcgctgcgatgaggagatgcggcagccggaactggagttcgatgtcgatatggacatgtcgccagatgactcctcacagacgatgcgcaagggtgagatattataatttattacgaagtttaatctggttaggttatataaatggtgatctgatatatgagcatgtagtgacaatgatattcaatacttctgatgagcgcgtccgatgctaatgccctctctctcgctcctcctaggtcaaggtcagcccatttccacccaacagcagcagaatcagctggccccccagcagcgcccgcccagcagctgtctctcatcctcctcggcggccaccacgctctctcagtcgctctccaaccgcacctcgtactgcagcgtcgacggcggcagcgcacgaagtttttgcggcgacgaagctttcgcagcgggacgatcgacgacgacgacggcggcagcagcagcagcggcggcgctctcagttcagaaaaccacctcgccgcgtccacacgcatcgctctcgtcgctctgcacggtggagaatttccgcggctctgtttcctcgaactcatcgatcgcctctcccaagtcgtgcaagtcatcggttaccaagacctctgctggcaaatcgcgcgttttgaaatcgccaaaatccccaaaatcaccaaaatcgccgctaaatcgcaaggcgcacaccccaaacaaatgggatgccgtgatgaataagatcgctagcaataagtctctgatcaagacaaactacaacgatgtaaagtcaaaggtctcgaccacacggatcatgaccccggcttccggttcgagtccggtttccggttccggttcgggctccgtttcgcgtaccgcttcgagtccgcgcgccagtcccagtgtgagtgccagtgcccggcgttcgccctcggccacgcccaaagtgccgcccaagatgcttctggccaagcgaccgagcagcagcagcggcaaggtcaatgccacgccctcgccgcccccacacgcgaccccgccaacacggcagccactggataaaggctcagttggcgccgggtcggtgggtggtggtggcgctcgtgcggtaaagacacccaagtcgcccacctcccccaccacacctaccacgcccacatcgccgcctgcgaagagactccagacgagcctcgtcagtcggtaagtgatcactgatagacgatactatttgatttatttcgaaaagataatggtgtgacatgtagctgtagatccataggaacttggaggaatatatatatatattcctatcataagtcgatctatcacagaagggcattcgcaagcccccaaaacccaaagttttcttcgttgccttaagcatatctcttgcatactttcttatcgcgaacagagaacataccaagcttatcaatcttgcgtcttatcacaccagcctttgttaatggactttttgcgtttgttttgggcgctccacaattcgaattcgaagtttcgataggccaatcgagtggccatttacacacctgtcttaatgagttcagggtcgtttgacttgggtagtgcgctgaatagatagcgtagattgcacccaggtctttaaataattcatcaagcatttcgattcactttgaaattcaattagttatgagcgaggaatatgtaagtagttgtggaaaaatgagaaatggggcatgcctttcgcccataactatctgaactttctcaaaaggtgcgaatacatttgcaacatttcagtttgacgtcacttggctgtgtgagctaataaataaataaatagacttaattagatgggtaatttatcgaaatgcgtagcaggtaagcagactaaatccaaataaacattaattagtttccacttagattgagtgaattattaagcagcgcagagaaagttaagtacgccatagtacttagtttattaaactagtgccgtgagtattaaacatttaagcaggaattagttgaatgcgaagagcaatctttgtatagattcctctatagagtgaactacccatgctaatttcacagcttttgcgctatttcgtcatgtggacacaaatttcgcttgcggttgtcgaaatgataatttcggttcccgaggtccatgcattatacaaattaaaaccaaagtcacacaaacaaacgggcgagttaaatgccaccaaagtttgacttttcaactgggggttgagtgccgaaagcaacccacaaattgttcacagacccaagaaggcagaacaaatttccatttaaatatatacatttttgttttcgcccaggtcttttctgttttgttatttttctcgcagttcagctaacatgcaaaacattttcaattacaaatttttccgcaacgcagcggcagggaaaataaacagcttacaaattaacaaagcccaaaccaaagcttgtctctaaaaattatcatctatcgtctacagttttgttgtatttttatttacatgacgaacgcccataaaaatgcattagataagagattttcatcttgggttagccacgattcggggaattacatgtagctggtagttagctattgttttttttttttaccgcgacttttctttaatttcaatctgatgtctattatttgaacaagccaaagccgcaaggcaatgtatatatatacttatcatctgagccggcaataacaaaccgagcaatgtgaatgtatctttgagtgtgtgttttgtttgactctcgattccgaatccaattccgattccgatgagcgtgagtgtgtgaaaaacgcccaagctcaggctcaaagcgagttaatttgagtcaactggtatgctaatatatatatgaatattcgtttgaatatccatacagccaaggtgtggaagtagctttggtttttattttgaattgcatttgttggcgaattacgtagattcgtgtattgttcgccagtaatgagagaatttgtggtgccgagaataaaaatggaggggaattttaagcgaggtttcagcttatgttatttaaatggaaattaaaagcgagtctttaaagtggcatcaataatgtgttctacctatcattattttcattaggttattagtatttgtagtattgtgaaaaaagctgacaaaaataaagcaaataaaggtggaaatatctcaacacgagcacatgttatcagccatggcgaacaacgtgtaacttgtagataaacaaagccaagagcccaaagctggcccaaaaaaatatcataaatttcgacaaggtcaacagaataccagcaattagacaggcacacgaaaaaattacggtctccggatatgaaaaacttcaaactcgaacacggccactgaaatgcaaatattggttttgggtctagaaatagatggggcatttcctctggctggaatcaaaatgaagaaaaaacaggagagtgatgaaaactggaaagggggactcaaattggaaatcgaacattagtcagttcttgcgcttcggcataaaaacaatttctgccttgtaagcggattcattaacacgtgcatgtgaaacttgggctttttcttatgttttttttttatgctgagaagtcataaacaaatgcctgataagctacataaagagaaacattattgcttttttaactcaacattgacctaaaccgagatatttgaaatcattttttacaactttcagcgacatgagttttatgtccgtagttttctcgccgtgcattcattaacatccatcagatacaactgtctatattgtgtttacgactttgacctttcgccggcgattgtctctgcctcttcgataaaatagccataaatgtcatggtgttattaataaaagttgcccatcacactcaattggattcgccgttgattgcgatgcgatgcgattgcgagaaatggcatggtaaaggctaataaagtcgtttccatctggaaaaagtcgttgccgactttaattcgcataaaattcagaaattcagacattcagacaccaagacagacattttgaggcgctcttaagagcctggtggcaaatattgtgacaagtgtcatgggggctgtcaacaatgtgaactccccttaaacgcccacaaaaattaaaacgcgagcggttttaattgaaaatgcaaccagtttcgtttcggctagtttaaagtttaaatcatattatgtaacattttgccggcaacagtaacaagaaaagttgtgtatacaacaaaggcaaacttgttcggcaaacaaatgggaaaagtgcgaaaggtggaaaagtcgtgttcattctgtcggctcttttcgtttttgtttacccttttaataaacaattttttcgtttacatagcgggggccattcataaatgcttaatgggattaaaaaactaatggttataaatattaaattagctgcctctggacaagcaaataaagataacatttttggacgaacttggcagctaaaaaatttatgaattggaataattttatctcgagaatcccgtttaaaaatggcataaagtttaagaaaaccagtattcgaattgcccagatcaattaatcgattctgagaacaatttttatggccggtaattgctcattcttttgttcatgaacaaaagtttctactttagatcaaaagtaaatttcaaaaggaaccggaataaaaaacttaaatggccacagaacagcactaaaaacttaatcaaatatagcatgaattttattaatgtttactttaggctttctaccgattggccaaatttgaaacgcaaaatatctgcgcagcatgaaatggaacacatgtgtgccgattaagatctaaaagttaataatcaactgagtatgagtgaattataataaataattaagtcttagctggttgctaaacagccatgatcgcattatgaacgaacaacactacaaatgagaattcacagaccgtgttaaatgttaaatttttgattgacaacaaatgttgttacaaattgaaactcgcagagctaattggcagcccaattgttttgcagcttgaccaaaataaaataaagacccaaacagtttcaaagtgccgaaagttaacaaggaactagttgagtaaatttacaatttacgtgtgaacttttccctttgcgaaaattaccaaaagtgtggttgttggctgttgtttgccattacagtttgcttaagagaaaaaccaacagaggagtttaaaaagttgttaaacccatccagctaaatgcaaatgagttgccatcggtttggcttataacatcttatctgaattgaccctgaacttggtcagaaagttgagctcaccagtcgaaacggggtactgccaattaggcgttgcctgaatatttatgcgctaatcaatgatcggctcatgtttatgagcttttctggctgaataaaataaatatccaaaaaagcgtagagaaggggcagcccatttgggggtttgctgggaaatttattgttcgcctgagttgtgaccccaaacactccccatttcgaccttttgacgagtggcactttttgggtgtgaaatgcggccaaaatgtgcaggaacaagctggaaggccataaatcattattagagtgacaagtttaatattttggttggttgattttaagactgaaaagaacagaactttacacattgattttgttgctatgaaattgcacagatttctcaattttcaaagtaattaattaaaggcagggcgtattagcagcatatttaatttatttcaattaacctgccattataaattattctctgtcaatagctctaataggacttataaaagaaatcattcagccgcatttttatttcgccagcctaacaaatggcgaagctgattgggttgaccccaaaaatggtagaaatgtcttgggctcgcagttctaatggaacacaataaatctctcggacacatttacatttaagcgctgtaacgagtttcacaaacgggcaaggcttttgtttcatatgatttgattttttttttttttgttgtattctcaaaaggtttccatttcgatggatttagaagcgaggtcgctcggggggtctgcgtttaatgaattagacaagttttgtgccttgcggctgatttgagccatgtgttgcgggtcaagcataaagttgttagtccatttgacgagattggagattgaaaccagaacgcacccaataacaccgaaattcccagcaaaaggtttgcgatgcgaaggggggccaactcaatcgagcgaaaccgaatcaaatggtcaatcagaattaatgaaattgctgcatgcaaatcgcagcttttgttgcattttgacgtcaattaagcgtttcattcagaccgccattctatcggatttccccttggcagccggcaacgcctttagaattttcatttacgctcgtttgaatatcgccagccggacattttgcattttgcgaatttgcattaacaattcatgccaatttccagctatattttcgctgtcggttttcagctttacagagtaattacgagtgcgagtggtggggaatttacaattttacaagtttcggcttcttcgttgagtgtgcaagaaacagcaaatttgaaattgtaatgaagttggtttttgcggcggccaaagttttccagtagctagagaaaattgtttattagctgctgggcgtggcgaagggggaggtgcccggcaaggtcgcctgtcagcataaattataagtgagaattcaaaaaaaaaaaaaatattacgcagttgaagttttggtttgttagataaatgaaacttaagctaatttacagtgcgataaaatgtatcccatagctatcaatttacctccaaagctgcaaattcttaaatacaatgcaatctgattataaattttgggttggcattaaacaatttcttagtgacacttttacaatcaaacaaatctttgctgatgacagcttaaagtcttaaaatcgccttttgaattaaatttccattgcaagtaattggatttgtggggaaattgcctttgctgggctggcattaactactcataaatcaaaatgtgctttcaacattaaaactcgtatctacgataagttctacatttctcagtccctctatttttgccttgtgcaaattaatttgaaatatgtgtcacattgcctggtttacttggaagtttttgcttttgttggccagacgacggggcacattaatatgtaattagcagcaaatgacctcaatttttgcggagggcttgccgcttggcagccaggaaagtactctctctggattgggatgatgaaagtcccacgtgtccaatggcatttgatggcgttttaagtgccaccgaatgaacagctgagtaatgctgccctgcggtattcgttgctcatcatcgacatcatcatcggatactatatagcacgaattgaggttccataaaaaaaaaatgtggaaggaatacctccaaaaccataaatttatgtgagcgtggcaaacaaattgccttccgtatgggaaattattgcgtgtgtgcacccaaataaagtgggaaacagacggtggagtggaaaagtcggaaaaaacgcggagagtcgaggcagcgggtgggaaagtgggcgggagcagggcacaggaatcgacgacaaatcatgaatttgtcaaggcacatcagcaagctggaaatacctgaaaatacctgaaattacaaccatgacacgtgagcatttacacaatccacgttaagtcaccaaacttgtgcacagcaaacgctaaatacgagtagttcttttgaatatttaaatataaaaaataaaatttttacaaattttacaaagactagactaaactagttgtttattgtttgctgcttaatataagtatttatttatttaaagacgaacccaaaaagatcaaaactttttccgtgtgcttaaacaagcagcagaagtcacttgacttaacccatgacatgtgtcgcttgttttgacccccttaacactactttgcctctcttttttggccagcttatttcgttattgatttcggggtgttgaaagattttccttttcccctggggctttggcaacattttgactgccattaaagttcaccaaatttctggcatgcgatttttctcacacgtttcgtaatgtcgatgggaaaaatcttatgtggcaatcgtctggcgattttaatttgtcgccttcttttcgatttatctgtgctttggggaaaatgttttacaagttggtgaaatttcacggcattttcgttgcgttgtcttcttgagtttttcccgatgatttttgattaattgctcctcgctgcccgaaagcgatttaagttttttgtctttgcttctgttcgcttctttataaattggatattaactaatgagcttaagtgatttggttgcattttcagttttttctgttggtattttgtttgggcattgtgaaagtattagagctgaagaaaaatgtattttcgctgtgtgtgttctatagaaagggaaaattaagttgctgttgatgtgcgcgtgggaattacgaaagtcattcatggttgcattgggtgggccatcaatggattatataagtcagtaatttattttatttcggtgtaattctattttaaaggaactgttcctcaatttcaaaccgaaattaatatgtttgatgtgcacctaccccaattcaatttcacttaaacgcccacaaatctctgtatgataccactatgcccatatcggtgtcctgtggacttcaaagcgatttttagccagccacttagacgcccatcaaaatgttccgacttgttaaaataaaacgggcaatagaaaaaagaattgcttggcccacaacaagcagggcacaatgccggctattacactatacagacaaataattccaactcatgaatcacatgacttatttataaacgacaccagcggcccatccatccgcggcactaactcaacaaaactcaacccagcgcagcccaaactctatttttgcccgattttctcgctcgatagacccggcaaaaaataaaaaaccggcgatgggaataaaaaaagtttcggtggccgaaaagagcagcaaacatcatcggtagtacggaatcatctatcccaactaatgcaacaaaaaacaaaacaagcgaaattagttcaaattctatatttaaaagtaggactgtcggcaaaatgttgctgcatctttagctccaccgcttttccgtcgcttttccaaacgaagcgcaacgccgtggaaaacacttgtttcgcttttcggcttttccgagcacaaactttgttgcacagtgtttgtgagtggatgtggcaatatccgcaaggtgaacagaggaattaggaattatatagatttaaaaaaatttcataaatttgatttaatataaaatatataacagagaatatcagaattttgttgtgctgcaagatacttttatttattttgtagtatctcttaaactgttggttgattttgaaagatcaaaacattatgttctcaaagctaatatgataatttcacttttgattactatacaaatagaagtgtatcttcaagtggcttagaccaaactttaatcagagctcgactatcttttgttccagtattctttatctcgccgcagaaatcgccattgaaagagttgttgaaatgtttacgctcagcttcgtccattgtacatggatggaaaatattggggggcactcgagcaaaacggcgccggttgccgatgcccagaatcaattaggtttttgctttgtaaccaaagttggccacttccccatggaaagagcaagatttagcaaactttttgtacgtcaattaatacatttatgcatgtttttaatggacacttttagcgtttctgggatttccgttttgcgtttccagtcgagtgcgctaatgtgctaaattctgctcgaaaaccatttcacattgctcgaacttggctcttgtttttgtttgcactcaaacgaaaaatgtatgtatgcgttctctttggaaaacaaacaatttgaagaataacaataattcttacaacgaaaagaccgagtggaaaaaccaatatttggctggattgctatttatacagcaattcttcagttgaccgcaatttcgacgaatatgaattttaatgttttgctggctcctttgcgatgcgatcataatttaagaccttggggaatatgatgcaatttcggtatttatgaatgcctaaatgttatggctttatacaaacaagtggcttttttcggttctttaattttaaacaaagttacagaacttccactgatccacattcaagtgtcaaatagctgtaagaaaaattagaacaaagcctctaattaaaacagacacgaaggcaacgatagatcttccacaaacaccccgactaatgacgacttcagatgaaattccgcctaggaaaaacaacattaacatttcttatcgcgcagtcacttcaatttgcacatttctgcgcttcgtcggctttctgtgaagtatctatctcaatcattgaatcaccgagcatagcgtgctgtcttcccatccaacatttccagctatttgcaatggtttcctaaccccaatgctattgtaagccatatcccactgcccatatatgacataaactattgcagtatggaagaaaaagtgtggcactgccaatgagcaggttgtcagccagccagccagccagtctatatgcccatctatgagtcggagtcattagacttggctaacaagtgggagtgctggctggtaataccccttccggagaggggtctttgctatttggtaatcgttttgagaccgctaagcaaagtctgacaaactgatcaaacagaatgtgacaaacaaaagtatgattgtgtgaataacaactttacaatattagatacaagatgtatctatatagagtaacttatatattgatgaactcatagtaccgaaatgaactaaagagcgtaatatcataacccaatcccattccaaacccatcttgtatcgtgcgaaattagctgagttatatgagtagatataattgaagtgagccacttctacttctccagccacttgcacagatttatgcccactccacctttgctatgacttccattagagctgcttagttctcggatggagtgtctccggcttcatggcgaccactttggagcactgcactccagttaagtgtcgttattgttaccaccaaccatctaccatccagcatttaccatggcgatggcttgtctgcggtctgcgacgacatcaaatgctgctaatgttaatcaataactcatgcgttaaacaaaagctgcgtgcttgccgcgattctcgtctggtttggtttgtagctctcattgtgcttcactcttgaagttgtcagtctgggtatgttgtcattaaagtgcatttaatttgagtgaaataaattgaattttttaaatctatatatttgaaataagttttcctttgctgcgcactatgccaaattccacttcattatttgatgtctgtattaaaagtgggtagagcaattagattccagcataatttaaaacaaagagtcacctacttacgtttgagaacaaaagaattgattaatgagaattttcgcaagataaaaaccttgtatataagtaaatttgccagatctcgcataataaactcattgtgccgctctccgcaaaggaagtgaacaatttaattattctacactcgcagaagattcttttgaggttaagagggcaaccacgaagtgcaatcactgccagtcgcttgcaatggccattgaatcaaattggcatagccaagtgaaagtatgcaaatgagttgagtacgcaatgtttcaacaagaggatataaacttcaattaaaattgtggcttatcgattgggcatgcacgcaaataaaaccaattttgcggatttaaatacactacaaaagtggtaataccactagaaatgtgctgtgtactgggtatgcaaaacacaagtaaataagaaatgcaacgaaaatcgttggggaatacgttgtttgggggataaatccctcaaacgtttagatctcacaatcacccactgccactctccttgtagaacgaccaaacaaagctgagtgcaaacagagctgcagctgcaattaagtttaatggaagctcattaagagtacgaattgtttctgctccgactggagtcgagggagatggcaaacggttgcataatgaatgcagatgcatatacatatgtatatgtatatatatgcaactggcccgtgggctgcagatggatgcctgccacagcaataacgacgaattattgaggaaactgcaattcgaagttttgctgtttgctggcaacgagcggaagtcgcctaattgccccgtcaatttttcttttcactttttgcatttgccaaaggccaaagatcaattgctggcctggccaagtgccatcaaaaaaaataaatagtcaaaaaaaaaaaaaacctggaaaatggcagctcagttgtcagaatttttatggattttgtcatggctcttaatgtcgtctgtgtccttgttgatgtggcaattaaaatgcagccagtggcatctattcgcaaaaaaaaaaaaaaacagacaaggaattaattgacagcttgtaaaagtgaacatttacaagtgtcgcaagtaaagagggagacggaattgctttgggaatttcgcaataaacacctgattcaggtgacgaaatagaatcttcaggaaactaagacttaaaatggttccaagtattgaaaaagagttttctttgattctacagtcaaacaaactactaatgtagtggattcttatattttcataaaacgcataaaatattaaaaaaatatatatttaaatatcaattgcacatgaggtgataagcccggttttgcgaagagaagggaatgctggccatagtaatcctgatgactggaggtgttggggtatgcataaaccccaatcgttctgaccagaaaactgccttcaaagtggtggcaacatcggtgaaagggtaagcgtgattctccagcccaaaaagctgacaaatgataggcaaaggtgcgttcctagcaggtgaaaatttgggctggaactttgcctttgcctgtgacattcctacaaagtacagataattctatgggattttctgtccctttttgaataggggtatatccgaatagggaatcacctcattggccacagtgatggtaattacaagatatgcattaaatggattacatatatgtatatatatatatatccatagtatttgttcttctgcaagcgcttaaatcgcgtacttatctcccctttttggttttcgttaatgtctcccctctgattttcatgaatgtctcgacatttgcatttcattaataatgcattttaattacgaaccatcgcagttgcaactgctcctcagcttttgcactttgtggtcggactggggatgatataataaatatttataacaacgtcacggaaaaggtacatacgttgctatttaaaaattaacaatctgtttataaggcggttagtcccaatagcgccctctcgttttcgccagcctctagccgactctttctgttcaatcgattctctcactcgatttccgctagtgtttaacgcttcagcgaattcttcagcgtgtcgatgggttcgtttcacgttttgcataattaaatctatttaccgcccagtcgccgactttccacccgcctttccctggattttttttttataatgcctgaaaactccacatttgtagctcgcactggttagctgtgctgatgaacttgtttcctacttcagccttccaaggcggaaatgttcgcctttcttcggggattggctttgaccaaggcggcgccttaaatggtgacacagaaagcaaaccttggcagtgaaaatatatttttgccaaacggtagctgggcttgccggtaaacaatgttcgctgcaaaaactccgaatgacttggcacttagtttacgcagtggaattgatttgtgttcgcttttattttctttatgcacggggttatgttgatttaggatgtacttgctaaaaaacagattttctcgaaataaaattgctttttacaatcggtggtcattgctgaatttatatttataatttatacgttttccatgtagtatcatcaagcagtaatgccattttgatgcttgagatgctcattcatgaaagtgaaattgttacttgatgatagtacatttatagagagatgatctatccttttggctctggtccacaatttgagattactgagcttgtaagctactgctaatctttgcacgaattgatagttcaagcagcataaagaattctcgctgttagctttccagtcagtttttcaacttatgggagaaacgctctcatttctaaccacgattcttcgaatgtcaccccgctgtatatcgaaagagataactaggtccttgtccacgcccattgaagctcctgcattgtcgtacaatccacaatagttgggtgccgagaagacggtgaccaattggcgtttggcaaagaactcgtatccatcctccaccacctggtgggcacgacacaccagatcgaagtcgttcttttgcagaaacttctcgaggacatcgcgaccatagagatagctaacacctcgatcactcgatgtccagccgaatccatagcgatccggatcgctccacaacagatcgcatagcagacccgtttcgggcacttcagtgggacgggcaatcgattcgatgttgctcagctccttcagctgcggactcagtccgccgtggcaacagaagatgcgatgggaaatgatggctgccacgggcatgcagttgtagcaatcgacaaaggttttccacagcttcaccgtgtagcgccgcttgcactcgtcaaagaatccatagactcgattcaccgactgcgattcgtgatttccgcgcagtaggtaaatatgctttgggaacttgacgcgcagtgccaagagcagggtgatcgtttccaccgaattcttgcccctgtccacgtaatccccgagaaatagataccgtgtctgcggcggatatccgcattgatcgaggatcttcagcagatcataaaactgcccgtgtatgtcgcccacaactcgaatgggtgccggaacattgagcaacatgggctcgtccaggaaaagttcacgtgccagggtgcacagtaagttcacttctgactccaacaatggaagtctttgcatctttgagcgtcgaaagctcatcagtttattgagcaaatcgttcagattcagggcaccaggcagacggtagtcagcattcgcttcgctattcgacaactgccccgcgaaatgtaaactgtgcagtgtatccacggccatcgtttgggtgggtgaaatcaacaagtgtattcttaaataataaaaaactgacagaaaatgtaaagccagtggatcacaggaaaaattaggcaatctttaactaacaaatattttgcattattataaatggtagctcatcatcaactcgttgtaactgcaattaatgcgacaagaaattaaaattaacgattttccgatttgcgccgcagtcgccggaaagcgagtaaataaatatgaatgaaaaatgtcttttggctgctgcggccaacgacaaaacaactttttgccctagttggatgagcgaaaaaaaatgcagttatgttgttggcaagcggaaacgcagttggcactgctaattccttttggcaactctcgcttttttctttcagcggtttcctgctgaaattttcctctttttgtaaagttttcaattagcgagctgtcgacggaagtcgtacgtaaaaaatgcaagcgaaaaaatagttgaacagcggcgacgcaaaggaaatttcacccacttaacggaaaggcataaatttgacgcgtcttccaattgattttccaattttcacctgctttgtttgtttctgttttgtgattgctcagcgacgcttgaagaatgtttgcaataatttcacagccttatgaatttttaagttccgtcgctgcgttacaaagttttcagattgttggaaaggctacggaaaatgcgaaaattatggtcgatgaccggttgaaaagttagcactagttataggcatattttcactgatttaatttgatgtatattgagcagacgattgttgagtaattagtttgaaatcataactaatggatgttcactgtcttcccttacagtggacgctcgtacagcaaggacagccacaagagttcgcacaccgacttgagtttaatgtgcaatgcctcatcgtcccggccatcgaactctgcgtctggaagcggatcgccgaagctattggcaaacactcaattgcgtaagtacattgtatatatataatgtttataatagtgtaccttaatattataagtgatacatgatatgatgatattcaaaattatattttgtaaggtttatactaaatgaatcatttgtggccatcacagttaagtattctacaaagttttgcatatgaaaatgagatattttaaatttaatttgaaagcctaaaagtgtgctttacaatttcaaacttctgatcgcacttggtaaactttctagcgcgcaagcatttcaaagcagtgtggccaagcagtgaatgttgccgcaacatgtatagtatagtgcaccacaaccagataaacgaaactatctctcaccgcaaataaactttgatggctcgagccaaacttcgaaactgctaagtagaatgctcaaagttttaagccgcgaaccggcttttcatcgaccaccaagcggctgctcgctaagagctccgttttatggcgaagagcgcgattttgtgagcgctgaagttgtagatacaaatgtatctggtgtcgtcgataaaacggcatttggcttttgcctacagtttgcttttcgctgctgtctcttcagttgacggcgggttttcaatgctaacgtgtgccgctcgctctccgttctttgcgttgttcgtgttcttcgtgatctcgattagatcgcgtttcgtgatcgagagggaaaataattaccgaaattggtcatgaaacaaggcccaaagtgttttgtgtgatagtgatggatcaaaaatcaatcatttaatgttatctatagtctattgaaactgcaaattgcaggcgggtcagaaataacacataaatgattcatagtttttacttaaaatggctcccatttaaagtcctttttgcacccctaaacttatttatacctttatattaaccccgtctgtgaaacaggttttccagctttttcatagaatgccggttgcctggggtttcttgtttatttcgaaaatgtgtgtaaaatgtttccagctgaaacaaaagcatcgtctggcatttccagactcacttttgaccaccgaaacccgaaacccatccaaccaccttcgactgcattattcatttggtcttatttctctgctcttgacgtcatttctgtgtatttcaatttggtacttatttcgctttttacgtgttgacactggatatccaaagaatgtaaaaaagcataaaggatttctcgagtaaaaatcgcattagcttggcagggcaatcaatcaatcagtgggtgctctcccctttcattcaattttcttgccaacccgacaaagaattcttctgggcttctgctggccataaattatgttggtcgtaatcagttttgttacagtttgtgccttggctttctcacgaacttttgcgaagccgcaaaatcaccccaactctctctgcgtctctctatagacccgattaccgttagcttttgtctaggagaagaatccgccaggtgaagaaaaaggggtggggagaagagttcatttacctatggcagttgaaaacgtgcttctcgtcgcaagtctgggatcaaactacatcgccattcaattggaagctctgaaaggcttctacttacctgcctacctttgtccaacttcgccaaagtttcgcgaagtgtaatcccataatgaatggctaagtcggaggtgatgggatgaacataatgatgccgggatataagcttctctcgacgttgatttgggtgtgcggaacattacaatgagatcacctcaacacctggtgacatcagtgggatgggagattaaagttttgcttctcttttggttgatttggattaccttaaatgaatatatcaaagttttgtcattaactcatagaatcaattctgaataacagctttagtgtcagatcgtaaagtccaagaagactattaaatcacttatccgcttatgttattacggaaatcatcagtgggaaaaatggtcagtaggcgtaaccaactgtttgcacacacagaggaatctcactaatgttctatatccgtaatgtcagctcaacggatataagccctatatggttgggcatatttaagaccttatttatggggttttctagactctcataccgccaaagacgacacctgtttccggccttatctactggtttcgatcgggcatctttttgagtccactccgccgttggctttgatttttccacaactggctgctgtggctataattttcatcaaacagtcgacagacagttctcgttggtttgttgctagaaaacaagcggcttttcgtggtgtgcgtggctttccatctgtgtgcatttctcttcgcctttcatctgtgtgtttgtgcggcatgaacgactctttcttaattttcacttgacgtgctggcatgcttttgtgcttttttacattattattatcatatttgcattttttctgcatctcttgtctgctcggcttgtcgttgtccgccgtctctctctctctttgccgtgcattaaattattatttactgtgtacagtggggcctcgatggggaagatgatactcctggggttcggtgtcggcttcagcttttgtctctgcactgataaaaatattgtggccagcagtgttttcaaagctacaattatgataagaatattttggcttaagggaattggctttagagcgcagactgtagcctcttttcaattcaattaatctctataaaggaacatatttaccaattcgttcttcaatgtcaacttgattgaaattattattctctgtgtatttggtttgctttcattttgctctacctcaccctatctccctttcactctatctctttcgctatcccgctcttgctatggcgcttaataattatgtgggaaattgcaaaataatgctagacagaaatatttctagtatttctttcattttctgtgctttgtgtgtttcgtttcgttttgcacttgtgtttccttttttttttgcattttccattcgctgtttttgtacaattcgcttaactatgcgagaaagtgttgtgggcgttatgttgttaaaaattatgctgcaaaatatcagcagcaaaaaactgcaacaccgccgaccgacaaagaaactaaaaatgaaatgcattcaaatggaattgtggctgcttttcaatttgccaacattgtgaaggttgcgcaagggaaaaactgaatttccatcaaggaatttttcaggttttctaaaggaaatagaaatttaaaaggaaatagatcattgacagattattctttatcaaaaaaaggaaagtttgatatttataataataatagattgattcgcattgaccagttgatcccggccactttcccattccttaaactcctataccttttggccataatgcgattaccataattgcatggaacacccaaaaaactgataccttttccgattcaagtgcaagctcacctcaggaataaactatacaacaaaaatgtatctttagatggctgtcaactttcacttgatatttttcgatcgatgcaatcggaaggtgtattgtctgtttttttttttactttgttatgttttttgcataatttcctacggctctcgttgttggataagaaacgaaggcgaaacacttttcattttgccataatgaagcgcttatatgccgcgaacatcatgtgcctgccaatcacaaagaccaaaaatggtcagaaatcagctgtttgtgtggcgaccaaacaaatttcaactggtcactgaaccattcactccattcagagagctagccaaattgatcaaaaactgggctgccgatgtgttgataatgttaacgaagattgaatcggctggtgtagttgcatgtaccatgaatatcgcatttcaattctagcgtgccgactcttatgctgctgtcagttttttaacgagctctttaaataaaagtaaaacgagaaaactagagcagtttatgataaggtttacgagacactttgttgaattgctgtgttaaagtcaaacggaaaacaagtaataagtttcaggctgattgattttgcatgtgatatatttatgtgttttctggaactaagactgcgtaaatatattttagctgtctaactttaccactactttttattgggtaatttcttcgtcatttaccattgggtttttcgattcacagaatcacctgcatttcgtgtttgattgatcgcagcatttaaaaccgaacgttgtcttcttgctgagttgttaacgagggaaagacagggaaatgagatgggacccccgaagattcgatgcttttaaactctgctcaaacaacatcaacttgatcacgcattcgtggctaatttgcatatcgaagtaagccattgaatgccgggactcgaacgagtcaattggtgggtctcgacttgtcaaatggatccgctcgtcgcggagtcataaagtgcatttagtgcttagtattcggcttaattcaataaattaattgtgtcgttagactcgctcaacttttaccacacacttcctgtcgaccaagcacgtaacttgcgttgctagaaaaactatgctacagagtgctacagactgacaattgtcattcagatggttatttaatgacccaagccaagggccgcgcgttgggcgccaaatttttctctttgggggtcgcacgtgcggtcgcttagaaaatatcgccagacagccggaagcatttcataggccgttgttaataatcactctcgttagatgtccaaaaaaatacacatgaacactcaaccaactatattgtttgtctaatggaaatctgtgggactgttttaacaggtgcccaacaaattgatggccggaatttgttttggctttgaaagtgactaggcaattttttgggttttcagaaagcgtaaaggcatcgaatcgaatagattggatttggctttttactaagattaggtttgatttctaaatttaagttgtaagctgttatcttctactcaattaaatattaactttacctcttcttactcacatcagctgggaagttatttagctctgtttgtgaatcaatactcattgtttgtttcttagcttttaaataagaattgaattgtcaaggcaattgcaaaaattggccaaaattgaggtgaagtgatgtcgacagctcaattagaccacaaatgaggttgctgtcgtcatcgaaagaagacggcaacctactgagggatacaaaattagcgtttgaaaaaaaagaagtcaaaatgaggcaagtgttggcttatgcaattcacacattggtctaatgcatattatgccacttgctgtgcaaacagggcactcaaagaaaatctcaattttttcacttaataaaagccatttaaaatgccattgagcgcatttaaatcaaagattctgttttctaaattatattataatatattcatttattctatattcacattttttgttagttttcaattctttttgcttgcacctatttaatggatattttttgaaaacaaattgccgccacttgcgcgccggcagtcagaggaaaaagtgtgccacatgaaaaagaaataaggaaaaaattagctggcaaatgcaaccccctccgcggccgaaaagaaaatcccgggggcaaacgacagcgttttaaaaataaaattgcattatgagcacactcgcatttgtatttgccattttccccttttaatttttgttttggttggcaataaaattgtgtgcgggattgcccaactgtttgtgtacttgcgaatggaaactttattatcatttgccggaaaattgggtttcccatttcaaatattttatttgaataattgagcactaaaatgttagtgtttctatgcaattaagctgaatgtgattcttgcatatcattactgaattgtgtgttttctcatgtgagtgagttccctactttgccattagcctatctgttcgtttagctttctaaaatcatttagagaatattaaccccgtttagagtggtttcagttttccaccaacttatgaatcatcattcggctatctttccattctggttcttttccacttacagggtatttgaagacgcatttgcttttgaagatctatgccatattctatatttataatttggcccagcgcccttttttgtgttcaatttactggagcaaataacgatgaaaatgaacatttcaatgacatcattttgcagttttaagcgaaaatcagaattggggttaacgagtgtgtctcagttgcttgctgcctggaaatttttaatgtccgatgcagtttttcgcagtttgctgtcagtttaacgattgtttatatcgaatctgcgggggtctagcggtcgattttatttcggtaccgtttccgcggacatcgggtggagtttccttttactgttttgcatgcgcattggcagactccagctgatggtgattttttaatgggtgcacactttttatttttatgcacgccacattaataaaaagagtgggaaattgttttccttttcgcattggtaattgttaattttttattgccggcggaccgggggtagccccctcataaaaacacatctatgggtacaacgaactcatagtttacgatagttgttggtcacataaaaaacatggcacagatcgaactgaaatggtcgagccgtaatatggtttatgatcgcccagtgggtgaggtttaaagaaataaaatgtggtataaaatccagattaaatggatctgatacaaacttagcgtttctcttctattttatggatcaatcgaaagttggtctgcatgggaaatatttatggtgcttaaatcggctcaaagtaagagcatttaagccacatttagttgcgagtattattcaatctagagacgccatcgtaactttcctccttttgctgcacttgtctcggttaaattatgtagatttatgcccacctccgcctttgtgttgtcctggctggaaagttccttccgagctcgattaattgcttttgcagcttccgccgcttttcacctgcttttcacccgccggaggaaagcttgccaatgaaaaatgtttgaacgcccacacgacggcaacgtccaacttttaattgaaagtcatattcaatttttgcatattaatttacagggggcccgcggcaattgggttggttcatcagctgtcattggcagaaagggaaaacaaaaaatgtaaaaataaaagaaaaaagcagctgcaacaccgagttgcccttgaggactatcccacaacttccgtttcacatttgtttttgttgcggtgcagaacttccggcattcgaggcatgtgacattcggtattgaatgatgtgccaagtcatgtgaattatgctccccaaagttttccaatcgactaaatttggagccaacaataaaatcgaatggcactcgaattccccccgaacatttgacacctttttgtgttgcatttcgagctaattatagttggcctggtcggattgacatttgcaggcctgactaaactcacaaaaaagtcaaagctaaagagggcgccggcgctattcatagcatttaggttgtgcctgctctctgggatactggtgcccattagtccaaaatctgtgtgggatatgcgcggttttagagtcaactagcgcgacatatcccaagtagcattgtctttgattgcacaagttattcttcagttaaatcaaaaaattatatataaatgtagttatgcaattgttttgcgatatattcagcaagcagaagataattttgaaatatgcgcatatcttaaccactgtgccagcataaatttcgatttttttccgaaatgcgtgtcttttccgtcgttttgtcttttcactcagtagttttcggtgccgctgttcccaattcaaatgctctgccacaaatcatagtgtgcaatttgtcagctcatttgggtttgggtttcgttttggctcgcctttgtccgtcgagttatgatgacattcaaacatgtcagcaactgccgtgcaaagtcggaaattcaggcacttggagtgggaaatgggcattttccttcactcgaagatttatttggactgtgttgcaatgttttcttggccatccatgcacctgcttcacttcgctctgctgtgctttttccgcagccaaaaaatcggggtcgcattgtcgcatagagtgcctcctattttctagaccatttatcattcatgttgcgaaatgcagcctgcagttagtacaacaaacaggggcatttatttttgcacttacaatgtagattaaatgggttctggtggatggatggtatagttgaatgaccaaatcttcaaatactctggcagaaaattgtatcttacagttcatctagataatgtatcttttagatatgcaagaattacctatcagtttcatttggagcataccctctggaagggtatgataaatagttgcactaaatccgcacgcttaattaaatgtaaaattgttttcatgtctgggctataaagtattcgtctatttcgaatttgtgtgtctaggttgttggcatcctaaaaagattttatgtctaattcttggaatgctttcgcctttagtatgtggaaaatgccatcaaattggagcacccattgatggtgccattaacaataatttaattaaatcggattacagtcggttttgtgggggagtcatgagttaaatgaggcgtctaattgaatcggctaatggccgccaattaaatctaaccattataaatccattcaatgtcaactacaggaggaaatatgtacatggcaataaaaaactaaacaaaaaacagtactgaaaatgtcaaccttgtggtaatcatagagcaaaagtggctttgcaaaaaaaaaaaaacgtggtacaccgagtgcacaaagctaaaaaatgcattcaagcggcaattgtcagcgacatcaaattaaattcgccgccatcgccgacgtctggagattgtgcgcgggtgtattaaacgagagtctgtgaaagtgaaattcgaagtcgtgatatcgatcagattcagttcagagcaggcacacactctccggaaaactcttgtgcggatcaaagacactttgtacaaatcgaaaatccagccagtcaaaatgggtgcccacagttcgaaggagaaactatcgcgttcgtactccgagcgctacatccatagccaaatgatcgagcgcgaacgcttcggaagttttggcaagcgggcctccaaaggcctcaccaaaggtgagtttctggcggggatcgggctgtaaatgctaatgaggtgaagtggttatgggctaaacccacatcgagggcattggcttgcagcgtaaacagagccggagttgcgtaagcatcaacgtgggttatcttagatgataagccatcaccttttttgtgacaaacggggcaaacagcttaaggttaagtaagagggaattccagataaatttaaaagaaaaaaggttaacttttataggatacatatttagcgagctcagaatgaaattataccaaatggttagtattcaaatttgtctgcacttaatgtttaactgcgtacaaaagcagaaccacccaattcacataacctccatttcaaacgtaatcccttagcacttttaagctttgttggaaattccaactgcggtccgcttatcaagcccccactatgccacaaaaggattacgtgactcggtgcaacgctccgcccagataaaaaaatgattttcattttcatttggcctaagccaggttgcagccagcgtgcaacttttatttccatgtccatgtccagcacaattagccgtcagctggaataaatttattacgttgtccatgccgcagacgcttctgtggtcaactcggaaatgcattttcccgccggctccgttgattagcggccctaaagtggccaggccaggcccacaaatggtggctaacaagtgccgagttcgggccaacttgaattgaagatggacaatggatggtcgttaaggaggcccctgagtttaggtgaatccaagttgattagtggcgagcagggtatgaaatatgattgattgccattggaaatttgttactaccaagtggaaaattagattaactaaagaaagttgtgtcttgttgtatatatagcttcttattagtcattccaactgttgtaataccaaatgctagaacaaaaatatatgtttaagtaccgccagcaatgtcttaatcatttcttgaaaaaactaaagtgcactcaagatcttaagatcatatgcgatggaactcgttctccacacccgttgagaactaatggacgtctgcacgggcataaaacgatttcaccctcggtttgtgtacagacacttcaattatggaaactctttgttttaatccacaaaattttaaaatgcaaatagcgggacccccaactgtttgaaaacaagtgtgattttgcctttgagtttttaaatgggaatccaagtgcacagctcgattcaaaccaacccagacactttgagtctttgcgtttcgtggcaacgtgtttgcgcataaattacgcatccgcatcatccacatattgatttcctagcaattttttttttcacatttctcccctcatttttgtctcttgcaggagctgccaaaaagcgcgatgtgcgcaatctgagcatatcgccaaccgatctgggtccgccaccaaaaacccaacagacaaccaagggacaatcgacgcgcagcaaatcatcggccacgcccacgccaacgcccacatccatacgtaagtgcagagatttacatatcactaggataagttgaaatcttaatgggtaaagccttaaatacatattttatttataagagttgtcaacttgctgagcttggagcaaagtatagctttgaatattttagaattatattccaattaaacttttgtgacttgagctatgccacttgaaatcgcataaaatctccaacatcgttcttactctgttcacagacggaagacactttttacagcttcttggaaatccccttgaaaggtgtcaactgttgtcaagagtccgccctgcaacgccccacctttttcgctcactagagttgttatagcctggctaaatgcgaaatcatcactcaggtgaaatgatgcacaacttgttgccctcaatgaattgctaaatctgtccacctgaccgtcggtctgttcccttatttcactcaccttgctccgccgtaatggtgtcgtatcttgaagtcactgtaattcaattgagggcgtgtgtgctggcttccagttggtgttggaaaaataatttagcgctccattcccacagtttgatgtttggatctgaaggggaaaactgggaaaaatctgtgccagctgcagttgggcaacagctgctgaggtgacactttgtctgcagtctccttcgacgcagcttgcccccaaactcctggcagagtacatgttgccacatgtgcctgcgaattctgcgcaaatttggctccgttgactcattcattccctgtgagtcatcttaaatcccccatcaagttgaaatgaatgtggtaattgcttcgcctggagtcactgattgcttcattgattttgttgaagaggcaagagatacattttctcgagagcctctcaaattatttggtattatcctaacataaatctcgaggaattttaaagtactgtgttgattgaaatcatcacgtctgcggaaaacctaattaaatcatttttgccacttgctcaattaacgcatttcgttcattgtattcgaatttcgatgaccccataaatttgtatatttatgctgatacaaaactggagcaaccaaaactgaaacttaataaatcatattactgctataattgttttaaagaattagaaaggatggaagagttaacttcccggagttttagtggtagttttaaactccaattattttctttagttttttaagtttctgcctgactttgtgcgggtaccattattttgtttacgatcgtgtacgggtcatgcaaatttttgcaggcctgcataaattagccttaatagggaaatgcattgtgttcgcctgccgagatgttgctaaattgcttgaaatgtcgcagggctggaaatgaaatcgctaagagaatgcttactcctccgttggattctatttataaagtcggtctaatttaaaatgacttcttttgtcccgatctccgatcatcgtcattgtccagtaggaatttccagagtgaacatgcttatcgcaccattttcacaagcagaaaagcatgaaaaacgatgtagaaacgtgttttgcatacccgatggggaaaaacgagctttttgctttcggctggaatttcttgtactaattaagatttattttgccaacatgcaatttcatgcaattaatgcctctagagattaatcaaaaagaaaacatatttacaaattctaagccaagaccatatataatagctactctatttttaatggtttatcaaccaaaacgtgccgtgagttctttcacctcgccactatctccgctgataagcagaagttcgattaacacacccattccagctaattggatggcccataatcgaataactattcagtattcactggacaagcagcgcgatggtgcaaacgtgatggttttcaagcccacactgcactccattaacccacgtctgccggttttggccaaaagaaaaccactaaagaaatgattattggcataattgcgcaagatcgattgagtcgtcggcactttcgcacctctttgtaacgttcagattagctgcccacgcatctgattttcgtaagagatccggttaggttttataccttatgggtttaattcaccaattgaaagatgtggtggtcataatagttcttcatgggtggtagctccaataaagttcagaactctcgtctgacattgacattcgtggcattgtaaactcttttttcggcctgcacaattccattgtttgtacttgtgcccggtttttttttctagacttgtactagccatttatggcttctggcgctggtttgtttagcgttttgttttgcgttttttttttttccttttttttgcctttttgtttttgcggttagcattgaaaccgaagcggtgacaaccgggctaaaaagatctcagcacgagctggagaattgcaaagacaatatgggagatacatacgtattcccaagtggaagtggtcgtgaggtcagttggtggacagtactattcgtacaggaaaataaacagaacaaaagcagcaaattatgctaattattcaaggaaacctgtattgtgtgcaagttgcaagagaaactttagaaactaaagagttaggttaagagttggaaacttaagagagctgccatatggcattcgatttaagagagatccttagcaacatttaactgcttgcctatgatgctttagcaacatttcaatgcattagagaaaatgaacaactagattaattgggataacatatttaaaatgcccatgctgttacctattttagttctcaaatgaaataaaactcagcaacatgttgcgctctctcgaccagcaacatgtgaactgctttctggcactgcttgctgcacgcacctgcctttttcatgccactctaaaaaaacaggtgtttctgttttggcattctttccctgttttgcaccttgtgttgcagcacacaaaaaaaaaaaacgcatgagcactgcaacctggaaatgcaaactggttttcttttgatttcattaatttggtcaaattatgacatgctgggcggccagcgactcgggatcgctgtttccccagccgaattcagactcggattcagttgcagatgcagattctggcgttttctgcgctccctgccacttgagcgttcaggtgcattgatagccggaaagcgggatttttatcataatagttgaaccaagtaggctcaacgaatgtgacaattgctgtagaaatatttcgtacaaaaattataaactttgccttattccaatttgaacaaataaatattgcatccgtattttcattctttatatcatatttcgaatgagacctgatcctcggagtggtatagataatagataatgaaaatatgggcctacgtaggtttattcgcaagcattttggcagtaaaaattcattgggcagtgcagttaaaattataaaaagcatagagaacgacgagttgaaaagtgagttttttccggttgcctgaaagtatgccgcattatttacatacgccctaatcatattaccattcgacacattcattgcagataaacgtttaaatggcactttggccagcacggcagcaattgcaacacccatcaaaggagtggccaccaaatccggagccacaaacaagctgcaacaatcggcaaaaactaaatcaaccgcgagtatcaaaagtccagcaattgtcggcgtttccgagggtaagtgtcaacagaaaagtaaaacatttcgaataagttaattagccgcgcgaagggaaatcgaatttggagcagctcaaattgtaaccccattacttatttcctatttcccttgggccaacgcgaaagacgcgaagtgaaagcatacgaaattcaagtttacttcaaatcaaattaatttttatctgaacgtgccgccaaagttttttgtctggccataaaaatttgttacattgacgcacaatcacaatcacacaatggtcgatgaacaaagttggctggtccattgcaaaatgctctcctggggacagtttttgtgctcaaaagttggctaacttttgtaattaatattaaggcagctaattagccgttcggggattacgaactgagcttctgcgccacattagttatacttattatatttacggctagttctatcttgccttacttgctggtgtcaaatgcgtggcacgcctctaaatgatttcaatggcaaactcagcactttgctgtgtgggttcgtttataagcaaataaaatatttatttgcattgaggtggggcagaatgccactaataggcggtgattatcttaatgggattcgtctatacgacttgcttaactaatttggtcttcttcggtgaaaaaatatctcaaatttccaagcagtaattaagcaaatagtacaatgataagtattatctagtaatagtttaaagacactcttaagttttcccattcgattcaattttagtggcagaacttcttggctttttagctatcagttgggttctttatctgcagcccgttcagtagttgagtaagccagtgaatttaatggccaagttatcccacatacgtatatgtgtatgtgttttgtgtgcttacataatcgtgtgcatgacccccacttggcaggtggttctacattatggccccacacacacactgagagaatttcccctcatcgttctgcgcacaaatgtcacaacttgtttatgccgctttgcgttcacttgtgctgcccccaccaatgaaatttgctttgatgttcagcgagttgtggccgccgtgcgttttgttcttgtttttcatactgggcgttggtgcatactcgagtgacccccacgtactcacccccttctcaactcatgagccactgcatcgttttggcttatttgaagttaaattgtttgttaaatggcataatgcgcactcgcccccctgcaatgtaattctcacccgatctctgggaatattagacgtaagcagagctcgaagcaatcagttttcacccacatctgtttttggcgctgatttcgactattttgtcgaattttatttattgctttcacaccatccactttgggggagcgatcaattaagttgtcatttaattttgattgtgcgtgattgtggcccgcatgtgaagtcgacgttgggaaagttgcgatgatatctgaatgctcttctgcggcttgttggaaaaaaaaatagtaatgaaatcgtacagagatttatagaggattttaatatattgtagctcatctttaaaatacagctaatcttaactttcctacaccaaattctatcttaagagcagttacaattattttttgatagggtatagaataaataaaggaatcgccaaatctttttggttggtttgctatcgggtgtgtgtctgtagctttgtgtggccaaaggcagtccattccgcgtatctgagcgcttgttttcactctaatttatggcctacacacatcaagttcattgatttcagcgcgcagtgtcgccgctatcgtgggcttttctttatggccacttttcacgctcttaaccgattgattgtcaagcgcttttagccatctgtgtgcgatggcacgcttcgagaaagaccacatcatcgtaatctattaactgttttgcattttgcaatggcaaattgctgactggctgggaaaaagaaaaaaaagttaatggccgccgctcttcacaagaaatcaaacaccaacacgcacctttccagtatctttgcattgctctcttcgtgccttttgtttggaaatacttttacttttcttcgacggttttctgccatgcgtaaccaatatgaaaacctattactacttttagtattgagtacgccagcgtttccacaacaatttgcaattcattacgggcccacacacatggaacgcttttgaaagccgaaagatggttgggctcatttagcagattgcttcattggtggcaaataatgtaattgaaatagtgtcgccccaattaatccatgctaccaataaactatgctttcctacataattaccacctactaataaaacaaacaaaaaattaacccacaaaaatgtattgaactgtcagcgttagtttcacaaactcaattcgcatgacaaatttatgcaagttgaaaagattgggatttctcgagtcttataatttgcacacaaaagttgacttaaaccgaagccaaatattgcataaattgttggtagctcttagggcttgagtaatttcgcctttgaataatatattttggcgtgagaactgcgatttgcggtagttatgcataaattttgatcatcgggatttttatgggcatatacattttaaaccaatttcgcaagcactgcaatgagagagttggctttcttcgattcaacaattgttttggtcgcttatgtaagtcaccgaattcctattaatctgaaactttcggttttcgaattacattcaatatccatccggcacacgccatgattatttccttgttaaatcaatttcggtggcctctattttggtttgaatgttcgctgtatccgggtcgagttggttaattctattcaatagaaatgctttcttcgctctccataattatcccagcttaatctcggcaaacctgataaagtttatagccctcaagcttttaactggagcgtggctcttaatgagccggtgtgttcttaccatccgtaatcattataaacttttctccacttctgtatgtgtacatacatgtgtatagcaagcaagcattttgtattttgcatacaaactcggtcgaaaagcaacttttgctgttggccaactgtgacgcgaaagtcatggcgacaatatttgaaaaactcaaaacaaaatatataattacatttgccgcaaaaaggttaaaagttgatatgtaaagggggcggttgctttcgattcgatatatgtaggcgttgaatccatgtggtttccgaaatctgttatttgacattgacacttgggtcgtgcgggacgctggaaattcaaaatattttaataagtttcaacaaaatttgtttccgtcataatatcctgctattctagtttcaaagcgtttttgaaattcaaattcaatctttcgtcgaatgtgctgatttacgttttacttgaggacttttttgtaaggcagcaatttggtggcaagcttttgccatatcattcgctgcacagtcgctggaagttcgagttggagttgaagttgaattggagtggagttggaatcgaaatagcaagacccaagttaaagccggtgaccgaaagcagcgacgttggcgtcgacagagagatcgagaaagagagagcgatcactgtggggatacacttcagttgcgcggcgaactccgagaccagcggacgtcttttattcgcgcagtgtatgaccagtggctaaccaagcaaataaccaagtagcaactgtgtataacagtgcaagtgctgcccagtttgagagccactgacagccccaggcgcatgctccacaaaaatgggtctcaacgagtttgtgtcacttttgtacggctcctcacaaagtctgaatgcccacaaggacgcgtccacgtccacgtacccattgccatcggtcgcggattggaaagagtttcagcagatgttgaaaaatcacaaaaatgtgcaggtcaagaggtacggcttccaggattaccatcactcgcaggactttaagtatggcaaaatatattcgggaatcggaagcgcagcagaagccgcaggcaatggcggcggcggcggagtcggtggaggagtgaccaagaggaatgcctccaatggcgctggccaaaacaaacttctgaacaacaacagcagcacgcataacaacaacatggccaagacatcacggatacccacaaccacctcaaagtccatgacttcctcggcttcctcctccggcagcagtgaactggacattctccgctcgtacacaaagaataccatcaaatcctcgctgacatcgtcgacgccatccagttcctttctatggaactcctttcgcatgccacgcaaacagaaatcttcgctggccgaaaagaaacaaagcggcggtgagtagatgaaaaaaatcaattcgcatactgggaaagtatgctgtgcacaaaaatagatactagatatcagagtggtgatgttcctaaaactcactatctgtaccaaattgttaattgcctggagcagattgtgatttagatttagattccgagtgacccatttagttctccttttctccttcactaagaaaacaatggggaattgtttttttttttggtttctggccgtcggctatttggctaacaaggtagtgaaagatgagatgcgagatctttgagttgggccacacaaaacccactgtgaatcgcattgtataattcgaaaattgcttgggcatgacccacaacccaaagcaagaggaagaagaagaagaagcataagtctaacggcatccaaaactatcttagttatagggtatgaacaatcttatgttctcgactaatgccaaacgaggcgttacaataatttccactgaagtcatttggtgtctgtgctcctaatttccgttttttaatactcttcttcaacacttctttttttgggtttttatgctcagcttggcaaatacgatatttcgttttttttttgccatttcattattttggctcaattatgaaacttcgcctttggctgaaccgctaaaaataaactcaacataagtaagaaataacatcttaattgctggagtttttcctttttcatgtgccaagtcatttatttggtttgaatgttgacacatagtgagatcaccaaggcaaataagtgatttgacaaaagtttcgatggttttagttgaacgatcattagatattgatatgcttattttttggcggtaacccttgtataagaaaagttactataatagatggacataacatatcatcccatacttatttcgaagtttgtgtccacttcaatactttccctatgatttcttggctctattggctgtccctgattctgtaaatgtgatatcctaactgattggcaagtcttatcggggccattaagtatttatgattcctaacacttttacacgaaaacattgaggcatattctgcgcatgtctcgccatccgaaggcgcaacaagaagtggaaaaccgcaagctggccggttggttcactcctcttcttggccatggaccaatatcgattttcggagggcgcctactctgatatgtctctgatattacagcctgttttttctggtatcttaagaatccccgactaactacccccgttgatgatgatgatgacgttgatgactcatcggcggcgagctaccccaacaaaaaaaagtatccaaaactttctctctctgtgtcgcttggctcagcataaaaattgcataatgtactttttcgcttgtgtgtttgttgtgtgacacactgacactcattgtgtatgagatatatgacagccgcagcggcaggacatgcgcagttcgtcgcagagaggctccactgttataacgctcttgtttacagtgcccgccaaactgtactgaaacatttatggtgcgttttccctgggcttttaatgttttcatagcgcgaagtgaattaatacatacatcaaaaagagatggtaattaaatcatagctgctgtgctcattaacggtgcggttgcgctttttggcgctaccaaactgtgaccacatgccttttcttaatggagtcaagtgcaggcagaaaacaaacgaaagaagtccgcatccaagtggcggcttctgggcaacggagcgcaacaaattgttgccactggcgggccagcgaatccagtgagaatccggggagaaaagagaccgccacttgattgatccatgactttcggtctcgatttttggccgacggccaagttgtcaagcgcggaccacggggcgtatgcgcaatgccatttaatagccacagataagcattgaacttgcctttctcccggccaagattgccccgatagcccctataattaaggccatgtgcctgttgcagctttttattaagacatgtggattctcacactaatcgatatgaaatgggtttagggaactatgttaataaaaggggattactagattgcaaaaagcttagcttggcctgctttaaaaatggtgaaatgcaatagaattcactggagtcaattaaaagttaactccaattgtgaattttagtaagccataaataaatttgttaggctattaacacattaattagtcgaattaattaaatacttaatggctttataattatgattttctatcgcacatggttttatggtttttctaatttcgcaaaaatttccagcgattcgccacgctgcccaccttccattccatttgcgcgttataatttgaaatttgtgcgtggataatttaataactttgtgttccccatccgaagtctttcgccattacgctggcctgtcattccccccatttctatttgattctttggccaatttgtcgcgacgcagtgctttgtgaatggctcggcaggccaaataaaagcgaaccgagagagaccctagataataaaccgtgccaccgacttttccattgaattacgcacagcgacgtggaaagtgtcgagctttttcgctctctgtactttgtgtctgtcgatggcagtgcaattaacacttgttgacaagttcactgggccatgcttttacttaacgtatttaacttattgcgtgaaccgcccacgctctttgtggaacaacaacagctgccatgattttgtggcattaaattttgatttatattgggtcattaattagcagccagcagtcgcccagacttttggcttctgtaaaaattaattaagcattgctcatacgccgcgtggcccgctcgtttcgagcgcctgctatggcaattacgtgacccccagtgatgcactgcgccatcctcgactgcttttgtcaccagagctctccattgagcatgataataatttactatgcctcagtagtctccttctgcggctgacgtcacagtttgattttgtgtctcttttaattatggatgatttttgtttattaatgcaaggcgtacatgaacatgatgtacactagaaaaatattctaatgaagacatttttttctaaaattaaaattacgttgtggaattctttacttaaaatatattcctgataaaatggaatttacttttcttatattcacataagttaaaagttcttaagttcgaattttacgtccgattttttccattgtgtacttgtgcgccatttgtgggatcccataatccaccacatggtgaaatcaggccccaaattagcaacaactgcgtggcgaacgatcaacaacggcgaacaacgaggaagatcgacgatgaacaacgaagacacaacgacaacgagaaaagcgcgcctctttcgtttgaattaaattcactaacagtttatgcttagaagtttgcgctatcgcgtcgctcgttcgttgttcgatttataaattttcaccggcggttagccattttttatgtcgtgcgtacgccgagcattggaaatcggaagtggaaaatgtgaatgcggtgatgacaagcagtgcctggaaatcccagtcaaagggctcaacctcattagcgaggttcccaagtgtcgccaattaaaatcgatccatccgccatggcagctacgcgtccattaattgaaatcccagtgcgaaattaagccaaatagagcggaagcacaatgatggcactgtgcgatgtgggcggagctggatccaatgcatccactggatccgatggagctgtcaacgcagatttgtttgcgaactgcgattatgaggacgagggaattggcggtaagctggcgctgggatttcaaattgataagggaatgctttagttttccttaaattctaccatgtatctgaaattaaattgttgaaatatcaaagttgcgtcgcaattttcgtttttctcattcactcgtttttcaatgcaatttatgtttgtatatcagcaaaataaatgttgtgcaaaataaatagaaaaggccgacaagccaaatattaaaagcaacaaagctgaaaccaaaaagcatatgtacaaattttgatgtctggcctagaactttggcacatagcacaaacatgaatttggcataaacatacacacagtaggaaaaaaaaattaaattagtgagtgggtattatgtatatgaatatttattagaatttttattaacaaagcatttatttattattttctttaattcaatgtacactcgattcataactgcctagggtattgcacatttcaaaccatttcaatgccactttcctttacttactcatttgctttccagtcatgaagcttttttctggggtctttgctatcgtgggactttggttattattttcatttgtataacaaccgcaaaataatctgaaaatcatatataaaccgatgatatatgcgtagtaaaagttcgaaattaaacgcacactcagtcatgtaatgattaattagacatttggtatatagtgcactgatttcgtttattttgcgctttttgttgtgttttttttttggctggcaaaagcagaacggtcaatgttttcgtgcacaacttatctaaaaataatcattagaacttgagccaaaaacgaaaagtgttttaaaggcttatttagcctctgagaagcgataggaaaatgaaatgaaaatgcgccaagcgacgacgactgtgcgaccttgaaatgtgcgtttgccgagtgaaaatcatgaactacaaacaagaattaaatacaataaccaccagccataatggatgaaataaaaaatccatgccataaatcccttgatatgcgtctttcatcactgccaacatcgtgggcagtttgaagtgagtttttctgccttttgactctgcctgattgacattctgcagaaatcgatcgtcttcatctacatatatatcttaagatccatatatgtatgtagaatgggctgaagagatattccgctggccctattaccgcccttaattcgtatccactgtttattgggagttgtttatagcgacgcagctgctttccttgattttcaagcaaacaaattggttggcacaaagcataatttagtgcaaatactgtttacattttgtctcattatgggtcggtgaaaagcgatttgaatgacgtgctcatctgttgttttcaatttcatttgggggaagtgtaaattttggttgttcgaatgttgatggctcttccggcttgtaaagtgtacaatatatatattaattatagcaccacagatcttaggcaactttttgtataaaaaaaagcagcgattgtgtatatcaaactaggcctacatactgcgccccttaacatttcttttaatgaattattaaaagcttttggctatcaagatccttggaatttccatgttttttttttttttgcattaatgaatccgctcgcatacttgagatatttcttcataacataatttgcacaaaatcaccgccaggcacttgactctcgccacagaaagtgcttctgtctcgttgctaaaacaatttgttgttaaattgcaattaaagcgttgtctatttcgctacgcacccctggaacccttcacccctccccatcacatcaaccgactcgactgcaaacactgtgaaataaaacagatacaaagttacatttacaaacagtcgagtcgagtgaagtaaagtgattttggctgcttttttcgcttctcccaaaaacgcagctaattgaaatgccagtttgccagttgccagtttcgactggctgctgttgttcgcttttaattacgcgcattttcattggacatgtttttgtgggtcgccatgggttaagacgggttgttgctgtcattgttgttgttgtcggccagcaacgagccgagttttccaaaatcaaaaaaatccgctaaaaaggcgacggcaacaacagcagctgcctaatgccaaataagatatttcggaatttcaattattttccatcgcccagtgctgcaggtacgtccgtcccacagtcccgctgtcccactgtgcagcattcaatgtcacacagtgcccactgtgcacagcacagcatcgcattcgcatttacctcgacacatgtcgggttttggcgaaccgagacccgagacccaaactaaaactcaaatcccaacccaaaccgtcattatgagctcggctgaccgaatgcgaaccctcccggagacactgactccgaatccgaatccgaatctcggtgcgctgatgttgattgatcttgggtgggggagagttttccacacctggtggatggtagatggtggatgtcggatgtcagtggtgacggtggaaagccaccaacactttctattaactttcgcagtaattgtaatttgcgtattttcaaaagaggcatgattttgggcgaaaaaacgatggagcattttatatattatttaaaactgaagttgatagcctttgtgcaactacaagtaatacaaaacccatacgaacctctttcaaaaacaattacacccattcacaccaaattgtcggcggtatttgggaaaatccacgcgcccatgtcaacccaacaaaaaaaaaaaaaaaaaccaagcagaacgaagaatttctgaatgaaatcacccgctgctgagtttttccgagacccataaaaatccaagtgcgaaatgggctggaaaatgggaatgcgaacggaaaagcatagattccggccatataactactgaggtggtcggtttctcagccataaaatgcagacccatcgccatcaggggtctgggtcactcctcagatatgtcagcaacttgttgcgattctacgcgaagacaaaacagggctgtgagaatattctgcgcgaaatcaggggaaaatccgcaacaggattttcttggccttgcaattaattggtcgtagctaatgtcacttaattgcctaattgccatgagaaatgccgtcttcaaaagtcgtgtgccagacttgtttcggtcgtgtgtcattgagatctttcaaagtcgaggtggtggatgaggtccacaggtgatgctgaaggtctgccattaataattatcattaaatatgttctaggaacattcgtgggatatcaaggggaaaatccaattgcagtgcctcaatattgtctgcataatgtccaacttgtctttgcccaaatcaaaatgccattcggaattttgaaagccagcaataatttatgtaataatttatgcttcgatttgctaaacaacataacacatacatttcagacgaatccggtttctttaaatcacagtttgattggtaaacattgcacaatcaattaatgtggctaaaatcgaacgccatcattttagccactttgctggttgtctttgactaatttgttcattattttacaaccttaattaatttcctgaagcagcgggttttgttttatggtagagcttgtatttctctcggggaaaacatagaatataaatcaaatgtgaagttaatcctacaaagaaactactctctctgattcgctatcaattttgttagtattaatttactttcgatggctatagacatacatcccggggtaatgatcttgacaacaactccggaaggcttacaagcttaaatttgctttcgctgcaagcaattgcgatgccaactctagcaaacatgtgcaaacattgacaactttgtatgcgcgactctggctataaatttatgcggtaacataaaaccgtcaacggttgattatggccacacattggatatacatttgtgtatatccatgccgtaaagttttgggcttggccgcagcttcgatttggaatcgggcagacggacgacggcatggctagtaaggaaatcgggccaagttatggccaagcagtcgggctggctggctggcttgctggctgatcgatggtttgatcatggcggggttgctgaactccctcccgccacttttcatgccacataaatatatatatatctatatcccccccaatctgaaggcttgtcaaggccaatttgttgaccaaaaagtggccacgcatcctctctaattgacggccacccgatgcgaggagccatggctatcgggtaattgatgatgatgagatggcccgcctctgacccaaagtggtatttagctggtgacggagggcgtggtgcgacttacacctagatatatagctttcccttttgtcaatggaattatgctgtttttttttttgttttgttatttttgcggccacgaagcaattactcatgtaattttttttggcctggagaagcgtggtggatccacagctgggtgaatcacggttagctcatcatcgttagatcatcaacacaacacctagattttcatctgccagttgatgagcgaagactttcgccacacgaaacttgcgtaatcctagggatttgttgggttacaatttgataataagtggcactttcgatttcgcgttcggcaaattcataaaatggtttcacgttgaaataaagcacttctgaccttgttgtttcttgtgcctttccagaatccctgcgctctggcgtggatcaaaccgaacttcaggagctgaacaatgggcaatctgctaccggttgtccgacgccgccgatggcgcgggactcaaagcgtacgtccattggaaatgagttaccctgtgagacggaggccaagttgaagagatgcgaggaccagcaggatccacaagcatccacgacggcatcacccctaccgatgatcaatccacaggaacaagaagccagtggccaggtcaaagaagcaacaatcaccactgcaaatgaggtaaatcgattctaaatgtatatatattattatttatatatattcacaatcgtcgttattttcatattaaatattaatattaatcatatttaattttgaaaaccagccaaacgccttgtccttgcccgacgaaatcagcaattcggtcagctcgacgacgatgctggccacgccccgcgtagacatagccgcccagtatcccgtcctgaaaccattcacagagaacggagagctggactgtgcccgactggccaagttcttccaggacacccagttcgagaggaaggaggagcaacgccagattctgggcctctccgtaatggtgcagttcatgtccaaagaggtaagtcttaaagtagcgagtagcgagtaactagtagcgagtactgaaggatcagtgagggatttgccaggaaaacaggcgccagggatttatatccctgccatagccctttgaaggcaaatcgaatagatgccggtatagacacttttcgccgtcctttgtaattgccaggcacatgtgccggatcgcctcggatcgggatcacctgctctaataattcccgaattgttcacatatacacgtgctcgtatgcacgactcattgtttgagaaatttgccttaatctacgcttaaagttgagctaattttgtttaattgtgtcagtgccggctaagccgagcccctgaaaactgagccggggatatgggtgcactttttgtgtttgcgctaattaaaaactatacggaaattgtcaaacaaaagttggaaaaatcccccgaacccgttcctttgtccctttcgctttgtgtggaagcctttctccgtcgaaaaatgaaagggtgtgagacggtggcacattcaacttgatccacgaagcagctattcaattaattgtttgccatttttcggtgtaaaggattctgatagaacaaaacgagaaatcgtggatatacgtgtgagttttggcgagatttctgcttgaaaagtatataaacgctaaaggatgcggaaaaatgcggcttaggcaggctttttttgtaaaattttacctgttattttgcaggcaggcaaacctcacttaagtaacaataacaaggcaataaaaatccgcgacaaacgcgaaaaacattattttaacatttgcatatattggcggagaaggaccatctctacagacatcatctacgcacatcataaatcgatttatgatgatgtttgtctgctgacttctcaaccacaattgatttacgtagaaatggccaaattccgatttgccctcaacttgtcggaacaacagatatattctgcatctacacattttccccaagccacctatgtgtgttaccgaaaatgttgacaattgcgtatagccattgtctttggggcaacacatgcagaatgctgtcaggataatggaaacaattgccaggaccaagctgctgctgctgcttcagctggaaaatcaaccgatttaggcggtcttatgcaagctgaaagtgacacaatacacagaatgaaaggataattccttgtgccattgtattgatgtcatttgagttggtcatttgcgaacgattctcttctcttcacttttttttttttgaaaggaaagtcattaatgtggggaaaaattccagaatcctttaagctgttgtcggaatttttgcaccttgagctggggaaatttttgcaggaagttgcaaagtaggaaaaaaggaattaaaattctgcagctggcgaaattcctttctttaccgaagtaaagacatattttaaaatatatttccgatgctcccatttcatatgtaagcttaagactgttttcaacaatttttttcaccattttaaactacaaatctgtaaatggcacagaataaattgcttaaatcctttcgttgcgcaagcaatttgcatatttattcagagttcttgtgtttgtttaaggcacgtttcgaaaaaaaacaaacccggtgttattagagggaattacgggagagtacaccacaatatttggctaacttgttggacgcggctaccggtcaggccgcaaatgcaaacatgcaggggatttctttggccggatggaaaattccagggaacgcggcaatcgtgcgcaatattttcccactaaaagcctaaactgatgttccaatagttgcaacacaaatatttatttagatgtgatccagcgagatttcacagctcggtgtgaaaaccgaggaagcaaggtaggacacaaggacatcacatcgtttgccgaaggagaccaggctcgtgtgcatttttattaggtttttacgatgcgctattaaatgcgaaggacaatcgccgttgctttaaatccataaattacaaagtgcgctacgtgaaattgcctcaactgctggcgaaaggattaaatccagtcgagtcgagttgagctgagccagtttcacggcggcaagtcactaatttcaacactttaattgcgaacacgtccttgtcaggtaaataaatgtcgctgtcttcgactggccatcatctacaatctactccgactgtcacccatcgagacattgagatttcggttgagacagagatttcgccggagacagcaacatgatggctattaatttgctggacaggatcgacggcgacggcaggcgtggttgaggcaatttgcaatcgctggtcggcaactcttaatttggggatcagatttggctaggcgactatcgagcacagcaatttaaaaccagttaaataataatttggataatgttgtaatttataatttatatttcctttcttaataaataaataaatagtcaagtttatgtttgagttttatgatttatattttaagttatttcaactgcaacaccagcaccacgacctactcacagcaaaaaacgtacaagaaggaaagaaggaataaaaagagtggtattctcttacaatatgttttatggcataaaaggtgtggccattcatatcaaatataaagtagtgttgtttaacgttatttttgtaggttgaatagtatattccaacacgccccctcaaaaataacgtctataattaaaaacataacaataatattcattagtaactatcaaatgtgggtggtgtgcattctgggaagtgttaactgatccagcatttgctgcgaggatacggggaaaacccagaaaaacccgatcagatcattgtaacaaaatatgtttacaggaatttaaatttgaaaaatatatataaaaatttcattcagcattcgattggtcgtcttgcagcaaacccaatttgtctcgaactccacaaatctcgcagcaggcaacggttttgtaaatatgtcagccagttgattctctgtaggaatatactcaagacaaatcacatttattctgaacttgctctctggcaaaatgatatttaatatcaatatgtttagctcgtttatgacatgaggggttgtttgctatgctaatacagccttgattgtcttcgtaaattttaatggggttttctagtttaatgttaatactagttaataaaaatttaagccatagagcttctctcacggcttcaaatagggccatatactcagcttcagttgatgaggctgctactgagttctgtctcaagatatttactgcagtagttaaatctgggcgtgtacaaagcattatgtacattaaacatcctatgaggctacggcatggggtattgcagtcttcatctgaattaagtaattcataatttattttactaggtaaaggagtactaactgcattacaattttccatgttaaatttacttaaaattttttttaacatatgcagattggcttaaatagattttatcttcatgcatctctatcctaattccaataaaatgttttatttcatttaggtcagtcatcctaaacttttccattaaataccttttgaagttattcattcttgtcatatctcctgtagctataaccacatcatctacatataataatacatatatgttttcattgatgttacctttgtctaaaatatatatacagcgatcaactgaagagtttacaaactcacactctttcaatgcttgctcaaatacttcaaaccagcatctagccgcttgcttgagtccgtaaattgccttattcaatttacacaccattgtcactattacaccgatataccttgaggaagtctcatataaatttcctcttttaacgtgccatttaagaaagctgtttttacatccatttgatggactttcaagttatactgtattactaatgacaatataaatcggaaacttgaaattctagctacaggagcaaatgtctcttcatagtctatttggtatttttgagtgaatcctcgtgcaaccaatctagctttgtatctaattggatttccaagttcattatatttaacagaaaatacccatctgctatctacaatatttttggtttcaggcctttttgtaattgtccaagtattattaattttatgagcatttaactctgtattgatggcttcttcccaagaagatttatcatccctatattgaatttcatcaaatgaatttgggacatcgttaaatatagtgtgagcatttagaacaactttatttagactattatcctcttcattataggatatctgaggcttagtctttaatctctcacttcttctattaataatttctatgccatcatttttagttggattatcaattccaatttcttttaagtgctctgctgtttcactttccctactctcattcggggttgcctgatcccttactttcattcaggtgatcatctcgctttcttttcttactctcaattcagaaaatatttattactttcccttactatctttcaggaattggatgttggcgcattccttactctcaattcgggaactctgtttgtattattttcctactgtcattcggaaaatttttattttcactttccttactatctttcaggaattgtatgttgtcgcattccttactctcattcgggaactctgtttgtattattttcctactgtcattcggaaaatttttattttcactttccttactatctttcaggaacactgtttcaaatttaacagctctagaattaaccatattggtttcatcgacaacaacatctcttgcgacaataaatttttcatttacagcatcccacaacttaaaaccattgggttcatagcccacaaaaatacttttaaatgatttatcatcaaactttccttgtttgtttttaatatgcacataaacagttgcaccaaacactctcaaatgttttaagtatggcttcttattgtgccacatctcatatggggtctttgaactatcaacaagtgctctgctaggaattctgttgattaaataagtagcagttaatactgcttcgccccaaaagcttttatctagctttgcaccactaaccatggttcgagctttttccgtaatggttcttatcattctctcagaaacaccatttaactgaggtgtatgtggcactgttaagtgataagaaattcctttcttaacacaaaattgtctcatctcatgtcataaacgaaaattatttttatgcttagcatttatagaatatgcttgaaaattgatcacaggtacattgtttaacatacctgaattttttgacaaccattaacccatttttcgaaatggttacaccgcttttgtcaaattcgatcgacattcctgcctcttggagacgctttacggacatcaaattaccagcagcttccttacaaaagagtacatcctccagtgtaatctcatggtcattccgtagtcggacaataccacgcttagtggcataaataaattcgccttgcttggccactgcaatcttaagtggaggcacaacctccacactgtcggtatacagcgactcatcatttataagatggtcactagcaccagaatcaaggacaaacccgcagttgtccatcactgaagtattattcacttcttttaccataaacgcaatgccgtgtgatgttgcagtttgaacttgtttttcattttctttatttttattatttaatattcttttataatggaaacaatcttttttaatgtggccttctctgccacagtggtgacacttgactttatactttgaatttcccttgaatattttctttggtttagttacccgatttttaaacaaattatttttataagtgttattattggtgtgcacgatcgcgttcataactttcttgcttgtatcgttgtggtcatttttaattttaatttcttgatccagcaatctatttttcacaaacgccaatgtcaaattttcttcagataatgtctctatcgctgtaataattccatcgtaacacgaaggcaatgtgatcagtagatgagaaattttatccatctcttctatttttgcaccagctgccaacaattcacttataagttcgtcaaaaatatgaaaatggcttaatagtgacatctcactcgatagcttcagagaaagcaaacgttttcgcagcgccagttgcgacgccaaactttttcgttcataaacggcgtccaaattctcaagaatctgacgcgccgtaatgtcgcttgttgcgaaatttaaaaacgagtcgcttaggtactctattattggactttttgcacaacgctctgcctttttccaggagtcatctacctcgttaggcattaaaccatcaactactttaagcacatcttgctcggctaaaagagccctaattctaaatttccaaatcgcgtacttctcgccatcaaacggcttaatattacgtttagccttgtccatttttcactcaaattctgagaaggaaataatttcacaagaatgtgaaaaaaaaagctatttcacaagaatgtgaaaaaatgctatttcacaatttattttcacaatctttaattcacaatttaattgtttattaggcatggactgggcccataacctgttgtaatttataatttatatttcctttcttaataaataaataaatagtcaagtttatgtttgagttttatgatttatattttaagttatttcaactgcaacaccagcaccacgacctactcacagcaaaaaacgtacaagaaggaaagaaggaataaaaagagtggtattctcttacaatatgttttatggcataaaaggtgtggccattcatatcaaatataaagtagtgttgtttaacgttatttttgtaggttgaatagtatattccaacagataactatagtgcacacgggattttcatctaagaaacaaactatttaaaagtatttgcctactacactcgcctaaacacagttctttacgctaatttatgaactaaactcctgtgcaaattgcgatttgcaatagccagttcgaatttgtgacagacacttgagaatcgtttccattaaatccagtgtgagatccttcgaggcgctccgaaacttcgacacgcatccacccaaagtgttgcagagaaggtgcgcgccattacggcggaattgaagtgccttctggacgccccaaaaacggaaaattgctttccaccttcagctggcggacgcgtgaccaatgcctcgatgggttgatcccaaaccacatgaagttggccagcgatcgctaagcctttggttggatccgcccctaagaatcctcggttaggcagggcgtggcccaccaaaagggatacacccacccattgcatggctcagtttttttctgtttctgttcaacagagctggagcgcaaccataccgaacccttcacccttttcccagcatgtttttagaatcgcatttttacttggtccgtctgccttgtaaatattgtgctggccatatccggggatcttcgtttgatccctcgctacctgcggaagtcctcctccgctctgatctcttcctacctgccaatctctgctataaaagcggatgctggccaaaagtggccatcagtctactacaagtattcgtgttcaacacacaactctgcgctcagaacgaagacaaaatgtttgagaattttgagttcaccaacgagaatctatcggcacagaccatggatctggacatcgatctcatcagttggacggtgcccagcactccgacttccactacttttacggataactttaattttgctcaggcgttcgaagagcaacaggtatgattaccatagacttaggaaaatgtggatgatacgagaaatgtatcatttacataaagtatgaactccaagaaatgaaaaatcactacatccattaaattgaaagttgtagacatttattgagtgggattttcccggcaacctttggccatgatacgaacctctcgaacgagagcctcaagccattgtcttgccgcggaaattccctggctcagagacattgtctccgcgacattgccactcaacaatttgcctttgtgcgacttccgcgcaaactctcgagatccaaatagaaatttctttttaattacccaaagaggctacctgcaaggattccgagtttatagctggatttatagcgactgtttgtttctttttgggattacagctggatgcggttgcctgcaaggagaacaaacatcaatgcgcccggaccaagggaacgctagagaagactatattgctgctacagcatacgcaaaaggattgcgagcgactacgcgaggatttggaggacaagggcctggagtggattcagcggcagcaggagaaggaatatctgcatcgcactgaactgaagcaaggtgggtactttgatactttatgttcctatgaatggtagctaatgaatccccttctactttttagctgaagagaaattaatggaggtgcaattgcgtgccaagttaaagttctgcgaattagagtcccaactgcgtgccaaggacgaggagagcaaacaggcgcaggaggcctacagaatggaggtctcccacaaacttgcactgaagcaggaacatctgcgcactgccgagcagaaaatccaggaactgcagacacgtcttcagcaggtggagaccgaggagcaggggcaccgcgaggagctgatccgcaaggagaacattcacaccgcccggctggccgaggccaatcagcgggagcaggatctgatcgaccgggtcaagagcctgaccaaggagctgaacaccctgaaggccaacaaggagcataacgaacgcgatttgagggatcggctggcgctgtcccaggacgaaatctctgtgctgcgcacatcctcacagcgccgcagcccctgcaccagtttgccggacaacgcgtccgccgaactcaaccgcttgaccagcgaggcagacagcttgcgctgtgtgcttgagctcaagcaggcggagatttccgcccttagcaaggccaaggcggatctgattcatgaaagcgaagagcggctgaaactgagtaaccgcgtcgcccttttggaggcccaaaacgaaatgctgcgcaccgaactggaggccaagaccgaaaaggagaagtaagtagcaagatgtttacttttgcatttataaagctctccaattcaccttcacttgagtcaaaactaacccacatttgatctcttccagggaaatccagcaaaagatggaggaacttcagaaggcctacaaatacgagagcattaaacgcacgcggctgacgtatgacaaagaggagctacagtaccaccttaagcagagatcattgcagctccagtcggctgagtcaaagttgcaagatctttccactggttcccacgataacagcctatctagccacagccgatgcagcctgggtcgcagtggcctggagatcgccgtgaccacctcctcgcccacttccccagtgatgaagggaatgattgaacggaatgattccgtcagctggacgctagagatcgaagatgagtcgttcaagggtaacacttcaaagattgtgcgcagggcggggtcactgcgaagcaacaacgagcggtgccccatccagcggcgacagacattgacaagcaatggacactccaatggatcggccacaaatggcggctcttcccccgctcatcctaatccccttagccagagcatgtcggccacagcccttctgagaagcagcagtaattccggggagtcagagggtcgtcctttgtcccgggctcgctcaaaatcgatgtgcatcaaagcgtccgccaccagttcggcggtgtgcgaatcgtctggccaaaggaagaaaccacaagacgagttgagtctggccgactggcccgaggatattcccctgtgctccagttcaccacaagcgccgggaatagagatgcgtccgcgcagctccaccatgaagctaatgtccagcgaggcaaagaagttccaggaaatccaggagtccgccggcgaggccatggtctccggtgctaactcggaggacgaaagctgttcggcctcatccgaggacataatgcgcagctcttccgcctccagcaccgcatcgggtggatccctatccaagaggccaaagcaaccaccatcccgcatgtccatcgaggaggctctgccctgcacccccatggaggtaagctggtcagaagacgctgccgatgccaacggactggcatgacatgctgcctacgaggagcacgtcgaccagattgccgaggcggctgaagaggcttacgagagcgaggacattgaggaggatcacgatgagctgatcgtgggcgaggagcagccggagcacagcgacagcgatgatagcttctaaagcgctaaaaccaatttgtaaaacaaaataatgaggcagttagagtcggcacttgcggcgaaggtggaagtcatagtcggaagcatagcttagcgttttcacttctatagaccccgtacataaactattaagatacacaaaaatatataatgctaattcgtacgttcttaactgaaatgattgtgtaaataattgcatttagcagtatggtagctcatagaaggcgctcatgaaatataataataatctaacaattagtcgagcacagcaagcggagccgtcacagcaactgggggggaattgaaaaacataaatgagggaagtacttttttaaacgggcgcggacgaggatcgaagccacacacaaagctaaaccaagtttagagcggtatagctgcgtatttagaacagtttcaaactacacagaaatcagtaatgggggtagcatttagatgaagcagtatgaatatttgcataaaaccaaccaacttattactataccacacactataagtatttgtatgactagcgatattgatattgtattctaaccgcaactcgcaatctccgatgtcgaacatgttactcgatccaatccagatgctaacctctcttgagctcaaatatagcactcacttgatgtccttaattgaaaacctaatgcccgctatttgtggaccaggtgaggtatccgccccctgccacgcctatattataatgtaccaattagagtgtcagaggtctgaagctgcatcgccgaccgagctaagctttaatttgtgttttatatatgtatgtatttattatttagtctttaatgccttatgaaagcgttaaataaatgcaagaaattgaa

SEQ ID NO: 20480 - DNA, 6507 bp, DROSOPHILA
atgtactccacaaaaaagggagctcaggatccggccacaactcgcattccccgcctggatggcgtctcccgccttccgaagccgagtacttttggcctggccagcagcagtggcagcaccaccaacagaaccaccaccaccaccaccagcaccacccagcacattcgaccaccgacgagtgcacccaaggccactcagatattccgagcacccggcgatcctgccaagccgcgtcccgccagctcgtatgccccatcttcggctgctctgcgggatttgggcagcagtctgaagaagagcgccagtggagaacggataaacaatgcggtgagcctgctcagcaagcggaccaccaccgtcctgaagaagtactttagtcccaagtcaagcgcaagtgcaaatgcagtgatgtccagtccatgcgatatgacgagctcactgccagttactccacttccggtggggaagcgtggaatggtggcaaacgatcagttgaccagcagcacgccgatgcccctcttgagatccgagacctttgtctgcgaggacgagaagcagtcgaaccgaatgaaactggagagcactcgattgtccacatttggacgaaccatggacatcgagtcgccagtgccaaatgaaaccaaagtcctgatcagagacggcacgagaattatgaagggttcaccctcgacggatattactcagatagtaagacccactcagaaaacaccattgatgacattctgctcattggataccacacatgaaatgacagtgtgttcgagaaataatgcaacgcactcggttaactcgtcgggaataatgggtagaacaatgccagttattccggccaaggatgccaccagaacaatatctgccaattcttcgggtcttggaaatcttacgaaagttgtaaggggagttggaaatatcaaccaaactttggaggcagcaggaaatatcacaaaaacgtttaggggagctggagatctcacgagaacggttgaaaaagaagctaatataggtaagacttttgaggtggcagcaaattgcactcaaacatttacaagaggagtaaatctcacaaggacaatgaatgataagaatgaagaagtctctaggacaatagacaaaggacgaagtactacgaaaaccatagaagttggacaaaacttaaccataacaatggacgcagcatccaatctaacaaaatccattgatagaggagctactttgacgaatcgaggggcgaatctaaccaaatcggtcattgaaccaggtgacttcacaaaggtaatccaccaaggagccaatttaactctaagcatggatcagttacccctgctggaacacatatccatgccatctggcttggacattctgagttccaagtgttctggcaacgtcgagagaccgagccaggaaacggacgacacgctggacgtgacgttaaccagtttggcaccggacaagaccaacatgaagttgccgttgaactccacgctcaacactgaaagattgttggacatcagtgcgttgcagtcgccaaggcacatccaattgttgaacttaacccaggaactggagagaggaactccaagcagggtccaccttcagtcggggcgaagatccatgccgcagcactcactgctgtgcctttccccccagtcggccaccacaacgccgcatggaatgaggatgatgggacaggctactcctcagccagttcatttactctcaccgctgttgaagcaggcacaaagtgctctggtcttgcccactcgaacgccggatggtgacatcaccatggatggcaatggtgctctggacagtacactgacctccacatcggttaggggtcggacccgctacagtttcggactggatttgccagataccactctggactgctccatcgaactggtggacaactcgttttcctcatcaacccaactgcagcaattgcaacagcagctcctgaagaaacagagttcattcgatctggacgagagcttgggcatccttacgcccgatcagatgaaggatttcctggactctccacacaacaatcttatgcacaatctggaaatgatcaggatgcatcatccgaatctattgcagttgaggatggagcagacaccatcgccggaggaactgcctctggatcccattgagattaagtccgagattgtcaagcaggtggaggcgtcccagaaccaggtgaacacctcgcagcactcgaagctgagcaacagcttcataacgagcgtgaccagtgtaaccagcttggatacgggctaccagggcgatggtgagatgtcgcgccccgcttctcgcggagcatgtgatcattccccaagcaatggaccccatttgggccgagtgagtcgtcagcccagcttccctcccccaaatccggctcctttgagacgtcaggatcccatgacagactcggatttcttcaccgagtccgacgcggatgatgtactgcatcgcggcgatcgccgtgcccaggtgatcgatggccagttgtatggtccggacatgatgcaaccgagtgcctccgtgccccagatggaggactcctgcatggaatcatcgggtattttcacggacgttgagaatcgctgcgatgaggagatgcggcagccggaactggagttcgatgtcgatatggacatgtcgccagatgactcctcacagacgatgcgcaagggtcaaggtcagcccatttccacccaacagcagcagaatcagctggccccccagcagcgcccgcccagcagctgtctctcatcctcctcggcggccaccacgctctctcagtcgctctccaaccgcacctcgtactgcagcgtcgacggcggcagcgcacgaagtttttgcggcgacgaagctttcgcagcgggacgatcgacgacgacgacggcggcagcagcagcagcggcggcgctctcagttcagaaaaccacctcgccgcgtccacacgcatcgctctcgtcgctctgcacggtggagaatttccgcggctctgtttcctcgaactcatcgatcgcctctcccaagtcgtgcaagtcatcggttaccaagacctctgctggcaaatcgcgcgttttgaaatcgccaaaatccccaaaatcaccaaaatcgccgctaaatcgcaaggcgcacaccccaaacaaatgggatgccgtgatgaataagatcgctagcaataagtctctgatcaagacaaactacaacgatgtaaagtcaaaggtctcgaccacacggatcatgaccccggcttccggttcgagtccggtttccggttccggttcgggctccgtttcgcgtaccgcttcgagtccgcgcgccagtcccagtgtgagtgccagtgcccggcgttcgccctcggccacgcccaaagtgccgcccaagatgcttctggccaagcgaccgagcagcagcagcggcaaggtcaatgccacgccctcgccgcccccacacgcgaccccgccaacacggcagccactggataaaggctcagttggcgccgggtcggtgggtggtggtggcgctcgtgcggtaaagacacccaagtcgcccacctcccccaccacacctaccacgcccacatcgccgcctgcgaagagactccagacgagcctcgtcagtcgtggacgctcgtacagcaaggacagccacaagagttcgcacaccgacttgagtttaatgtgcaatgcctcatcgtcccggccatcgaactctgcgtctggaagcggatcgccgaagctattggcaaacactcaattgcgagctgccaaaaagcgcgatgtgcgcaatctgagcatatcgccaaccgatctgggtccgccaccaaaaacccaacagacaaccaagggacaatcgacgcgcagcaaatcatcggccacgcccacgccaacgcccacatccatacataaacgtttaaatggcactttggccagcacggcagcaattgcaacacccatcaaaggagtggccaccaaatccggagccacaaacaagctgcaacaatcggcaaaaactaaatcaaccgcgagtatcaaaagtccagcaattgtcggcgtttccgaggaatccctgcgctctggcgtggatcaaaccgaacttcaggagctgaacaatgggcaatctgctaccggttgtccgacgccgccgatggcgcgggactcaaagcgtacgtccattggaaatgagttaccctgtgagacggaggccaagttgaagagatgcgaggaccagcaggatccacaagcatccacgacggcatcacccctaccgatgatcaatccacaggaacaagaagccagtggccaggtcaaagaagcaacaatcaccactgcaaatgagccaaacgccttgtccttgcccgacgaaatcagcaattcggtcagctcgacgacgatgctggccacgccccgcgtagacatagccgcccagtatcccgtcctgaaaccattcacagagaacggagagctggactgtgcccgactggccaagttcttccaggacacccagttcgagaggaaggaggagcaacgccagattctgggcctctccgtaatggtgcagttcatgtccaaagagctggatgcggttgcctgcaaggagaacaaacatcaatgcgcccggaccaagggaacgctagagaagactatattgctgctacagcatacgcaaaaggattgcgagcgactacgcgaggatttggaggacaagggcctggagtggattcagcggcagcaggagaaggaatatctgcatcgcactgaactgaagcaagctgaagagaaattaatggaggtgcaattgcgtgccaagttaaagttctgcgaattagagtcccaactgcgtgccaaggacgaggagagcaaacaggcgcaggaggcctacagaatggaggtctcccacaaacttgcactgaagcaggaacatctgcgcactgccgagcagaaaatccaggaactgcagacacgtcttcagcaggtggagaccgaggagcaggggcaccgcgaggagctgatccgcaaggagaacattcacaccgcccggctggccgaggccaatcagcgggagcaggatctgatcgaccgggtcaagagcctgaccaaggagctgaacaccctgaaggccaacaaggagcataacgaacgcgatttgagggatcggctggcgctgtcccaggacgaaatctctgtgctgcgcacatcctcacagcgccgcagcccctgcaccagtttgccggacaacgcgtccgccgaactcaaccgcttgaccagcgaggcagacagcttgcgctgtgtgcttgagctcaagcaggcggagatttccgcccttagcaaggccaaggcggatctgattcatgaaagcgaagagcggctgaaactgagtaaccgcgtcgcccttttggaggcccaaaacgaaatgctgcgcaccgaactggaggccaagaccgaaaaggagaaggaaatccagcaaaagatggaggaacttcagaaggcctacaaatacgagagcattaaacgcacgcggctgacgtatgacaaagaggagctacagtaccaccttaagcagagatcattgcagctccagtcggctgagtcaaagttgcaagatctttccactggttcccacgataacagcctatctagccacagccgatgcagcctgggtcgcagtggcctggagatcgccgtgaccacctcctcgcccacttccccagtgatgaagggaatgattgaacggaatgattccgtcagctggacgctagagatcgaagatgagtcgttcaagggtaacacttcaaagattgtgcgcagggcggggtcactgcgaagcaacaacgagcggtgccccatccagcggcgacagacattgacaagcaatggacactccaatggatcggccacaaatggcggctcttcccccgctcatcctaatccccttagccagagcatgtcggccacagcccttctgagaagcagcagtaattccggggagtcagagggtcgtcctttgtcccgggctcgctcaaaatcgatgtgcatcaaagcgtccgccaccagttcggcggtgtgcgaatcgtctggccaaaggaagaaaccacaagacgagttgagtctggccgactggcccgaggatattcccctgtgctccagttcaccacaagcgccgggaatagagatgcgtccgcgcagctccaccatgaagctaatgtccagcgaggcaaagaagttccaggaaatccaggagtccgccggcgaggccatggtctccggtgctaactcggaggacgaaagctgttcggcctcatccgaggacataatgcgcagctcttccgcctccagcaccgcatcgggtggatccctatccaagaggccaaagcaaccaccatcccgcatgtccatcgaggaggctctgccctgcacccccatggaggtaagctggtcagaagacgctgccgatgccaacggactggcatga

SEQ ID NO: 20481 - protein, 2168 aa, DROSOPHILA
MYSTKKGAQDPATTRIPRLDGVSRLPKPSTFGLASSSGSTTNRTTTTTTSTTQHIRPPTSAPKATQIFRAPGDPAKPRPASSYAPSSAALRDLGSSLKKSASGERINNAVSLLSKRTTTVLKKYFSPKSSASANAVMSSPCDMTSSLPVTPLPVGKRGMVANDQLTSSTPMPLLRSETFVCEDEKQSNRMKLESTRLSTFGRTMDIESPVPNETKVLIRDGTRIMKGSPSTDITQIVRPTQKTPLMTFCSLDTTHEMTVCSRNNATHSVNSSGIMGRTMPVIPAKDATRTISANSSGLGNLTKVVRGVGNINQTLEAAGNITKTFRGAGDLTRTVEKEANIGKTFEVAANCTQTFTRGVNLTRTMNDKNEEVSRTIDKGRSTTKTIEVGQNLTITMDAASNLTKSIDRGATLTNRGANLTKSVIEPGDFTKVIHQGANLTLSMDQLPLLEHISMPSGLDILSSKCSGNVERPSQETDDTLDVTLTSLAPDKTNMKLPLNSTLNTERLLDISALQSPRHIQLLNLTQELERGTPSRVHLQSGRRSMPQHSLLCLSPQSATTTPHGMRMMGQATPQPVHLLSPLLKQAQSALVLPTRTPDGDITMDGNGALDSTLTSTSVRGRTRYSFGLDLPDTTLDCSIELVDNSFSSSTQLQQLQQQLLKKQSSFDLDESLGILTPDQMKDFLDSPHNNLMHNLEMIRMHHPNLLQLRMEQTPSPEELPLDPIEIKSEIVKQVEASQNQVNTSQHSKLSNSFITSVTSVTSLDTGYQGDGEMSRPASRGACDHSPSNGPHLGRVSRQPSFPPPNPAPLRRQDPMTDSDFFTESDADDVLHRGDRRAQVIDGQLYGPDMMQPSASVPQMEDSCMESSGIFTDVENRCDEEMRQPELEFDVDMDMSPDDSSQTMRKGQGQPISTQQQQNQLAPQQRPPSSCLSSSSAATTLSQSLSNRTSYCSVDGGSARSFCGDEAFAAGRSTTTTAAAAAAAALSVQKTTSPRPHASLSSLCTVENFRGSVSSNSSIASPKSCKSSVTKTSAGKSRVLKSPKSPKSPKSPLNRKAHTPNKWDAVMNKIASNKSLIKTNYNDVKSKVSTTRIMTPASGSSPVSGSGSGSVSRTASSPRASPSVSASARRSPSATPKVPPKMLLAKRPSSSSGKVNATPSPPPHATPPTRQPLDKGSVGAGSVGGGGARAVKTPKSPTSPTTPTTPTSPPAKRLQTSLVSRGRSYSKDSHKSSHTDLSLMCNASSSRPSNSASGSGSPKLLANTQLRAAKKRDVRNLSISPTDLGPPPKTQQTTKGQSTRSKSSATPTPTPTSIHKRLNGTLASTAAIATPIKGVATKSGATNKLQQSAKTKSTASIKSPAIVGVSEESLRSGVDQTELQELNNGQSATGCPTPPMARDSKRTSIGNELPCETEAKLKRCEDQQDPQASTTASPLPMINPQEQEASGQVKEATITTANEPNALSLPDEISNSVSSTTMLATPRVDIAAQYPVLKPFTENGELDCARLAKFFQDTQFERKEEQRQILGLSVMVQFMSKELDAVACKENKHQCARTKGTLEKTILLLQHTQKDCERLREDLEDKGLEWIQRQQEKEYLHRTELKQAEEKLMEVQLRAKLKFCELESQLRAKDEESKQAQEAYRMEVSHKLALKQEHLRTAEQKIQELQTRLQQVETEEQGHREELIRKENIHTARLAEANQREQDLIDRVKSLTKELNTLKANKEHNERDLRDRLALSQDEISVLRTSSQRRSPCTSLPDNASAELNRLTSEADSLRCVLELKQAEISALSKAKADLIHESEERLKLSNRVALLEAQNEMLRTELEAKTEKEKEIQQKMEELQKAYKYESIKRTRLTYDKEELQYHLKQRSLQLQSAESKLQDLSTGSHDNSLSSHSRCSLGRSGLEIAVTTSSPTSPVMKGMIERNDSVSWTLEIEDESFKGNTSKIVRRAGSLRSNNERCPIQRRQTLTSNGHSNGSATNGGSSPAHPNPLSQSMSATALLRSSSNSGESEGRPLSRARSKSMCIKASATSSAVCESSGQRKKPQDELSLADWPEDIPLCSSSPQAPGIEMRPRSSTMKLMSSEAKKFQEIQESAGEAMVSGANSEDESCSASSEDIMRSSSASSTASGGSLSKRPKQPPSRMSIEEALPCTPMEVSWSEDAADANGLA

SEQ ID NO: 20482 - DNA, 2510 bp, DROSOPHILA
aagggaaacacctcggtcatcaggaaagtaacgccacagttgagcagcatctgcaggcaggtgaaccgcatgttggcgtccagatagtccgagctgaggatcaccctgagcagatcctggtatatattgggggttgctcccagctgggccagatactcgttcagttccaccatgacgatgttaatgtccagctgcacgtccggggcatactgcgcgtagctgatggtggacaccaagagattggccagctccgccaaggcgctgtcgctcagcgatcgcacggagcactttttcgacatgtctctgttatggtttcggcccagaggtaaacaaaatacgacgcagaagccgctgggagatgagcgcactagaggaattgttttgctcgtggttacatcacttggtagcaggcgcaatgctggttgttttcctgctcccttagagtatttctaacgttcctcggtaactatttgcccaatatcagctaatggcgcacttctacacatgcgtgtaccttatatttaggggtaaaaatagattctaaaattatataggcgaaggaatcggtttctgccgacgaactagtgaactgctcgatccaacagcacgatgcaaactgagagccatgggacgccaaaatgtttggtttcctcggttccacattctcaattcggcgagccacttgagcgaccaaaaaaaaacaatgcttaactcgtttcattgttattttgagtcgctttacaattgcattatttattcgacagcatcggaatagagacattctatagtttacttaactgattcggatgaaagccagccagttattctgctgtttaaacaatattacaactattacacaaaattttaaaacgaaatcaaagtttttgtttggtattccgcagctttaagccttttaaactagaatttctggcgaatgcagttcggtttacagatattcgaatgtgggagagtactaagagagcgtttttcagtagagattctagggctgcaggtagctgggcagcttcatgcgcatgaacagccaggtggtgaagaaggagaccaggatgaaaatgaatcccatggcggtcagcagcaggcggttgaggttcgtcttgcccggcgtgtgcgtttggtccatgataatgaatcccagtccgccgacggtgaacaggaagctgctggccaggccctccatgatgtactgcccattcacacggtagggcataaaggccactggacgcgagtgtccgtgctcatccaccgtggctcccagactgggcggctccacaatcacgtcatatatgatacctgcgggccaatttgcatctctgtttaaccaatctcaattatagaaagcttaggactcaccgcctgtcaccagaaaataggaaaacaaaatcacactgaaaacggccatcggtgacggcattggaatgctgaatctgcgcaccttgatgttcggcggcaccaggatgtggaagggcaggttatacagtgtctcgatcatgatgaactaataatttaataactataaatttaaatatatcacggatttttcaattttcgtggcggtgtcgctgaattttgccggcgtaggcggagtttgttgttatctatcgaatagggatggacacttgtacgatactccccctgcattggtgtatttccactagacagcatctatgcttgcagctgcatcgtaagccatgtcattgtactgttaatgtcttaagttttaaactgcctaatcgatttgaatttttttataagactcaaaatatattatatgtaacatcaaacgattggcttattgatactaatgtgcttcagctgcgcagcgtgaacagcctttatatttggtcatacttagtgatgtcactattgcgctcgcgtagaaaaagaggaagatgcccccaaaataacaaacaaaacgtaactcccgatcaaaatagctttaaattgaagttaaataacgaaacaactataatggcgagtggcattaaccaagcagcaggtgggctgagtgaatttctgaagattcgtagcttagttaaccactccatttgcaggtaaactgccggcaattgcgaagaaggtgcaaaatctcggcgatatgggcgtttggcaaaaatcccgcgccttccacgatttaattggatatataaatggcaccagttcggccattcagggcattaaaaccacagacgagattttcgagtcggaaatgctcaagaagctgctgcggctattcgatgcactggagaaattggtagagcaaaatcctccattggagcagccgcagcggttcggaaacaaagcctacagggattgggcgcaggcaatgcgggaattgttgcccgaactcctagaacagctgttgccagacgacaagaagcgataccaggtggagctggggcagtatctcactgaatctttcggcaatgccaccaggatcgactacggcaccggccacgagctgtccttcctcttcttcctgtgctccctgt

SEQ ID NO: 20483 - DNA, 390 bp, DROSOPHILA
atgatcgagacactgtataacctgcccttccacatcctggtgccgccgaacatcaaggtgcgcagattcagcattccaatgccgtcaccgatggccgttttcagtgtgattttgttttcctattttctggtgacaggcggtatcatatatgacgtgattgtggagccgcccagtctgggagccacgtacatcatggagggcctggccagcagcttcctgttcaccgtcggcggactgggattcattatcatggaccaaacgcacacgccgggcaagacgaacctcaaccgcctgctgctgaccgccatgggattcattttcatcctggtctccttcttcaccacctggctgttcatgcgcatgaagctgcccagctacctgcagccctag

SEQ ID NO: 20484 - protein, 129 aa, DROSOPHILA
MIETLYNLPFHILVPPNIKVRRFSIPMPSPMAVFSVILFSYFLVTGGIIYDVIVEPPSLGATYIMEGLASSFLFTVGGLGFIIMDQTHTPGKTNLNRLLLTAMGFIFILVSFFTTWLFMRMKLPSYLQP

SEQ ID NO: 20485 - DNA, 8415 bp, DROSOPHILA
atgatttcagtttgcccggaacttttgcttttccagcagtcagtcaatatgcactactgtaaaatctggtgattgtaattttctaattgcacgacttattttcttggaaaactggtttgcataggctttcactgatgtgttcgcagctccaagtttgcattcaataatgcttattaatatacttaattatatggtcttatggtcatatatcgatattttatcacatttgaccgcgactttgtatacattttgtttcgaacgcctctcgtcaattaagatttcaagtcgtgatcacattaaccgattgaaagagagacagtgcgatccccagttgccgaccactttctgttgatattcaaaacgcgactgatttcaattgctcggaagtcgaaagccggctactgcttttaatcgcaattcatctgccaacatgtttgaagtgcacttagttgcaatcaagtttgatcgcaattcgtggcatacttctgcgatctgttacagaaataagaactttatatatataaaacatttaatgtaaatattcatagactaaaacaattaaaggtcagagaaacaattaaaacagacatcttcggatttcatggcaaaatattttaataatattttcaaatgtatactcgcagctgacgcctgaaaatcaggccagttttacaactagtcaataatggttcattaatacgttacaaaaatacaattgtttatatgctatgctataaaaatgttctatttacaattattgatctcggttaccgccgtgtgtgtatgcttgtcattgtgtgtttgagtgtgtgtgagggctctatgatcctgtgtttctgatatatatcacgatttccttacgctctaccggcttcaccaatctttggcacatatgtttctctcgaataaatgcttaaatagaaaccacaaatataaaagtaaaacatttaactgtcggcggaatgtggcaggtttcctttggtcgctcgagacgtgggtctcatctgaacaatctgaggcggaaggacatgatgtagaacgccaggatgcgcaggaagaccaaaacgccgaacagaaagatgagggcaagtgtatagtttccgttggccatgtccagacttttgagtatgaactgggggtgcctcaggtggcagtagagctcattgcaagccaggggctcgcgatcgtatccaaaaatggccatcgtggccccttccagactgtacttgaggaacgatatgtcaaacatccagcgcaaaaacaccggagcgtccttctccatcagaaagaacccgctaaactggaggaacgggcagatgaagaagggtcccagaatggagcccagcttgaggctcagtgctgctcccaccgccaagccaatgctctgcgagaccagagccgtaacgaacacaatcaggaagaacattccgaatcgccagagctccagcggctgttgggtcatcagatatgtgggcactatgaacagggcactgcaaatgatctggatgggcaggtcggctagggtgatggctacgtaatacgcccgcagggaataccagcgattgaagtgctcccgcgacacaatggggaactccagcggaactgcgggcgatagaatgataactacttttccattcactcactttccatacttacacttcaccagtatgcccgagaacgcacagtacatgatgaacatgattgtgtagaagaggtatcggaagatatttaacgtctgggcggcatcgttgccgatcccaaagtacagcgttcctattaggatgcctgtgattaggtgaatagcgaagcgcatcgtagtcaacgaactgtcccgccaaattagcaggaatgtcctcacaagcagaatgctcaactgtcggtagaacggagtggcgtagatgttctgtcttttgcacagatgcgatggatccaactctatagctggcctggatttatttttcttcttcggcttacaacagctgccagcgtttccgattcccgccgtttggctgtcccacactcgggaggacagttcattgatgggggtgagtggcttgaaggtgttgccctgcatgaaatgcgctggcacggatgtggacatcacaggtgctgtcaccggtgtgatcagtcccgctgccataagttggtctacaaagaatttttggttagccactgaagcatacttacaatttacccattgacttaccaactttcttcatggccgccagttgggccactcgcgcagtcttgctctgtctgtaatcctcattgcgaccattgtccatcagggccaccagcttctccagctgattgtcttccgccgtgtcatagtcatgagttgctatttccattactgttaattagatgaatattgataattttccatctcctacggagtttaccaacccgtaaactcacagtaatccgctggattgtaggactccgggcagtgcaaattgagggcgcccaggaagggcaataggttttgggctcctcctgcgtagatgcacttgccctcgccaatggcatacagatgatcgaacatggcgaaggtcaaggcacttggctggtggattgtgcagatgactgtgcgtccctcgatggcgagcttctttagcaaatttatcagctgattggaggtgaaactatccaagccactgaaaggtatatacatttcattagtttttatctacgtgttgatgaacaataacatacgttgtaggttcgtccaggatcagcaccggtgggttgttcaccagttccagtgcaatagcaagacgcttcttctgacctccacttagctgccccgtcctggtatgccggttttcgtacataccgatggcctccagaatgcactttacccgctctcttttctcgctatgtgtcatgtgagtgccgattttcaaattggctgcaaaatgcatcgcctccttgacggagagaaaggcctgaagactcgtatcctggcggatgaacgccacgttcgacttgaaggcctttaaatcccgcctgttgccattgacccggaaatcccccgtaaagccatatgttctgcaataaaatattagctcagtttgatataagtatatcaggatgcaggttatattacgtgtatcctgacagaatgttgagcagagtactctttccagctccagagggtccaataacggcactaagttctcccgacttgaagtagcccgttaaacccattagcacatccttggtttctgtaagaatcggaaaattaaagaaatgaaaattaaagcgaaacttatgtctttaagactacaaattaaaaaagtactttttaatcatttaatctcaagaagtcgcactacatttattgttctggtttatggctgattagtaagtcagttctataaacttacttaatcattgacagacctcagttttcaagaatttcagcttaatttgattactcactaaaagtgttaaatcaaactccaagtgtcactatttgaatttctagattagttcacgattttcatacgttgttttaaagattatttcataaaatattgagggtgactgctttacataagaacatgaatgactttgagcaatatctggtattaatgagttgcaaacgaagtccgattgactttgctttatttaattcccacatatgtagagtgccccacattaacttaactcgtacatcccgagtgataaggaaatcccaatgcccgcgattactggcgttcaatgttgtctaatctcggtttgcacgctttcttgaatccccagtggctggatgataatgccttataaaccttaagttcaatatgttcaattttgtgaggggttcgtttcgctgggccaaatacattgtaggcgcccattctaaatgtcgaatgtgcccggttaatctgtcgattagccatggctcctgtccaatttagattttgaggggtctgcgcgcccacttatcaatcactccgcagtcgaatcttatcgcactcaagttctatgaccaaaaatgtcgttaaactgcctttacgcctttttttgaatgccgtgggccagatgttagactagactcatcgctgggcaaacaggtgtacaacgagcaatgtttattgcacttccactggagttggcctccttatcagtgttttctatggccttgtacttggaagtgcatttggtaaggggggattatgagcaccacctgcatctgaccacgtcccatatttacacaacatattacatattatttggactaccaactcgtcacatcgagttattggatctgctttcttatcaaattgattgctaattgcgctggtaattaaatacaattttgagaatgcaataagccttatatggaagtttctggttaaatttacttttaaacttattactttattaagaagtatctaattgtttgcaagaaagcgaaagtatctatttaagcctcctaaaattctcagcacgcacaaccagagatctccggtaattttaaaaggcctacattgtattagtcaggaaactgaacctagcaattacattcaaagcgtgctaaaatcttaattgaaataggaagctccaatctcaaatcacctgactcatatccaaagtctgttccaaagtcggaatcttttgtaaatatatttaacagactccaccgctttaagagggaaaatgagaaaattcacttaattagtgagtcaatgaagacgacacgcgaagagcaacggaaaatctaagaagcaatttaagtgacttcaattaaaacgcttgcgccttctttcatagcgcgaagaaacaactataaaatgttttcatatcagatatctaactggggcatacatatatggtgtattattttattcgccgtcataataacatgcctgggaattgtaatgataaccatgtcgttcagttctcatatcatttgttcccaactatctatttgctttcaccggctaccgactttgaataatctaaaatacattaatggtgaagaactgatgtatgttatacacgctgtacattttattatcaattgttgtgtgggcgataaagcggtttgtagatatgaaacacgagtaacattggggacactttggattgcgttatgcttcgccttcgaatcggtaaatgggctgtgttgaaagttttttgagtgtactaacttaatgtgacttgcaattacgcaggataggacacatggagctatccacctcaattagtcttgtacgcagcacaaagcactggttatccaaaacacgaactcatggtaatcacccccataatgactgcctatgatttatcgtgcatataatcagcaaaattcacgtgtcataatttccaccaggatcataatcggatacacgaatgactcagaacgttagtcacctgggatactctattgggccactgctcgacgaaatatcttttcgggaatgcctatctatcagtggtgcactagcgtgagtcacatgttaaatgtcccttcttgtatgcacgataaccaatggtattccagagaagtatcaactatctgtattcatgttgtaagtggctttcttatcgccattaaaactgtgggatgggcgaatcgtaaacaaacagtacagtaaagccgccacactacacgatgtgcatataggaccatcggctctgcttaaataaaatcacctgaccccaaccctgcaactacacttttttattttctgcgtgtgcccaagatatgttcaatttaatttaagaggctctttgaacccagtgattcgcccaatcagcagcttgtcaatatactgaattgaagagtcccagatggttacatatatccaataaaggcaaccgatattccccactttgcccagcttgtttcctgcaagccggactttgccccaagaagttgatactacgcaagtgtcctaatctcaaagttacctaagtgcagctttatctggctttatgtcgagattgatgaaccgaaacattatcagatatcacagcattaagtgctgacgatttaaataattgtagcactatttttgttttggcattaaagccatttatttgaccattcatttaaaagactcattcgagtgtcagagaactggctgattttaattgggtttactggacattgccacgctagtatgcacatacatgtacatatatgtagcatatagccagcccttaattataattgccgacaatgcgtgactgggagcaaaaaagccatttaatgaccttggggggaatgctctccagatgacagctttttgttcaagtaggactccaaactttgaaccgaaaatatttagtatacatgaaacgatcgcttctcagagtgtcgatatccatatagatagactatgtcttgtcaggcaaatatcaaaatctttgttgtttacataagagctctcaaagtattaacatacactttccacttaacttagtttcgaacatttcttagcattccaaatacacactttataaatggatcaatattattgtttttttctgagtactatacaatttttatttcaaagtggcgcgtgtcctatttccaattgagcaaaacaaacacaaactttatgggtttgtttttcaatgtcaagattgtttaaaagaccaaactaaacagtcaatagggtttgttatagtatggtaagttcatttttctatcaaaccagcagttatttaagatattccaccctaattccatagttagatatggctaatccaaagactatcccaaattcaaaaagatcacctccgaataaggaccgattggaagcacttacccctctggaagactccgaatttggtagtgtagcgtatattctcgaagccaatgttgatcttcttgatggttttgtactgttcgtgggggaatatggatcctccgctggtggcggtgctgctggtgttgcggctttcgtcactatgctggctcgcctgactgcgctgactttggttggcaggtgacgaaacgggtgtggcgcccagcggagttccatagacagattcactggtcgagagaaccgtgttttccgtctcggccagcggagcatcgtgggacttggcctttatgttgagggtcaagtgtggaggtcgtttggacgacagtttcttggagggcacgggtgtcgtgggacgtggtagtgctccagaccccgttccagatccccgcgatggcagatgcgtttccgagctggactttaggtggttcaaccggatgacatcgccaccggtgacatttggcgacacggcactggccaaactccaactggacatgtcgtgatttcaagatttctagatttctatatgttgtctagcacttttgttacttcggtttcacttttagttatctcttatattgttttagcttgcgttctccatttaatttgcgctttccgtttgttcgtcgtaggcctgctttttgcgttaatttttgaggcgcgtcaagaaatttgaataaataatattttgtatttcgcggtgtttgagtgtgtgcgtgcctgttgctcatttgaattttaatttcgctctccgcgtgtctatgtgtgcgtgagttcattcgcattctatcctatgccaagggcgttggggaggggggcttaaagggggcagggctctgggagaccggcagacaacccatttaataaaaattcgaacggcggagaacactcggtcgcctgttgctaatcagaccatgccccaaaacaagaatagcgcaccaacacacatggtctcacatgtaaaacgagagagtatcacacaggggcggacttaaaacctattcaagggggttggagttaaattttgaaattatttgtgtatctgaagacatgcgggcatagtaaacacatacgacaaattacagtatctacattttctcaaaaccccctttctacgccactggcataaacaatgtttgttgttattgccacacgtagagtcgccgctcacaaagaacgtgctctgcgggggaggaggagggaagacaccagattattgcgctacagcaaatgcggtccggcctatgaatacttttcatggaattacaatatattgtaaagacaatatttcttttatatattaattttagctctataattctattccttttttaccaaatgcacaatatattatgtggcttcgaagtgactccaaaagtcgatatgccccttgttttggttttgctgtgtagcgctcgcaaatgcactcgatcttcttctttatgatgcaaatcgtgtgtatttatgtataatttagcacgtcgctctctttagcctttgttttgagtaagtgagacgcacttttaatcgcactaggccctattttcatgccctgctccccaaaaagcagctgatttatctgcgagtgtatgtgtgttaacctagccgccgacttattgggccctccttcatt

SEQ ID NO: 20486 - DNA, 2576 bp, DROSOPHILA
cctacgacgaacaaacggaaagcgcaaattaaatggagaacgcaagctaaaacaatataagagataactaaaagtgaaaccgaagtaacaaaagtgctagacaacatatagaaatctagaaatcttgaaatcacgacatgtccagttggagtttggccagtgccgtgtcgccaaatgtcaccggtggcgatgtcatccggttgaaccacctaaagtccagctcggaaacgcatctgccatcgcggggatctggaacggggtctggagcactaccacgtcccacgacacccgtgccctccaagaaactgtcgtccaaacgacctccacacttgaccctcaacataaaggccaagtcccacgatgctccgctggccgagacggaaaacacggttctctcgaccagtgaatctgtctatggaactccgctgggcgccacacccgtttcgtcacctgccaaccaaagtcagcgcagtcaggcgagccagcatagtgacgaaagccgcaacaccagcagcaccgccaccagcggaggatccatattcccccacgaacagtacaaaaccatcaagaagatcaacattggcttcgagaatatacgctacactaccaaattcggagtcttccagagggaaaccaaggatgtgctaatgggtttaacgggctacttcaagtcgggagaacttagtgccgttattggaccctctggagctggaaagagtactctgctcaacattctgtcaggatacacaacatatggctttacgggggatttccgggtcaatggcaacaggcgggatttaaaggccttcaagtcgaacgtggcgttcatccgccaggatacgagtcttcaggcctttctctccgtcaaggaggcgatgcattttgcagccaatttgaaaatcggcactcacatgacacatagcgagaaaagagagcgggtaaagtgcattctggaggccatcggtatgtacgaaaaccggcataccaggacggggcagctaagtggaggtcagaagaagcgtcttgctattgcactggaactggtgaacaacccaccggtgctgatcctggacgaacctacaactggcttggatagtttcacctccaatcagctgataaatttgctaaagaagctcgccatcgagggacgcacagtcatctgcacaatccaccagccaagtgccttgaccttcgccatgttcgatcatctgtatgccattggcgagggcaagtgcatctacgcaggaggagcccaaaacctattgcccttcctgggcgccctcaatttgcactgcccggagtcctacaatccagcggattactgtgagtttacggtaatggaaatagcaactcatgactatgacacggcggaagacaatcagctggagaagctggtggccctgatggacaatggtcgcaatgaggattacagacagagcaagactgcgcgagtggcccaactggcggccatgaagaaagttgaccaacttatggcagcgggactgatcacaccggtgacagcacctgtgatgtccacatccgtgccagcgcatttcatgcagggcaacaccttcaagccactcacccccatcaatgaactgtcctcccgagtgtgggacagccaaacggcgggaatcggaaacgctggcagctgttgtaagccgaagaagaaaaataaatccaggccagctatagagttggatccatcgcatctgtgcaaaagacagaacatctacgccactccgttctaccgacagttgagcattctgcttgtgaggacattcctgctaatttggcgggacagttcgttgactacgatgcgcttcgctattcacctaatcacaggcatcctaataggaacgctgtactttgggatcggcaacgatgccgcccagacgttaaatatcttccgatacctcttctacacaatcatgttcatcatgtactgtgcgttctcgggcatactggtgaagtttccgctggagttccccattgtgtcgcgggagcacttcaatcgctggtattccctgcgggcgtattacgtagccatcaccctagccgacctgcccatccagatcatttgcagtgccctgttcatagtgcccacatatctgatgacccaacagccgctggagctctggcgattcggaatgttcttcctgattgtgttcgttacggctctggtctcgcagagcattggcttggcggtgggagcagcactgagcctcaagctgggctccattctgggacccttcttcatctgcccgttcctccagtttagcgggttctttctgatggagaaggacgctccggtgtttttgcgctggatgtttgacatatcgttcctcaagtacagtctggaaggggccacgatggccatttttggatacgatcgcgagcccctggcttgcaatgagctctactgccacctgaggcacccccagttcatactcaaaagtctggacatggccaacggaaactatacacttgccctcatctttctgttcggcgttttggtcttcctgcgcatcctggcgttctacatcatgtccttccgcctcagattgttcagatga

SEQ ID NO: 20487 - protein, 812 aa, DROSOPHILA
MSSWSLASAVSPNVTGGDVIRLNHLKSSSETHLPSRGSGTGSGALPRPTTPVPSKKLSSKRPPHLTLNIKAKSHDAPLAETENTVLSTSESVYGTPLGATPVSSPANQSQRSQASQHSDESRNTSSTATSGGSIFPHEQYKTIKKINIGFENIRYTTKFGVFQRETKDVLMGLTGYFKSGELSAVIGPSGAGKSTLLNILSGYTTYGFTGDFRVNGNRRDLKAFKSNVAFIRQDTSLQAFLSVKEAMHFAANLKIGTHMTHSEKRERVKCILEAIGMYENRHTRTGQLSGGQKKRLAIALELVNNPPVLILDEPTTGLDSFTSNQLINLLKKLAIEGRTVICTIHQPSALTFAMFDHLYAIGEGKCIYAGGAQNLLPFLGALNLHCPESYNPADYCEFTVMEIATHDYDTAEDNQLEKLVALMDNGRNEDYRQSKTARVAQLAAMKKVDQLMAAGLITPVTAPVMSTSVPAHFMQGNTFKPLTPINELSSRVWDSQTAGIGNAGSCCKPKKKNKSRPAIELDPSHLCKRQNIYATPFYRQLSILLVRTFLLIWRDSSLTTMRFAIHLITGILIGTLYFGIGNDAAQTLNIFRYLFYTIMFIMYCAFSGILVKFPLEFPIVSREHFNRWYSLRAYYVAITLADLPIQIICSALFIVPTYLMTQQPLELWRFGMFFLIVFVTALVSQSIGLAVGAALSLKLGSILGPFFICPFLQFSGFFLMEKDAPVFLRWMFDISFLKYSLEGATMAIFGYDREPLACNELYCHLRHPQFILKSLDMANGNYTLALIFLFGVLVFLRILAFYIMSFRLRLFR

SEQ ID NO: 20488 - DNA, 5310 bp, DROSOPHILA
ttttgcctttgccaacgtttgctgtctgcccaaattgtttgttctttaaattgattatgtgacgggggcaatggctctctgaaaaggggcttacaggtggcttctcattaaatataattaaattgagggctttcgccgatcccaaggacgctaattgatttcgctcacaagccaaacacatatatttctgagtgcaaagctcagagggaaatgttcctaaacgaatttgctatctatttgcaacatgactgcgggtaaaataatggaatttctgccccttccaccggaagtttcgcagacggcacaaaaagcttggcaaaatgcatttcgggccaaagcccaaaagtgtcgaagatgcagaaaggccacgggacttcagactacagcggcagtaagtcagcccaaattctaagatgtccttgcctatatgctccatgtctgtgtgggtgagagtgtgtgtgttttggctgcaagtaacggcgctttcgaggcttgaattatgtcgctgccagaaaataagtctgtcggcagtcggatacaacatcaaagagattaaagcgagcggatctgcattgaaaattatgaatgcaaatttaatattccatttaaactgcaagcatgttagttgatgcgaacccatggaattctatgggattgaattctaggaactagtcgttgaagagaagaagccatgaagagcaattaaaaatatttttaagcattaagaagggcttacaataagatatatatttggtaagtttaatgtttaatgtaatctattgttaactaagggtagcaaaataaaagttgtatgtcgaattcaagtatttcggttcgtgactccactaatttgtagataataagcaatgtaatatgtatgtaaaaaatgtgtcgaaagaaagaattttagataaaaagtttaacaatcgtaacactttattagccattcactaacaatctcccttacatttgttaagggccagattcctaactaaccatatcaccgaagagctcgccggatgactgcgttcagggttacaaagaaggctagcagcaggaggatgagaaatattcccaggacagccatatcccaatcgaactcattgccctccatctggaagtccttgaggaactgctccgccgttctgtaatagcagaagttgcttgtggcatagcactccagttccccgcgatcgtatccatagatggctcgcatcagaccctcgaagatgtacctgaagaaggacacgtcgcagatggggcgcagaaaccaggagagctcgttcagccgaataaagaagccggagaacaggaggaacggaatggtggcactgggcaccaggaatatggccaactgcatggtgaacagggagcctgcgatcaccccgatgaagtggccaatgaaggcggtcatcacgcacagggcccagcacatggcaaatcgttggaattccggtggctgacccgtcatgaagtagccgatgctgatgaacattgtgggacaagtcagctgcaggggcagatcggccaggaccttggacagatagtaggctcccagggagtaccatccgttgtagtactccctgatgaacaccgccgagtcctgcatgcacagcaggatcgagggcatggcattgccggcgaacacgaagagtatcacaaaaaacaggcaggatacattggacacgattttctgtgcatcgccacctatctgccagtagacaacgcccaagagcagggccaccaccacgtgcatcaccagacgcatttggacagcaaactgaaagattacggaatagtttaagctatacaatagttgagtgcttcaagccaagtcttaccatatctctggacatggagcgcagatgacgacgaagcaggacacttagctgggtccagaaacccacctgctccttaccacgcaggtgagacaagtccaaggcatccttgtggacatctatcaaggctgctggaattaaattagagcaggcacagaaagtcgacagatagagcagaggagatagaagtgcaatagggaaagatagtaagttacgagtgcaggagcgcggaaatgggacttgtatgagaaaagccatcctgagaactatgccggccatcatcacttactctcctcatccacttgaagcttcacaacattactggcggtgctgtgcatcatcttgttctgagtgatgagcgattcacagcgttctgtggtggaggactgactgcacacttccagggctattaaaaatattgaactacattaggtaaggtgaaagattaaggacaaaacataccgaaatccgcgggattgtagtactgtggacagatgtggccggattgtgcgaaagtgggcagcatttcccgctgttccccagcgtaaaggacctctccgtgagccaaaaccaggacatcatcgaagagttggaagagtcgcgatcccggctgatgaaccacacaaacaactatcctgccatcgtgcgccagtcgctgcagatggcaaatcacctggtagctgcccacacaatccaatccgctggtgggctcatcgaagaacataatgggcggattcgttaccaactcaatgccaatggacaagcgcttgtgctcgcctccggataaattcttcaccagggtcctgcggcaggattgtagctgcagtatgtcgataatatcgtctatctggaaggtttacgattagattttccaaccatatatgctatttaacttttatgcatacaattttctgtttctcttgagcagctgtggaactgggcatcttcaggtctgtagaaactcgcagagtttcctcaaccgtgagcagatttagcatcacaaagttctgagcaatataggcggacattttccgaaagctcattatatccctggggcgtccattcaacagaaactggcccgtaactccctggagtctataaatggtagatacaattataataatactattttcaaatcaacttcttactcacttaaaacccgccaaagcattaagcaaggtggactttccagctcctgagggtcccaaaatggccgtaagtcgtcccgatttgaagaccccgcatgcctcgttgataatgggagtggatcctttggtggccccctttaagctgtagctaacttggctaaagtgcagctccagcgccttttgcttttgcgggcccagaccatttggctgagcttgcaccgcgttatcggccattagacggcagcagattgttgtttatgaacgaaccagatacccgagtggcgagttgttttttattcgatttttgcctttggtttatgcgcgggactgatcgttaagctggtcaataaaccggtgaactgctgagttcttaataaatgcagaacatatttgttcctaatgactgatacatttcgaagctttcgcctaacttttataaggaggatcgcggataatcttatcgcccaaagttggatggatcgaatcaaggtcgtctaaccctcaaacaaacttgttgaacaacaacgtgcatgagctcgaccgatgagttggctctccaatccactgcagttccacccactccgtatcgatgggatcttgtccgaggtcaggcgagtagataactagtgggctgaaaatagtttagcgataattcccgaggaatagaataggaatattaatgcgggtataattccaaagattttgatagcctaattaattagactcttacccatgggactacttttgcattacatgaaacctacttttttcaattttccgcctgaaagtgagcaccgattctatagaaaccaaatgaccttctttagagagtgaaattaacgattggcctacgccactgggtaattgatacacagtattcaacgcgaaacaatgaccgctggtaatacacacccatttacatgactgcacttgtggagcccaatctgcgtattataatagaagttaggctctataattgcctttgttaatttttgacttcgcacagctggtgcctattaatgatttcagtttgcccggaacttttgcttttccagcagtcagtcaatatgcactactgtaaaatctggtgattgtaattttctaattgcacgacttattttcttggaaaactggtttgcataggctttcactgatgtgttcgcagctccaagtttgcattcaataatgcttattaatatacttaattatatggtcttatggtcatatatcgatattttatcacatttgaccgcgactttgtatacattttgtttcgaacgcctctcgtcaattaagatttcaagtcgtgatcacattaaccgattgaaagagagacagtgcgatccccagttgccgaccactttctgttgatattcaaaacgcgactgatttcaattgctcggaagtcgaaagccggctactgcttttaatcgcaattcatctgccaacatgtttgaagtgcacttagttgcaatcaagtttgatcgcaattcgtggcatacttctgcgatctgttacagaaataagaactttatatatataaaacatttaatgtaaatattcatagactaaaacaattaaaggtcagagaaacaattaaaacagacatcttcggatttcatggcaaaatattttaataatattttcaaatgtatactcgcagctgacgcctgaaaatcaggccagttttacaactagtcaataatggttcattaatacgttacaaaaatacaattgtttatatgctatgctataaaaatgttctatttacaattattgatctcggttaccgccgtgtgtgtatgcttgtcattgtgtgtttgagtgtgtgtgagggctctatgatcctgtgtttctgatatatatcacgatttccttacgctctaccggcttcaccaatctttggcacatatgtttctctcgaataaatgcttaaatagaaaccacaaatataaaagtaaaacatttaactgtcggcggaatgtggcaggtttcctttggtcgctcgagacgtgggtctcatctgaacaatctgaggcggaaggacatgatgtagaacgccaggatgcgcaggaagaccaaaacgccgaacagaaagatgagggcaagtgtatagtttccgttggccatgtccagacttttgagtatgaactgggggtgcctcaggtggcagtagagctcattgcaagccaggggctcgcgatcgtatccaaaaatggccatcgtggccccttccagactgtacttgaggaacgatatgtcaaacatccagcgcaaaaacaccggagcgtccttctccatcagaaagaacccgctaaactgga

SEQ ID NO: 20489 - DNA, 2639 bp, DROSOPHILA
atcggttaatgtgatcacgacttgaaatcttaattgacgagaggcgttcgaaacaaaatgtatacaaagtcgcggtcaaatgtgataaaatatcgatatatgaccataagaccatataattaagtatattaataagcattattgaatgcaaacttggagctgcgaacacatcagtgaaagcctatgcaaaccagttttccaagaaaataagtcgtgcaattagaaaattacaatcaccagattttacagtagtgcatattgactgactgctggaaaagcaaaagttccgggcaaactgaaatcattaataggcaccagctgtgcgaagtcaaaaattaacaaaggcaattatagagcctaacttctattataatacgcagattgggctccacaagtgcagtcatgtaaatggcccactagttatctactcgcctgacctcggacaagatcccatcgatacggagtgggtggaactgcagtggattggagagccaactcatcggtcgagctcatgcacgttgttgttcaacaagtttgtttgagggttagacgaccttgattcgatccatccaactttgggcgataagattatccgcgatcctccttataaaagttaggcgaaagcttcgaaatgtatcagtcattaggaacaaatatgttctgcatttattaagaactcagcagttcaccggtttattgaccagcttaacgatcagtcccgcgcataaaccaaaggcaaaaatcgaataaaaaacaactcgccactcgggtatctggttcgttcataaacaacaatctgctgccgtctaatggccgataacgcggtgcaagctcagccaaatggtctgggcccgcaaaagcaaaaggcgctggagctgcactttagccaagttagctacagcttaaagggggccaccaaaggatccactcccattatcaacgaggcatgcggggtcttcaaatcgggacgacttacggccattttgggaccctcaggagctggaaagtccaccttgcttaatgctttggcgggttttaaactccagggagttacgggccagtttctgttgaatggacgccccagggatataatgagctttcggaaaatgtccgcctatattgctcagaactttgtgatgctaaatctgctcacggttgaggaaactctgcgagtttctacagacctgaagatgcccagttccacagctgctcaagagaaacagaaaattatagacgatattatcgacatactgcagctacaatcctgccgcaggaccctggtgaagaatttatccggaggcgagcacaagcgcttgtccattggcattgagttggtaacgaatccgcccattatgttcttcgatgagcccaccagcggattggattgtgtgggcagctaccaggtgatttgccatctgcagcgactggcgcacgatggcaggatagttgtttgtgtggttcatcagccgggatcgcgactcttccaactcttcgatgatgtcctggttttggctcacggagaggtcctttacgctggggaacagcgggaaatgctgcccactttcgcacaatccggccacatctgtccacagtactacaatcccgcggatttcgccctggaagtgtgcagtcagtcctccaccacagaacgctgtgaatcgctcatcactcagaacaagatgatgcacagcaccgccagtaatgttgtgaagcttcaagtggatgaggagacagccttgatagatgtccacaaggatgccttggacttgtctcacctgcgtggtaaggagcaggtgggtttctggacccagctaagtgtcctgcttcgtcgtcatctgcgctccatgtccagagatatgtttgctgtccaaatgcgtctggtgatgcacgtggtggtggccctgctcttgggcgttgtctactggcagataggtggcgatgcacagaaaatcgtgtccaatgtatcctgcctgttttttgtgatactcttcgtgttcgccggcaatgccatgccctcgatcctgctgtgcatgcaggactcggcggtgttcatcagggagtactacaacggatggtactccctgggagcctactatctgtccaaggtcctggccgatctgcccctgcagctgacttgtcccacaatgttcatcagcatcggctacttcatgacgggtcagccaccggaattccaacgatttgccatgtgctgggccctgtgcgtgatgaccgccttcattggccacttcatcggggtgatcgcaggctccctgttcaccatgcagttggccatattcctggtgcccagtgccaccattccgttcctcctgttctccggcttctttattcggctgaacgagctctcctggtttctgcgccccatctgcgacgtgtccttcttcaggtacatcttcgagggtctgatgcgagccatctatggatacgatcgcggggaactggagtgctatgccacaagcaacttctgctattacagaacggcggagcagttcctcaaggacttccagatggagggcaatgagttcgattgggatatggctgtcctgggaatatttctcatcctcctgctgctagccttctttgtaaccctgaacgcagtcatccggcgagctcttcggtga

SEQ ID NO: 20490 - protein, 609 aa, DROSOPHILA
MADNAVQAQPNGLGPQKQKALELHFSQVSYSLKGATKGSTPIINEACGVFKSGRLTAILGPSGAGKSTLLNALAGFKLQGVTGQFLLNGRPRDIMSFRKMSAYIAQNFVMLNLLTVEETLRVSTDLKMPSSTAAQEKQKIIDDIIDILQLQSCRRTLVKNLSGGEHKRLSIGIELVTNPPIMFFDEPTSGLDCVGSYQVICHLQRLAHDGRIVVCVVHQPGSRLFQLFDDVLVLAHGEVLYAGEQREMLPTFAQSGHICPQYYNPADFALEVCSQSSTTERCESLITQNKMMHSTASNVVKLQVDEETALIDVHKDALDLSHLRGKEQVGFWTQLSVLLRRHLRSMSRDMFAVQMRLVMHVVVALLLGVVYWQIGGDAQKIVSNVSCLFFVILFVFAGNAMPSILLCMQDSAVFIREYYNGWYSLGAYYLSKVLADLPLQLTCPTMFISIGYFMTGQPPEFQRFAMCWALCVMTAFIGHFIGVIAGSLFTMQLAIFLVPSATIPFLLFSGFFIRLNELSWFLRPICDVSFFRYIFEGLMRAIYGYDRGELECYATSNFCYYRTAEQFLKDFQMEGNEFDWDMAVLGIFLILLLLAFFVTLNAVIRRALR

SEQ ID NO: 20491 - DNA, 4402 bp, DROSOPHILA
atcgagtacaataccatcagcgaggatggatcttttcagtttcggtacatagatgtgtgacaaactatagtgaacatttttaaaggatattaagcactgaaaaaaaaattggcattatggattaaatggatatgcatttaattgcaaatgcaacaccctgtgactcaagaaatttgatgaatagtttttgttacaattgcaaaattttgaatttagtaaaattttcaatttacctaaaaatgctttaaaaggcaggatattttgacagaaattagtaatttccttcgtaatacgattatcataatacctacatcgactaagatttttaataggattttaaaacttcacaataaaattaattcagataacattgaaattaatatttttcaattttcaactcattgcattagtcatcacaataaaaaaacttaaccaaataacataatttacattaaatagaatagaactttcattgtcgtccaatttccttttaaaaaaaggattaaaagtagttagtcgctgaaaataagaaataaccttccccaattgcgtacaaacttagctgtttggtagaataataaaccttttgaaaagagaacaactcaattacagttttttagcagccatgggtcataaatctaacaaatcatctaatcggtcaatgatgtctgctaccttaccatcaccattacacccgagaaaatttgagatttttagcacctctttaacgcctcaacgttttgcaaccacaacaataacacgcttccgaccatctttccctctccatttcgcacgcatggggcaacgcaattacttctgtttcgatggatcccacctggcatggataatggatatgctgctgctggtactgctactgctactgcttccaatcggccaaaagacatgcaaatgatgacattggcggctactatcacagcgcctcgggcactccggacaacacggtgcgaggtcgctacggttcgcggagtccggcgagcgggcagatcgaggagacggtctacacagccggaccacgtgggtgagtaatcgaagacggtagccaagactagtgggtaaagtgcgctggtgcactgcaagaaaatagtatcattttagagtgcatatgtgtggagaaaaatgcatttaaaattgatgatgtcaaaatatgcgtaaaagaaaaacataatttttaaaatatatgtatttcaaatgtttttaaaaataattaggcaacgataagttctgtgggtatacatgactcgaaggtaacttccttgaggaaggtcggcggttttttcctgagtgtattggccgctgaggaagtggcagcacaaagtgagttatctcccctcgatgtcagagttgagctcatatatcagcggttggcggcaggcggcggccactgaagcgaaacccaaacaaacggagggggatccatggagttggagccgttctaacacattggactgctttttctggcgttgcctaaacgtttttccattaccgcttcggcgctactgttgttttttgcaatctccggtaaatcgggggaaacaaaaagctgttaacaaattgactggcctgagagattcgagccaaaaaaaaaagaggaatggattgtagatggcagatgctcaacgatagcgatgattctgaatgggatcgttccccgagatgtgtagtaatcgaagtaatggcgtgccgggctaagatcgaatctatattcaaaattgcagtgcaagtccgcttccgctgaaagggtttacccaatccccactcattgtgtcggtagctaattaatctccctctatttcccacatagatttcgcgtgaacggaccgaaaatccatcggaaaatggacctggctcagtatccggtactgccgcggggaagtccggacgatccgctggccgatcccttcgacgatccatcctacagctttagttttcgcactccggatcagtcgcgcagcgaggagaatgattccgggaataggataagaggcgagtttagcgagtatggtacttaagagtatattaactgattctatcccaggtctgtactcctatttggacgacgtgggcgagcggcacagtgttcgttatgcagctggagccggaaccggattcgagatctccaacgctgtgccggacagcccatctgttgtggcgtactccagtcctctgtacacgtcccatcccaaagcacgcggcaagatgtctgtgcaaagggggccggctggaagctataagctgatcgcctcaggttcggatcaccgacgggcagaaagtcgagcacccgatggcctggtgcgaggaacctactccttcctggacgacaagggcgtgcagcggacagtggagtatatagctggagcaggaattggctaccgggtggtgcaaaatcggattggtcctggaacccataacaatccctctgtggctgattttcgtttgacagatccagatttccgactggctaatgattttggcaggggtgctggtggtggcttaggtccgaagggaggtggtggtggatcaggtgggggaagtgtttcggtaggagcttcggggccaagtggtggtgcaggtggagcgggaaggggccgtactccaagcagacccggaggcaaagattacctaaagccggctgatggagcaagagataggaatcgtggagatggtgatgctggggcagctgatgaaaatctgggacaccatgctgatgaccaaggggatgacattgggcttggcagcagctcctctggttccaccaactttaatggcaaagaagacagaagagggttccctgcgggtagtccgcaacggggcagtactagatacgatgccggaggtgacagctctcagagaggtggttcaggtagctccacgagaaacaatgttagtgggtcccgaaacagaaaccgattcggcggcgttggtggagtaagtgtctcctctgagcggggagcaggaaggggaggtgctgccggtggtggaagcagtcgtcgaggaggtggagctggagcctccagggaaggcgactccggcctgggctacctgccgcccacaggtggatcgggcaccagtgccatgagcggacccggggacaattaccacctcaacgatgacgatgtgggcagttcactgcctcctctggtcaccgccaaccaccgaattctagagatcgacagggatcgggagtgggtgcagcgacaccgcgactccaccgtcatcaagaacgtgggtaaatggtacgtgggcctgccgcctggtcaaagtgtgcgtgcccatgtccagaacatcgacataatacccttgggcggaaggatcggactttcgccgtcggaggcactgcgtcaggatgagatcgccgagctgaatgcctcaagggagcactaagcacccattggatctgtagatctgtagtttgtagtgcgtagctctaagtgatcagtgttgagtaaccgaaactgggttgactccacatggaaactaaaacagtatttaaagcggaatacattttttgcctgtatctgtatctcaaactgtatctgtatctctagcgaatagttatttgatatccgtggatccgggtataagcaggttaatctgcacattgcggtttccttgaatccacatataaccccatgacttagcatgctcggagtttagttgtttctgagacttgaacatgatgttggtgcttttcattgcttcgctgatagtttcctgtgctcaaggagcgcaagtgtatatgcagttcaatggacaaggatactcctacaacacggatggcgatagattggataggagtgtcgttaagcctagttttggggcatcttctctggattcctttggtccgctgaactttgtgcatcaatctctgaggacaagacagaatccactttcccggatttcctacaatacacaggataacctagcagtggcaacatcttcgctgagtgcgggctaccaattagcatcgaccaaccacctgaagcaccggcaaagccagcaaaactttgatttcagcaccgaccagatgtcgcatgcccagcacaccgatgaggcgggaaatgttttgggcaagtactcctactacgatgaggctggctaccatgagctgagctacaaggcgggcgccggcatcggattcgtggtcatgggtggcaatttggccaaggccaccaccgccgctgaaccgcactcggaaatcgaaatcggaaacggaatccaaacaaatgccttgactagcctgcaagagttgcataaatatcgtggctacacgtaaataaaatatattagccaaaactattgctcgttctacttgggtgttttgcgttatttactggaagtctttggagatctgacagtgtcacctgtcgtgtttgagacctac

SEQ ID NO: 20492 - DNA, 1567 bp, DROSOPHILA
gcagatcgaggagacggtctacacagccggaccacgtggatttcgcgtgaacggaccgaaaatccatcggaaaatggacctggctcagtatccggtactgccgcggggaagtccggacgatccgctggccgatcccttcgacgatccatcctacagctttagttttcgcactccggatcagtcgcgcagcgaggagaatgattccgggaataggataagaggtctgtactcctatttggacgacgtgggcgagcggcacagtgttcgttatgcagctggagccggaaccggattcgagatctccaacgctgtgccggacagcccatctgttgtggcgtactccagtcctctgtacacgtcccatcccaaagcacgcggcaagatgtctgtgcaaagggggccggctggaagctataagctgatcgcctcaggttcggatcaccgacgggcagaaagtcgagcacccgatggcctggtgcgaggaacctactccttcctggacgacaagggcgtgcagcggacagtggagtatatagctggagcaggaattggctaccgggtggtgcaaaatcggattggtcctggaacccataacaatccctctgtggctgattttcgtttgacagatccagatttccgactggctaatgattttggcaggggtgctggtggtggcttaggtccgaagggaggtggtggtggatcaggtgggggaagtgtttcggtaggagcttcggggccaagtggtggtgcaggtggagcgggaaggggccgtactccaagcagacccggaggcaaagattacctaaagccggctgatggagcaagagataggaatcgtggagatggtgatgctggggcagctgatgaaaatctgggacaccatgctgatgaccaaggggatgacattgggcttggcagcagctcctctggttccaccaactttaatggcaaagaagacagaagagggttccctgcgggtagtccgcaacggggcagtactagatacgatgccggaggtgacagctctcagagaggtggttcaggtagctccacgagaaacaatgttagtgggtcccgaaacagaaaccgattcggcggcgttggtggagtaagtgtctcctctgagcggggagcaggaaggggaggtgctgccggtggtggaagcagtcgtcgaggaggtggagctggagcctccagggaaggcgactccggcctgggctacctgccgcccacaggtggatcgggcaccagtgccatgagcggacccggggacaattaccacctcaacgatgacgatgtgggcagttcactgcctcctctggtcaccgccaaccaccgaattctagagatcgacagggatcgggagtgggtgcagcgacaccgcgactccaccgtcatcaagaacgtgggtaaatggtacgtgggcctgccgcctggtcaaagtgtgcgtgcccatgtccagaacatcgacataatacccttgggcggaaggatcggactttcgccgtcggaggcactgcgtcaggatgagatcgccgagctgaatgcctcaagggagcactaa

SEQ ID NO: 20493 - protein, 497 aa, DROSOPHILA
MDLAQYPVLPRGSPDDPLADPFDDPSYSFSFRTPDQSRSEENDSGNRIRGLYSYLDDVGERHSVRYAAGAGTGFEISNAVPDSPSVVAYSSPLYTSHPKARGKMSVQRGPAGSYKLIASGSDHRRAESRAPDGLVRGTYSFLDDKGVQRTVEYIAGAGIGYRVVQNRIGPGTHNNPSVADFRLTDPDFRLANDFGRGAGGGLGPKGGGGGSGGGSVSVGASGPSGGAGGAGRGRTPSRPGGKDYLKPADGARDRNRGDGDAGAADENLGHHADDQGDDIGLGSSSSGSTNFNGKEDRRGFPAGSPQRGSTRYDAGGDSSQRGGSGSSTRNNVSGSRNRNRFGGVGGVSVSSERGAGRGGAAGGGSSRRGGGAGASREGDSGLGYLPPTGGSGTSAMSGPGDNYHLNDDDVGSSLPPLVTANHRILEIDRDREWVQRHRDSTVIKNVGKWYVGLPPGQSVRAHVQNIDIIPLGGRIGLSPSEALRQDEIAELNASREH

SEQ ID NO: 20494 - DNA, 8792 bp, DROSOPHILA
cgagaagtgtgtgaagtcttcacgccgaagtgcttgtcaaatcaaaaaaaaaaaaaaagaacatgactcttgagtcactatgtgcgaaactttctaacgagttccaggcaaacattttaattgaattgcccggcaacgaatcgattctttcatcacggtaagtctcttaccattttggcttatgtcatgttctgggcccgttccgagctgattacctttccacttcccacacgcatttcgcttctattctcgtggctcactccacttgtaatggccagtcacttcgctcctgtccagtcacactcaatcaagccaataaacggccaattaatcaaagtcagcgctgtgattctgtgttcttgctaggtgcgagtttgcgaaacagtagactgaagaagcgactgtcagcacatttaatcaaatgcttgagaaatatctgacaatatgttaggcaaactatttgcctaacccaagggatcggggaagatttcgatctgcgaaatcctagagttgtaagcctgcatatcaattggtgttgtgtaccctggagctggtaaccaaatcccacagatccacgcccccagataaaagccaggccaaggcgctcgactacgtgcccgaatcgcggtcttctcttcgactctctcttctgcccaaaacccagttctcttacacctgatcgggccctgttttcttggccatttctttcgcttcgtcgtttgcatcgctaatggaaatgttataaacagacgcgctgggcccggccagcactcagttcatcttcagacgtcgcctggctcgctggctcttggttcttggtaggagttccatttccagaccctatttattgtgcgtgacaaaaaaaaagaaagaaaaacaacggaacctgaaacaatcgtaaattgaaagctcagcaggattggttttatagtgcttttagtgtgtgtgattttgccgcgtgataacccagagtgccactcattcccgttctcgtttgcagttcaaggatatattgtcaaggcgaggattggtcaacgccacgaacaccaagcatttattgaaaaatctgaaactattcaccagaacctcgcgttaaaatgcgctttcttgttgtaagtcaaatcgcataaaaaagaaaattaaataccatgaatgacttaacttcacattttgggaatacaaaacgaaactagtttatacctgaccgcaattaatcatttattgctctgtgctgccgctgaactcattaactcgtcaactggcccaagttcgtgccttaagtcttttgtttctttcacttctgaatcgacactaactttcactaagcgacttttttgattcttggcttggttctttcctttttttgatcgccttaattagccttaattatgctctgtgccatatgcaaatattaataagagtgcctaaaatctttttggggtttataataatcacaaatcaatttggacgcaaagaactatattggggaaacttttttttatatgaatgcaaaaggttaagacttctttgtgccagttattgttcacttagtaaaggtttttcaaaagagttaattctttctgaaaagtgaaacccttttgtccattccatttgaacgtgacaatattctagccccaccccaatttaaaaagtgagaattaatcattcatacctaggaagtattgttccttgcattattcatattcccattatgaaaagcatgcccttaaaagtcaaaactctacagcgactcccataagcaacaatgccattcaattataaccacaaccaatacaaccacttgggttgaaaagcccaaaaaataattatgactcaaagaacataaaattaatatgccgcaaacgtataaaaatcatgcgtgggctaacaaatggtaatataagtcttcttttccccctcccaactatcaaacaatcggtcacatttgtgtggggttcttaactataagtgcactggtttgttttcgagtttgtgatcgtttcgatagtggttcataaattaatcaatttatgagtgtagacagttagccacacgtcccaagtccatcaatccctgctcaattagctgcattggaatggctctggaatatcatttaagaccaaaagacacctgatcggatgtgaagatcaggagacagactcatttataacttgtttgagaacataaaatgctgcgcttaaactttgcattcgagccattaacccagtttatttttggacaagacacacctgatatggggtcgaatcggcatcgttatgtgagggcaatataataaataaggcgaaatacacaaaagaaagcagacagaaatacatcttactgcttggggatgcaagagttcttgcaaatcaatggcaaccaggttcgacagcctctgcgccagaatctcttctctcgagttacgtttcggcaccgaaatcgtaacagccgcctagaggttcaggtcaatgacacaacacgagcctcgacttcgaatccagctttggttttggcttttggtctcagttcctctcggctttgtgacatttcggcgctgatagataggcgtgcgggctggtcgtttccaccggctaacggttgcgtcaatattgactttgccaaagatgtggagagccggcgagagtgagtcaaatatttgccgatcgtgaggttcttgacaatcgtattcgagggaaaatccgtcaagtacataagccgttccttgccacctggctctcacttttcggcgtagctttcagcagcgaaagaaattatgcaaatgtgctggaggagcagggagagagagactttcgcgactttcgggacttgaccgcattccacacgtgtgaattttgtatccattacgacatcagaatacagacaccctatctaaccggcataaatcatagatctcattcatctattgtcacacatttgtctttcagctctcaacactgcttctggcctctttggcacttggccaggctcaacagcacggtggactggccgtcgagtaagtagactagtagctagttacccagccctaagaccccaaataaccatgaaatgccttgcctgccaaatgtgactgtgtcaacgctaatgctcattccaagtagaagttgatgcgcttgcctagaactatgtgactaaaccgaaaaaagcccagacttgtgactaaccctcaaaactcatttccctccacccaacaacacattaccctgcattagcaactagaagctaactccaccaacagatagagaccaccaaacaaaccccacctttcgtttgcagaattcagaagcagcggctggtcaaatttcccgaggactttgagcccaatgcggccactccgtcctcggaaaaggcggacgaggccaagcgcatcctcgagcagatagccaaggttaacgaggcctttggctacgtgaagaagcagccggagcagcccaagctgccaccgatccttgattccagtcaatacctgttccccaagcccgcccatcagccatttcacgcccatcagcaccacttctcgggaagtaatggtcagaccttgttagaaccctcaattagggcggtgaaactcacaagaaatgtggcgggcagttacaatgtgcctcccaggttgcgccaggcaattgagagcacctccaaggaggagaagaaagcgcaactctacttccgacccaaacaggtggaggtaccgaagccgagttccgaacaagaagcacagcagctgcccgcccactttgtggtgcccgtgcacctgtacaaactcaataaggaggagtatctcaaggagcacgcctcgcaggaatacaagataaagggatacaaaatcattggcgatgtggacagcttctatggcaaggcgaaggctggaagaaaacagggcaagacgacgcccaagtatcacctgttcttcctgccccgagaactggctctcaatgaagatggcaccccaaaaaggggtaattccaccaccattggtacgaccaccacaaaggctccagtgcctgtgaacttcaaggaatatcgtttggactcccgcgagaagcccgtgcataagccacagaagattcagcccacttcgtcaccggaattaaattctttgaacagaaagaaggttggttccacagcgaaacccgttcgcttgagtggaaaggatgctgaacagcaaatctaccagggatccacatcccttaatatcaaggctacatctgcgcctgtcctgttgagttctactttaccaccatctggtggcttgctgcccaatcggaatcgcttaagtccattccgcatgcccggaatgaatatagctgagatgcagaatcagacctcgactgccatcaagaatgcctttcaaaacattttcaagctccccttccgacctccaatggcggccacagctggagaaggtcctgtggttgttggcaatgttcctgtgaagaatcactcaatcgattcgatggattataaatgggaggatgaaaacgagggcgccggcgatgggatggccgatgatgtggataccattgagaacacagccgcggaactggacaacagtgcctcctcagagaagcacttgtttgctcacaagggccatcacctgatgcacactgtgagccaggtggccaccgctcaggaaagcacccaaaagcaggcattgcgcgaaggaggaatcatcattcagcggctaaaggttcgcaggggcggcatcgctatcgcaggacccgggggcgtggccacggcgggcagcggaggaacggcgattgttggtcccggtggctatgctctcacccatccacggagtctcaccatcgccggtcccggggccaaggtgatctccataccggcagatgtggaccttaaagatgccctggcacgcaccgatctggagacgagaagttttccgcgagagggaaagatagtggctacaggaccaacggtctactatgctccacccacgggcacaacaaccatggaggcggatcagggggcggggctggagacgggccagttcgagtcctaatccagttcgaggcttaaacctaatagctattatttagcacatttagttaggatccatagttggtattgtctagtgttctaataaatatttgtatttcgtaattgtttgggcttttgctttcatcttgtacatagtagttttagatatcacacttattccgcatgatattaacccgacacagtttaacccctcgaattattgctgtaaataatatacgactaaccggcggttctcttcaccattttcctctatcccactcttcctaaaccaaaaactatcctaactcaagtgcctactggcgcacaaccaatatcgaggcctggccaccaggagcacccgtcgcagagaagtccggaaaactcattgcaggatctgctccggcccaggacctcacgccctatggagcctatcaacccgtgctgttcagtgccccatactacgccgcctacaatctgcccctggcctatgtggtgcaacccaccatcgccagtgccgatcaagccaccatagccagtgcaacaaccacaacgaccactaccacaactggccgacccgaaagcttagctgatgacagctccagcgagttggagaaaccagaaaagctacaggctctgcctgcagtgaagacccgaaccactggggatctgaagagtgatgtgggtctccgctcagcggtcagcaaaataaaccccgagtatgtgatcgaagagatcgttccggtgccgggcaagctagtgatctccacttctgggtcaccccgctccgccaagcagcagttgaagaaggcgattgccccacaaaaaatgagaaagcaggcgggtggaagagttcccttgaaggttgaggccaccggaaagaccagcacgagttccggcaactttccgcagatcccatttggaaactacttcctgccctatagaccggagcaggctcaggcgatccagggacgcaagcaggctgcactcatcctggaacctcattccaaagcggtggttggtaatggtggcactgccatatccacgcccatttccaaggcgtatctgaagaagggtgtacccaccaacgtttacttcaatccggaatctgtggccatagcaggtgtgggtggcaaggcgcatgctacggcggatttggaattggatctgttcacgtaaaggagcaaggatttaacttaaagctcactttcattaactgattacttggcattattttgaaagtcaattgacacagtacgcaaaacacgcaaagacaattttcctatgaaatcagttgctgaaaatgggctctatgtagtaggttacccaacagaatctaattggtagttcctcctcccaactgacctatgttcctatgttaagaacataggcctatctgatgtgtcatttcttagattgtaaataaagtaaaccgtaaactgtacagctttcgccttgggtcatatagtagtccgctaatcccatgtagatacttctacgcttctcttaatccccgctttctccaggcaactcccaaacacaaccaacacacacactctctataaccaaatctaaccccgaaaagcagacacagatcgaggtcggctccgctggtcttcgaggagcatccttactacggaggattgaggggtcagcttctccagctgcgtccgcagcgggacggcagtgtgggcagcttcatcctgcagcgccaacagccgcagttgagggctgtacctagagactccgatgacaccatcaccatttcggccgcaagcatctcggcggtagctgatgctagtggagcttctagctccagcagctcgatctcagccagcgccagtgatttcaatcggattcagtcggccgccgctcggttggttgccattcaggagttggccaagcgcaagggttccttcagtgaggaggacaacaagatctatgccagcagcttactggaactgggccaggctgcccagagtttggccatgctccagcaaagcggacagattaaggactttagtgttctgctgcagccggacatgtttggcaatcctcaaaagcagccagccaatttcgggctagaggccaccaacaatccggcggaccagaagatcgacgaacagaaactggacgaggtcactgagcaacaattctcgccggatgagcagttcctgccccccaacaacgaggatccctatgaggatgttaacgatagtgtgtccgtaatggctcctaagaaagatgccgccgtggctgaggcaaaaccagtgggtaagttctctgaaggagaggcttctcttaatttacttctattaaaccctccaatcaccttttaggtctttcgattgccggtgaaggtggcgtggcctcctcaaaaccgaacgctgtggctctctccggccggaatggattggccgtagcttcgcccaaggccacagccattgctggagtttctcccgaggaggcagctgccttcagcatttcattgcccactcgcaatcaactggtgatcaagagtcccaatttggcttcggagaaggctagcgaagactatgactataatgatgtaccgctgacggttgcccgctttcctctgacccgggaaactcctcagcaattggtcccggttcgcatctctggaggggattcccttgtggaaaggtggcgcaccgccatcgcagaggattatgcagccaggcaggcgctgaccaaggtggccatgccgcatcccacacccttcatccgcatggctcccaaactgcgtcttcactccgaatagaaaaagtgctgtaggattggatgaacgagattaaaattggattggacttgatcgcaatgagattcatactttactttaagcaacatattgtgtgccagctcccagattgccaataaaatatgtctatttaaataaatgaattaatctgagattcttattaaagatctatacaggtcaattaaatatatcatttatagcctatagcttagtttctgaatgttatataaacaagtttaaaagctctagtcactttgttacaaaattttagacacaaaaatggcttgcaagcgatcgttgagatgcaataattgttcggtctttaaaaaggaacgtaattacaaccgacttgcgggccaaagaactggagttttccataccctgttatcgggcgttcgaatcacagaccgcaaatagccagtcaagatcacgtgaagaatgcgacagagggacacggcaacgcatctaattgctgcgggaagtgcatacagtttataaggaatataaatttatttatgcgattgcgcccagcgcattgaaaatctcaggcgaactgaatgcaagcatgtgcaaatcttgattaatcttttccgccagggcaggcaacatgaaaataaattatctaagcgggcagcggatggagggtcggtcggcaggaaggaacacattcaatttgcacctgaaccagttggctccatcgaccatctcccatccgagtacctttgcccgtcaatgcggcttcaatgcgttcgcccatgccatgcttgacttctattacgcggcaggtttaacaaacttgataggcccagaacttggacggggatgtggcgaagacggcatctccgttgaccatctgccatctgcaagcgaacctgaaaccagaatgtatctggcccgccagctttgttggctattcgggcttcttttggctagcgaacgacttggttcccccttcggctttcctgcgggaagctgcacatttccagttccatcaggtctgcag

SEQ ID NO: 20495 - DNA, 3616 bp, DROSOPHILA
ttcaaggatatattgtcaaggcgaggattggtcaacgccacgaacaccaagcatttattgaaaaatctgaaactattcaccagaacctcgcgttaaaatgcgctttcttgttctctcaacactgcttctggcctctttggcacttggccaggctcaacagcacggtggactggccgtcgaaattcagaagcagcggctggtcaaatttcccgaggactttgagcccaatgcggccactccgtcctcggaaaaggcggacgaggccaagcgcatcctcgagcagatagccaaggttaacgaggcctttggctacgtgaagaagcagccggagcagcccaagctgccaccgatccttgattccagtcaatacctgttccccaagcccgcccatcagccatttcacgcccatcagcaccacttctcgggaagtaatggtcagaccttgttagaaccctcaattagggcggtgaaactcacaagaaatgtggcgggcagttacaatgtgcctcccaggttgcgccaggcaattgagagcacctccaaggaggagaagaaagcgcaactctacttccgacccaaacaggtggaggtaccgaagccgagttccgaacaagaagcacagcagctgcccgcccactttgtggtgcccgtgcacctgtacaaactcaataaggaggagtatctcaaggagcacgcctcgcaggaatacaagataaagggatacaaaatcattggcgatgtggacagcttctatggcaaggcgaaggctggaagaaaacagggcaagacgacgcccaagtatcacctgttcttcctgccccgagaactggctctcaatgaagatggcaccccaaaaaggggtaattccaccaccattggtacgaccaccacaaaggctccagtgcctgtgaacttcaaggaatatcgtttggactcccgcgagaagcccgtgcataagccacagaagattcagcccacttcgtcaccggaattaaattctttgaacagaaagaaggttggttccacagcgaaacccgttcgcttgagtggaaaggatgctgaacagcaaatctaccagggatccacatcccttaatatcaaggctacatctgcgcctgtcctgttgagttctactttaccaccatctggtggcttgctgcccaatcggaatcgcttaagtccattccgcatgcccggaatgaatatagctgagatgcagaatcagacctcgactgccatcaagaatgcctttcaaaacattttcaagctccccttccgacctccaatggcggccacagctggagaaggtcctgtggttgttggcaatgttcctgtgaagaatcactcaatcgattcgatggattataaatgggaggatgaaaacgagggcgccggcgatgggatggccgatgatgtggataccattgagaacacagccgcggaactggacaacagtgcctcctcagagaagcacttgtttgctcacaagggccatcacctgatgcacactgtgagccaggtggccaccgctcaggaaagcacccaaaagcaggcattgcgcgaaggaggaatcatcattcagcggctaaaggttcgcaggggcggcatcgctatcgcaggacccgggggcgtggccacggcgggcagcggaggaacggcgattgttggtcccggtggctatgctctcacccatccacggagtctcaccatcgccggtcccggggccaaggacctcacgccctatggagcctatcaacccgtgctgttcagtgccccatactacgccgcctacaatctgcccctggcctatgtggtgcaacccaccatcgccagtgccgatcaagccaccatagccagtgcaacaaccacaacgaccactaccacaactggccgacccgaaagcttagctgatgacagctccagcgagttggagaaaccagaaaagctacaggctctgcctgcagtgaagacccgaaccactggggatctgaagagtgatgtgggtctccgctcagcggtcagcaaaataaaccccgagtatgtgatcgaagagatcgttccggtgccgggcaagctagtgatctccacttctgggtcaccccgctccgccaagcagcagttgaagaaggcgattgccccacaaaaaatgagaaagcaggcgggtggaagagttcccttgaaggttgaggccaccggaaagaccagcacgagttccggcaactttccgcagatcccatttggaaactacttcctgccctatagaccggagcaggctcaggcgatccagggacgcaagcaggctgcactcatcctggaacctcattccaaagcggtggttggtaatggtggcactgccatatccacgcccatttccaaggcgtatctgaagaagggtgtacccaccaacgtttacttcaatccggaatctgtggccatagcaggtgtgggtggcaaggcgcatgctacggcggatttggaattggatctgttcacatcgaggtcggctccgctggtcttcgaggagcatccttactacggaggattgaggggtcagcttctccagctgcgtccgcagcgggacggcagtgtgggcagcttcatcctgcagcgccaacagccgcagttgagggctgtacctagagactccgatgacaccatcaccatttcggccgcaagcatctcggcggtagctgatgctagtggagcttctagctccagcagctcgatctcagccagcgccagtgatttcaatcggattcagtcggccgccgctcggttggttgccattcaggagttggccaagcgcaagggttccttcagtgaggaggacaacaagatctatgccagcagcttactggaactgggccaggctgcccagagtttggccatgctccagcaaagcggacagattaaggactttagtgttctgctgcagccggacatgtttggcaatcctcaaaagcagccagccaatttcgggctagaggccaccaacaatccggcggaccagaagatcgacgaacagaaactggacgaggtcactgagcaacaattctcgccggatgagcagttcctgccccccaacaacgaggatccctatgaggatgttaacgatagtgtgtccgtaatggctcctaagaaagatgccgccgtggctgaggcaaaaccagtgggtctttcgattgccggtgaaggtggcgtggcctcctcaaaaccgaacgctgtggctctctccggccggaatggattggccgtagcttcgcccaaggccacagccattgctggagtttctcccgaggaggcagctgccttcagcatttcattgcccactcgcaatcaactggtgatcaagagtcccaatttggcttcggagaaggctagcgaagactatgactataatgatgtaccgctgacggttgcccgctttcctctgacccgggaaactcctcagcaattggtcccggttcgcatctctggaggggattcccttgtggaaaggtggcgcaccgccatcgcagaggattatgcagccaggcaggcgctgaccaaggtggccatgccgcatcccacacccttcatccgcatggctcccaaactgcgtcttcactccgaatag

SEQ ID NO: 20496 - protein, 1172 aa, DROSOPHILA
MRFLVLSTLLLASLALGQAQQHGGLAVEIQKQRLVKFPEDFEPNAATPSSEKADEAKRILEQIAKVNEAFGYVKKQPEQPKLPPILDSSQYLFPKPAHQPFHAHQHHFSGSNGQTLLEPSIRAVKLTRNVAGSYNVPPRLRQAIESTSKEEKKAQLYFRPKQVEVPKPSSEQEAQQLPAHFVVPVHLYKLNKEEYLKEHASQEYKIKGYKIIGDVDSFYGKAKAGRKQGKTTPKYHLFFLPRELALNEDGTPKRGNSTTIGTTTTKAPVPVNFKEYRLDSREKPVHKPQKIQPTSSPELNSLNRKKVGSTAKPVRLSGKDAEQQIYQGSTSLNIKATSAPVLLSSTLPPSGGLLPNRNRLSPFRMPGMNIAEMQNQTSTAIKNAFQNIFKLPFRPPMAATAGEGPVVVGNVPVKNHSIDSMDYKWEDENEGAGDGMADDVDTIENTAAELDNSASSEKHLFAHKGHHLMHTVSQVATAQESTQKQALREGGIIIQRLKVRRGGIAIAGPGGVATAGSGGTAIVGPGGYALTHPRSLTIAGPGAKDLTPYGAYQPVLFSAPYYAAYNLPLAYVVQPTIASADQATIASATTTTTTTTTGRPESLADDSSSELEKPEKLQALPAVKTRTTGDLKSDVGLRSAVSKINPEYVIEEIVPVPGKLVISTSGSPRSAKQQLKKAIAPQKMRKQAGGRVPLKVEATGKTSTSSGNFPQIPFGNYFLPYRPEQAQAIQGRKQAALILEPHSKAVVGNGGTAISTPISKAYLKKGVPTNVYFNPESVAIAGVGGKAHATADLELDLFTSRSAPLVFEEHPYYGGLRGQLLQLRPQRDGSVGSFILQRQQPQLRAVPRDSDDTITISAASISAVADASGASSSSSSISASASDFNRIQSAAARLVAIQELAKRKGSFSEEDNKIYASSLLELGQAAQSLAMLQQSGQIKDFSVLLQPDMFGNPQKQPANFGLEATNNPADQKIDEQKLDEVTEQQFSPDEQFLPPNNEDPYEDVNDSVSVMAPKKDAAVAEAKPVGLSIAGEGGVASSKPNAVALSGRNGLAVASPKATAIAGVSPEEAAAFSISLPTRNQLVIKSPNLASEKASEDYDYNDVPLTVARFPLTRETPQQLVPVRISGGDSLVERWRTAIAEDYAARQALTKVAMPHPTPFIRMAPKLRLHSE

SEQ ID NO: 20497 - DNA, 20245 bp, DROSOPHILA
acagcacaaagccaattttaatgatatcgctaccaaaggaggtcgataagttcaccagaatgttgcctataaatacaaagccaaatatgtagaacagagaatgcctcaaaaaggtggctggcttacccgaaaaggtgtgcgtacaaaacgccacatatccgaaaaaaccaacagatatgtaaacaaaagtacaaatccaagtggcattgcggacgatgccgtttaatttgtcgagactctggttgttaatgctctcaaagacctcaaatagttgcctgtaaatagatcagatatataaataaattttgcggacatagaaagcagggtgtacacacatttggcaggagagagccatgctgaagatgggtaggcattggagtacgcccgccggttcccagtagagcaccttttccgtccagtcgttggccgtaatgtgtggctgggcctccaacacgatcttgagaattaggcagacatagaaacctatggacgcggtgcaaacggcggacaagctgtccacattgcggagcatgccgaggggcactatgcacaccacagtgactacgaccatgacctggtagataagagttagtttctcttcttggatagaatagcactttcttaccagactccgcagatgcaggtgatctgccacgtccagcgcgaaaatcttggcgattatctgcggacccagatcgcccacgaccacaaaatacgtgatgcacgttccaatcaggtagccaatgatgcacagctccaccagcagcttgccggaagtaccgaaagcatggagaccgagcatctcgaagctcctcctacgtgtcagcagcgaggttttaataagatagtggcagcaaacccgggttattccattgcttagcacaagaagaacgatggataacaggatgccgcacttctggaagcagaacggcatggccaagatgccgacgcctatgatgctgttggccaacgtcattacatgcgcggagtgggccaacatcttgccgggaattcagcctactttctcttttatcccgagtttcgagaactgcgatccgttttcacgtgggcgtttcgccgcgtatgcaataccgtcacaagctgcgtcgaactgataccaaccttctgtctgatacggcgaacagcagtacggcgcaaaatactacttgttactccaaaatgaagcgctatcgacgattgcacttgtgtaagcaaaattgtaaacaaaataatccggcgacgacgacgacggcggcggcggtgaaaaagacgttggcgcttacatttagtgggcggttgtggttcagcaaacatttgttccaattacgtgtacgtgcgttgcgctgccaggctgcttgcgcatttttacggccgcaagaaagtttttaagcaaattgtttgtgtcgtcaccattccgtcaccgatgtttgacagcgtgaccagcttgcgttatttggatttggtgaaccgcgaaagtcatgagcctgtggggacttcgaaatggtcacaccgatttttggcatttcaatgcaatccaacagtcgcactaattttgtactcgaaattcaacacgagcaaacgtgctcgcggacagttgaaaaatttattaaatctaataaatgtgcaattttgcagaccatcgagtgcagcagattctccacgacgcattggcaccattttcaagcacggatgccctgcagagatggtgaaatcttgtgattaaaattctccccgtctgaggtaggaaatagtgaaaaaaaatgtctgccgcgccgaaaattgacaaagcgacgccgccatgtcgcaacctatagtcatctccctctcgcagcgtgctcccagcaccaccagtgttcatctatgtgtgtagtgcatatttcgagcgttaaaatctgttgaaaatttaaaaccattcaaacagtggaaaatattgtgcacacattataggtttttcacatttcccttgcggaaatcggaaaagcaagcgtatgtgtgccgaatggaaaaaaccaagacgcagggttgcatttttcttgatttcgaggggtgcattctgtgtgataagcgtttttttattctgtctttaaaatgattgtagacttttgtcccgtcatgtttgataatggatattacgcagcggtaaaattattatttaatgtctgttattgagtcaatgagttctgcggtttggccagggctgcagcatcggcacatgttcgaggctggccacgttttctttttcccgccatccgctgtcatttcaaaataacactgtgaactcacaccccttctatttttttttgcagatgtctcaaacatgaatgaaggtaattcagcaggaggggggcatgaagggctcagcccggcccctcctgctgtgccagaccgcgtaactccacattcaacggaaatttcagttgcccccgccaattctacaagcacaacagtacgagcagcaggatcagtaggagcagccttgccggccacccgccatcaccaacatatagcgacccaagtgaagggaatcgccagcagcagcagcaaacaacagaagcaactggccagtgcgcagctgcctgtgccgctgtcgcccttgccgcaacaacaacagcaaacggcagaggcaacggcagcagcagcagcacccgcccactccaacgtatccgtttcctccagcacaatagaagcctctgttttgccgccgcaggccaagcgtcagcgtttggacgacaacgaggacaggacgagtgccgccagcattgttggaccagccgagagcagcaacattgtaagctccctgctaccagcgtcggtggcctccagcagcgaggtcggcgggctttcttctacggccctgcaggacttgaatgccctcaagaagcgcatactccagcagaaattgcagatcttgcgtaatcttaaagaaaggtgagttactacttttttattaccaaataccgctgaataacaaattttcttttaaaaaggcatcttgaaaatgtgtccgaatacttttacctacaaaacggcggcagtatgatggactaccccgcgtggcgcaagaagacaccaaccccgcagttcatcagctacagcaatgcgaatcgtatagatcagctgatacacgaagataagccaagcacatcagcagcagcagctgcggcacagaatcagaaatataccacccaacagacagactctgtggagtcctcactagtcagtggcatcggtactggagcgacaaaaggagcgccattggatggcaatatcagcaatagtactgtgaaaacggtaagaacatagttttaaaaaagtaacacaaaatatagccatatatatatatgatgttaacatcatactgagtgcctaaatcgatctatttttgattgattctggcttttaaaagggatgttcgcagctgcgaggcatttgtctgataacacttttctattaatttactattgaggttctttggtatcgtactaattaagatttctttttccctttagaatacgcaatctcaagttccaagcaagattggcagcttcacagaatcaacgcccgcagcaacagaaagcaactcaagtaccacagttccaggaacagctacaagtggcgccgcaaccagcacatcagctacttcggccgaggctagtggtaatgtcctggcagtggaagcagaaatcaaaatcccagctgttggagccacaccagtggccatttccaccaagcttcccgctgccgtcgtccagctaacgcaacaaggtaaactcatcttgttcccagtcgacccctttgacctctcattgttacgaagacttttgtgtttctgttgtgttcgtttcgatcaaacaaaattgtattttttgttgtttaaaactgttatgttcgtcctcccatatttacgccaaatttaaattgtaaaatcgatgcaaaatcttgaccactgcataccatctcctgtaattccgaaagtgatactaaaacaacgccaacttgccaacgcacgttctgcactaaagataccgatattatattgtggccgccaactattgtgcattactaatacataatacaacaaaagcaaactaaactcgcaaaaagccaagattattttgttagtttaccacaaacatacacacacctactaaaacacaagcataactacataaccaactctatcacgtactgctatttattatttacactttatttatttttccgatttctgttcccacattaatgctgcctacattctcctataacgcacacactcaactcaccataattgtatcgttataatataggtcacatacccggtagacctttaggaggtcgtcacggtatggtcttcggtcaaatacccgctcctcctgctgccgtaggaaatccttctgtacctttggtgccaggtgcttatcgttcgcaaacaacaaacaaaaaaatatcaaaaatctttcacagctaaaattctttttgtttttatttaaattcttacttaaaccagattgtgtcttaaccattaaagcattttatcatttctcaagcaaagtagtgcattgattgatgtgcataaagattatattttcaatttgtaaattgttttctagaattggtgttttgcccttagtttggattggtaaatctgcttaataatttcagtttgaattgataaataattgatgaatgtatcgtttaattgattgcgttgatttgtaagcaagttagcaaacttaagcatacttagtaaaatagagaacgcgccgaactataggacttaccacaccgattgggctctcattatcatcccctctttcatccacttgaaatatcattagtactagactagttttatgtcgcacctaaaagcgttttctcgtcggctcgttaaatgctcttgaaaatcgtagatgtgtgccagagcgaagctcagttgcaagtgatacggccattttttgtggcagatatccataacgctgactacaagtgatctcggcggacgcacctaaaagcgttttcttgccagcccgttaagtgctctcgaaaatcgtagatgtgtgccagagcaatcgtcgcagttgcaagtgatctagatccgtgacagaatcagatccaattaaagctgggctcatttatatattagtatctaaacttacaaatcggccggtacacgggcaagcgcactctgtgtcacatcgatatatccagcctcatgtgatgacaatttgtaagcttgctagaataagggggagcttcgcttatccatgcggcaactatcttcagcccagatgccgcattgaattcgggcctcacattaagactaagtttgcatgcatttcccacctctttcgtttagcaaccgattcgcaaatgattcttattctaactcttctatttcattcattcactattgctttcctcgtagctcttttgtacttgatgcactttccagcatgccaagagttgacctttttccgctgtcccttgagtaaatgatatcttttctaatctatccctttttgacttattttctaaggtggcacccctttattgccctgcaatacatccgccgggtccacggcgcttcgtcgtccccaaggtcagaacaatgcctcaagcggatccgccgcggcatctggaggcggaggaagcctcacacccacaccgctctacactggcaatggcccggccgctctgggcggtagcggaggactcacgcctggcactccaacttctggcagtctgctcagccctgccttgggcggtggctccggaacgcccaacagtgcggcgcaggagttctcttttaaggccaagcaagaggtgtatgtgatgcagcgtatatcggaactacagagagagggattatggactgagcggcgcctgcccaagctgcaggagcccagccgccccaaggcgcattgggactatcttctcgaggagatggtctggctggcggcagattttgcacaggaacgcaagtggaagaaaaacgcggccaagaagtgtgccaagatggtgcagaagtatttccaggacaaggccaccgctgcccagcgggcggaaaaggcccaagagctgcagctaaagcgtgtcgcttcctttattgcacgcgaggtgaagagcttttggtcgaatgttgagaagctggtcgagtacaagcaccaaactaagatcgaggaaaaacgcaagcaggctttagaccaacacctcagctttattgtagaccagacagaaaagttctcacagcaattggtagagggaatgaacaagagtgtggcggatacgcccagtcttaattctagccgtctaacatcgccgaaacgggagtccgatggtgagttataccttaacttattatatcagtcgattaccagaactgagcacttgatgataaactacaaactgaaacgttgttgtggtctatttttgaacacttcgatgttaccttgggatggtcgcacttgcgaggcatttgcctgatgcttatgcgcataagttccatgtgtacttctagctttaaataattgctaatgaaaacatcatccactttacagatgactttcgccctgagtctggttcagaagatgatgaggagactatcgccaaggccgaagaagatgcagccgatgtgaaagaggaggtgacggcgctagctaaggaatctgaaatggactttgatgacttccttaatgatctaccacctggctatctggaaaatcgtgataagcttatgaaagaggagcagagctcggcgataaagaccgaaacgcctgatgacagcgatgatagtgagttcgaggcgaaggaagccagcgacgatgacgaaaataccatcagcaagcaggaagaagccgagcaggagatagaccacaaaaaggagatcgatgaactggaggcagacaatgatctctcagtggagcagttgttggcgaaatacaagtctgaacaacctcctagtcccaagcgacgaaagttagcgccgcgtgatcctgagctggactctgatgatgattcgacggcagttgattccaccgaagaaagcgaagatgcggccaccgaggatgaagaagatctctctactgttaaaactgatacggatatggaggaacaggatgaacaggaggacggtcttaagagtctaatggcggacgctgatgcaacaagtggtgctgctggcagcggaagcacggctggggcaagcggcaacaaggatgatatgctgaacgacgctgccgccctggccgagagcctccagcccaagggtaataccttgtcctcaaccaatgtggttactcctgtgcccttcctgctaaagcactccttgcgtgagtaccagcacatcgggctcgattggctggtcacaatgaatgagcgcaagttaaacggcatcttggccgacgagatgggtctgggcaagaccatccagaccattgcgctattggcccaccttgcctgcgcaaagggcaactggggacctcatctcattgtggtgccttcgtctgtgatgctcaattgggaaatggagttcaagaagtggtgccccggctttaaaatactcacctactacggctcccagaaggagcgcaagctaaaacgcgtaggttggaccaagccaaatgcgttccatgtgtgtatcacgtcctacaagctggtggtgcaagatcaacaaagcttccgccgcaaaaagtggaagtatctcatcctggatgaagcgcagaacattaagaactttaagtcccagcgctggcagttgctacttaacttttccacagagaggtgagtaatgattgcatatgctgctaagcttgccagtcagcaccaaaaatcagtaatcatgcgattgctaaactagcatggcgactacgcttgggtgctaaaagtaaattcgctataatgccgcatactaaaccagagcatgctaatctagccctagaatgcttgtggccttgtttcgagacaaataacaaatacgccttttacacgaatgaatttataaagtactcttaactttctacaggcgtctgttattaactggaaccccactacagaacgatctgatggagctgtggtccctgatgcacttccttatgccatatgtgttctcatcgcaccgcgagtttaaggaatggttctcgaacccaatgactggcatgattgagggcaacatggagtacaacgagactttaattactcgtctgcacaaggtaagcatatcattaagatataaatgtttatttttttcagcacctaaaagcgttttcttatcagcttgataaatgctcttgaaaatcgtagatgtgtgcaatagcaatatctacaatagcttgggattcagtttctatataacttcaatccgttcagattgtaaacatccattataagtcttacaatgcaaatgcactctgtgtcacattgaatttacctacatgtgaagacaatttgttagtttgctatatgaaagagatgtgacttatccatgcaattagtgccgtaaaaggttgattgcattgaaatcgcattttacactatcgaaaattaattatgacaggtgcacctaaaagcgtttccttgcaagcccgttaactgctcttggaaatcgtagatgtgtgcaaaatcaatcctcacaatagcaagtgattttagttcctctaactcaaatccatttacattgtgaacatacgtcctcaggaattcttaggcaaatgcactctgtgtcacattgaattgaatgtgaagacaatttgttagtttgcaatattaaagagttgcgtattatccatgtatttaaagccgtatcagggtgattacattgaaatcgcattttacactattattaatcaattattttcattgcacctaaaagcgttttcttgtcagcctgataaatgctcttgaaaatcgtagatgtgtgcaaaatcaatcctcacaatagcaagtgattttagttcccttaactctaatccgtttacattgtgaacagtcgatccataagtaaaatgttcatgttttgttcctacttttgcaaatgcactctgtgtcacattaaaactagcttcgtgtgatgacaatttgttagtttgccagatcaaggagatgcgtcttatccatgtggctgagttcttaccaatttattcacattgaaaacgcccctaacatgaccctcttatttaagttatccttattttcaaaataaatgcgcagtaattagaatttggcttttgtttctccgtacaggtgattcgtccgttcctacttcgacgcctcaaaaaggaggtggaaaaacagatgcccaagaagtacgagcatgttataacgtgtcgtctgtcgaatcgccagcgctatttatatgaggacttcatgagccgcgccaagtaagtttggatttgctgactaccgacgaatgtattactgatcatttaagttttttttttttttttttttttaacagaactcgtgagactctgcaaacgggaaacttgttgagcgtgataaatgtactgatgcagttgcgaaaagtgtgcaatcatccgaacatgtttgaagcgcgtcctacgatctcgccatttcaaatggacggaattacattccacactccgcgactcgtctgcgatataatggaatatgatccgttcacggtgagtcttatttctaccttctttattgccaattttttttcttgattgtggtttgaaaatgatgttaaactgtcactgatagttggacttaatctattttggagagagtcgtaaacttttcctaggatgttcgcatttgcgaggcatttgtctgattcgcttaggcaataaaatacgtattaggttatagccaattaaaatttgtactaatttatgtatattcttacagcaaataaatctagagacgttaaacctcttgctgttgcatttggagcaaactatgaccgcctacgtctcgcacaaatcccgcctgctcgccccgcctcgcaagctgatcgaggatatcgatacggctccattgccagctccccgttgtccaaatggcaaataccgctttcatatccgagttcgtagcgctgaactggcgcagcgcatcaaattgaatgctgtgaaggtaggagcaagtccagccatgcggttggagggttcaaagattatgccaatgcgcaatttgctaccaagtggaagagtgctgaaaagggtcagtgcttcgatcaaccctgtgaatatggctttgaaaccagtggtgatcaatagtgtggtgacaacaacatcatcatcgaccacagcatcttctcctactggagctttaagcgtgctgagcaactccaagttgctgggtgcacgttcacaaattaatgctccaacgcccgctaaagtagcgaaaacgatgcaagacggaaaaccatttttctacctcacaccggcgacgaattcaggagcagcaggagcgcgtcttaccctgacaagcaaaaccacagcctcggcgtccacgacgacctccagaacaacagttacagcatcaactacttctggtcagcaactaataagggatcccattgtcaaagatttggccactcatgtaaaaagcacagtacaaaagcaaagcattgccaatgggaagacggagcccgaggaagaaactgaagcagaggatccctacaaagtacaggagctgattcagatgcgcaaggagcagcgattggcagcgcttaaacgtatggcaatgataaatcgtcgccgaacggatgccactcccatatacggcgaagattgtcgcgaggctatacagcgctgcatgcaggcgacccgatccctaaagcgatcaacctggcagacgcgtggatacgccaactgctgcactgccatggcgcatcggaacggttggtccctaaaccacttgctgaagagcttcgaggaaaggtgcgctgatctaaagccagtgtttgccaactttgtgatctacgttccttctgtttgtgcgccccggatccgtcgttatgtacaaaatctctcatcgacgcactggcagcacgaacaaaggattgaaaacattgtggatcaggccctgcggcctaagctggcgttgctgcatccaatcatttcggaaatgaccactaagttcccagatccgcgtctcatccaatacgactgtggcaagttgcagaccatggatcgtttgctacgccagctaaaggttaacgggcatcgtgtactgatattcactcagatgaccaagatgttggatgttttggaagcttttctcaactaccacggtcatatttatctgcgtttagatggctctactcgggtggaacagcggcagatcctgatggagcggtttaatggagataaacgaatcttctgcttcatcctctccacgcggtctggtggagtgggcatcaatttgacgggtgccgatactgtgatcttttacgactccgactggaaccccacaatggatgcgcaggcccaagatcgttgccatcgtattggtcaaacgcgagatgtacatatctaccgtcttgtctccgaaagaaccatagaggttaacattcttaagaaggcaaaccaaaagcgaatgctgagcgacatggccatcgagggtggcaactttacaactacgtactttaagagttccaccataaaggatctctttacaatggagcagagcgagcaggacgagtcgagccaagagaagtcggaaaacaaggatagaattgttgctacaacaacgctttcagatacgccttcgacggttgtggagacggagaagcagtcactgcgtgcatttgagcacgcgttggctgccgccgaggacgagcaggatgtgcaggccacgaaaacggctaaagccgaagtggcagctgatctggccgagttcgacgagaacattcctattgcaacagaagatccaaatgcggaaggaggtcctcaagtggaactcagcaaggccgatctggagatgcagaacttggttaaacaggtgagctagttttcaataagagaatcagataattagatggtttagtattataattgttaccaacaatttaataccagtttagaaatagttgccgttcttgcactttatactgaaaccctgcatttaaagagattccggctaagcgagtgtggcacagagaaaatcttcctttggaaagtagactttcagacatagttgaggcgacataacccacgccacgattgtatcactcaaagtctaatatctgaaaaatcttcgatcatactattttttttacaacgccaaactagtttttattgcggcatcgcttgcaactcattgaattcgtttttctaatcgaataaaatgaagtgagtgttgccaagagcaatacaccttttcgtatgaggctttcagacatagttgaggcgacataatccacgccacgattgtatcactcaaagtcttacaatttttaacttagtgcagtgctgtagaatttcttcaaattgaacatataaatatttcccgatcttatttctattcagctctcaccgatagagcgatatgccatgcgctttgtggaagaaactggagcagcatggacggcggaacaattgcgagccgcggaagcggagctggaggcccagaaacgcgagtgggaggccaatcgcttggcggccatgcacaaggaggaggagctgttgaagcaagaaacggaagcggaggagatgcttacctacagtcgcaaggattcgagtaatcaggttaataccaaaacagattccaattccaataagcgacgactggtgagggaaaatcgcagaaactcagctcagaagctgagcaggagtgttagcagccatagcaccggtagcaacaacaagaacagtaaatcggcaacgacccgtggaaatagccagaacagcctcaatcagactgtaccagtggggtcaggaataagcagggtgaatagaacgggggcgggggtcagtagcagtagccgaggcaaaagtaacagcacgaagtcaacggggaagggaacagacgccgcaccgcaagttcggcggcagacccgtctccactctctgggcgcagtcaatatggccagcgcccgaacaccgcccactagaaagacaacacgtacagctctggctgcatctgcagctgcatctactttagaggatgcctctttgatcgtcgaggagcgtcccaaaagacagtcggccaacatagctatgagcaagatgatgaagacgcccttcaaacagaatgttccatccaacatcagtataaagacaactcctcctaaaagggggcgaagagacagtgttgcagctgccgccacacgcagtaaactgctggaaagaagagctacaattgctgctcctttaaaacatatggatgatgaaagtgaccaggatgaagaggagcaggaagagcaggagtctgaagaagataccgagggcgaggaagcaaatgccacagtagacgacgacgaggagggggaggaggagttggcgtcacttgacgaagagaccatacaaaccggatcgcaaacaaatgatgaagaagacgatgacgaggaagaagttggtgaagagggaatggttgatattgatactgaagattcagaggcagatgtcaaatccagctccacctatggtacagcggcagatggtaagcccgaagaagccgaaagcttggatggctgggatgcacacgaccaggtgcaggacaccacaatgactagctccacctactacaatgtcagcgaggaatcagacacggatgagcatcacgatagcaaggcggaggctaaagagccgccgcaaaattccgataagagcgacgagagcgaggctgttggacacacaccacgtacaaggtcgcgcggcacagtaaagatcaatctgtggaccctggacgtgagtcccgtagcaaacgcattgaataaaagcagcgccaataggagcctcaaaaaagcaccaaggactgagtccacgccaaaggagtctcagagcgagccaaggcgaaagattactcagccaaagctgccgaagaaagaagaaactaacaacaaatctaacagcaatatcggcaccttacaccgctggatatcgaagtccccccgagtaatgcttcgatccacacctgttacggcagcgagcgctagctcatcagcagcagtcagtggtgtttcgggaggaaatgcctcctcgagcggaacagccaggtgatgatgttcactatcatacctcagtcagtattatcagctgtgtgtgttgtgtgcgttttagtgggcgactaattatctgtggggagacgggtccttccccggctgttactgctgccaggcgactgatgcataatgagtatttatagactgtaacaagtttccttctatcgtatgagataagttagttaggcgccggaacccacgctagaatctagaataacaaattaaacttcatttggtcaaacatcttgacctataacatcttgacaaaatgcgttatttgccattcgtctgtgcaaccaatggcttcctttgtagcctcttatgttttgaaaaacaaagggatcagatgtcctaatttttcatagaattaaaataacccagaaaagtggtaggaaagaaatccattcctaaggcgtatccattcctgtcgcttcgggaaagattaggatgaactcaacattcagggaacaaaaacggacgacttgtcataagttaaaaagtgaaatgaagcgggaaggtaaacgggaagtcaaataatattgcacgattgtataatgcgtatagcaaattttactctaaattaccacatcctcgattgttgttgttaaataatgtttgtcaaaaaaccaatcgagaccacagatcaaactcctttcccaaaaactgcattagatcttaagaataggtatactatgataattgttaaacatttttgcattctataatttattttgtactctaacctaaatggaacattaacaatctaaagactatgagcatagattgactaaccaataagacacagaactcatttcgtatgctttaaaaagtatcaaaatccatttattgtgtaacataacaagataaaacgaaacgtataaaaacagaaacaaagctaaaaattaaacaaaactaaatgacgttgtggtttttatttacggactaatttcgtgcgttgcctcaaagaaaagaaaaaaatcttccgtcctcatgaaaccaagttggaaaagaatatttggatatcgtccatagattgttaaatattattttctataaacaaatgtagaattctgttttggtgtcgcaattagtatccaattatcactattaatcccctcccatgtctataaacttattgtttaaacccctaagcgccgtacgaaagtataaaaatggttcggaatgaaagctacaacgccatcagtatgataattttaaagtcagctaatatcgatagcaatacgttgaatcgcaaaatagtttctaagcaaacaccaaaacagagttgctatatcatgaaaataatgtggaaccgtctattcttttctttaactttcttggctaccatcatctggtccaggtctggatatcgcgcaacaccatggaacagatgccggtaagttcaagtggtagtgcttggttcatagtgctaattatttgtgatcccccttgattagatgtggtgtcctcccacgccgccgcaagacaacgataacgatatctatattgactattcgctatcgttcatgtatgagctggaaccgattgcggagacggatctgccgccagtttacgtacgcaaggagcacaagcgctcgcgcacggatgctgggtacgatggtagcagacggcccaataagatgcgccgggaggataactacgtaccacccagatcgcttttcgatcgcccaacgccacagctggcgcgactgcgtcgggagctgaagagccagcgattccgcggaagctttaagcctaatatgccgattccaggccttaaaccacaacttcccaccaaacctcttaccgaacctgaggccatggctgagtggtgtgtcttcgaggatatggccattttgcacgtcctggtaaatctgcaaggattaccttgcagccttatgctgctctcaccgggccaaacgcccaactgggacctcgtctcagagatggtcaacttctgttcgaagacctaccgttcggcgcggcagtgtcgctggaggtacgaaacgcacattcagccgcgtgaggaaggcaaggtggtggagagtcccaagaagcagaagaagcttaagcccactctgcgcactgagtacctgaagagtccgctgcgatatttgcgaactacccagctgtatgtaagcgataacaacgcctcgttttacaagacgatgcgatcccgcttcgacagcattaagactgcttaccttaagaaagcaccgccgccgaaacgtcagtttagtgctccgagcctgatgaatcccaagcacatggaggtgctacaggagtttggcatcctaaattacgaccaaccggtgtcgccgcagaacattgcggcaatgaaggcaaataagattcgggagaagcagcgggggcagcagatgtcccagcctccggttggcgtgggagtggttcagcaaatgcagcagcagtctcagcagcagcagcagcctgcaccacctccgctgccgcagcaacagcagccgcaacaagtggttcagcaggttcaacagcagcaacagcagcagcagcagcagcagcagcagcaggttgtgcagcaacaacttcccactgtttcaaacgttcaacagactctgcccgtccagcaaaccgtggagctcgtgcagcagcaacccaccaccacgacaacagtggcggtgcccgctgctggtggtcagttgcagcagctgcagatccagcacttgaccagttccaatgtctcgcccggtcaacagactgccatcctgctccaccaaccgcagcagcaattgcgtacgcaccccgggcagggtggacaatccaatactcaacagttggtcaagactattgtcggcacctcctccagcttgaccgcgggccaattgcaacaattagcccaacagtctgcagtcgcttctgggggccagtccagtgtgagtgtggtcctaaccactccagtacagacacttccgtcggtggtgcaaccccagataggctctggtgcccagatcgtttcgatctcgtcacagacgctgcccgttaacagctctccccagttgggcagcattgtgcagacccaatcgctgccacaggtggtctccgttagcactttgcccaccgtgggcaccgtactgaccaccactgccaatcagccacaacaacagcatcagaccacggctgtaaccactttgaacacgactatgttgcgtggtcagcggattgtctcgacagctgcaggaaacacccttcaacagcgaacgacagccggtggtcagtctattgtctctatgccgaacttaggacaaggcgcgagtccctcgcaattccagactcagcttcgtttggcagctgttcccacatctccagccactcagaccacacagttggtgaccacaaagggaattccggtgagcgcattgcagcagggagggaagacgacagtgattcccgtgactcagcaatctgggggagcacatatacagctctaccgtcagcgcagcttgaaggtgctgcagacaacgacacaagccgtgcccagcggatcagctggcgctactggagctactgctaatctggtgcaagcaggcggcaccataatccaagctagcaacatggccacgcatgtgacaagccaaaaagtggccgtgtcgggaatgccgggcacttccactactgtgcaggcaggcaacgtggtaagcagtgtgcaaatgcacggacaggccaggacgcagttcatcaagcagatggcggccggaaagcagcagctgcagcgtcaagtggtgtccgctgacggaacgaccaccacaacagcagcaggggatatgttactggttaagcgtcataatattcttgctgctcaaaaggcgcagcaggcctctggagcactctttacgaccaccactggacagcagcaacagcagcagcagcagcaaggtcaactcccagtggccgggcaaccgcagcaggtaactcagcatcagatcgcgtccctcgttaaagcttccacggcagcggcggcaagcggtagcagtgttaatgcaggcggagtcaccgtatcggctactaatccgactgttcaggcgggaagcgtgaatatgacacttccacagctcaagcctggcagccagatcaaggtaaccatgcccaatcagatgcgccatctgcaaatgcaacagcagctgacgatgccacgaaagatcagccggatgacacagctggtcagcgccagtggtcagcccacggccaccaatataataacgacaactggtccccagcaacagcagcagggagtcacagtgtctggcggcggtaccttgcccacagttgcttcgcagcagcaacagcagcagcatcagcaaaaggttggaggtggaaacagtgtccaggcacaattgctgcacattcaaaacacaaagggactatcgaattcggtgaccatgcagcagattcaacaagttatgcgaagtggccagcagggcacgttagccaccaccaatctggtgttgggtaaaacaagcgtgggacgggtaatccccgtgtcggtggcttcacaggccaaccagcgtcaaaccattcaggtaggtttcttgttttagcgatccccagactgaatcaactaattttaacttccatgtctttaggttgtttcagctgcatcagctcaagccctggctgcgggaaatctgcgcacccatgttgctgggccgagtattgccagtactctgaaggtggccgcccctgggagtgcaggagggcagaccacgcagcagacgctgatagctgcactgcagcataatcagcggcagaacgccagtcctgttcggctgcaaacgacggcaggaggcaatcttcttgccgttgtgcagcagcaacagcagcagcagcacacaagtattgcgggtccaaccgctggaccggcagaggtgatgaccatcactcagacgaccaccacgctgcccacggttggcagcttgcagcagcaacagcagcagcagcaacaacagggcggcatatcgcagcccacaacgcaacaggtacgcaagctggtgcagaaaaagatcctgatacgcagcgagaaagaataacgctcgactaaagccgtcagaccacgtcagcggcggagcatcacgagcatcacctccaccgccaccgccacctacaacacaccaactcagattcaaatcccacaagcacctcaaaatcaaacaccttcaactcagtcaaaagtcaatcaatctgatcctttcgaatatcaagatcgaacaaatttcaatagctcatctcacgccgatcctcatgcattcaatcagtcagtcagtcagtcaatcagcccgtcattgctaaattgatctcaatttctgtcgattggttttgcagccatgagcgatctaactgttctggaggattgtgagctcaaggtgaaacgctgaagattacaacgatgatcgcttcaatcagctcaaggcatggaagccgtattactaattttactgatccttagatatagcaccttagcttaagtgaaatttcattgtatctattcatattacgagaatagttttaaggaagtgtaggtggagtgcctagtgtgtaggctaactgctttaaattcaatatgtaaatcgtagttaactaagtatcagcccccctattcccgtagagcagtatgtacattggtaaatctaattcagatctatcagatactacataaacacacctaatatgtagctataactaaatgtcctttctagttgtatgatcgaaagcaaataaagaaaattgtaaaaaaaaagtttaaagttttgaaatgtgactacccttattgcatatagacttgtgatggatattaatatggttgccaaggcaacgtttttccttgcgaccacaacaatgtgaaccaaatcagaattggagtcgactggttccggcagtcagttgcaacatgtcgctgttcaatgtctgcagctggtggtctgcccagtgttccgatcctggagaggaatacgacgtggctagcttgctgtgcgctcgctttggcctggagacccaggaaaaggactacattattgtgggttcccagacggg

SEQ ID NO: 20498 - DNA, 10230 bp, DROSOPHILA
cttgccgggaattcagcctactttctcttttatcccgagtttcgagaactgcgatccgttttcacgtgggcgtttcgccgcgtatgcaataccgtcacaagctgcgtcgaactgcagtacggcgcaaaatactacttgttactccaaaatgaagcgctatcgacgattgcacttgtgtaagcaaaattgtaaacaaaataatccggcgacgacgacgacggcggcggcggtgaaaaagacgttggcgcttacatttagtgggcggttgtggttcagcaaacatttgttccaattacgtgtacgtgcgttgcgctgccaggctgcttgcgcatttttacggccgcaagaaagtttttaagcaaattgtttgtgtcgtcaccattccgtcaccgatgtttgacagcgtgaccagcttgcgttatttggatttggtgaaccgcgaaagtcatgagcctgtggggacttcgaaatggtcacaccgatttttggcatttcaatgcaatccaacagtcgcactaattttgtactcgaaattcaacacgagcaaacgtgctcgcggacagttgaaaaatttattaaatctaataaatgtgcaattttgcagaccatcgagtgcagcagattctccacgacgcattggcaccattttcaagcacggatgccctgcagagatggtgaaatcttgtgattaaaattctccccgtctgagatgtctcaaacatgaatgaaggtaattcagcaggaggggggcatgaagggctcagcccggcccctcctgctgtgccagaccgcgtaactccacattcaacggaaatttcagttgcccccgccaattctacaagcacaacagtacgagcagcaggatcagtaggagcagccttgccggccacccgccatcaccaacatatagcgacccaagtgaagggaatcgccagcagcagcagcaaacaacagaagcaactggccagtgcgcagctgcctgtgccgctgtcgcccttgccgcaacaacaacagcaaacggcagaggcaacggcagcagcagcagcacccgcccactccaacgtatccgtttcctccagcacaatagaagcctctgttttgccgccgcaggccaagcgtcagcgtttggacgacaacgaggacaggacgagtgccgccagcattgttggaccagccgagagcagcaacattgtaagctccctgctaccagcgtcggtggcctccagcagcgaggtcggcgggctttcttctacggccctgcaggacttgaatgccctcaagaagcgcatactccagcagaaattgcagatcttgcgtaatcttaaagaaaggcatcttgaaaatgtgtccgaatacttttacctacaaaacggcggcagtatgatggactaccccgcgtggcgcaagaagacaccaaccccgcagttcatcagctacagcaatgcgaatcgtatagatcagctgatacacgaagataagccaagcacatcagcagcagcagctgcggcacagaatcagaaatataccacccaacagacagactctgtggagtcctcactagtcagtggcatcggtactggagcgacaaaaggagcgccattggatggcaatatcagcaatagtactgtgaaaacgaatacgcaatctcaagttccaagcaagattggcagcttcacagaatcaacgcccgcagcaacagaaagcaactcaagtaccacagttccaggaacagctacaagtggcgccgcaaccagcacatcagctacttcggccgaggctagtggtaatgtcctggcagtggaagcagaaatcaaaatcccagctgttggagccacaccagtggccatttccaccaagcttcccgctgccgtcgtccagctaacgcaacaaggtggcacccctttattgccctgcaatacatccgccgggtccacggcgcttcgtcgtccccaaggtcagaacaatgcctcaagcggatccgccgcggcatctggaggcggaggaagcctcacacccacaccgctctacactggcaatggcccggccgctctgggcggtagcggaggactcacgcctggcactccaacttctggcagtctgctcagccctgccttgggcggtggctccggaacgcccaacagtgcggcgcaggagttctcttttaaggccaagcaagaggtgtatgtgatgcagcgtatatcggaactacagagagagggattatggactgagcggcgcctgcccaagctgcaggagcccagccgccccaaggcgcattgggactatcttctcgaggagatggtctggctggcggcagattttgcacaggaacgcaagtggaagaaaaacgcggccaagaagtgtgccaagatggtgcagaagtatttccaggacaaggccaccgctgcccagcgggcggaaaaggcccaagagctgcagctaaagcgtgtcgcttcctttattgcacgcgaggtgaagagcttttggtcgaatgttgagaagctggtcgagtacaagcaccaaactaagatcgaggaaaaacgcaagcaggctttagaccaacacctcagctttattgtagaccagacagaaaagttctcacagcaattggtagagggaatgaacaagagtgtggcggatacgcccagtcttaattctagccgtctaacatcgccgaaacgggagtccgatgatgactttcgccctgagtctggttcagaagatgatgaggagactatcgccaaggccgaagaagatgcagccgatgtgaaagaggaggtgacggcgctagctaaggaatctgaaatggactttgatgacttccttaatgatctaccacctggctatctggaaaatcgtgataagcttatgaaagaggagcagagctcggcgataaagaccgaaacgcctgatgacagcgatgatagtgagttcgaggcgaaggaagccagcgacgatgacgaaaataccatcagcaagcaggaagaagccgagcaggagatagaccacaaaaaggagatcgatgaactggaggcagacaatgatctctcagtggagcagttgttggcgaaatacaagtctgaacaacctcctagtcccaagcgacgaaagttagcgccgcgtgatcctgagctggactctgatgatgattcgacggcagttgattccaccgaagaaagcgaagatgcggccaccgaggatgaagaagatctctctactgttaaaactgatacggatatggaggaacaggatgaacaggaggacggtcttaagagtctaatggcggacgctgatgcaacaagtggtgctgctggcagcggaagcacggctggggcaagcggcaacaaggatgatatgctgaacgacgctgccgccctggccgagagcctccagcccaagggtaataccttgtcctcaaccaatgtggttactcctgtgcccttcctgctaaagcactccttgcgtgagtaccagcacatcgggctcgattggctggtcacaatgaatgagcgcaagttaaacggcatcttggccgacgagatgggtctgggcaagaccatccagaccattgcgctattggcccaccttgcctgcgcaaagggcaactggggacctcatctcattgtggtgccttcgtctgtgatgctcaattgggaaatggagttcaagaagtggtgccccggctttaaaatactcacctactacggctcccagaaggagcgcaagctaaaacgcgtaggttggaccaagccaaatgcgttccatgtgtgtatcacgtcctacaagctggtggtgcaagatcaacaaagcttccgccgcaaaaagtggaagtatctcatcctggatgaagcgcagaacattaagaactttaagtcccagcgctggcagttgctacttaacttttccacagagaggcgtctgttattaactggaaccccactacagaacgatctgatggagctgtggtccctgatgcacttccttatgccatatgtgttctcatcgcaccgcgagtttaaggaatggttctcgaacccaatgactggcatgattgagggcaacatggagtacaacgagactttaattactcgtctgcacaaggtgattcgtccgttcctacttcgacgcctcaaaaaggaggtggaaaaacagatgcccaagaagtacgagcatgttataacgtgtcgtctgtcgaatcgccagcgctatttatatgaggacttcatgagccgcgccaaaactcgtgagactctgcaaacgggaaacttgttgagcgtgataaatgtactgatgcagttgcgaaaagtgtgcaatcatccgaacatgtttgaagcgcgtcctacgatctcgccatttcaaatggacggaattacattccacactccgcgactcgtctgcgatataatggaatatgatccgttcacgcaaataaatctagagacgttaaacctcttgctgttgcatttggagcaaactatgaccgcctacgtctcgcacaaatcccgcctgctcgccccgcctcgcaagctgatcgaggatatcgatacggctccattgccagctccccgttgtccaaatggcaaataccgctttcatatccgagttcgtagcgctgaactggcgcagcgcatcaaattgaatgctgtgaaggtaggagcaagtccagccatgcggttggagggttcaaagattatgccaatgcgcaatttgctaccaagtggaagagtgctgaaaagggtcagtgcttcgatcaaccctgtgaatatggctttgaaaccagtggtgatcaatagtgtggtgacaacaacatcatcatcgaccacagcatcttctcctactggagctttaagcgtgctgagcaactccaagttgctgggtgcacgttcacaaattaatgctccaacgcccgctaaagtagcgaaaacgatgcaagacggaaaaccatttttctacctcacaccggcgacgaattcaggagcagcaggagcgcgtcttaccctgacaagcaaaaccacagcctcggcgtccacgacgacctccagaacaacagttacagcatcaactacttctggtcagcaactaataagggatcccattgtcaaagatttggccactcatgtaaaaagcacagtacaaaagcaaagcattgccaatgggaagacggagcccgaggaagaaactgaagcagaggatccctacaaagtacaggagctgattcagatgcgcaaggagcagcgattggcagcgcttaaacgtatggcaatgataaatcgtcgccgaacggatgccactcccatatacggcgaagattgtcgcgaggctatacagcgctgcatgcaggcgacccgatccctaaagcgatcaacctggcagacgcgtggatacgccaactgctgcactgccatggcgcatcggaacggttggtccctaaaccacttgctgaagagcttcgaggaaaggtgcgctgatctaaagccagtgtttgccaactttgtgatctacgttccttctgtttgtgcgccccggatccgtcgttatgtacaaaatctctcatcgacgcactggcagcacgaacaaaggattgaaaacattgtggatcaggccctgcggcctaagctggcgttgctgcatccaatcatttcggaaatgaccactaagttcccagatccgcgtctcatccaatacgactgtggcaagttgcagaccatggatcgtttgctacgccagctaaaggttaacgggcatcgtgtactgatattcactcagatgaccaagatgttggatgttttggaagcttttctcaactaccacggtcatatttatctgcgtttagatggctctactcgggtggaacagcggcagatcctgatggagcggtttaatggagataaacgaatcttctgcttcatcctctccacgcggtctggtggagtgggcatcaatttgacgggtgccgatactgtgatcttttacgactccgactggaaccccacaatggatgcgcaggcccaagatcgttgccatcgtattggtcaaacgcgagatgtacatatctaccgtcttgtctccgaaagaaccatagaggttaacattcttaagaaggcaaaccaaaagcgaatgctgagcgacatggccatcgagggtggcaactttacaactacgtactttaagagttccaccataaaggatctctttacaatggagcagagcgagcaggacgagtcgagccaagagaagtcggaaaacaaggatagaattgttgctacaacaacgctttcagatacgccttcgacggttgtggagacggagaagcagtcactgcgtgcatttgagcacgcgttggctgccgccgaggacgagcaggatgtgcaggccacgaaaacggctaaagccgaagtggcagctgatctggccgagttcgacgagaacattcctattgcaacagaagatccaaatgcggaaggaggtcctcaagtggaactcagcaaggccgatctggagatgcagaacttggttaaacagctctcaccgatagagcgatatgccatgcgctttgtggaagaaactggagcagcatggacggcggaacaattgcgagccgcggaagcggagctggaggcccagaaacgcgagtgggaggccaatcgcttggcggccatgcacaaggaggaggagctgttgaagcaagaaacggaagcggaggagatgcttacctacagtcgcaaggattcgagtaatcaggtctggatatcgcgcaacaccatggaacagatgccgatgtggtgtcctcccacgccgccgcaagacaacgataacgatatctatattgactattcgctatcgttcatgtatgagctggaaccgattgcggagacggatctgccgccagtttacgtacgcaaggagcacaagcgctcgcgcacggatgctgggtacgatggtagcagacggcccaataagatgcgccgggaggataactacgtaccacccagatcgcttttcgatcgcccaacgccacagctggcgcgactgcgtcgggagctgaagagccagcgattccgcggaagctttaagcctaatatgccgattccaggccttaaaccacaacttcccaccaaacctcttaccgaacctgaggccatggctgagtggtgtgtcttcgaggatatggccattttgcacgtcctggtaaatctgcaaggattaccttgcagccttatgctgctctcaccgggccaaacgcccaactgggacctcgtctcagagatggtcaacttctgttcgaagacctaccgttcggcgcggcagtgtcgctggaggtacgaaacgcacattcagccgcgtgaggaaggcaaggtggtggagagtcccaagaagcagaagaagcttaagcccactctgcgcactgagtacctgaagagtccgctgcgatatttgcgaactacccagctgtatgtaagcgataacaacgcctcgttttacaagacgatgcgatcccgcttcgacagcattaagactgcttaccttaagaaagcaccgccgccgaaacgtcagtttagtgctccgagcctgatgaatcccaagcacatggaggtgctacaggagtttggcatcctaaattacgaccaaccggtgtcgccgcagaacattgcggcaatgaaggcaaataagattcgggagaagcagcgggggcagcagatgtcccagcctccggttggcgtgggagtggttcagcaaatgcagcagcagtctcagcagcagcagcagcctgcaccacctccgctgccgcagcaacagcagccgcaacaagtggttcagcaggttcaacagcagcaacagcagcagcagcagcagcagcagcagcaggttgtgcagcaacaacttcccactgtttcaaacgttcaacagactctgcccgtccagcaaaccgtggagctcgtgcagcagcaacccaccaccacgacaacagtggcggtgcccgctgctggtggtcagttgcagcagctgcagatccagcacttgaccagttccaatgtctcgcccggtcaacagactgccatcctgctccaccaaccgcagcagcaattgcgtacgcaccccgggcagggtggacaatccaatactcaacagttggtcaagactattgtcggcacctcctccagcttgaccgcgggccaattgcaacaattagcccaacagtctgcagtcgcttctgggggccagtccagtgtgagtgtggtcctaaccactccagtacagacacttccgtcggtggtgcaaccccagataggctctggtgcccagatcgtttcgatctcgtcacagacgctgcccgttaacagctctccccagttgggcagcattgtgcagacccaatcgctgccacaggtggtctccgttagcactttgcccaccgtgggcaccgtactgaccaccactgccaatcagccacaacaacagcatcagaccacggctgtaaccactttgaacacgactatgttgcgtggtcagcggattgtctcgacagctgcaggaaacacccttcaacagcgaacgacagccggtggtcagtctattgtctctatgccgaacttaggacaaggcgcgagtccctcgcaattccagactcagcttcgtttggcagctgttcccacatctccagccactcagaccacacagttggtgaccacaaagggaattccggtgagcgcattgcagcagggagggaagacgacagtgattcccgtgactcagcaatctgggggagcacatatacagctctaccgtcagcgcagcttgaaggtgctgcagacaacgacacaagccgtgcccagcggatcagctggcgctactggagctactgctaatctggtgcaagcaggcggcaccataatccaagctagcaacatggccacgcatgtgacaagccaaaaagtggccgtgtcgggaatgccgggcacttccactactgtgcaggcaggcaacgtggtaagcagtgtgcaaatgcacggacaggccaggacgcagttcatcaagcagatggcggccggaaagcagcagctgcagcgtcaagtggtgtccgctgacggaacgaccaccacaacagcagcaggggatatgttactggttaagcgtcataatattcttgctgctcaaaaggcgcagcaggcctctggagcactctttacgaccaccactggacagcagcaacagcagcagcagcagcaaggtcaactcccagtggccgggcaaccgcagcaggtaactcagcatcagatcgcgtccctcgttaaagcttccacggcagcggcggcaagcggtagcagtgttaatgcaggcggagtcaccgtatcggctactaatccgactgttcaggcgggaagcgtgaatatgacacttccacagctcaagcctggcagccagatcaaggtaaccatgcccaatcagatgcgccatctgcaaatgcaacagcagctgacgatgccacgaaagatcagccggatgacacagctggtcagcgccagtggtcagcccacggccaccaatataataacgacaactggtccccagcaacagcagcagggagtcacagtgtctggcggcggtaccttgcccacagttgcttcgcagcagcaacagcagcagcatcagcaaaaggttggaggtggaaacagtgtccaggcacaattgctgcacattcaaaacacaaagggactatcgaattcggtgaccatgcagcagattcaacaagttatgcgaagtggccagcagggcacgttagccaccaccaatctggtgttgggtaaaacaagcgtgggacgggtaatccccgtgtcggtggcttcacaggccaaccagcgtcaaaccattcaggtggccgcccctgggagtgcaggagggcagaccacgcagcagacgctgatagctgcactgcagcataatcagcggcagaacgccagtcctgttcggctgcaaacgacggcaggaggcaatcttcttgccgttgtgcagcagcaacagcagcagcagcacacaagtattgcgggtccaaccgctggaccggcagaggtgatgaccatcactcagacgaccaccacgctgcccacggttggcagcttgcagcagcaacagcagcagcagcaacaacagggcggcatatcgcagcccacaacgcaacaggtacgcaagctggtgcagaaaaagatcctgatacgcagcgagaaagaataa

SEQ ID NO: 20499 - protein, 3169 aa, DROSOPHILA
MNEGNSAGGGHEGLSPAPPAVPDRVTPHSTEISVAPANSTSTTVRAAGSVGAALPATRHHQHIATQVKGIASSSSKQQKQLASAQLPVPLSPLPQQQQQTAEATAAAAAPAHSNVSVSSSTIEASVLPPQAKRQRLDDNEDRTSAASIVGPAESSNIVSSLLPASVASSSEVGGLSSTALQDLNALKKRILQQKLQILRNLKERHLENVSEYFYLQNGGSMMDYPAWRKKTPTPQFISYSNANRIDQLIHEDKPSTSAAAAAAQNQKYTTQQTDSVESSLVSGIGTGATKGAPLDGNISNSTVKTNTQSQVPSKIGSFTESTPAATESNSSTTVPGTATSGAATSTSATSAEASGNVLAVEAEIKIPAVGATPVAISTKLPAAVVQLTQQGGTPLLPCNTSAGSTALRRPQGQNNASSGSAAASGGGGSLTPTPLYTGNGPAALGGSGGLTPGTPTSGSLLSPALGGGSGTPNSAAQEFSFKAKQEVYVMQRISELQREGLWTERRLPKLQEPSRPKAHWDYLLEEMVWLAADFAQERKWKKNAAKKCAKMVQKYFQDKATAAQRAEKAQELQLKRVASFIAREVKSFWSNVEKLVEYKHQTKIEEKRKQALDQHLSFIVDQTEKFSQQLVEGMNKSVADTPSLNSSRLTSPKRESDDDFRPESGSEDDEETIAKAEEDAADVKEEVTALAKESEMDFDDFLNDLPPGYLENRDKLMKEEQSSAIKTETPDDSDDSEFEAKEASDDDENTISKQEEAEQEIDHKKEIDELEADNDLSVEQLLAKYKSEQPPSPKRRKLAPRDPELDSDDDSTAVDSTEESEDAATEDEEDLSTVKTDTDMEEQDEQEDGLKSLMADADATSGAAGSGSTAGASGNKDDMLNDAAALAESLQPKGNTLSSTNVVTPVPFLLKHSLREYQHIGLDWLVTMNERKLNGILADEMGLGKTIQTIALLAHLACAKGNWGPHLIVVPSSVMLNWEMEFKKWCPGFKILTYYGSQKERKLKRVGWTKPNAFHVCITSYKLVVQDQQSFRRKKWKYLILDEAQNIKNFKSQRWQLLLNFSTERRLLLTGTPLQNDLMELWSLMHFLMPYVFSSHREFKEWFSNPMTGMIEGNMEYNETLITRLHKVIRPFLLRRLKKEVEKQMPKKYEHVITCRLSNRQRYLYEDFMSRAKTRETLQTGNLLSVINVLMQLRKVCNHPNMFEARPTISPFQMDGITFHTPRLVCDIMEYDPFTQINLETLNLLLLHLEQTMTAYVSHKSRLLAPPRKLIEDIDTAPLPAPRCPNGKYRFHIRVRSAELAQRIKLNAVKVGASPAMRLEGSKIMPMRNLLPSGRVLKRVSASINPVNMALKPVVINSVVTTTSSSTTASSPTGALSVLSNSKLLGARSQINAPTPAKVAKTMQDGKPFFYLTPATNSGAAGARLTLTSKTTASASTTTSRTTVTASTTSGQQLIRDPIVKDLATHVKSTVQKQSIANGKTEPEEETEAEDPYKVQELIQMRKEQRLAALKRMAMINRRRTDATPIYGEDCREAIQRCMQATRSLKRSTWQTRGYANCCTAMAHRNGWSLNHLLKSFEERCADLKPVFANFVIYVPSVCAPRIRRYVQNLSSTHWQHEQRIENIVDQALRPKLALLHPIISEMTTKFPDPRLIQYDCGKLQTMDRLLRQLKVNGHRVLIFTQMTKMLDVLEAFLNYHGHIYLRLDGSTRVEQRQILMERFNGDKRIFCFILSTRSGGVGINLTGADTVIFYDSDWNPTMDAQAQDRCHRIGQTRDVHIYRLVSERTIEVNILKKANQKRMLSDMAIEGGNFTTTYFKSSTIKDLFTMEQSEQDESSQEKSENKDRIVATTTLSDTPSTVVETEKQSLRAFEHALAAAEDEQDVQATKTAKAEVAADLAEFDENIPIATEDPNAEGGPQVELSKADLEMQNLVKQLSPIERYAMRFVEETGAAWTAEQLRAAEAELEAQKREWEANRLAAMHKEEELLKQETEAEEMLTYSRKDSSNQVWISRNTMEQMPMWCPPTPPQDNDNDIYIDYSLSFMYELEPIAETDLPPVYVRKEHKRSRTDAGYDGSRRPNKMRREDNYVPPRSLFDRPTPQLARLRRELKSQRFRGSFKPNMPIPGLKPQLPTKPLTEPEAMAEWCVFEDMAILHVLVNLQGLPCSLMLLSPGQTPNWDLVSEMVNFCSKTYRSARQCRWRYETHIQPREEGKVVESPKKQKKLKPTLRTEYLKSPLRYLRTTQLYVSDNNASFYKTMRSRFDSIKTAYLKKAPPPKRQFSAPSLMNPKHMEVLQEFGILNYDQPVSPQNIAAMKANKIREKQRGQQMSQPPVGVGVVQQMQQQSQQQQQPAPPPLPQQQQPQQVVQQVQQQQQQQQQQQQQQVVQQQLPTVSNVQQTLPVQQTVELVQQQPTTTTTVAVPAAGGQLQQLQIQHLTSSNVSPGQQTAILLHQPQQQLRTHPGQGGQSNTQQLVKTIVGTSSSLTAGQLQQLAQQSAVASGGQSSVSVVLTTPVQTLPSVVQPQIGSGAQIVSISSQTLPVNSSPQLGSIVQTQSLPQVVSVSTLPTVGTVLTTTANQPQQQHQTTAVTTLNTTMLRGQRIVSTAAGNTLQQRTTAGGQSIVSMPNLGQGASPSQFQTQLRLAAVPTSPATQTTQLVTTKGIPVSALQQGGKTTVIPVTQQSGGAHIQLYRQRSLKVLQTTTQAVPSGSAGATGATANLVQAGGTIIQASNMATHVTSQKVAVSGMPGTSTTVQAGNVVSSVQMHGQARTQFIKQMAAGKQQLQRQVVSADGTTTTTAAGDMLLVKRHNILAAQKAQQASGALFTTTTGQQQQQQQQQGQLPVAGQPQQVTQHQIASLVKASTAAAASGSSVNAGGVTVSATNPTVQAGSVNMTLPQLKPGSQIKVTMPNQMRHLQMQQQLTMPRKISRMTQLVSASGQPTATNIITTTGPQQQQQGVTVSGGGTLPTVASQQQQQQHQQKVGGGNSVQAQLLHIQNTKGLSNSVTMQQIQQVMRSGQQGTLATTNLVLGKTSVGRVIPVSVASQANQRQTIQVAAPGSAGGQTTQQTLIAALQHNQRQNASPVRLQTTAGGNLLAVVQQQQQQQHTSIAGPTAGPAEVMTITQTTTTLPTVGSLQQQQQQQQQQGGISQPTTQQVRKLVQKKILIRSEKE

SEQ ID NO: 20500 - DNA, 2964 bp, DROSOPHILA
gaggcagatcgcatgctggacatgggtttcgagccgcagatccggaaggtgatgctagacatacgtccggaccgtcagaccataatgacgtcggccacttggccaccaggagtacgtcgtttagcgcagagctatatgaagaatcccatccaggtgtgtgtcggatcgctcgatctggcagccacgcactcggtgaaacaaattattaaattgatggaggatgacatggacaaattcaacaccattacatctttcgttaagaacatgtccagtacggacaagatcatcatattttgtggacgcaaggttcgtgctgacgacctatccagtgaacttacgctggatggtttcatgacccagtgcattcatggtaatcgcgatcagatggatcgtgagcaggctattgccgatattaagtccggcgtcgtgcgcattctggttgctaccgatgtggcatcacgtggcctggacattgaggatatcacgtaagcaaatttttcgagtcgaggaacccattagtcattattttttcatccacaaagacatgtcatcaactatgattttccgcacaacatcgaggagtatgtgcaccgtgttggtcgcaccggacgtgctggccgacagggcacatcaataagcttttttacgcgcgaggattgggctatggccaaggaactaattgagatactgcaggaggcggagcaggaagtgcccgacgaactgcacaacatggctagacgctttaaagccatgaaggacaagcgcgctgctgaaggtggcggttttggaggaagaggtggtcgttttggaggcggacgtggcggcggacgccgaaatttcgatcaatttcaatactgattcattctacattttctagttataagagactagagcgcattgaagtgccttgccaaaaattgtttaactatttatctattccaattatagatgatcataacccaaaacatgccgtgttaaaagaacacgcgatttaaatgtatcaaactaagagtttagaatgtttattgagcttagttagtgccaccggcgtatttctccagcagttcccgtttccgctggcgcagcagtgcttcctgtacatcttgttgcgtcggcacgggaacgtgagcggtgaacttggatgccaataggccatgaggatcctccacggcggctcgagccttggcatcctcgatggcttcgcgtgctggtcccgaaaggggatatatttcatcctcctcttcgtcatcgattatgcgaccatctctggccattttctcccgccattcctgcacggccttctgaatggccgctcgttcgatgcgttcctccagagggatcagaacaccatcttcgtcatctcgatagccgtagtattcggcatctatgtccttcattagttcagcgcgtgatttcctgggtggcggcggaggatcctgttcaaagagctcgcgaacacccggcagatccttggcggctccaaagtatttgtagcctcgattgccgggaacttcacggccctccgcatcgaacatcttgggaccatagcgtctatagtgggggccacccaatgaggatatctgattttcccaatgccgtttctcacgcaataacttgttgatttcatcgttcagatcgcgaatccggaattctcccaagccagctataagtggtcgctattagtgtatattgttagggagaaataaataaaccgaaataggtaccattctgtatctgggccaccttcttcgatatgtcgcgtattatctccaggcggaacttctcacatctgggcaaatcgtggcactcggaggccaaatagggccggcgttccttttcaccagattccacttcttttgcggcccgccaacgtgccaaagttgtcctgtcgaaaataagcggatgagtgctggaaatcttatgttatacgtatatccgggttacttacattgccttctctgcattgcgcgcctgaaaatatacatgtattattcatttaattaaaattaataaaattttcacatcatcttaccattttgtttactaacttcttctgccttaattgccagtcacagcgaactatacggaaatcggttacacgttatcgatagcaagtacagtaaatattgtccagtagcgatttcacatatattttaaatgcaatttattaataatattcccgatgaaacccgaagacataatattatttatttgtacttaatatatatataccatatgaattttattttctcttaattggatacatgctgaaataaacgattaccattcactacgaatactactaagtacactaccgcgcacttggccacactgacctgcccagttgttttttcacgacaacatttacgctctttggaaaaggaaaccttttttcgcgaatttcaagcagatcccgaccagaaacacacctgccccaggatgttggccctcatcaacaggatcctcgagtggttcaagagcatcttctggaaagaggagatggaactcacgctagtggggctgcagttctccgggaagacgacgttcgtcaatgttattgcagtgagtattttcgcagtgggtgtgtgcgaattcgtgtgggtgtatgggtgagagggtggttttttttgtgtgtggttgtctgttgtgtgggtggggagggggttcacggaaagccgggggatcagctactacttaaaaagcattacaaacccccagtgacaaaggaattggtcttagcttgattcccccactctaacattgtttatttcttatcttttcgtactcccagtttctttcactgcatccgtaattaacgctgtgctaaccgtttccttttagtggtaaagtttaccgttcctgccgctgtaatcaataaacctacatatagcccatatatacgcatgtttctccgcacaatgacgccattatcagcacttcaacccctgaccccgtattcccgta

SEQ ID NO: 20501 - DNA, 856 bp, DROSOPHILA
atgcagagaaggcaatgtaagacaactttggcacgttggcgggccgcaaaagaagtggaatctggtgaaaaggaacgccggccctatttggcctccgagtgccacgatttgcccagatgtgagaagttccgcctggagataatacgcgacatatcgaagaaggtggcccagatacagaatggtacctatttcgctggcttgggagaattccggattcgcgatctgaacgatgaaatcaacaagttattgcgtgagaaacggcattgggaaaatcagatatcctcattgggtggcccccactatagacgctatggtcccaagatgttcgatgcggagggccgtgaagttcccggcaatcgaggctacaaatactttggagccgccaaggatctgccgggtgttcgcgagctctttgaacaggatcctccgccgccacccaggaaatcacgcgctgaactaatgaaggacatagatgccgaatactacggctatcgagatgacgaagatggtgttctgatccctctggaggaacgcatcgaacgagcggccattcagaaggccgtgcaggaatggcgggagaaaatggccagagatggtcgcataatcgatgacgaagaggaggatgaaatatatcccctttcgggaccagcacgcgaagccatcgaggatgccaaggctcgagccgccgtggaggatcctcatggcctattggcatccaagttcaccgctcacgttcccgtgccgacgcaacaagatgtacaggaagcactgctgcgccagcggaaacgggaactgctggagaaatacgccggtggcactaactaagctcaataaacattctaaactcttagtttga

SEQ ID NO: 20502 - protein, 274 aa, DROSOPHILA
MQRRQCKTTLARWRAAKEVESGEKERRPYLASECHDLPRCEKFRLEIIRDISKKVAQIQNGTYFAGLGEFRIRDLNDEINKLLREKRHWENQISSLGGPHYRRYGPKMFDAEGREVPGNRGYKYFGAAKDLPGVRELFEQDPPPPPRKSRAELMKDIDAEYYGYRDDEDGVLIPLEERIERAAIQKAVQEWREKMARDGRIIDDEEEDEIYPLSGPAREAIEDAKARAAVEDPHGLLASKFTAHVPVPTQQDVQEALLRQRKRELLEKYAGGTN

SEQ ID NO: 20503 - DNA, 12029 bp, DROSOPHILA
gttgttcgatgagaaacattagcagtcgccgcaattccacggcattgggatacaaaaaggtctgataaccaatatcgcctcggtaaccgctatccttgcaaccctgcgccaaggagctggccactccgaagcgctgggccatcgctccgccggggagagtgcgtggaagctgcaagtctggacgaatctccgccagacagccggagactgctcgcaccacctgttccggggtgaagtcggacagctcatccgtcggctcgatggtcgcgtccacctggtgcagctggtgcatgattatcttgtccacttcgtccatgattcgctttatttactatttattttcgcattttaatgggagtgttttttttgtgacccaattgtgacagtcaccgcgattcgtgaacaagttggtacggcaacgttagcgggtttcttgaaccgatgtggcagcaccatttaattcaaaaagttctttaggttgtaactaatttgtttgtactaaaaatgttatttacaactgcattaaaagcaattacggaattcggttaacccacctgccacaaaacaaataattatattcaattaggattggtattcaatatttactttgaaaacatttttgcagctttctaaggtttctttggacaatgttgaaatattaaaataataacttatttatttctttaagaatgactaataagcaggcaatccttatcggagattaatataagtttcgtcatatgcaaagatattcttgtgtcaccccattttatttttaacatttacatttactgtaccctgaaattttaaccctgacacggtgtcttaacgtcattattttataaccaaccctttgcccgtgattgtgcgaaatacttgctgatatatttttacagcagactgggcagaaaatcgtctttgcgggcacgcaaccacaaagtctaattgaatttggttggcagcacaaaatgcgatataaacgaggcattgcggtgattggaaacagttcagccctgtggcgcacacagagcgaaacgggtagcggttaaggcgtatcggttgggaatcggttcggtatcgggttgaccgatatggagccgttgtgcaacgccagtgaaccgccacttcgcccggaagcgcggagctctggcaacggagacttacagttcctcggatggaatgtgccgccggatcagattcaatacattccggagcactggctgacccagctggaaccgcccgcgtccatgcactacatgctgggcgtcttctacatatttctcttctgcgcctcgacagtgggtaatggcatggtcatctggatcttcagcacatccaagtcgctgaggacaccatccaatatgttcgtgctgaatctggccgtcttcgatctgatcatgtgcctcaaggcgccgatcttcatctacaacagcttccatcgaggattcgccctgggcaatacctggtgccagatattcgcctccattggctcctattcgggtattggtgctggtatgacgaacgcggccataggatacgatcgatacaatgtgatcaccaagcccatgaaccgcaacatgaccttcaccaaggcggtgataatgaatataatcatctggttgtactgcacaccgtgggttgtcctgccgctaacccagttctgggatcgattcgtgccaggtgagattgtgtgtgtgtttaaattgaaaaccagggattttttagaagttttatttataaatatctgaaatattctttttttttactggtaatcatttcggaaagttcctaaatacacagtacattttttggataatggttggtgctatcaaaaagtagtgggtgcctgtttggtttgccacttagttccatcgtggggcagaggactcctaatgctgggcgaaataaatgtccagaggcctcgttttcccatgaaggccatgaagttgcccagtagcccttgattgtatctataatcctttggcgtatagaatgtggtattcagatacaatgctggtatctgatatcccaacattatgagtgatagaatgcaggcatagatgttgatgatgaaacttatgttcagtgctattaactcgcagctcattggtttgagaaataggaaaaagcgtgaaaagtgtaatacaacatattgcctccgaatttgttcatcaattataagcagatttacatgcgttgccaatgacaaaagtgatccaatatgcatgtaaactgtgaaccagaaaaagtacctttggaaaggaatggtggtaaagttacaataatatcgctgtcaccagtaactattacctgtaattagtgtggccaacgcaagtcgcagtgaagatgcagtgatgatcccgcctcagaatgcagcattcacacactttgcagtgccaggatctgggctgtattaagtgtcacatacatattttgtaataatgtttagtatccgcacatccactttttacaaatgctttttcgtggatatacagaaatattctatggcaaatactttaccggcactaacatctggcagtggtcacagaagtgccacaggtgcttctcctctgggcacggaatctggcgatccttgggcaaggaagtcaccgccgaggagttgcgatggcaggctagcatatttcctagcagattgtagacaataaatagtgccataagccaggcgatcttgaagaacagtccatcggtgtcgtatatcctgggcaacatatagaacatttccaccgaaaaaaataataccgttcccactagaacgaatcccactgcgctgggatgtacgatctttgcgaaccgcttcggattggcgttggcaatgtacttgcatcctatcatcatgaagcacatggttatataaaagatacaagctgtagtaagaattatgagttttatgtgtaattccaaggcttctttcgaaattagcacatgacaagtatctgagtgaaatagggattgtaaataaaattcaccggatatgaaaccctatccaaattatatatgaaactctaaatgatacgtttcaatcctttattcttttcctaatgtaaatccttaaaacatcaacaccattcttttgaatcatagtgattttgagtagttcattggaattcataggactagcttagcacatgtattaatttaatatgcacttatctaacacgctaacagctaccaatcagcgacgaaagtccaatttataggggggggcagagatacggatacgctaggggttagttggtacgctcctccaccttcctaatgaccacgttcagggcaagattaccgtcctcagagaacagttcgacggtgtgcttattgagcaccaggaagtcggcgttggtgaacgaggagaagttctcacggattgatcttggcttggattgccagcggagagtgcgattataggcctccaaggagatgttatacacgaactcggcggcatccttcatggagccgatcatccgacaggcggtgaagtactgctgacagtcctctcccaaattgatcttctccagcgagaggaggaagtgccgcccatggcaggactgcaccattgtccagtcgagggcaccctccagattcacattggtggccaaaaagatgatgtcgttgccctccatggtgatcacgttctcgtgggagctcatcaggtgctggtatacgtccctcaacggtccctgccaggagcacttgtcatccggatacgggcagaagtacggacggcattcgcaatcctcctcgtgcttggtcttctctgcgtaagagagccgcgctctgcagccgaaatgcgaatgcttgcagggaaagatcagcttggaggccaccttctccattgccaggctgcggatgttggtcatgaacacccggcagacggggcaaatggtcaactttgagcggcaggtggagcagatgaggtggccacgcgggcactgcataattggcggcattatgtagccaaagcacaccgggcactcgagcaaagccattagaaaatcgtctcttgcaccactgcgtgttgtgtccaatggcccagtggccacaattcccgactgcacagccaccgagtccttccgcctagacggcaccagttctccggcagcggctgcgtccggggattgccgcttgaccaccacaacgtgcgtggtctcctccggcggcacgaccaacgctggtgccgattgacgacgagtcaacatttctccggatgccgttggagtgtcaatagtcctttgcggacttacccgctccggccacgataactgggggcgtgagttgcgaacagacatctgtgcttcagccaacaatcaatgcgcaagctattaatcctaagacctaacaaccaaacgattctgaagaatgagagtgccgatggttttactttttttttactttttctgaacactgaaattttgcttaaaagaattcgaaaatacaatctgtaccacaatacaacgaagctaaaagtataatgagctacttttacttcggagcctacttgctttaaatcattttaaaatcagcttaaaaatttatttttgaaattggcctaagtatcctagtaagataccaatccagctaaatctttaagatgcttcggcggtgcaccactaaaaacttgtgccatctattattgcaacgttttaaaacgcattagaagtaacccaagtatctcaaagataatccaaattaaacagataactgatttaaatcgacaagtttataaagtggcgtagctcttctttgtaattcagcttcccccagattaatttcaataattaacgagcattgtttacttttactaatcatgtttatttcagttttgtagttttgtgtctgtgtgagtgatctcatatggtagtggcgcggtaaatcggcgcattaaaagctaattacggtgcagatgcttaaaatcattaatttttcttccgttttcgattgggaaacgttggccgaatggaaatcaaaaccaaaacatgagccaaaccggggagatcgtcttaactagatagaaatttaaacattaacattgctttatatgtttggggggacttggggggaaatgggaaggggcaactgtctttttagcattgcgaaaaaaaatgttttcttttttttttagtgtgtttttgttattttgtgatggtttggcatgaacaaaattgcgggtcgcagtttcgtttaggctgcaactttcaaacaactctcgagttattacagattatcgctatcaaatattacttttctttgtgggttattaggtttgttaatttcgttaaactgttcgttttacttattaccatttacaagtattgtataaaataatttacattaactaaactagactttgcagtacatgttcgagtggatgagtgacctcctcgcctttcttgctgttctcctcgttttggtgagtgggtctgtgtgttcctagcgttcactgtagtaggtggtgggcacgtgggcacgcgcaggcagctctgctccaggtgtgtggaccttacgaactaaattaaactaaagcagaaccccatgaactaacaaaacgggtaacactgaaactttgaaatatatagtattgtgtgtgcggtaactgaaaaatcatgtcctagaactagagtaccaatcgaaccgattaaacatacaaacatacaggtcagccacgattttcgcattcgacaggaaagtgtgttatacaaatctgcgaaatctcaccaaaaatatttggcatttttctgcaaacgagtgagatttacacacagtcatgtgcaaactaaaaatgaaaatacgaattttaaacgcggttttacaggtttaacgaacgtgtgcaataaacactgaacatcacttagcaattgctttaatacgctttccatttcgctttggaaaattgtgagtgtcttagcttaaaaatcaaagaaaactgcgatatcgtgccgaatgtgataatcgaagcagcctgatatttccatagatatatatacatatgcatgtaagtggctcttagaatagagaatcatttttataaaacaactctgcaaaactctttcttcttaatctccagactcacaatctgtccacgagttagacgcctgatgcgaacagagggctataaactatatatgtatttgtatcggaatagtaaacacaagaaatgaaagaacccgacgaattgacagtgcgtttagaccagagatatggtcacgttaatgcccaggttgccattgtcggcgaacaattgcgcaatcgacgtgtcgaacaccaggcagtccgagttgtgaattgcggaagcgacgccctcgtggatcgaacgcggcattgcctcccaggtgagccggcgtcggtttccgttcaactccaggcgatagacaaagttctccgcttccttgcgcgacccgatcagctgaacgatggcaaagaactgctggtgtccgtcgtacttctcctgcttctccagcacgagcataaaatggtggccgaagcaggactgcatcattacccaatcgacggcgccgggcaggttgatgtcggtggccaggaacacgatgtcctcgccctgcagcgttgtgatgctcttgtgcgacatcatcagatgctgcatgactaggtcaagcgggccctgccacttacagctggcgcccgggcacggacacaggtagggccggcactcgcacgtctcctcgtgttctgtcttttccgtgtaaaccagcgaggcggtgcatccgtagccggagtgcttgcacgggaacttgacgttcgaggcaaccttctccatcgccaggttgcggatattcgccagcggaccgcggcaggtggggcagcaggtgagcttggagcgacaggacacgcacaccaggtgcccgctggagcactgcaggatcggcggtagcacatagtcaaagcacacggggcattcaaacagcgaggtcaagtcggcggacatgcccgcatcaccgccaccggcggacgacagcgaggagctggacgacgaggatgtgttggccgaggacgtgttgccggcactggaggatccggtcgaggtgctcgtgttggtggccactcccgtggcaccggctcctgctgctgctgctgtcggttcgcggcgcttcgggttgattttattggacattggaagggttctcgcaacggcacgaatgtgtctacaattcttctgggtccctgcaattctcgccaggttcaggttcttcgccctcccggtggcttcggcaatggctttcttgtgcttctgtctaaaatgagatacaatcacaggtcagtgagtaatgcggtcaatttagtcatagcatatgtataatttttttttcttttttttgtaattttgttcgttcagtgataagaaactccaaaaaacaataacctacaaaaccatacagatatcttaacaaaaatagtttgtttcgattaggcttagttaatccaaaaataacatatatcaaccaacaaaaaaaatcacagtataacacactgcataaatgctggtttaaatttgaacatatgttatgagctttctatcgattttgcggcttaagttcggagcatactattgatttgaatgttcattccaaactattgtgcccactgggacatgagtaataggcaaaaatatttttccatgaagtaatagaaatgaaatgaatgcaaactgtgtaagcaaaatctactcgattgctataaaaaatgttgcccagcaaaactactatccatttgtaataatttaatttgagccttattaatttaaaacttatttcgcgtaatcactactactaggtagttcgtttttcgtgccgcccaatagaaaagccaaagcgatttatcattcctggccttaaccttgccgtggattcccaattgttgtaattaccgaaaaaagaaaacacacgcatttgcgtgtatgggaattgcatttaagcaattacttaaagcggaacgtatcgaaccggagttggtctgcgaaaagcaaagacacagcccgaggtcgccgtcacgtctccgatcgaaatgaaggcccgattccgattccaactccgagcccaagcccaaaagcctcttggcggcacgtgtggaacggcgcaaatatgttggctcttatcaggcggagctgacggagccgacgctgatggacggccattagggacgtcgacccatggcgggattgtgcgatggtgggtgtcgtgctggttgtaatgggtgtggttcggtttcacgggtttgtccactttggacagaatgggcacacattagtgtgaacaatatgctgtgggtgctttggtgcgtttataagataaatatcaatataataatataaagttttcgtaattgtttagctttgatgtacaaacaaaacttgttctctttcctaacgggaatatatttgctatatgattgctatcaaaattttgtgtgaaaggagttcagtaatattgtttatattcgaaaacaaactcaaacctaaaaaataaataatatgtttccttattaacccaaaacaaaaacacatgaaacgcatgaacatacaaatgtttaatactttaccctatatattggaaaaattatttgaacatttgccattatgaaattcgtaccatcgcccgcataaacgtaatatcgtaatgaagagtgcgtaacgtaacaaatgcaacgaggatgtgtagggggtgggtggcggtaggggatggcagccgcggggagggaaactcacacacttacaacacagacacagatcgcacacacataattaacagttcgtttacgttgcgtaccgttggaaacgttcatacggggtaaaaatggtaattgccacaaaagtcatagccatgaatataattaacttagcttctgctttcatgagttgcaaaatggtaaaatagaaaacgtaagttgcggagcaaagcgaaatgcgactatctttctttaatttatgccgccattaagtgcgactaggctgctgtttaaacagcaacaacaactgcgaaatacataatcgttgatatgtaaacttacatggcaggctgcctccaagaaattgtgccgaggtattggtgccccgctgcgttggtgtgtgtgtgtatgtgtatattttattttcttgttatttttttgtttccttttttatcagtcagtcagcctttacggccatgcacacacacacacgcatacagccagcatgtgtgtgtatatatcctaggtgcaagttccgttttttacgttgcaatttgttatttttttaaccgcatatatatatataaccaatgcaggtggttttgctactgcacacgcacactgggaaaatggaaaaactgttttgattgcttttcgccttttcgttcaccttgcaccgaaccgaaactcgaaattcaggcgtgagctaatttcatttggctttttatctaattttctttaacgcgacccgcacacatacacatttattcatatttagctttactagttattttcgccttttctgcctctgtgttgctgctgctgctgatgttgtgttgttgttgttgctgcacaaaaataaaccatttgcatttacacacaggcagcgaaatgggtttttttcgtgtgtctcactttttctatattgcgttctttgatcgtcgcagtcggcgtttattgcacttgcccttgcgcggtgtggaattcagtctttttcggcattctccatgtactttgggcgtgatgtctgcctttagctggttaattaattaatttactttactatactgagtttcttctaatgtccgcgtcggttgcagagatggaaccccaattgtcgtctattcgattccagatagtcgattacacgcaatcggcaacatcgcagtgcctcctggtagctatcaattgctgtcatcgattacttaacagccttgccacgtttgtcaaattaatttaataacaggaaaacatcagttttgaaataatacaaatcgaatcaggcgcataatttttaaaggatcaaagttaataatgtagtctgttactcttattgacaactaaagcctaatttttaaaataattcattaataaatacttttttatgatttatagtatttccaatcaaataatataggcaatacaaaaaattaaataaaaatattgattggtgataccttgaccttgtgtcacatcattggcgggaatgtttaagaacttagtttggatcgggaaattcgaagaaacaaatttacgaaagagtaaaattgcgttttacgaatatgaagtaaataaatatcctaataccaaaaatcccattaatcttcttcacttttatgcatttccagagggctacctcacgtcctgctccttcgactatctttcggacaactttgacacccggttgtttgtgggcaccatcttctttttcagcttcgtgtgtcccacgctgatgatcctttactactactcgcagatcgtgggccatgtcttcagccacgaaaaggccctacgggagcaggccaagaaaatgaacgtggagtcgctgcgctccaatgtggacaagagcaaggagacggcggagatacggattgcgaaggcggctatcaccatctgcttcctgttcttcgtgtcgtggacgccctacggcgtaatgtcgctgatcggggcattcggggataagagtctgcttacaccaggagccacgatgatcccggcctgcacctgcaaactggtggcgtgcatagacccattcgtctatgccataagtcaccccagataccgcttggagctgcagaagcgctgtccctggctgggagtcaacgaaaagtctggggagatctcttcggcgcagtccacgaccacccaggagcagcaacagactaccgctgcatagaaccaaggacaactctactctaagacaactgaccatgtaacatgaaagccaaggaaaaagtataaaatgccgacaacgaaactgtataacattaattttataatttgtagtgtgacattcttgagtttgaaataaataaatagtaacttattgcaaacgaagtagaaaatgagtcccgttttttatttgaaattcggttctttgatgtcattattttgttactatttctacacttacacttaaaaattaaataacaaattcaactcaaatcctaaacacatttacacagttatttggagcctcttcattcctaataaaatcataaaatcgagtttttttttcaaaatagtcagttatgtatttattcggtttttgggtaatatctttaagatacccattgtgaaatctgttggcatttgttaaacaaaatgaaggtgacccaccaggaaataaattccatgaccctggctaatcctcagttgcacatcagggaatgcagtcgaatgaccgctcggtaatcgttgtgcgacagcagaccacgctgcgatcgctgtagcactcgtttcagccgctctacggtctctgtgttggaggtcatcttgaaaagatcatcgaggtactttagcgattcgcgtgaccagaacatggacggtttgttggcgtccttgttgatgctgccaggttgattgtgatccatttcactcaacagacggtcacactccggattgagagtatggcgcagctgaagatcggatcgtgatcgttgctggagattattgtagggcatctggtcgatctgtggacgtcgtagattctgctgatattggttgttgtcttgctgctgatgctgctgctgttgttgcatacgttgctgttgcacacgttgttgctggtgttgctgttgtagactttgctgctgttgcttttgctgctgctgcaagcgttgctgttggttttgatgttgctgctgcagacgttgctgttgctgttgctgctgccgttgttgattttgtgtttgctgatccagggcttgacgttgcttcttctttgacattttaggaggtggtggtggagccatgtcctgccgaactggtgggagaggcgttggcgatggtggccccttactaggcgattgcggctgactctgcgttttcttttg

SEQ ID NO: 20504 - DNA, 1387 bp, DROSOPHILA
aaacagttcagccctgtggcgcacacagagcgaaacgggtagcggttaaggcgtatcggttgggaatcggttcggtatcgggttgaccgatatggagccgttgtgcaacgccagtgaaccgccacttcgcccggaagcgcggagctctggcaacggagacttacagttcctcggatggaatgtgccgccggatcagattcaatacattccggagcactggctgacccagctggaaccgcccgcgtccatgcactacatgctgggcgtcttctacatatttctcttctgcgcctcgacagtgggtaatggcatggtcatctggatcttcagcacatccaagtcgctgaggacaccatccaatatgttcgtgctgaatctggccgtcttcgatctgatcatgtgcctcaaggcgccgatcttcatctacaacagcttccatcgaggattcgccctgggcaatacctggtgccagatattcgcctccattggctcctattcgggtattggtgctggtatgacgaacgcggccataggatacgatcgatacaatgtgatcaccaagcccatgaaccgcaacatgaccttcaccaaggcggtgataatgaatataatcatctggttgtactgcacaccgtgggttgtcctgccgctaacccagttctgggatcgattcgtgccagagggctacctcacgtcctgctccttcgactatctttcggacaactttgacacccggttgtttgtgggcaccatcttctttttcagcttcgtgtgtcccacgctgatgatcctttactactactcgcagatcgtgggccatgtcttcagccacgaaaaggccctacgggagcaggccaagaaaatgaacgtggagtcgctgcgctccaatgtggacaagagcaaggagacggcggagatacggattgcgaaggcggctatcaccatctgcttcctgttcttcgtgtcgtggacgccctacggcgtaatgtcgctgatcggggcattcggggataagagtctgcttacaccaggagccacgatgatcccggcctgcacctgcaaactggtggcgtgcatagacccattcgtctatgccataagtcaccccagataccgcttggagctgcagaagcgctgtccctggctgggagtcaacgaaaagtctggggagatctcttcggcgcagtccacgaccacccaggagcagcaacagactaccgctgcatagaaccaaggacaactctactctaagacaactgaccatgtaacatgaaagccaaggaaaaagtataaaatgccgacaacgaaactgtataacattaattttataatttgtagtgtgacattcttgagtttgaaataaataaatagtaacttattgcaaacg

SEQ ID NO: 20505 - protein, 378 aa, DROSOPHILA
MEPLCNASEPPLRPEARSSGNGDLQFLGWNVPPDQIQYIPEHWLTQLEPPASMHYMLGVFYIFLFCASTVGNGMVIWIFSTSKSLRTPSNMFVLNLAVFDLIMCLKAPIFIYNSFHRGFALGNTWCQIFASIGSYSGIGAGMTNAAIGYDRYNVITKPMNRNMTFTKAVIMNIIIWLYCTPWVVLPLTQFWDRFVPEGYLTSCSFDYLSDNFDTRLFVGTIFFFSFVCPTLMILYYYSQIVGHVFSHEKALREQAKKMNVESLRSNVDKSKETAEIRIAKAAITICFLFFVSWTPYGVMSLIGAFGDKSLLTPGATMIPACTCKLVACIDPFVYAISHPRYRLELQKRCPWLGVNEKSGEISSAQSTTTQEQQQTTAA

SEQ ID NO: 20506 - DNA, 2295 bp, DROSOPHILA
ctgttcctccgcctgcaccacctgcccctcccccacagctgccgcaccatcgatccagtagcgtggtttctgcatgctgttgttgatcactcgtgttccgctgacgaaacgctgtccgggaatgggatgcttctgctgaggaggcggtggcatgctcctggcatcctggtcgctggttgactccttcgcaggctgatccatggcagtgtgctcttcgaatccatcgctgtagtggatcgaggcatatagaattgattctagctcgttcagccgttcgctgtccatctcctcaagctgcggattggaatgcattagatcggtaggaataacgggtatttgggccaacactcacatcactcatattgcgcgtctttgttttcctttgcctttgatttatttttcctgcgcattgataaaaagtaatataatgaaagagagcacgttgatggcagtggtgggcaagctggagagagcatgtcaatcgaggcagtgatgacactctggctatcggaaaatgttgctatcgaatagtaaactaaaaaatctgacaacagtacttctactagctggcaaaaaataaataatttacatcaacgaacggttcgaatttggtttaagttttaaaattaacacttaattattcactatggcattataaataaaaatgaataattttccactccgagttttttatctctcaaaatgttaaattaaaatttaaaatttacaaaaaaccaaaaaaaaaaccaaaaaaaccaaaaaaaaccaaaaaaaaatttacaaaaaaaaaaaatttatgatacttctcgtttcgatacgtgtaaactggcagtcaattgtgggtgcctccgataacgataacaagaggagcaaccctagctgccgggccacgtacaattcgcgtcgaaaaataacaagaagtaattaaagctaaaattcaatgtaagagtgccgcaagtgtgttaaactaatagcttaaccggatcatcttatttctagtatggacgtaatgcagcgctacgtatcgcccgtgaacccggccgtttttccccacctcgccaccgtgcttttggtcatcggaaccttcttcaccgcctggttcttcatctttgtggtgtctcgaaagagctctaaggaaagcaccttgataaaggaactgctgattagcctgtgcgcctccattttcctgggattcggcattgttttcctgcttctaaccgtcggtatttacgtatgagataagacaccattccgcatagaaataaactgaagatctgatcgtgggcgttaacatacatgaggcctttgttttatttaggattattgttattataatttcaatttttaagattcaatttgcgcttaaaacttatcgaatatttttgatggtaacatataaatcgtctgcacgtgctcgcactaccccgtcgaataagaaatcacggcaactgttgaaatcatggctcttctagcccgctagaccggccttttgtctgcacttctgcatggtggcccgtaggatgaattgtttgcgggatagctgtcgcacgtgcttaagaaaggtctccagatcgatgacacctccgcggagaccctcgcccaagtaatatatggcatcctcggtggccgcttcgtcggcataggcattgagtaacctgcgggtggataaaccattaattatctagcatgaatcttggaatgcgcacgcagacattcaacttactgtcggtaaagtggcgctgtggtggtcaccgcctcgtcggggttaatggcctcggcgctctcaagatcttcaagagctttttccagctcctgctccttgtcctttaatatacttatgttcttttgcatatcaatatgttcgcgctcgaggcgctctataatggcatcgatcttggcactgccctcgagcaactcctgcttggtgcgattgagagtttcgatctcggcctgatactgattaactttctcctgaactcggcggcgcagcttgtcgtcgatagcgctaatgattgatgctttgatgtgctcctcggtaatagttcccgtggaactgggatttgagggattctgaaaagaataagctttaaacattaagaagtcgatttttggataataatctaaaacttacatatcccgcagctggtgggtacccaccggcggttggttgtatgaaattcgggtaggccggatatccggatccgccagctggaccagcgggtgtcggggggtacggtccgacattagatcccgtgggatacggtggaaagttgctaccaccagctccgccagctg

SEQ ID NO: 20507 - DNA, 295 bp, DROSOPHILA
atggacgtaatgcagcgctacgtatcgcccgtgaacccggccgtttttccccacctcgccaccgtgcttttggtcatcggaaccttcttcaccgcctggttcttcatctttgtggtgtctcgaaagagctctaaggaaagcaccttgataaaggaactgctgattagcctgtgcgcctccattttcctgggattcggcattgttttcctgcttctaaccgtcggtatttacgtatgagataagacaccattccgcatagaaataaactgaagatctgatcgtgggcgttaacata

SEQ ID NO: 20508 - protein, 78 aa, DROSOPHILA
MDVMQRYVSPVNPAVFPHLATVLLVIGTFFTAWFFIFVVSRKSSKESTLIKELLISLCASIFLGFGIVFLLLTVGIYV

SEQ ID NO: 20509 - DNA, 2865 bp, DROSOPHILA
acttcgccggactctgttccggtgatgccggagctccggcgtcttacaacaaccaattggtgggcattgccgccttctttgtgagcggatgtggttccgagcagcccgatggctacgtggatgtgacccagcatctggagtggattaacgaaaacgctgtttaaataaaaccgagacgttgattagggaaatgctgtatgagaacattgttttttaacaattactttcgtgaccgacttaaaatagtatatgttgtttcatactaattaaaaggggaaacaacgtataaattgcttactgaatacgaaatatcagttgtatacttcttttttaatacaaatacaactgaaacagattttataaatattatttcacctaaagtggttcaggtaaagtagtgttttccgtttttgatttacactcaacaatcttctctttctattaaaaaactttacttcgagtgcgtttaagataaagaaggttttgttttctctgatattttaagtgctatcagcattccagcttatatatgggtatatatttacatctgactcagcaatcattgaatccacttgttaatttatgtcttaatcattaacgttttataagatttctaataaagctcctataagtatgctacaaaattcgaatttcaaagtaataatggctatatttatggtctatcgatatttgtttaactttcacctcattagattaagctgcctagatgatagtagtagtacgcttttcctataaataaacaaaataaaagaaaagaaatttaaatggataaaaccaattaaaaagccactaaaagaggaaacatttaaaaaaaattaaaaactacctctaggttttatttagttaatatacatgttataaacatgatatcacaatatcaatgaactatttttaaacaatattggtaacttaaatttcccttaaaaaaaaaaaaaacaaaaaatgaagcttttggaatgcttttgctatcgacattggtttattgctgcaactgctgttggatccaatcgtagttggccgcaatgctaatgaatcgttcgggcagcattccgccgcactcgccaaggatctgtgcacccagacccaccagctggccctggtagacggccggtcctccaatgtccccactgcagattccctgacgacggccatggcccaggcacagcacctggtcgtccgccaccagcagctcatcccgattggccagggcgcattcgcgtggtgccatcacctcggcggctcctatttgcagggtgcgatgcatgttcacctcggactcggtggtgcggccccagccggagacctccacctggctgcccatgggcggaacgtcctgggagagtggaatggcattgactgtctcactgaaagtaatctcctcctgcagacggagcagggcgattccggtcttcagagtgctgtagttcgggttaatggtgatctcctccacgcgaatctgcttgccattgtagagatccaccgatcctacggtcacggcgaacagaacagcagcccatctgaaatagggagaatttaattcgctagttcgctagtatgtttcgcttcaactatagaaagtttttgcagatttccattacggtcacttacggggtatccttgccgtcggagcagacgcaagagagggcggtgagggcgtatcgctggccaatgatcacggcgccgcagttgtagcttccgccgatggagagggccgcctggtagggcagctggccgagaacggcatcttctccaccggcgatcctgccctgcggctgggcctccagaactccggcggccacaaggattagtccaatggtgagggtcagcttcatggcactttgcttgcttgacttttaatgggatcgcagcgatggcgtgagttcttatagggttcgcacacccgtacagggggtatggcatgggtatgggtatgggtatcttatctgtcagccggagagatagccggatagatagagccatccggtgacagcgactcctcctgattagacaagccccgcgcgtatcaatggtatctccggggatcagtttctggaaaggcgatagggatggcaaaagtctaagtctatacatactatactatttattattgggactattatggtcgcaatttaaaaataattaataattttttaaaatgtagtgtatataaatatgaaataaaagttataataatgactgaaaagtaatggtatgaaaacaggactggctgatttctataattattaccatcatatttacttggatatttttgggatccagtaaattaagatgttgtatgacgattatgtcggcatttccttggccatgtatcaacgaactctgctggggtgatgcttgctctcagctgcaggaatggagggggtaatagtccagggcgaacacgtttcaggcgaggcatgccacacagatacgatagaccaggggccaacgatcgcagatctcgattcgcacgtagcaaagctcatctcatcccataccataccatgccatctcatcttatcccatcccatggcgatccgattcgatttggccagccgcacaaccagttggctctcgtttcgaaccgcatttcgcaccgccagagacaagcccccattatatggtcgttccgaccgccagttttgaccattcgcagactcaccgccgaccgaccatgatcttgcgaacgccactcgttgccggccaccagctgcagctgctcctgctgccctccgtcctgctcctcatgctccatcttcttctctgcgatgcaaagacggtcaatcccggtgattccatgcagatgcagcatcaccagatgaccgcggagccgggactgccgga

SEQ ID NO: 20510 - DNA, 774 bp, DROSOPHILA
aagcaaagtgccatgaagctgaccctcaccattggactaatccttgtggccgccggagttctggaggcccagccgcagggcaggatcgccggtggagaagatgccgttctcggccagctgccctaccaggcggccctctccatcggcggaagctacaactgcggcgccgtgatcattggccagcgatacgccctcaccgccctctcttgcgtctgctccgacggcaaggataccccatgggctgctgttctgttcgccgtgaccgtaggatcggtggatctctacaatggcaagcagattcgcgtggaggagatcaccattaacccgaactacagcactctgaagaccggaatcgccctgctccgtctgcaggaggagattactttcagtgagacagtcaatgccattccactctcccaggacgttccgcccatgggcagccaggtggaggtctccggctggggccgcaccaccgagtccgaggtgaacatgcatcgcaccctgcaaataggagccgccgaggtgatggcaccacgcgaatgcgccctggccaatcgggatgagctgctggtggcggacgaccaggtgctgtgcctgggccatggccgtcgtcagggaatctgcagtggggacattggaggaccggccgtctaccagggccagctggtgggtctgggtgcacagatccttggcgagtgcggcggaatgctgcccgaacgattcattagcattgcggccaactacgattggatccaacagcagttgcagcaataa

SEQ ID NO: 20511 - protein, 253 aa, DROSOPHILA
MKLTLTIGLILVAAGVLEAQPQGRIAGGEDAVLGQLPYQAALSIGGSYNCGAVIIGQRYALTALSCVCSDGKDTPWAAVLFAVTVGSVDLYNGKQIRVEEITINPNYSTLKTGIALLRLQEEITFSETVNAIPLSQDVPPMGSQVEVSGWGRTTESEVNMHRTLQIGAAEVMAPRECALANRDELLVADDQVLCLGHGRRQGICSGDIGGPAVYQGQLVGLGAQILGECGGMLPERFISIAANYDWIQQQLQQ

SEQ ID NO: 20512 - DNA, 13898 bp, DROSOPHILA
aaatgcatttctctggccgaaagttgaaagaccccatagagagatatgtaaattatattattgtgccttgtgcgacaattaataattgtcgagctgatctgtcaaagatcttggaatttaacacaaaatatctaaaattataatcctttaacaacagctagctatcggtattttgctgaaaaacaaaactcattcggttgtttgttttgcatatttgaaattgctttgctcaaacgaatttattgcaaatcacatttaaaagcattttgttattgtcatgcatgtccactgtgacgccgtataaatcatttcgccattgcatttgataacgtttaacgattatagaccgctgccgttcctagttcgataaaaaaagtgtaaatatggggcgattttgttgcattacgtacatgcgcccattcaaggtattcaaggttccacttctggatgcaatgattgttcaaccacactgtcaatcaattgcacgatctatcatcgatcgtcgaactgtctattggggagcaatttagcaagcccattcaactgaaaaggtgcttagaaaactaaagggtaaacaaagctctggagaatgcgaacaactacagctattcgtttgtgagaaggaaaaaaatgccgctaaaatacgcaataaaaacaaaattactcaagaagatataagtaatatattttaaaaagtaaaatataaaaatagcaattctcatgtttttaattactggaactctcctgtaaatacttttctgataagcacaattgcattacatgatattgattcagaattgaatcaggcctctgattgcgtgcgcaactcgggagagagagggagatactatatagtcgagcgatcgtggggacgagtgctccccaccttttcgaggagagagtccgatcgcgatcttgggggctgtggggctctacgctgctgcgctgctcgaacgtcgctcattcgcttgtgagcagccgtcagtgtcgcgtgtgccagcaacgggataaaatagaaatagttacctaaaatatctagcagtgcataaatgtatgtgtgtgtgtgtgtttgaaaatagtgtaaaacgaatggcgatacaaatagctgagcaacgtgcaaaaatcagtttcaagtgcaacagcgctacaaaataagtggaataaaattgcaatttatttgtactattttttttgcaggcaaatataaactgaactaactgtgctaattcaaccagaaataactgttaacttaaacggtgtgaacacgctaattgaacgcagtgcagatccaattaaaatcgagtgaaaccaaattagatcccgagagattttcagcaagtgcaacggtaacaacgtataatggcaccaacaatcactgacaattgcgaatttgaatgtgcaactgttgaggcaacaacaacatcagcgattaccatcggtgattccgataatttcgatagttcggccattggtggcagcggcgataacttcgaagaatcgaatgaactgcatttgaacggacagcaggatcaggatgttcaggaggagcagcagcagcaaatgccatgggaggcacctggaaaacagggactctacgatccccagaacgagcacgaggcctgcggagtcggttttatcgtggccatcgatggcaaacgctctcacaaggtaaggatccagcatatacatcctttcgatcctgaaaccaaaactttatgacatccaagtgttttaatatctttattatgaagttgttcaagattcttttacaaacttatttcaatactcaaaaccaaaccattatataccgttctatacttttgttttattcatagcaactgtgttctatccgtttagatatacacatgcattttatttgatttgctttatttataagtaaatgtttcatttatttaagtctacgtattgaaattaaaagcgatgaatgtaagctgaaaagatttttgtttcacacatagattctacgtgatgcccagaccctctcagaacggatgaatcaccgcggcgcctgcgcctgcgacaatgacaccggcgatggcgctggcgtcttggcttccattcctcacggactctactcgaaggctctgtaagtatcactaatatatttatatatatagatatagcatcgaatatacatatgtttatttgtgccggttcctctggcaccattgatgaacgaactgcttacacggaacgaacacgggacttgtcgatgggcagggtgaaatgacggagcaatatcgccgcgatctcgtgcgcgaaatacgaaaatagctcaaagctgttgagatctattctcttaataaaagtataattcatttgagattaagttggttcaatagaggcaataacctcatatttactctttcttcaataataattataattcataataataacttactcaatcattattaaaacgagtataatgattatataacaaagttaatttattcctccgagaagtataatcgataatacacgtaagattgatttttccttttaaagtatcagtaaattgtcttttatttgcagttatatgcagtaatagaagaaagatcacttagcttagccaattcaattgcgatatacaatttattaatgataaacacttaatgtactttctggtttaagggaggatctcaacattgatgtccctttatttgctgaatttcaaagtaccgtggggaaatgatcgagcatgtcaaaaatagtttgttaaaatgaggcacatccacaggaacacaaagatatatcatatccacgaccagtggcgctcacatacaagtacatatagaatgtatgtatgtacatatgtcgaggagtatttgcctacctatagagatccgacaatccaacatctgctctctgctcccgaccgacctatgtattttgttttctgtttatttcgtcagcttttggcacggttcttgttttcgtcacgctttgcccagaatcggtaaacatacgtagccgtaatatatatatttatttattttaattggctatatatgggactaaacgatgtttttagggaccagtctaagtggatagcagaatagaagccatttgcagccaattactttgtgcaaattattctacattatttagctcaaatacgccaaatggaaaaacacggcaaggtcccctattcgtacccctcgggtggttcttcacttaatccagtgtaccagatgtgcatagtaatgaggtttggttgggtaagattcagatattctaaatgaagaaagatttgaaaactttaaacaattaattgcaaataataggtataaagtttttattgtatttcctagaactttaaaccgagaccgagaggttcaattaggcatttgaaacggttgaaaaaaaaaaaatcataaaaataatatttgaaaagtttattaaggttaactgacctaaatcgctcaaatcaaagtcaaataaggcaaaagacctctatgattttaagcagtttaatcagagctcaattacgctgacctttattaaatatatcagttaaatttgttatgctctttcggttgctaggtgctgcttttagaatctttgaaaatggttgatagtttccaatggaaccgattgattttaatgcgttccaagccatttcccgaaccccagctaataaaaacgacactgtccaagcgatttacaactcaatatgcgctaatcaatggcgcgaatttgcaactatttgctatttaattagtagagcagccgtctgatgcccgagtatatactatatataatatacacaaataggaggaggtgacagatgaattttcacaactggttgggtcattaaaacgcgtaatgtcgcacgacagtcccataaatctagttaaattagcgtctagcctacggctttattgatatgtccgagcaatttcggggtattctggacgattcggagattcgctttggtcaacaaattgtgacccaatcgagaagaaagaaattcactctagacacgcacgtgcaaacggtcaagagccttaaagaagattgcgatctgaaagcaacgcaacaagtcggtgattgccaagttcaaggaccggcttcaagtcttggactaattgcgaaattatggcaaaacacttaaacagtacgccgcccatcggttcgaccggaattctgagacgtaataagaacgcagtttagctacagacatataagctcagttcaatctcaattgcacctgggaaaaaactttgcatttacagttttccatttgtgttgaaatccaaatttttatgtctattatagtatagtttaaaaaaaaaatatgagtatggcaaattatgtgtgttcatacggctttctcgcagtgtacgaatgcatgcttgaataacgaaaacaggtggacaggcgaataatgcgcatcggtagacggaataggggaggtatgggattggttccatcaggttgtgacggctggttcgctgacagcttctccatagagagatgctgataaggtgcgacttgtggcggactcgtttcgtcaccagcactcaatggaatggcgcgatgaatgaatgactgagtaactgaactgggtgacttggattgacttgcgccagttgcggagagcgacttaatggcgcattaatactggagctcggaatgaatataatggaaaaatgcttaaacgttgacaaatcggtagtctgattccgtgaaattcctttaaaatcttaaaaaactgttcataagctatgacaaattcaactctgcatatccctcaaactcaactaaccctacatattctccgtttgcagtgccaagcagggtgtaaccttgccggagttgggtgactatgccacgggcattttctacctggatgaggctcagcatgcagctgccgagaaggagttcgatgatctggccaagagtcttggattggaggtgattgcctggcgcactgtgccgtccaatcagtcggccattggcgtggtggcccgcaagtcggaacccctgtcccgtcaggtgtttgtgcgtcgtccagccggaagcgatgagaaggccttcgaacggcaggttttcgtccttaggaagagggccagccatgagttgatcaagccggggcgacggttctacatctgctccctgtccgatcgcacagtggtctacaagggtctcttcacttccgaccagctgtgggattactacactgacctgaaggatccagagttcgaaacctatttggcattggtccatactcgtttctccaccaacacctttcccagttgggaaagggctcatcctctgcgagtcctggcccacaatggtgagatcaacacgcttcggggaaatgtgaacctcatgaaggcccgcgagggtgtcatgcagtcggatctgtttggggatcagctgaagaaactgtacccagtggtggagccgaatctctccgattccggcagcttcgattgcgtgctggagttcctcaccatggccagcgacaggtcgttgccggaatcggtgatgaccatggtgccggaggcatggcagaatgacaagactatgccgcaggagaagcgtgacttctaccagtgggccgcctgtgtcatggaaccctgggacggtccggctcttattagcttcaccgatggtcgctacattggcgccgttttggatcgtaatggactgcgtccatcgcgtttctatgtgaccaaggagaacgtgctggtcatggcttctgaggtgggtgtgtacgatgtggatccatcgcaggtgaccctgaagagccgcttgaagcctggaaggatgttgctggtggacaccaaggagaagaagctcatccaggacatcgagctgaaggccaagatagccaagtctaggcctcattccgagtggctgcagcagaaggtgagttaaggtttggtcgtcacatgtggtatgatgaaagactcggtggagtacaatcgttagaatgttttcagtaactctatcctaaattaaaaaatacaaaaagatatattgatcaaattttgctataagaatatttatccatggtattgttactcgaaaatgttctaagttttaacggagctttcaagatctgtgcgccacaaatccagccacctatactatattactatacacatctcaggctcacagggtcaatttccactaatcatttaaaaacacaaactcatctccagacacccaatcggaaaactaataaaaataataatctttggtctaaatttgtccattctctctcacgctatcccctaatctcaatctatgtgtatttttgttgtggaaccgatgcagatggtgagttaaccaacccagatagccctagatcctatcctttgtcctttggcctcccaaaagtagtgtagatcctagtttttgccttcccgttgcgtttcattttgcatgttgcatttaaatataattataaatatttcgcaaaaactaataattttgtttatatcgaaatagattaccttggatgagattcgcaacgccaatgtgttgaatactcctcctgttgatgagctggccaagttgcccgcctccgagaggggcatcttcgatcccaggctctctcttttcggttattccacggaaacggtcaatatgctgctcattcccatgtttaagaacaagtaattagataatttgagtaattattaataacataaagataatccatttatcgttttacagaaaggaagcccttggctccatgggtaatgatgccccgctggcatgcctctccaacttccagcccataccgtatgagtactttaagcagctcttcgcccaggtaaccaatccgcctatcgatccattccgcgagaaggtggtcatgtcgatgcagtgtcctctcggtccggaggcgaatcttctgcagccatcggctcagcaggtgcatcgcatttggctcaccaatcccatactgagcattccagatacccagctgctcaagcggaatacgcaccgcggctggcggaccaaagtcttggacataacattccagtataacgaaggcgttcagggttatatcgatgccatcgatcgtatctgccgcgaaggatatgctgcagctcaagctggctatcagttgttggtgatctccgatcgtggagcgggaatcgatggtaaggtggcagtctcagcccttttggccctcggcgccttgcatcatcatctgattgagacactgcagcgcatgaaggtgggcattgtggtggaaactgctgaggcccgcgaagttcaccatatttgcgtactccttggctacggagcggatgccatttgtccatatctggcttttgaactggcccaggctctgcgtgatgatggagtaattgcgcctgaggttaacgacaagcagatctatgccgcttatgcccaagctattgatacgggaatcgcaaaagtaatggccaaaatgggcatcagcactttgcaatcgtacaagagcgcccagatcttcgaggctgtgggattgggttccgacctggtggccaagtgcttccgcggcacacaaagtcgcatcggtggagttaccctggagatactggctaaggagggccttcaacgctatcaactaacctatggcaaagcaacgccggacacacgcatcctgcggaatcctggccagtaccactggcgtcacggtggcgaagctcacattaacgagccatcctccattggcagcctgcaggaagcggccgtaaataagaatctggatgcatttgaagcttttaagaaaaccactctggatagtgtgaagaagtgtgctcttcgcggacagctggagtttgttacagatcggcaaagtatagatatctccgaggtggagcccgccagcgagattgtcaagcggtaggttcaagtccacatgtatacttgctgatgttaaagtctctttctttatgtgcgacccatatagctttgccactggtgccatgagctttggcagcatctcactggaggctcatcaaacactttcgatcaccatgaatcgcattggcggcaagagcaacactggtgaaggtggcgaggactcagatcgttatttaagtgagtcacaaagtatatccctatcagttagtaaactaatcaatatttatttataatttgctatccagaccaagatccaaacaacagtcgtcgctcagccatcaagcaggtggcttcgggacgtttcggcgtgaccgcatcttacctggctaatgccgatgatctgcagatcaaaatggctcagggcgccaagcctggtgagggtggcgagctgccaggctacaaggtgaccaaggatattgccaagacccgaaagtccgtacccggagtgggcctaatctcacctcctcctcatcacgatatctactcgatcgaggatctggctgagctgatctatgatcttaaatgctccaatccaaatgcacgcatcagtgtaaagctggtgtccgaagtgggcgttggtgtcgtcgcttccggtgttgccaaggtaggtttgcgaatgcattagaaaggtaataagtctcttgaagaattttcttattacaacagggcaaagccgagcacattgtaatctctggacatgatggtggtaccggtgctagctcctggacaggcattaagaatgccggattaccctgggagctgggtgtggccgagacgcatcaggtgctggtgctaaataatctacgatcacggtaagtttccgaccaggagaagccggcacagagccattcccgctctctcctcttgttgttactaatcatgaaccgatacattactgaaagtgcctggttatccagatgacagcgttggaaaacctgttcagaacatgtattcccaaaagcagagatccattgatcatcggaaagttgggctgatccccctacacaaccccattgaaactcctcgtacatgtggccagtgggcggtgggcaggaggacgatgacacggcgcttggggaaggcgaatcttgtccagcggaagagcgctcaatgagaatttcaaattctttgaaatctgacaaatgaaagatgtctcgattgcgaacccatggacatgatccagtgtgaggaaacggatacagtgaaagatcgatccattcaaaatgaagaagtagcgcattctttggacagagacctttgaagtaatgagtatcactcaactgatctccagatcctagctacagaaacccgcttccaaacagctgtaaaacacgattcgatcgatccagtccaaatccaaactccagtccactcgctctactccactccactcactcgctcactcgatcacgttcgtcgcgctgtgctccattcgtaatttcttctcattacattgattcttacccggggctgaatttgctaacattgccttcctttttatgtcgtgtcttcccactataaacggtctggatctggattttgtttggatgaaccttccgcagtgtgattgttcaggctgatggacagctccgcacaggattcgatgtggttgtggctgcactgctgggtgctgatgagtttggtttcagtactgctccattgatcgtcatgggtaagttgtggccattacttttatactctgtgttataagtataatactctttaaaggctgcactatgatgcgcaagtgtcacttgaacacctgtcccgtgggcattgccacccaggatccggagctgcgcaagaagttcacgggtaaaccagagcatgttatcaacttcttcttcatgctggccgaggatgtaagcttatatttcccatagcttctataaattagactaatcatttgactatttttatagattcgcaaaattatggctggattgggcattcgaaagttccaggatctgattggtcgcaccgatttattgcgcgtggccagtcaacgcgatgccaaggctagtaacctggacctcaagttgctcctgcagccagctttggaactgcgtcccggcacgaacatcgttggaggttccgtaaagcaggacttccagctggagaagcgttccgacaacgaactaattgccaaggctcagcaaatattcagtggagcagacgataatgtaaccgtcaagatgcgcatccacaatgaggagcgagcctttggttctactctgagctatcatattgcatggtaggattaagtctgttaacaaggtgatcataatctaatttgttataatctacagcaaatatggagaggctggcttgcccgctggcaagagcatcgacatcttcctggagggttccgctggtcagagcttctgcgcgttcctggcgcggggtgttaatgtgacattgaagggcgatgccaacgattatgtgggcaagggtctttgcggtggtaatgttgtcatcatgccacaagatacggttcccttcgaatcacatctcaatgttatcgtgggcaacgtttgcttgtatggagccactgagggaactgcctatttccgcggtattgcctccgaacgcttctgcgtacgaaactctggtgtaaccgccgttgttgaaggtgtgggcgatcacggatgtgaatacatgactggcggtgtagtggttatcctcggtcttacgggacgaaacttcgccgctggcatgtccggcggtattgcttatgtgtacgatttagatggttcctttaagcccaaggtaaacccggaaagtgtggaactcctgccgttggaaattgagaaggatgtgctgctcgtcaaggaactgttggctgatttcattgagaagacaggctcgaaggtggccaaggagttgcttgacaactgggccgaagcccagggcaagtttgtcaaggtcttcccgtatgaataccaaaaggctctaaaggacatggccgaacaacaagcagtggagcagcccctgaagtccgccatcgagaatggaaacggaaagcatgaaccgcacatcaaggacattgaggaagcgattcaggacgtggtgctcgagcagaagcgtgccgatcgcgtcctggacaagacccgtggctttgtaaagtacaagagggaatcggctccgtaccgagatgctggagagcgacagaaggattgggatgaagtctacaacttcccacatgtgcgcaagaacctcaaggttcaagcagctcgatgcatggaatgcggtgtgcccttctgtcagtccaactccacgggctgtccgctcggtaacatcattcccaagtggaacgacctcgttttccacggcgagtggcaggaggctctgcgtcaactgctgcagaccaacaacttcccggagttcactggtcgagtatgccccgctccctgcgagggttcctgcgttttgggcatctccgagccagctgtaacgatcaagaacatcgaatgcgccatcatcgatcatgccttcgagcagggctggattaagccagagattccggaagtgcgcactggcaaacgagttgcgattgtgggatcaggaccttccggcttggccgcctcgcagcagctgaaccgcgccggtcactttgtcaccgtttttgagcgcaacgatcgcgttggtggacttttgcagtatggtattcccacgatgaagctttccaaggaggtggtcaagcggcgggtagatctgatggctgacgagggtatcgagttccgcaccaatgtccatgtgggcaaggacctcaaggccgagcaactgctgcaggagtaagtataattgaacattttaggtgatctagctgatttttgacgattttgccatgattgggttaaatcagtcctcaagttttaatagaatatttagtctaaaacacctgtacttattactctcgaaattttcaacaggtatgatgccgtcctcctcaccactggctccacctggccacgtgacttgccgctcgccaaccgtgacctgaagggcattcactttgccatggaattcctggaggcgcagcagaagaagcagctgggcggaaagaatgatataatatctgccgctggcaagaatgtgatcatcatcggcggtggcgataccggatgcgattgcattgccacgtcgttgcgtcaaggcgccaagagtatcactacattcgagatccttccggaaccgccacagaagcgtgctcaggacaacccctggcctcagtggccgaaggtcttccgcgtggactacggtcacgaggaggtgaagctgaagtggggcaaagatccgcgccagtactgcaccaccaccaaggagttcgtgggcgaaaatggagccatcaagggcgtgaacaccgtcgaggttgagtggaccaagacggaaacgggccagtggcgcatgcaggaggtggccggttcggagaagtacttccccgcagaccttattctcctggccatgggcttcctgggtccggagaagacggtgccgagcgaactgggcctggagctggacccgcgcggcaacatcaaggcatccaacggacagtatggcacctcgaactccaaggtctttgcggcaggaggtcagttttatgtctactaagtaataggcttagtattaagagttaatcacatcaatcattgaatgatttctgtatctttgcataacaaaaatgttaatttatcttctgtcctttgcagattgccggcgtggccagtcgctggtcgtctgggccattaccgagggtcgccaggccgcacgacaggtcgattcctatctgaccggccgtcccagtgggcttccaggacctggtggcgtcatcgcgacatcctaaagaggatccacagaggcagccagagcagctaatatcaagttttgtgtgcgtgcatcgtccttagcctatagtgcgaaattctttaacgatttgtgatttttattttcgcgattttagtttagtttacactaaaaagacttgagttttttacacaccaaaccaaaacgaaacacgtttcatttagttttattttgatcgcaaagctggctgggaattgttagtggttcgtcgagatgccctccatatgatgatgatgatgatgatgatgatgcggcaggagtcaattaagagtgcaaactgaaattctgattgaagccaatcaatatgtatatcttaacggaaatcgaatatccaacaaaaaatctaaggacaataactagaaacttaccgttatcgttaaaatgaaaattaattgaacattaaatatttagaaaatgcattttttcaatgttgttttagcttgagttgcctaatctatgcaaacgaaatatatgaagtgaaaattgatatgctgatctccaccatcctatatacaatccataaatcgtatatacagaaagagaaatgtattaaactcggccaatatcgaaacgcattttttagatgttgtttttgtgttttgaactgcattcgaccgttgaccgcaaatgtacctaagtggctattgttaaaacaaatctgctctttggcagttgaatgtgcgaatacaaagaattacacaatttatacaaaacatatttaacccaaatgtatacccttatacagacatctctatataaatatatttatgtgcaagtatttgatgaaataaatattcaaattattaaaaagcatttctccgatgagttgatatttgtgttttgaatttggcatgggaaatatatttattaatagcttgaaaagagaggcaacgtctttttgaaattaaaaacctttgttatatgtataccttgtaatttaaaattattggtattttacgtaaagcgtataactttaaaggaatgagaaaccattgtaatgtagaaaatatttaataatatttctttaaattcattgtatggtaacttatgtagttaccgctttatttaattactaagtacaatatcttgttgttttatgccgtaagcttgttacgagcggagctgaagttccagtg

SEQ ID NO: 20513 - DNA, 6858 bp, DROSOPHILA
caacgggataaaatagaaatagttacctaaaatatctagcagtgcataaatgcaaatataaactgaactaactgtgctaattcaaccagaaataactgttaacttaaacggtgtgaacacgctaattgaacgcagtgcagatccaattaaaatcgagtgaaaccaaattagatcccgagagattttcagcaagtgcaacggtaacaacgtataatggcaccaacaatcactgacaattgcgaatttgaatgtgcaactgttgaggcaacaacaacatcagcgattaccatcggtgattccgataatttcgatagttcggccattggtggcagcggcgataacttcgaagaatcgaatgaactgcatttgaacggacagcaggatcaggatgttcaggaggagcagcagcagcaaatgccatgggaggcacctggaaaacagggactctacgatccccagaacgagcacgaggcctgcggagtcggttttatcgtggccatcgatggcaaacgctctcacaagattctacgtgatgcccagaccctctcagaacggatgaatcaccgcggcgcctgcgcctgcgacaatgacaccggcgatggcgctggcgtcttggcttccattcctcacggactctactcgaaggctcttgccaagcagggtgtaaccttgccggagttgggtgactatgccacgggcattttctacctggatgaggctcagcatgcagctgccgagaaggagttcgatgatctggccaagagtcttggattggaggtgattgcctggcgcactgtgccgtccaatcagtcggccattggcgtggtggcccgcaagtcggaacccctgtcccgtcaggtgtttgtgcgtcgtccagccggaagcgatgagaaggccttcgaacggcaggttttcgtccttaggaagagggccagccatgagttgatcaagccggggcgacggttctacatctgctccctgtccgatcgcacagtggtctacaagggtctcttcacttccgaccagctgtgggattactacactgacctgaaggatccagagttcgaaacctatttggcattggtccatactcgtttctccaccaacacctttcccagttgggaaagggctcatcctctgcgagtcctggcccacaatggtgagatcaacacgcttcggggaaatgtgaacctcatgaaggcccgcgagggtgtcatgcagtcggatctgtttggggatcagctgaagaaactgtacccagtggtggagccgaatctctccgattccggcagcttcgattgcgtgctggagttcctcaccatggccagcgacaggtcgttgccggaatcggtgatgaccatggtgccggaggcatggcagaatgacaagactatgccgcaggagaagcgtgacttctaccagtgggccgcctgtgtcatggaaccctgggacggtccggctcttattagcttcaccgatggtcgctacattggcgccgttttggatcgtaatggactgcgtccatcgcgtttctatgtgaccaaggagaacgtgaccctgaagagccgcttgaagcctggaaggatgttgctggtggacaccaaggagaagaagctcatccaggacatcgagctgaaggccaagatagccaagtctaggcctcattccgagtggctgcagcagaagattaccttggatgagattcgcaacgccaatgtgttgaatactcctcctgttgatgagctggccaagttgcccgcctccgagaggggcatcttcgatcccaggctctctcttttcggttattccacggaaacggtcaatatgctgctcattcccatgtttaagaacaaaaaggaagcccttggctccatgggtaatgatgccccgctggcatgcctctccaacttccagcccataccgtatgagtactttaagcagctcttcgcccaggtaaccaatccgcctatcgatccattccgcgagaaggtggtcatgtcgatgcagtgtcctctcggtccggaggcgaatcttctgcagccatcggctcagcaggtgcatcgcatttggctcaccaatcccatactgagcattccagatacccagctgctcaagcggaatacgcaccgcggctggcggaccaaagtcttggacataacattccagtataacgaaggcgttcagggttatatcgatgccatcgatcgtatctgccgcgaaggatatgctgcagctcaagctggctatcagttgttggtgatctccgatcgtggagcgggaatcgatggtaaggtggcagtctcagcccttttggccctcggcgccttgcatcatcatctgattgagacactgcagcgcatgaaggtgggcattgtggtggaaactgctgaggcccgcgaagttcaccatatttgcgtactccttggctacggagcggatgccatttgtccatatctggcttttgaactggcccaggctctgcgtgatgatggagtaattgcgcctgaggttaacgacaagcagatctatgccgcttatgcccaagctattgatacgggaatcgcaaaagtaatggccaaaatgggcatcagcactttgcaatcgtacaagagcgcccagatcttcgaggctgtgggattgggttccgacctggtggccaagtgcttccgcggcacacaaagtcgcatcggtggagttaccctggagatactggctaaggagggccttcaacgctatcaactaacctatggcaaagcaacgccggacacacgcatcctgcggaatcctggccagtaccactggcgtcacggtggcgaagctcacattaacgagccatcctccattggcagcctgcaggaagcggccgtaaataagaatctggatgcatttgaagcttttaagaaaaccactctggatagtgtgaagaagtgtgctcttcgcggacagctggagtttgttacagatcggcaaagtatagatatctccgaggtggagcccgccagcgagattgtcaagcgctttgccactggtgccatgagctttggcagcatctcactggaggctcatcaaacactttcgatcaccatgaatcgcattggcggcaagagcaacactggtgaaggtggcgaggactcagatcgttatttaaaccaagatccaaacaacagtcgtcgctcagccatcaagcaggtggcttcgggacgtttcggcgtgaccgcatcttacctggctaatgccgatgatctgcagatcaaaatggctcagggcgccaagcctggtgagggtggcgagctgccaggctacaaggtgaccaaggatattgccaagacccgaaagtccgtacccggagtgggcctaatctcacctcctcctcatcacgatatctactcgatcgaggatctggctgagctgatctatgatcttaaatgctccaatccaaatgcacgcatcagtgtaaagctggtgtccgaagtgggcgttggtgtcgtcgcttccggtgttgccaagggcaaagccgagcacattgtaatctctggacatgatggtggtaccggtgctagctcctggacaggcattaagaatgccggattaccctgggagctgggtgtggccgagacgcatcaggtgctggtgctaaataatctacgatcacgatgtctcgattgcgaacccatggacatgatccagtgtgaggaaacggatacaatcctagctacagaaacccgcttccaaacagctgtaaaacacgattcgatcgatccagtccaaatccaaactccagtccactcgctctactccactccactcactcgctcactcgatcacgttcgtcgcgctgtgctccattctgtgattgttcaggctgatggacagctccgcacaggattcgatgtggttgtggctgcactgctgggtgctgatgagtttggtttcagtactgctccattgatcgtcatgggctgcactatgatgcgcaagtgtcacttgaacacctgtcccgtgggcattgccacccaggatccggagctgcgcaagaagttcacgggtaaaccagagcatgttatcaacttcttcttcatgctggccgaggatattcgcaaaattatggctggattgggcattcgaaagttccaggatctgattggtcgcaccgatttattgcgcgtggccagtcaacgcgatgccaaggctagtaacctggacctcaagttgctcctgcagccagctttggaactgcgtcccggcacgaacatcgttggaggttccgtaaagcaggacttccagctggagaagcgttccgacaacgaactaattgccaaggctcagcaaatattcagtggagcagacgataatgtaaccgtcaagatgcgcatccacaatgaggagcgagcctttggttctactctgagctatcatattgcatgcaaatatggagaggctggcttgcccgctggcaagagcatcgacatcttcctggagggttccgctggtcagagcttctgcgcgttcctggcgcggggtgttaatgtgacattgaagggcgatgccaacgattatgtgggcaagggtctttgcggtggtaatgttgtcatcatgccacaagatacggttcccttcgaatcacatctcaatgttatcgtgggcaacgtttgcttgtatggagccactgagggaactgcctatttccgcggtattgcctccgaacgcttctgcgtacgaaactctggtgtaaccgccgttgttgaaggtgtgggcgatcacggatgtgaatacatgactggcggtgtagtggttatcctcggtcttacgggacgaaacttcgccgctggcatgtccggcggtattgcttatgtgtacgatttagatggttcctttaagcccaaggtaaacccggaaagtgtggaactcctgccgttggaaattgagaaggatgtgctgctcgtcaaggaactgttggctgatttcattgagaagacaggctcgaaggtggccaaggagttgcttgacaactgggccgaagcccagggcaagtttgtcaaggtcttcccgtatgaataccaaaaggctctaaaggacatggccgaacaacaagcagtggagcagcccctgaagtccgccatcgagaatggaaacggaaagcatgaaccgcacatcaaggacattgaggaagcgattcaggacgtggtgctcgagcagaagcgtgccgatcgcgtcctggacaagacccgtggctttgtaaagtacaagagggaatcggctccgtaccgagatgctggagagcgacagaaggattgggatgaagtctacaacttcccacatgtgcgcaagaacctcaaggttcaagcagctcgatgcatggaatgcggtgtgcccttctgtcagtccaactccacgggctgtccgctcggtaacatcattcccaagtggaacgacctcgttttccacggcgagtggcaggaggctctgcgtcaactgctgcagaccaacaacttcccggagttcactggtcgagtatgccccgctccctgcgagggttcctgcgttttgggcatctccgagccagctgtaacgatcaagaacatcgaatgcgccatcatcgatcatgccttcgagcagggctggattaagccagagattccggaagtgcgcactggcaaacgagttgcgattgtgggatcaggaccttccggcttggccgcctcgcagcagctgaaccgcgccggtcactttgtcaccgtttttgagcgcaacgatcgcgttggtggacttttgcagtatggtattcccacgatgaagctttccaaggaggtggtcaagcggcgggtagatctgatggctgacgagggtatcgagttccgcaccaatgtccatgtgggcaaggacctcaaggccgagcaactgctgcaggagtatgatgccgtcctcctcaccactggctccacctggccacgtgacttgccgctcgccaaccgtgacctgaagggcattcactttgccatggaattcctggaggcgcagcagaagaagcagctgggcggaaagaatgatataatatctgccgctggcaagaatgtgatcatcatcggcggtggcgataccggatgcgattgcattgccacgtcgttgcgtcaaggcgccaagagtatcactacattcgagatccttccggaaccgccacagaagcgtgctcaggacaacccctggcctcagtggccgaaggtcttccgcgtggactacggtcacgaggaggtgaagctgaagtggggcaaagatccgcgccagtactgcaccaccaccaaggagttcgtgggcgaaaatggagccatcaagggcgtgaacaccgtcgaggttgagtggaccaagacggaaacgggccagtggcgcatgcaggaggtggccggttcggagaagtacttccccgcagaccttattctcctggccatgggcttcctgggtccggagaagacggtgccgagcgaactgggcctggagctggacccgcgcggcaacatcaaggcatccaacggacagtatggcacctcgaactccaaggtctttgcggcaggagattgccggcgtggccagtcgctggtcgtctgggccattaccgagggtcgccaggccgcacgacaggtcgattcctatctgaccggccgtcccagtgggcttccaggacctggtggcgtcatcgcgacatcctaaagaggatccacagaggcagccagagcagctaatatcaagttttgtgtgcgtgcatcgtccttagcctatagtgcgaaattctttaacgatttgtgatttttattttcgcgattttagtttagtttacactaaaaagacttgagttttttacacacc

SEQ ID NO: 20514 - protein, 2162 aa, DROSOPHILA
MAPTITDNCEFECATVEATTTSAITIGDSDNFDSSAIGGSGDNFEESNELHLNGQQDQDVQEEQQQQMPWEAPGKQGLYDPQNEHEACGVGFIVAIDGKRSHKILRDAQTLSERMNHRGACACDNDTGDGAGVLASIPHGLYSKALAKQGVTLPELGDYATGIFYLDEAQHAAAEKEFDDLAKSLGLEVIAWRTVPSNQSAIGVVARKSEPLSRQVFVRRPAGSDEKAFERQVFVLRKRASHELIKPGRRFYICSLSDRTVVYKGLFTSDQLWDYYTDLKDPEFETYLALVHTRFSTNTFPSWERAHPLRVLAHNGEINTLRGNVNLMKAREGVMQSDLFGDQLKKLYPVVEPNLSDSGSFDCVLEFLTMASDRSLPESVMTMVPEAWQNDKTMPQEKRDFYQWAACVMEPWDGPALISFTDGRYIGAVLDRNGLRPSRFYVTKENVTLKSRLKPGRMLLVDTKEKKLIQDIELKAKIAKSRPHSEWLQQKITLDEIRNANVLNTPPVDELAKLPASERGIFDPRLSLFGYSTETVNMLLIPMFKNKKEALGSMGNDAPLACLSNFQPIPYEYFKQLFAQVTNPPIDPFREKVVMSMQCPLGPEANLLQPSAQQVHRIWLTNPILSIPDTQLLKRNTHRGWRTKVLDITFQYNEGVQGYIDAIDRICREGYAAAQAGYQLLVISDRGAGIDGKVAVSALLALGALHHHLIETLQRMKVGIVVETAEAREVHHICVLLGYGADAICPYLAFELAQALRDDGVIAPEVNDKQIYAAYAQAIDTGIAKVMAKMGISTLQSYKSAQIFEAVGLGSDLVAKCFRGTQSRIGGVTLEILAKEGLQRYQLTYGKATPDTRILRNPGQYHWRHGGEAHINEPSSIGSLQEAAVNKNLDAFEAFKKTTLDSVKKCALRGQLEFVTDRQSIDISEVEPASEIVKRFATGAMSFGSISLEAHQTLSITMNRIGGKSNTGEGGEDSDRYLNQDPNNSRRSAIKQVASGRFGVTASYLANADDLQIKMAQGAKPGEGGELPGYKVTKDIAKTRKSVPGVGLISPPPHHDIYSIEDLAELIYDLKCSNPNARISVKLVSEVGVGVVASGVAKGKAEHIVISGHDGGTGASSWTGIKNAGLPWELGVAETHQVLVLNNLRSRCLDCEPMDMIQCEETDTILATETRFQTAVKHDSIDPVQIQTPVHSLYSTPLTRSLDHVRRAVLHSVIVQADGQLRTGFDVVVAALLGADEFGFSTAPLIVMGCTMMRKCHLNTCPVGIATQDPELRKKFTGKPEHVINFFFMLAEDIRKIMAGLGIRKFQDLIGRTDLLRVASQRDAKASNLDLKLLLQPALELRPGTNIVGGSVKQDFQLEKRSDNELIAKAQQIFSGADDNVTVKMRIHNEERAFGSTLSYHIACKYGEAGLPAGKSIDIFLEGSAGQSFCAFLARGVNVTLKGDANDYVGKGLCGGNVVIMPQDTVPFESHLNVIVGNVCLYGATEGTAYFRGIASERFCVRNSGVTAVVEGVGDHGCEYMTGGVVVILGLTGRNFAAGMSGGIAYVYDLDGSFKPKVNPESVELLPLEIEKDVLLVKELLADFIEKTGSKVAKELLDNWAEAQGKFVKVFPYEYQKALKDMAEQQAVEQPLKSAIENGNGKHEPHIKDIEEAIQDVVLEQKRADRVLDKTRGFVKYKRESAPYRDAGERQKDWDEVYNFPHVRKNLKVQAARCMECGVPFCQSNSTGCPLGNIIPKWNDLVFHGEWQEALRQLLQTNNFPEFTGRVCPAPCEGSCVLGISEPAVTIKNIECAIIDHAFEQGWIKPEIPEVRTGKRVAIVGSGPSGLAASQQLNRAGHFVTVFERNDRVGGLLQYGIPTMKLSKEVVKRRVDLMADEGIEFRTNVHVGKDLKAEQLLQEYDAVLLTTGSTWPRDLPLANRDLKGIHFAMEFLEAQQKKQLGGKNDIISAAGKNVIIIGGGDTGCDCIATSLRQGAKSITTFEILPEPPQKRAQDNPWPQWPKVFRVDYGHEEVKLKWGKDPRQYCTTTKEFVGENGAIKGVNTVEVEWTKTETGQWRMQEVAGSEKYFPADLILLAMGFLGPEKTVPSELGLELDPRGNIKASNGQYGTSNSKVFAAGDCRRGQSLVVWAITEGRQAARQVDSYLTGRPSGLPGPGGVIATS

SEQ ID NO: 20515 - DNA, 2907 bp, DROSOPHILA
tggaatgaaaatgcgcaatgccagcgacgagaatataagagactagctccatataactaccacctcctccaccttctacccgaagttctccaccacttccttgaccaatccttatcttcggcttgggcatcagagaaaatctaatcttatcgccttatggcaatggctttatgccgctatagactattgttacttgttagttcaccgattaattggcacataaatagaaaattgcacaagtcggttgaagggaagtccaaataaaccaaacgaccagtgtccagtgacagtacaactacaaccatctataggagataatgatgagtaacacatgactcaggggagctacggaaattagggtgcttcaggtctcagaataatctaaaatcagtcgtggaaaactttggattttttgagttgctctttcaataaaatgtctaaacattttggtgttaattaaactctataaaattgccttgaatgtaagcaaattatcaacgtatttagtaggaattaccctttagcttggcgataacaaatctggattataaagatttagcccagtcattggcgattgatcaagctagctgcacaaaagtttggttcccaggttgattacggcgatttccttcgatctctatctaaatgttctgttaaatagccatactctctaatatatatgactccataaacaataatagccaattgttgtgaccatttacttggcaattttgttagataatccttgacggcatcccataaattagaaacaggtttcaaggtaatttcttagtaattaaagaacctttgaacggcgccaattaaatgttattctatcgattgtagctttatgaccagcactaaattccatatagtttgcatccatataaagttaaaaacacaaaacgtttttttttgtagagggagtaacacactttatgcacatgaaaaaaatgtataaaaaaataaagggtagtccttggatggcgaaccaaaagttttactgggtattggcctcgatccaggttaggtagtaggagacacgggtggccacatccggatacttgctgccgcagggtccgaagttgaagctggtcaaaccgcgaagcaccttgtcgtcatcgatgacagccgcaccggcatccccacgacagatgccctcgccctcggctctcgagaggcagacgacggattcgtagccgtatccggcttcccattcgcacagggatcggctcagcgtattgtagttggccttctgctgtttataggatgcagtaccatccgaaagttcaccccatccagccacatagaccggagttccgttgggcagctcagcgtccacatcttccgtctcctcatcagttgtggggggcagtgcgatgtcttggatgcgatcgctaaagaccagggtctcgtccagctccagtatggcgatgtcgtgcaggaagtttccgtacgatggatggatgatcacgctctttacattcacaatgctgccgccggcgtactggttaatggtgcccaggcgaacagccaaggtgctggcatccactctggggatttagaacaaatagggattagaactggtagatgaatatatattcttaaagttctcaaagtgaagtgcttagggaatccaagtgtatataatcataaagtgtagttagaactcacggggtgatgcccacgctggacacacagtgggcggcggtcaggatgtggtttgttgagatgatggcgccggagcagacgtgggccttgttgtatctcacggatgcggaccaggggtactcgccctgggcaacgtcctcgccgccaagaatgcgaccttgtggcgaggcttccgcggagaggatcaggccaaagattagcaggccgaggccgagagtaatgcgtggatcagccatggcgatggattggcaactgaatgggcccatcagccaacgatcggtggtcaccgccacttagcgatctaatcgatgggcattgtatggcgataaggagagcgacttgaatttatgggggtaacaatcgtgtggcgattagattgcttaacccatggtcgtaaacggggtgttctataaaggtccgccggccggtaggcgcacctttcagttgagatcccacaagccatgagtccggttcagtcatattcacacagtcgactactcctgctcgtggtcatcgtgaccttgggcgtggtccaatccagtcgactgccggcggaggtgggctcccagccacacagcatctcactgcgtcggaatggcgtccatgtgtgcggaggagctttgatccgtgaaaagtggatcctcaccgcagcccattgcgtcagtttgggcggtggacagcagaggtagatggtttttacacagagagaaaaagttcatatcaacttaagttaagcataattcaattagatgctaattgtttacttttcaagacattatttatttatttataaatattttcacattttgaaagaaacttactttaaaagatagagaatgattcaaagtataatcactataaatatatattttagttgagctgttaataccatttaagtaattcaaaagggctgccaagttgatataactttttcactgtgtaggataaccgtgtgaaacagaatacattacccaattcatccatttagctacccagctaaatcctacaatgtgcgagtgggcagcattcagcgactgaccggtggtcaactggtgcctctgtccaagatcataatccacacgaactactccagttcggatgcagttggctctaatgacttggccttgctggagctggaaacgtcggtggtcctgaatgcgaatacgaatccgattgatttggccaccgagcgaccggcggcgggctcccagattatcttctccggctggggatcca

SEQ ID NO: 20516 - DNA, 786 bp, DROSOPHILA
atggctgatccacgcattactctcggcctcggcctgctaatctttggcctgatcctctccgcggaagcctcgccacaaggtcgcattcttggcggcgaggacgttgcccagggcgagtacccctggtccgcatccgtgagatacaacaaggcccacgtctgctccggcgccatcatctcaacaaaccacatcctgaccgccgcccactgtgtgtccagcgtgggcatcaccccagtggatgccagcaccttggctgttcgcctgggcaccattaaccagtacgccggcggcagcattgtgaatgtaaagagcgtgatcatccatccatcgtacggaaacttcctgcacgacatcgccatactggagctggacgagaccctggtctttagcgatcgcatccaagacatcgcactgccccccacaactgatgaggagacggaagatgtggacgctgagctgcccaacggaactccggtctatgtggctggatggggtgaactttcggatggtactgcatcctataaacagcagaaggccaactacaatacgctgagccgatccctgtgcgaatgggaagccggatacggctacgaatccgtcgtctgcctctcgagagccgagggcgagggcatctgtcgtggggatgccggtgcggctgtcatcgatgacgacaaggtgcttcgcggtttgaccagcttcaacttcggaccctgcggcagcaagtatccggatgtggccacccgtgtctcctactacctaacctggatcgaggccaatacccagtaa

SEQ ID NO: 20517 - protein, 261 aa, DROSOPHILA
MADPRITLGLGLLIFGLILSAEASPQGRILGGEDVAQGEYPWSASVRYNKAHVCSGAIISTNHILTAAHCVSSVGITPVDASTLAVRLGTINQYAGGSIVNVKSVIIHPSYGNFLHDIAILELDETLVFSDRIQDIALPPTTDEETEDVDAELPNGTPVYVAGWGELSDGTASYKQQKANYNTLSRSLCEWEAGYGYESVVCLSRAEGEGICRGDAGAAVIDDDKVLRGLTSFNFGPCGSKYPDVATRVSYYLTWIEANTQ

SEQ ID NO: 20518 - DNA, 3073 bp, DROSOPHILA
cgcgaaatcccgaagattcaatacctacacattgttgccttgcttaacgcaatgggcggcggtgacaacgtagtccttggagattatggagccaccacaagtgtggcttccacgtcgacgtagtgagatctggtgaggaaactgaccctccctcgccttggtgccgcccacaatgcggggctccactacggaatcgttttgtgccaggactccggctgcgcaaaggacgagtagagatgtccagaatggtaacatgactggttgggcttagctaactgaaaagcagtgctcactgcaagtttcactggatgtatatatatatatatgtatatgtatgcatatatactacccaaatctaagacgctcatcatcattagttccttaaaatgtcaaagtcaatgtcgctatcgagctgctgcctaatttagtttagttaccccatttcgttcgcaaatgaagcccctctaattacaaggggtgtgcaacgcacggtggtaagagtttggaggtcaaagttggacgaaaagggttaaggaagcacgaaaatgtttaaacgaaatttgccgaaagtttcctattgcataattattgcacatttattataattattagatcttaaagtgcagatctcttcagtttcgaacagcaaaagaaggcatttaaaaaaaaggtttggttttggattttgaaaagtcttcaagtttccttatataactaattgtaggcccaaattacgtaaagcttgcctaaattgaccctaaaaccggaatgctttatcgatgactcgagttctgggctataaaagccatgccattgaggtcataaatacaataaataagcatgcttagttagcgattattacgttaaccacaagtccagtggcaatcaccgatccttatccttatcaaaatcaaactattgagtcattttgcccgctttgagtttgggaaaatagtttctattttgttagcttgtgaaggaaaaacgggatgaaacggatctaggcgatctgctcctggatccaatccgcgtagctggagagtcggacaaagacatccggatagcgggagccacaggcgcccaccacaaagttggtcagcccgatcaacgtgttgccatagatggcaccaccgcctccgtctccgtggcaggtgccctccttcagctcgtgggcgaggcagaagctctgctcgtcgtgatcgctgtacgcatccaggcaggtcgcctccggggccacctttagcgatatctgacggatcttgtaggagttggtgccgtcgctggtgcgtccccagccggccacgatcacctccgatccctcggcgggcagtgcctctccgctggcgaccagcgggatggcagtgatccgatcggtgtaggtcagctcagagctcagcgtgatcacggccaggttgttgttcagattatagtagtccggatgcactgcaaccgattccacgttgacaatcttgccaccagcatactggttggtactgcccacgcggcacgccaggcgactggcatcgattctgttggggatttcgtgagaataatctagattactttatcaagacttttgtattgaatgtattgtatataatggtttaaacaaaaagggaatacatggttattcgaggcataggccatcttcaaatatcactcattcgcctagttgtacaaaccaaactacatatttgctacttccactatttaagagcacttaatattaataatatgaatcaattaattagtagtaaaaattaattaattagtagattgactttggtactcacagctttccatcgcgatgcacacagtgggcggtggtcaggattttggtctgggagagaatgctaccgccgcacacatgggcattgtccacccgcaaggaggcggtgaaggtcgtggctgtggcgtccgcgtcctcccctcccatgatgcgtccctgggcgtggcacatgcccaccgccgtcaatccgatcagacccaaaatcactagtctcggctgcatcattttgttcctgtattttttttttggttttttatttggtggttctgctacccacggcagttggaatgaaaatgcgcaatgccagcgacgagaatataagagactagctccatataactaccacctcctccaccttctacccgaagttctccaccacttccttgaccaatccttatcttcggcttgggcatcagagaaaatctaatcttatcgccttatggcaatggctttatgccgctatagactattgttacttgttagttcaccgattaattggcacataaatagaaaattgcacaagtcggttgaagggaagtccaaataaaccaaacgaccagtgtccagtgacagtacaactacaaccatctataggagataatgatgagtaacacatgactcaggggagctacggaaattagggtgcttcaggtctcagaataatctaaaatcagtcgtggaaaactttggattttttgagttgctctttcaataaaatgtctaaacattttggtgttaattaaactctataaaattgccttgaatgtaagcaaattatcaacgtatttagtaggaattaccctttagcttggcgataacaaatctggattataaagatttagcccagtcattggcgattgatcaagctagctgcacaaaagtttggttcccaggttgattacggcgatttccttcgatctctatctaaatgttctgttaaatagccatactctctaatatatatgactccataaacaataatagccaattgttgtgaccatttacttggcaattttgttagataatccttgacggcatcccataaattagaaacaggtttcaaggtaatttcttagtaattaaagaacctttgaacggcgccaattaaatgttattctatcgattgtagctttatgaccagcactaaattccatatagtttgcatccatataaagttaaaaacacaaaacgtttttttttgtagagggagtaacacactttatgcacatgaaaaaaatgtataaaaaaataaagggtagtccttggatggcgaaccaaaagttt

SEQ ID NO: 20519 - DNA, 809 bp, DROSOPHILA
aactgccgtgggtagcagaaccaccaaataaaaaaccaaaaaaaaaatacaggaacaaaatgatgcagccgagactagtgattttgggtctgatcggattgacggcggtgggcatgtgccacgcccagggacgcatcatgggaggggaggacgcggacgccacagccacgaccttcaccgcctccttgcgggtggacaatgcccatgtgtgcggcggtagcattctctcccagaccaaaatcctgaccaccgcccactgtgtgcatcgcgatggaaagctaatcgatgccagtcgcctggcgtgccgcgtgggcagtaccaaccagtatgctggtggcaagattgtcaacgtggaatcggttgcagtgcatccggactactataatctgaacaacaacctggccgtgatcacgctgagctctgagctgacctacaccgatcggatcactgccatcccgctggtcgccagcggagaggcactgcccgccgagggatcggaggtgatcgtggccggctggggacgcaccagcgacggcaccaactcctacaagatccgtcagatatcgctaaaggtggccccggaggcgacctgcctggatgcgtacagcgatcacgacgagcagagcttctgcctcgcccacgagctgaaggagggcacctgccacggagacggaggcggtggtgccatctatggcaacacgttgatcgggctgaccaactttgtggtgggcgcctgtggctcccgctatccggatgtctttgtccgactctccagctacgcggattggatccaggagcagatcgcctag

SEQ ID NO: 20520 - protein, 248 aa, DROSOPHILA
MQPRLVILGLIGLTAVGMCHAQGRIMGGEDADATATTFTASLRVDNAHVCGGSILSQTKILTTAHCVHRDGKLIDASRLACRVGSTNQYAGGKIVNVESVAVHPDYYNLNNNLAVITLSSELTYTDRITAIPLVASGEALPAEGSEVIVAGWGRTSDGTNSYKIRQISLKVAPEATCLDAYSDHDEQSFCLAHELKEGTCHGDGGGGAIYGNTLIGLTNFVVGACGSRYPDVFVRLSSYADWIQEQIA

SEQ ID NO: 20521 - DNA, 6637 bp, DROSOPHILA
ttttatgtaccattttttacgacataattttcccaaagattccctagtaaatataccccacactttgccaacttgcacaagaatatctgaagaggaacttgagttcgttgaggtttttcgccgtgtctgaggaacttcttgccggaaactacagtgcatttcgcactgcactctgtggggaagcccaaggattggggggggggggggtctcggggttcagagcgctggtaacgcgttttaatgactcaacatttcttgactttgattcgagtcgcggaaggaaagaatgagtgcaggttgctggtcgaaaaggggttgcttctggccaaaaggcattggcccgctttttgtcggctgtcaaaataacaaagtgcttcagctgcattcccttcgccaagccagaaaaaagtgaggtagaacaaaaaaaaaagagaaaaaaaaaacagggccaaaaggcaaaaagtgtcgatgaatgttaaagttaacaagtgacggaagtgaatttacggggcgagcaaaaagagcaaagcagccgcaaaacaaaaacgagccaacgaaacggcgaacaaaaagcgaaaaccaactcgaacacgaaaaaattaaaaggcaagtaagcaaaaatcattttcacaaagtgcaggacacgaaggacctgccaaaaaaactcgaagccgaactttggatgctctatcattattgcagcaaaaatgcagttaaattgtgctcagaaattacattttatggtgaataatccactgaataaggattatattccacttatatacaatatagacataaatataaattataaaacctaaatgaaggtaatgatgtatgtgcaaaatcaatacaagtcctttgatttattataggaattttacatagtttctgctgtcaaaaccttaaataacccttcaaataacatgattaagttttaaaatcaaaagacaagtttcaagtatatatatatatggaatatataagaatgcatttgatatgaatgcgaatgttgccccgtatataagtcattaaaatgtaaaatcctctacaatctttgtgacattttcacagcatatatttaagtacatgcatgtgcgcttttccgacgaaaaacattataaggcattaaagctcggcatatattgacccaatcagatctttgacattttcgcggcttatattcatctactcaaaaatcgaaatcttatgcactttccctcgccttctctttgcagttctgcttgccgtcagttgggaggattggtggacatacgatggcatctcaggtaagcttttccgcccgatccggtccgcccccatttcaccgccttcgtttaagtttcataaataccaacaacaaagtaaattttaatcaaagctcaacaataaccacggacggaagcggaaagtaaaatttcagccaacgagcagcacgcgtcgctccagcaacaaagttggttggggcaaatgggtgggaaaattcaggggagcgcggtggtatatttttcacctgctcgagggtcgcggaaaagcgccatggcgattgccatttgttgttgttgctgctggtgtaaaacgattttctcagcgactgaagctgcacgcgtgaaatgcatggaaaagagccaaaggaaaatggttttggtaggttggttgggggaggtgggcgaacgagaaatgggaaatggtcggtgtgtggggtggaaaggggggaaaagcagagacgaagccgatttgcagctgtcaaatggaaaggcagacaaagtattcaaagaacccaggcatagaaagagagcggactttcctttcttttttttttttttctgagcaccattgtctggcgttgaaacgtgataagcagccgaccagacgagaaaagagatggcactagcagtgagcaaaagagaggggcatataaagagcagcagcagagatgggaattggagctccgaaatggaaaacagttcgccatgtgtcactactggcggcgaaatcggggcaaaggtccatggagattatgtccagacaggacagcagacagccgataagcgttgctccgtctccctcacacccagccccgcccaccgcctctgccgacgcccttgctgcattctgccttcggtggtagcatctttcttaatcttattagagacacaacggcgacgccatttgcacaagacaaatgcataaataagttcaagtgctttgaattttgaattgaatttggcgagcgggagaaaaataaatggatagcgcaagatagatcgtaagaaaatcaagcttaaagtcaagaaagccgagcacaaaaattttgtgattgaaagaaaaagtgctgatttttataaattgaaaagaattcaataccgcaaatgccaagtcaagatgcatttgaaatattttgcatagactgtggccttaattcggtctgtattaaacatcaagttacccatttctcgacgtgtaaaagcctggaaacaggggtatcttgtaacacgtgttgtcaacaaattgcaaccgaaatccgaggcgaactttgtgtctcttttggcataaataaatttacataagcattgcatgcatgtcggctggaggacttcaaatccctcgtcaggggaactacactgagtgtggctccaggggttgggtaagaggggctatagaattgccaaagagggggtgggggaggggtttggtttcgaattggcaaaaggttgcctcgaaaagacggcttagcctcagctgcagttgcagctgcaacgtgccacttgtttaacgtgatttgcactcccaacgagccaaataaaggcggccaaacggaatcaaacgaagcgtgcttcatgccatcgtctttttgcctttggcaccagccaaccaccgagctatttggcaaagaaaaaaaaaaaaaacaacgcaaaagaatgccacccacccactggggcaacaccccatgcatccagatcccggatccagtcagccaagccactaatgttgttaatggctgctaaaatcgtttggcaattgcctcattgactcgactccagaccgcaatttaatagactcgagactgcaacatcctccgcggcgttatctgaagtcttcaacttgtatccaccgattttacttatccttcttgccgcaatgctctggtgttgagcacgtgacacgagtgaagactcctccttaagttctcattgttttagtggatgtttgcggttggataattgtataaaaatattcatattgatcataaacttatttttcaagcttccaatagaaaatccattatgttcaggcattgttaaaataactttaatttagctatatcatattaaaacctaagtcctttaacaaactgtaattataattctgtaatttagcagtattttcgcatttcaacttatcttcttaagcgaatggaaaaaaaaaatgaaaattataagatcgccacgctctagagagttaattgcctaacccatttaatgcccgtagcatctccagtttttcatcaggttacgctttccactcttgggattattttcaccccgttcctcatcctttattttttatccgcttttcctttggcttttctttttggctaatgcgatggcgtcgttgaggtcaacaatcgcttaaacgcgagtacgtggcatatctatgattgaagctcctgattgcggcctcgcagcgaacgtgttgattcccatggacccccctttcctcgccgcccccgccacgcagccagccagccatccagccagccagccagccagccagccagccagccagccagccagccagtcagccagacgtacgtactacgtgtcgtatacgcaatgcgactgcaggcgaagcatttttatggatacgtcagagaatggcgagtgcacagaaggaattggtgggggaaaagtttcgaaatgtgtgccataaatgggattacaagtggctggaacggaacggactcgaatggaacgccctagaagaggttttaataattggttgatccttgagcaagcaagcgaaaaacaagggtagaatgaaaggataagcgaggaatataaataaaaagcataaactcaattaaggcactgcagccgtaactttatgatattaaatgaaatgaaacacctggcagtaggttatatttaacagcatggattaaaacttgttagactgcagcagaaaacaagcagtgaaatgcataacaaaacatacaaaatatccaattgcaagaatttagaacaacagattcgactcgtttcgtttcgtggaagatttaaggtattcacacccaaaactccaaatgaaacactttcaattgctgaatatacaaggatcatagattatatcaactcaacaatagcaacaaactgaccaaaccgactgacttgccctgggaacaactggcaataaaaaaagctggcctattgttttttcggattcagctcggcttgatttcatattgccataaattaagctgcccgagctgccagataaagttggtcaaagccaggagcaagggagatagcagcacatagacgagggagacgccagataaagctgcaattttactgttacactgggtggtggtggtggtggtggtggttataaaaatgggactggtgattggggggggggggggaggaaaaactaagtaaaccgcacgaaattaaacaagtcagggggctttttgggcagcagggctagatggcttagttgtgtggccagaatcaaacagacgcaaaaccaaccagaaaaagagaaaaatgaacaaaaaccaaaaccaacgcaggccaacacctatgcagatgcagacaaatattgtaatggcctctggcccccatgactttttttgcctcacacccccctttgccatttgccattatgcaatttgtggcaggtttttgcagcacaacccacaattgtggtcggcaaggaaactttggaaacagtttgaggcgaactgggttcataaatctccttgccaccaccgcccgtttttgggcatggatcgattggatggactgtccaataaagcatgctcactcttcgtttcaggacctgccttttggggcctcatcaatccggagtggtcgctctgcaacaagggtcgtcgccaatcgccggtcaatctggaaccccaacgcctgctatttgatcccaacttgaggcccatgcacatagacaagcacagggtgagtccgaaatgcccgctggggaatgaaaacgaacatttaagattatattatatatgtttttctcggataatatgtatacccttgcattgcattgttcttatttgatgaaaaaatttatttctaatttttattttctccagatatccggattgatcactaatacgggccacagcgtcatctttacggccggcaatgatacggtggccaactacgacggtatgcagacgccagtgaatatatcgggcggaccgttgtcgtatcgctaccgtttccacgagatccacatgcactacggattgaacgaccaatttggatcggagcacagtgtcgagggctatacgttcccggcggaggtgagatacatatacccatgtctatctacttatgctgtttttgccactcgtgtcactctcaatttccggtgcagggtgaggcctaaatttagcatgggacactttgacacttgcttgggctcaaggcctccaatggattctatttcggttcttttgcctgtcaacagatttccctctttaacaattcaattgtgtctgtttcggttgccgcctcctgtgttccttctgggcaatggtatgccaaggagtgtggggggggggggggagtttctcaacttttcttgcgtcatttcaatgccatcctaccgtcctgccatccattgtggcccactgcgccactggctgtaaacttgttagcccgcccgctcaaatattaacacagataaacgagcggaagtgtatttgatcagcatttaatgcagcaaatgtcgatttgtcgctgacaaaaaacaaaaaagcttagaaaaaaaaatgaaacataagatggggggcaaataaaataaataacaaagtcaaaaaagccaagagctcgacgtctttgtctgctgttctcgacgacgttatcatcaacgcaacgacgtcgtcgccaggttcaacatgttggaaactcgccccacttgtctgccgctttgatttgaagccccagcctctgcttttccacttttccactttgccgcccccccccgcggacgcgtcattcacacttttgcgaggcggaatttccacaaaggtagctcagctcaggttacctatttgtttaaatagaaacgttgcttgatttgacagcgttatgcacaaacatttttttaagttaaaaaatcaatatattaaaaatcgatgcttaatagataatatatataatcattgaaaacgtattgagtacatgacgaaaacggtgaaatatttcaaaggtaacgagagtgaacgatttgcatgagcgcgtttttcctggcttttcacagcctgctcctgatggctgatgattttgtattgttttatttgtacattgtttttctggaaagcaggagggacatatttatatgtcatatggcaggcgttgttccgactcacagacaccttgtctgc

SEQ ID NO: 20522 - DNA, 429 bp, DROSOPHILA
atgcgaatgttgccccttctgcttgccgtcagttgggaggattggtggacatacgatggcatctcaggacctgccttttggggcctcatcaatccggagtggtcgctctgcaacaagggtcgtcgccaatcgccggtcaatctggaaccccaacgcctgctatttgatcccaacttgaggcccatgcacatagacaagcacaggatatccggattgatcactaatacgggccacagcgtcatctttacggccggcaatgatacggtggccaactacgacggtatgcagacgccagtgaatatatcgggcggaccgttgtcgtatcgctaccgtttccacgagatccacatgcactacggattgaacgaccaatttggatcggagcacagtgtcgagggctatacgttcccggcggagggtgaggcctaa

SEQ ID NO: 20523 - protein, 142 aa, DROSOPHILA
MRMLPLLLAVSWEDWWTYDGISGPAFWGLINPEWSLCNKGRRQSPVNLEPQRLLFDPNLRPMHIDKHRISGLITNTGHSVIFTAGNDTVANYDGMQTPVNISGGPLSYRYRFHEIHMHYGLNDQFGSEHSVEGYTFPAEGEA

SEQ ID NO: 20524 - DNA, 3255 bp, DROSOPHILA
ttgcattgactgacagattgatggactgattgatggtgcggcagattgacagccagccggttggacaaactgaacaaatcgtgccaggtttacgtggggtattacattgggataccgaaacccatggaggcacgccacgatccccagcgatccgataattgcgccccgaaaagagagcgaaggaaaacaaagaggcggtggaaaactgaggctgtggaaactgtggaaaagtaaataaaaagtgcgagaccagttaaatgaaaagcaaaacaaagtcattaaacgccgagtgcatggaaaaaaaaagaagtcagcaaagctgaaaactgaaaaccgaaaaccgaaaaaaagcggaaaattaccgagcaataatagaaagagttgggtgagtttcggagctgattttcattttcactttcactggccggcggggaaatgcggggaaaagcggggaaaagcgggaaaaagcggggaaaagttgcgctctgataaattgccaagcggccaaaatgggaagccaccaagtcaccaatccaccaagtgggttctaaaaagcggtcacaatccgctggctcgcaaatgagtcatgtagagatgaccccaaaaaaaaagggggatcaactacatacctcattagatcaactacctaccatatggatttaaatcgcacaaaaatgatacaaaagcataatatcataatatagatatttacaattggggtcagtaactttgaagttgaatcttaaactaatatttaattcttttattggcatataaaaggaaaaagggttgttattttatagaatagactttgaaattcctttgctgtgctgataatattttatatttattattgaagtgcgttttacaacatagtaatctgctatgttgctaaaaataatgtgaaataatatatataagttaaatagaaaaccgtttttccatgggaattttccgtgatatctttgcgtgatttccggacctcgttttttttttgtttttacaaactggccttctcggcgatccaattcctcagtttggagaccctttcgtagccatcgggcgcagctcgtccgcagccaccgatgacgaaactggccaagccgaccagtttgccctggtaggtggccggaccaccggaatccccgtagcaggcacccttatccttgggatgcagcaggcacatcgtggtttccggcagctggcgtaagtacgtcttctggcaagattcccgggatagggccttcacctgcacgtagagcagggagttggagatcggtccgcgctgggagatggcgccccagccggagatgtccacggtggcatcgttgggcggatcttcggtggccagcttgatggcggctatgttggagttaaaggtcagcgagttgcgaagtcgcagcacggcgacatcgtggccattggagttgtaattgggatgcacggtgacggtggccactggaacgcgaactcctccgctggaaaggagcaggctgcccgcctgaatctccagctcattagctggagctctaagggcaagcactctgattgagaaacgcgaaatcccgaagattcaatacctacacattgttgccttgcttaacgcaatgggcggcggtgacaacgtagtccttggagattatggagccaccacaagtgtggcttccacgtcgacgtagtgagatctggtgaggaaactgaccctccctcgccttggtgccgcccacaatgcggggctccactacggaatcgttttgtgccaggactccggctgcgcaaaggacgagtagagatgtccagaatggtaacatgactggttgggcttagctaactgaaaagcagtgctcactgcaagtttcactggatgtatatatatatatatgtatatgtatgcatatatactacccaaatctaagacgctcatcatcattagttccttaaaatgtcaaagtcaatgtcgctatcgagctgctgcctaatttagtttagttaccccatttcgttcgcaaatgaagcccctctaattacaaggggtgtgcaacgcacggtggtaagagtttggaggtcaaagttggacgaaaagggttaaggaagcacgaaaatgtttaaacgaaatttgccgaaagtttcctattgcataattattgcacatttattataattattagatcttaaagtgcagatctcttcagtttcgaacagcaaaagaaggcatttaaaaaaaaggtttggttttggattttgaaaagtcttcaagtttccttatataactaattgtaggcccaaattacgtaaagcttgcctaaattgaccctaaaaccggaatgctttatcgatgactcgagttctgggctataaaagccatgccattgaggtcataaatacaataaataagcatgcttagttagcgattattacgttaaccacaagtccagtggcaatcaccgatccttatccttatcaaaatcaaactattgagtcattttgcccgctttgagtttgggaaaatagtttctattttgttagcttgtgaaggaaaaacgggatgaaacggatctaggcgatctgctcctggatccaatccgcgtagctggagagtcggacaaagacatccggatagcgggagccacaggcgcccaccacaaagttggtcagcccgatcaacgtgttgccatagatggcaccaccgcctccgtctccgtggcaggtgccctccttcagctcgtgggcgaggcagaagctctgctcgtcgtgatcgctgtacgcatccaggcaggtcgcctccggggccacctttagcgatatctgacggatcttgtaggagttggtgccgtcgctggtgcgtccccagccggccacgatcacctccgatccctcggcgggcagtgcctctccgctggcgaccagcgggatggcagtgatccgatcggtgtaggtcagctcagagctcagcgtgatcacggccaggttgttgttcagattatagtagtccggatgcactgcaaccgattccacgttgacaatcttgccaccagcatactggttggtactgcccacgcggcacgccaggcgactggcatcgattctgttggggatttcgtgagaataatctagattactttatcaagacttttgtattgaatgtattgtatataatggtttaaacaaaaagggaatacatggttattcgaggcataggccatcttcaaatatcactcattcgcctagttgtacaaaccaaactacatatttgct

SEQ ID NO: 20525 - DNA, 1200 bp, DROSOPHILA
tgaagacttttcaaaatccaaaaccaaaccttttttttaaatgccttcttttgctgttcgaaactgaagagatctgcactttaagatctaataattataataaatgtgcaataattatgcaataggaaactttcggcaaatttcgtttaaacattttcgtgcttccttaacccttttcgtccaactttgacctccaaactcttaccaccgtgcgttgcacaccccttgtaattagaggggcttcatttgcgaacgaaatggggtaactaaactaaattaggcagcagctcgatagcgacattgactttgacattttaaggaactaatgatgatgagcgtcttagatttgggtagtatatatgcatacatatacatatatatatatatacatccagtgaaacttgcagtgagcactgcttttcagttagctaagcccaaccagtcatgttaccattctggacatctctactcgtcctttgcgcagccggagtcctggcacaaaacgattccgtagtggagccccgcattgtgggcggcaccaaggcgagggagggtcagtttcctcaccagatctcactacgtcgacgtggaagccacacttgtggtggctccataatctccaaggactacgttgtcaccgccgcccattgcgttaagcaaggcaacaatgtagctccagctaatgagctggagattcaggcgggcagcctgctcctttccagcggaggagttcgcgttccagtggccaccgtcaccgtgcatcccaattacaactccaatggccacgatgtcgccgtgctgcgacttcgcaactcgctgacctttaactccaacatagccgccatcaagctggccaccgaagatccgcccaacgatgccaccgtggacatctccggctggggcgccatctcccagcgcggaccgatctccaactccctgctctacgtgcaggtgaaggccctatcccgggaatcttgccagaagacgtacttacgccagctgccggaaaccacgatgtgcctgctgcatcccaaggataagggtgcctgctacggggattccggtggtccggccacctaccagggcaaactggtcggcttggccagtttcgtcatcggtggctgcggacgagctgcgcccgatggctacgaaagggtctccaaactgaggaattggatcgccgagaaggccagtttgtaa

SEQ ID NO: 20526 - protein, 251 aa, DROSOPHILA
MLPFWTSLLVLCAAGVLAQNDSVVEPRIVGGTKAREGQFPHQISLRRRGSHTCGGSIISKDYVVTAAHCVKQGNNVAPANELEIQAGSLLLSSGGVRVPVATVTVHPNYNSNGHDVAVLRLRNSLTFNSNIAAIKLATEDPPNDATVDISGWGAISQRGPISNSLLYVQVKALSRESCQKTYLRQLPETTMCLLHPKDKGACYGDSGGPATYQGKLVGLASFVIGGCGRAAPDGYERVSKLRNWIAEKASL

SEQ ID NO: 20527 - DNA, 3736 bp, DROSOPHILA
ttttttcaatgttgttttagcttgagttgcctaatctatgcaaacgaaatatatgaagtgaaaattgatatgctgatctccaccatcctatatacaatccataaatcgtatatacagaaagagaaatgtattaaactcggccaatatcgaaacgcattttttagatgttgtttttgtgttttgaactgcattcgaccgttgaccgcaaatgtacctaagtggctattgttaaaacaaatctgctctttggcagttgaatgtgcgaatacaaagaattacacaatttatacaaaacatatttaacccaaatgtatacccttatacagacatctctatataaatatatttatgtgcaagtatttgatgaaataaatattcaaattattaaaaagcatttctccgatgagttgatatttgtgttttgaatttggcatgggaaatatatttattaatagcttgaaaagagaggcaacgtctttttgaaattaaaaacctttgttatatgtataccttgtaatttaaaattattggtattttacgtaaagcgtataactttaaaggaatgagaaaccattgtaatgtagaaaatatttaataatatttctttaaattcattgtatggtaacttatgtagttaccgctttatttaattactaagtacaatatcttgttgttttatgccgtaagcttgttacgagcggagctgaagttccagtgtgtccagtctgacgataagaagacagaagatatcgtcctccaggaaaggtcttggcgttagtacctcttttcgccgtgatgccagaccgggtttcagtctgggcgccacaattgaaataataattttttattgctataatagccatgctaagataatagaaattttgaaaattgagtattttttgaaagttgtttcaatgacttaattttattttaaataaatgcgccactttgaaagcttgaaaaaaatacggcttcagggtcatggtatttaatgtcgtggaaataccacactctggtaactctgagcgggcgtcactcttttcgtctctgggcacactgtcggccctcgcacgcgtatttttctgccgattttgcgtgtaaatttaattgtgaaaacatagtaaaacagctgcaatcatggccaatttcgatctgacacgcatcaattgccagtttttggacaggcatttgaccttcccgctgctggagttcttgtgcggcaaggaggttagaaaagcgaccaggcggtgctccgctggcggttgccgagtcaccagtacataactatgggaaatcttcatatgtgtgactttcgttgcagatctacaaccagcaggagctgctggagtacattttggagacggtgaacaagacgaacatgatcgattacacgatggacacccgcaagcgtctcaatctcagccaggagatgcccgaggagctcgtgcagcgcaaggcggaggtcctggccacgcttaagcagctgcagaacgaggtggcacccatcatgaaggccaccgacattcttaagaacggtgagagcatgaaggactcgaagaccttcgtcaacgcccttcagaaggactacaattttaaggtggagcacctggagagcgcctacaagctggccaagtacctctacgagtgcggcaactatcaggagtccacctcttacctgtacttctgcctcatcgtcatgtcgcccaacgacaaggtgcgtatggagctaaattaacatgaaaagcggcaaaaaccactaaaacaagaatattaattgatattgtctcccaaattttgcagaactaccttaatgtgctgtggggcaagctggccgccgagattctgaccctcaactggaacactgctctggaggatctgacgcgtttgcgcgactacattgacaacgccaacttcagcaccatccaggccctgcagcaacgcacctggctgatccactggtcggtcctggtcttcttcaatcaccccaagggacgcgatctcattattgagatgttcctgtacaagcccctgtatttgaacgccattcagacaatgtgtccgcacatcatgcgttacttggccaccgccgtagtcatcaaccgcacccgccgcaatgctctaaaggatttgatcaaggtgatccaacaggagtcgtacacgtaccgcgatcccatcaccgagtttctggagtgtctgtacgtgaactttgatttcgagggagcgcgtctgaagctgcacgagtgccagacggtgatcctcaacgacttcttcatcgtggcctgcctgaatgagttcgtggaggatgcccgcttgatgatcttcgagacattctgccgcatccaccagtgcatcaccatcagcatgctggccgataagctgaacatgaagcccaacgaggctgagtgctggatcgtcaaccttatccgcaatgcccgtctgaatgccaagatcgattcgaaactgggtcatgtggtgatgggcacccagcccttgagtccctatcagcagctggtggagaagatcgactcgctgtccatgcggtcggagcatttggcaggtttgattgagcgcaagagcaagcagaagcagaatcaggagtcggccgactcctggaagtactactagttgctgactttttatccacaattaagttaagactctttgtaccctttaaaaaccgatgattgcgcgcagtcgagcgaataaattaacatcttactcattcgctcaattcaacatttgattttatttccttcggaatcaaaattagttatacaaaaaacaataccaaggcgggaatttgtaatttcgctagcctacagaatgcaaacgtctgctaatcctagaattagttgtttgtacctacaagtgggtgctggatctttatgacgatctggccccggatcacactattgattgctaccgcgatttctgcttgaccaccaaccaggatctgacgggcaggtcctgcaagtaaacgatccatttgcgcaccagcagcagccacactatgccgtacagaacgcaaatgcccgactccaagtagtacccatcgaaggttatctcgcacttgccagccgacgcttcacagctctgcgggagaaaattaagaaaaatatttgtttagttacttttatctcataactggcaaagtttatcttttcctggtttggggtaaaactttcaccatacatatgtatccatatacaataataataataatcttgtatgctgtagaatctctctctgagcactcacctgttgctcctccttgccctggcaggtattttccgcattattggagcactgcttccaggtgagcacgtccaccaaccacaacaccactgtgttgggccaattaccgcccagattgcacaatgtgttcaaaaatgtcatgtaagtgccaccgacggctggatcggagatcttggcgaaaaaggccatggcggccacaaacatggagtacaggaatacttggtagatggcataactggtgatcagcaggacgtagtaataagcaggcacggctcctccacggacaatatagggtgtgatgtaggccaagccagtggccactgttgccatgatgatgcgatagggaatggccttcagatagacgtccatcggacgtggtccgttcgtatatcgaccgaccgccagcggcagaatgagctgcagaggaattaggggaatggcgagtaaagccagcttatccttcggtacaccagcgtcaatg

SEQ ID NO: 20528 - DNA, 1556 bp, DROSOPHILA
aaataccacactctggtaactctgagcgggcgtcactcttttcgtctctgggcacactgtcggccctcgcacgcgtatttttctgccgattttgcgtgtaaatttaattgtgaaaacatagtaaaacagctgcaatcatggccaatttcgatctgacacgcatcaattgccagtttttggacaggcatttgaccttcccgctgctggagttcttgtgcggcaaggagatctacaaccagcaggagctgctggagtacattttggagacggtgaacaagacgaacatgatcgattacacgatggacacccgcaagcgtctcaatctcagccaggagatgcccgaggagctcgtgcagcgcaaggcggaggtcctggccacgcttaagcagctgcagaacgaggtggcacccatcatgaaggccaccgacattcttaagaacggtgagagcatgaaggactcgaagaccttcgtcaacgcccttcagaaggactacaattttaaggtggagcacctggagagcgcctacaagctggccaagtacctctacgagtgcggcaactatcaggagtccacctcttacctgtacttctgcctcatcgtcatgtcgcccaacgacaagaactaccttaatgtgctgtggggcaagctggccgccgagattctgaccctcaactggaacactgctctggaggatctgacgcgtttgcgcgactacattgacaacgccaacttcagcaccatccaggccctgcagcaacgcacctggctgatccactggtcggtcctggtcttcttcaatcaccccaagggacgcgatctcattattgagatgttcctgtacaagcccctgtatttgaacgccattcagacaatgtgtccgcacatcatgcgttacttggccaccgccgtagtcatcaaccgcacccgccgcaatgctctaaaggatttgatcaaggtgatccaacaggagtcgtacacgtaccgcgatcccatcaccgagtttctggagtgtctgtacgtgaactttgatttcgagggagcgcgtctgaagctgcacgagtgccagacggtgatcctcaacgacttcttcatcgtggcctgcctgaatgagttcgtggaggatgcccgcttgatgatcttcgagacattctgccgcatccaccagtgcatcaccatcagcatgctggccgataagctgaacatgaagcccaacgaggctgagtgctggatcgtcaaccttatccgcaatgcccgtctgaatgccaagatcgattcgaaactgggtcatgtggtgatgggcacccagcccttgagtccctatcagcagctggtggagaagatcgactcgctgtccatgcggtcggagcatttggcaggtttgattgagcgcaagagcaagcagaagcagaatcaggagtcggccgactcctggaagtactactagttgctgactttttatccacaattaagttaagactctttgtaccctttaaaaaccgatgattgcgcgcagtcgagcgaataaattaacatcttactcattcgctcaattcaa

SEQ ID NO: 20529 - protein, 435 aa, DROSOPHILA
MANFDLTRINCQFLDRHLTFPLLEFLCGKEIYNQQELLEYILETVNKTNMIDYTMDTRKRLNLSQEMPEELVQRKAEVLATLKQLQNEVAPIMKATDILKNGESMKDSKTFVNALQKDYNFKVEHLESAYKLAKYLYECGNYQESTSYLYFCLIVMSPNDKNYLNVLWGKLAAEILTLNWNTALEDLTRLRDYIDNANFSTIQALQQRTWLIHWSVLVFFNHPKGRDLIIEMFLYKPLYLNAIQTMCPHIMRYLATAVVINRTRRNALKDLIKVIQQESYTYRDPITEFLECLYVNFDFEGARLKLHECQTVILNDFFIVACLNEFVEDARLMIFETFCRIHQCITISMLADKLNMKPNEAECWIVNLIRNARLNAKIDSKLGHVVMGTQPLSPYQQLVEKIDSLSMRSEHLAGLIERKSKQKQNQESADSWKYY

SEQ ID NO: 20530 - DNA, 4292 bp, DROSOPHILA
cgtcggcatgattaatggtcgcattaaaaaatacaaatttacggacggaaatagcaataagaagttttaagtgtagccgcaaacaaatgacagtattgccaacagtaagactgttcggaaataattaaaaaatctcgtcaaaaatgtcatttctatagaaatatttatattatttttagtggagcatgtaaaaaccctctaaacctgttcggagtacgttcataaacatttatcgtatctgatgcttaattttgcatccgacgttcacgtgggtacaatctctgggtcaattatgaatcaccggctggcataaaaatccccaaagaaacccatgaagttggcggcattctgtatacgcatcaacgcatttcgtaagtacatacatatatatacatatatatctaagggaaactacaaagcccatcgaaaacaggaatatgaactaatattgttttcatttccgttgtcaattgttctgcttgcggttaggggaatattgttaattattcaaaaaaactggaatataactgtgtgcataattaataagatgggatgacaatacgaagacaatttataaacaacccacttaaaatatttcttccctagctaatattatctgatctgtacattttgtacatgcaataaattttgacacataaaagtaattaagaggaattaagtcctcacatgcttagtgcgaggtttggttctataatttatctgttaattgcgctgttatgttactattactgcattgtatggattcatcgcttctaaataaataaataaataacaaaaaaaatgaagagggattatatgctaatttgcatttaattatttgaagccgaaaaacttttacatacaatatatcacatttttaaataaacgcgccaaagtacaaagggtcacaccgcgcgataggcatacacttcttaatatcgaagtgccacagagcccgatatcgataatatgtttttgtaaaacgtaaacaaagcagccgcaacacgtgcatttcattctctctcgtttagtttaataaaaaccgtgtagataatggaattatttactgttaacaggtaactaaacttgtgtttattacctacagtcattttaaatcaattacaccccagatataccgaggatttgaaagaacaaaaagatggggcccaaggcaccaacaacgaggatgaaatactgcaaaaattgcttaagaaggctgcaaaacgcaaaaggaaacatgaagccatagaagttgtagaaacaccaatcctggaaaaagaaacctcagatgtgaaggagtcggaatccaaggaggagcaggtggaagaaccagaaaagcccctagaagttgtccaagaggaagatgttccgtctaatgagtttcaagttcttggaggcgatgattcggcggccaagaagaagaaagtgcagatgcagctgcccaattggctggcacatccaaccatcattgaaggtggaagcctgcagccggaggaggaagtgcccgcctccgaggcaattgaccagctcgattacctggagaagtacacatgtcaagctctcaagcagatgaagattaagcggctttttccagtccaaaagcaggtcatcccatggatcctggaggcacacgctaagcctcctccctttcgtccccgagatatttgtgtatctgctcctacaggcagtggaaaaaccttggcctttgccataccaattgtccagttgctatcgcagcgggtggattgtaaagtaagggctttagtcgtccttcctgtggcagagctggccctacaggtttatcgggtcatcagtgagttgtgcagcaaaacggagctggaggtttgccttctatccaagcagcacaaactagaggatgagcaggagaagctggtggagcaatacaaaggcaaatactactccaaggcagacattgtggtgaccacaccaggtgagttaaacaaaccgagagaagtcttgtagtttcattatgtatgtaattttcttacaggccgcttggttgaccatttgcacgccacgaaagggttctgcctgaagagcctaaaatttctggtcattgacgaggccgatcgaataatggatgcagttttccaaaactggctttatcatctggacagtcatgtaaaggaaaccaccgaccagctgctggccggcactcaagcacctctatgctatgcagaacttcaagccagctttggcaagcaaccacataagctcctgttctcggcgacattgtctcaagatcccgagaagctgcaggatctacgactctttcagcctcgtctgttcgccaccgtacttaccatgcccgtgttgaaggacgcaacggaagaaggtgctgataccgaagcgcttacagatccaggacaatttgtgggcagatacacaacgccggcggagttaaccgagcagtactgtgtgacggagctgcgacttaaacccctcactgtttttgccttggtggaaaagtacaaatggaagcgattcttgtgcttcaccaacagttcggatcaggcaactcgactaacattcgtgctgaaagtgctatttcaaaagtatagcaccaaagtgtctgaattgtcgggaaatctctcggctaaggttcgaaatgaacgactaagggactttgctgctgggaaaatcaatggactgatctgctcagatgcactggcgcgtggtatcgatgtggcagacgtggatgttgtgctctcatatgagacacctcgccatatcacgacatacattcatcgagtgggccgaacggctcgagcgggaagaaagggcaccgccgtcaccgtgctcacggaacaagatatgactttattcaaaaaaatactaagcgatgcgaacaagggattgggtgaggaaatccacgtttctccagatattgagattcaacatgcagttgaatacaaagaggctttagccggcctgcgctcggaaaaggtgaagaacaagaaccaaaagatggccgagaagaatcgtgtggccaccaaggcattgatccacaagaaacaggaggaaacggccacagttcgtccactgacgttgatggaaaagttgcaaatcaaagcgaatgaaatcgtgcaatcatcaaagaaatcctccgaaacgaaaaattccaagaccaaggcagacaaaacaaaataccagccaaaggaaaccaagaagcaaatcattgccaaacaacttaaggccatcgagaactaaaatgtgggggattaatatgatgttttattaagtttactcaaatataataatgtaaaaagtgtttgtctatagcttcgacgtgtgtatgaggtctccgggagcagcttcttatctcgggggcgcaagtgaatccccagcaggttctttaccgcacccggtgtatgtataccctgggtatttagatgctgtgatgtgtatgagaattgagataagtctatttagaaatagtcatacacctaattcaaaaatattaagcatattaagcagaaagtcggaatttcttttacctcttctttagaaactttcttttcattctttcatagttagaattttcctattactatgatactgtgcaaaacaaaaaatgctttctctgggttttgtacataggatttaaatacgatttgtataatataatttgattttgaacgattgttcgatcgagttcaattcataaagaggaaaaccagttttgaggggtatttaacgcttcgtttcccgtaaaaaatgaaacttttctatataaacacagccgtagcggaagaatttaatagaatcttgaatcttgcaaagatgaacacatcaacggcaattagttttgtggccgctttagtgctttgctgcttaggtaatcaatcagagtgtgctcaaaccccaaacgggctaataggctaatcaagttctcttccccatcagctctatccgccaatgccctgcagattgaaccacgcagcagttggggtgcggtgtctgctcgatcgccttctaggatttccggcgccgtcgactatgtgatcatccatcattcggacaatcctaatggctgctccacatccgagcagtgcaagcgcatgatcaagaacattcagtcggatcacaagggtcgccgcaatttcagcgatattggatataactttatcgtggccggtgatggcaaggtgtacgagggtcgtggtttcgggctccagggatcacactcccccaactataatcgcaagagcattggcatcgtcttcattggcaacttcgaacgcagtgccccatccgcccagatgctccag

SEQ ID NO: 20531 - DNA, 2178 bp, DROSOPHILA
caacacgtgcatttcattctctctcgtttagtttaataaaaaccgtgtagataatggaattatttactgttaacagatataccgaggatttgaaagaacaaaaagatggggcccaaggcaccaacaacgaggatgaaatactgcaaaaattgcttaagaaggctgcaaaacgcaaaaggaaacatgaagccatagaagttgtagaaacaccaatcctggaaaaagaaacctcagatgtgaaggagtcggaatccaaggaggagcaggtggaagaaccagaaaagcccctagaagttgtccaagaggaagatgttccgtctaatgagtttcaagttcttggaggcgatgattcggcggccaagaagaagaaagtgcagatgcagctgcccaattggctggcacatccaaccatcattgaaggtggaagcctgcagccggaggaggaagtgcccgcctccgaggcaattgaccagctcgattacctggagaagtacacatgtcaagctctcaagcagatgaagattaagcggctttttccagtccaaaagcaggtcatcccatggatcctggaggcacacgctaagcctcctccctttcgtccccgagatatttgtgtatctgctcctacaggcagtggaaaaaccttggcctttgccataccaattgtccagttgctatcgcagcgggtggattgtaaagtaagggctttagtcgtccttcctgtggcagagctggccctacaggtttatcgggtcatcagtgagttgtgcagcaaaacggagctggaggtttgccttctatccaagcagcacaaactagaggatgagcaggagaagctggtggagcaatacaaaggcaaatactactccaaggcagacattgtggtgaccacaccaggccgcttggttgaccatttgcacgccacgaaagggttctgcctgaagagcctaaaatttctggtcattgacgaggccgatcgaataatggatgcagttttccaaaactggctttatcatctggacagtcatgtaaaggaaaccaccgaccagctgctggccggcactcaagcacctctatgctatgcagaacttcaagccagctttggcaagcaaccacataagctcctgttctcggcgacattgtctcaagatcccgagaagctgcaggatctacgactctttcagcctcgtctgttcgccaccgtacttaccatgcccgtgttgaaggacgcaacggaagaaggtgctgataccgaagcgcttacagatccaggacaatttgtgggcagatacacaacgccggcggagttaaccgagcagtactgtgtgacggagctgcgacttaaacccctcactgtttttgccttggtggaaaagtacaaatggaagcgattcttgtgcttcaccaacagttcggatcaggcaactcgactaacattcgtgctgaaagtgctatttcaaaagtatagcaccaaagtgtctgaattgtcgggaaatctctcggctaaggttcgaaatgaacgactaagggactttgctgctgggaaaatcaatggactgatctgctcagatgcactggcgcgtggtatcgatgtggcagacgtggatgttgtgctctcatatgagacacctcgccatatcacgacatacattcatcgagtgggccgaacggctcgagcgggaagaaagggcaccgccgtcaccgtgctcacggaacaagatatgactttattcaaaaaaatactaagcgatgcgaacaagggattgggtgaggaaatccacgtttctccagatattgagattcaacatgcagttgaatacaaagaggctttagccggcctgcgctcggaaaaggtgaagaacaagaaccaaaagatggccgagaagaatcgtgtggccaccaaggcattgatccacaagaaacaggaggaaacggccacagttcgtccactgacgttgatggaaaagttgcaaatcaaagcgaatgaaatcgtgcaatcatcaaagaaatcctccgaaacgaaaaattccaagaccaaggcagacaaaacaaaataccagccaaaggaaaccaagaagcaaatcattgccaaacaacttaaggccatcgagaactaaaatgtgggggattaatatgatgttttattaagtttactcaaatataataatgtaaaaagtg

SEQ ID NO: 20532 - protein, 687 aa, DROSOPHILA
MELFTVNRYTEDLKEQKDGAQGTNNEDEILQKLLKKAAKRKRKHEAIEVVETPILEKETSDVKESESKEEQVEEPEKPLEVVQEEDVPSNEFQVLGGDDSAAKKKKVQMQLPNWLAHPTIIEGGSLQPEEEVPASEAIDQLDYLEKYTCQALKQMKIKRLFPVQKQVIPWILEAHAKPPPFRPRDICVSAPTGSGKTLAFAIPIVQLLSQRVDCKVRALVVLPVAELALQVYRVISELCSKTELEVCLLSKQHKLEDEQEKLVEQYKGKYYSKADIVVTTPGRLVDHLHATKGFCLKSLKFLVIDEADRIMDAVFQNWLYHLDSHVKETTDQLLAGTQAPLCYAELQASFGKQPHKLLFSATLSQDPEKLQDLRLFQPRLFATVLTMPVLKDATEEGADTEALTDPGQFVGRYTTPAELTEQYCVTELRLKPLTVFALVEKYKWKRFLCFTNSSDQATRLTFVLKVLFQKYSTKVSELSGNLSAKVRNERLRDFAAGKINGLICSDALARGIDVADVDVVLSYETPRHITTYIHRVGRTARAGRKGTAVTVLTEQDMTLFKKILSDANKGLGEEIHVSPDIEIQHAVEYKEALAGLRSEKVKNKNQKMAEKNRVATKALIHKKQEETATVRPLTLMEKLQIKANEIVQSSKKSSETKNSKTKADKTKYQPKETKKQIIAKQLKAIEN

SEQ ID NO: 20533 - DNA, 2641 bp, DROSOPHILA
caccgccgtcaccgtgctcacggaacaagatatgactttattcaaaaaaatactaagcgatgcgaacaagggattgggtgaggaaatccacgtttctccagatattgagattcaacatgcagttgaatacaaagaggctttagccggcctgcgctcggaaaaggtgaagaacaagaaccaaaagatggccgagaagaatcgtgtggccaccaaggcattgatccacaagaaacaggaggaaacggccacagttcgtccactgacgttgatggaaaagttgcaaatcaaagcgaatgaaatcgtgcaatcatcaaagaaatcctccgaaacgaaaaattccaagaccaaggcagacaaaacaaaataccagccaaaggaaaccaagaagcaaatcattgccaaacaacttaaggccatcgagaactaaaatgtgggggattaatatgatgttttattaagtttactcaaatataataatgtaaaaagtgtttgtctatagcttcgacgtgtgtatgaggtctccgggagcagcttcttatctcgggggcgcaagtgaatccccagcaggttctttaccgcacccggtgtatgtataccctgggtatttagatgctgtgatgtgtatgagaattgagataagtctatttagaaatagtcatacacctaattcaaaaatattaagcatattaagcagaaagtcggaatttcttttacctcttctttagaaactttcttttcattctttcatagttagaattttcctattactatgatactgtgcaaaacaaaaaatgctttctctgggttttgtacataggatttaaatacgatttgtataatataatttgattttgaacgattgttcgatcgagttcaattcataaagaggaaaaccagttttgaggggtatttaacgcttcgtttcccgtaaaaaatgaaacttttctatataaacacagccgtagcggaagaatttaatagaatcttgaatcttgcaaagatgaacacatcaacggcaattagttttgtggccgctttagtgctttgctgcttaggtaatcaatcagagtgtgctcaaaccccaaacgggctaataggctaatcaagttctcttccccatcagctctatccgccaatgccctgcagattgaaccacgcagcagttggggtgcggtgtctgctcgatcgccttctaggatttccggcgccgtcgactatgtgatcatccatcattcggacaatcctaatggctgctccacatccgagcagtgcaagcgcatgatcaagaacattcagtcggatcacaagggtcgccgcaatttcagcgatattggatataactttatcgtggccggtgatggcaaggtgtacgagggtcgtggtttcgggctccagggatcacactcccccaactataatcgcaagagcattggcatcgtcttcattggcaacttcgaacgcagtgccccatccgcccagatgctccagaacgccaaggatctaatcgagctggccaagcagcgtggatacctcaaggataactacacgctgttcggtcatcggcagaccaaggccacctcctgcccaggtgatgctctgtacaacgagatcaagacgtggccgcactggaggcaaaactagaaagcaaagttacatatcttaagtaaaataaacttttaaaaattaatgacatttgtctaaaaaatgtgtttatttggtaaaatgtacaattatttacatcaatttagctacagagaatgggtttcaagatatatttatgttagggtctccatctttcatcaacactcgaatgattcatatggaaacctaaggctttggtcgccaatttggccactttttgagctcgttgagaaggtgtattcccggacaagcagtggccttcgtttggcaatgacccaccacggaatagttgggcgaaacctggcgacgctgcacagcgatttggatgagggttcgggcagcctggagcatctgcgaaggaggtaatccagctgaaatacagacatagtattaaagaaaatgacacagggtaattgaatgggatgacttactctggaagttgccaatgaaagcaatgccaatggactggctgttatagcggggagcatgctcgccacggatgccgaaacccaagccctcgtagattcgaccatccccgccgatcaggaaattatagccaatatccctgaactttctgcgcatatgatcggctcgaatttgcctaagtaccaactggcactgatgcggattgaagcaaggggccgtgactgtatgatggatgataatcagtcgcaccggtaccatgagcctgggcattcgcggcgagatgggcacaggacaccaggagctgcggggaacaatctggcccaaggccagagtcaatccacatagaacgagagccaactgtagcttcatgttgtttacttctggatgtatgtgctctttcggtcaccgatctgcttttatagtcaaccgaaatatctggccaggaatctctatatttactcagatgttttgatcaatgggttcgatcgttgtattactgcagcataattaaatggccagcctttgtgttgccacaaattccgcttgcgtcatctttccaaagatatttatttgt

SEQ ID NO: 20534 - DNA, 573 bp, DROSOPHILA
atgaacacatcaacggcaattagttttgtggccgctttagtgctttgctgcttagctctatccgccaatgccctgcagattgaaccacgcagcagttggggtgcggtgtctgctcgatcgccttctaggatttccggcgccgtcgactatgtgatcatccatcattcggacaatcctaatggctgctccacatccgagcagtgcaagcgcatgatcaagaacattcagtcggatcacaagggtcgccgcaatttcagcgatattggatataactttatcgtggccggtgatggcaaggtgtacgagggtcgtggtttcgggctccagggatcacactcccccaactataatcgcaagagcattggcatcgtcttcattggcaacttcgaacgcagtgccccatccgcccagatgctccagaacgccaaggatctaatcgagctggccaagcagcgtggatacctcaaggataactacacgctgttcggtcatcggcagaccaaggccacctcctgcccaggtgatgctctgtacaacgagatcaagacgtggccgcactggaggcaaaactag

SEQ ID NO: 20535 - protein, 190 aa, DROSOPHILA
MNTSTAISFVAALVLCCLALSANALQIEPRSSWGAVSARSPSRISGAVDYVIIHHSDNPNGCSTSEQCKRMIKNIQSDHKGRRNFSDIGYNFIVAGDGKVYEGRGFGLQGSHSPNYNRKSIGIVFIGNFERSAPSAQMLQNAKDLIELAKQRGYLKDNYTLFGHRQTKATSCPGDALYNEIKTWPHWRQN

SEQ ID NO: 20536 - DNA, 3649 bp, DROSOPHILA
gccctcttgttagtatatctaacccttttagtcttgtttgctcaagaaatgcaggcaaagttattagacgcaacaaaaacggaaaaaaatcttgtgagccataaagtctgatgtgtgtaacattaaaaaataaaattccattccgtttctccagtccaatttagaagaccccaatgaaaaggtttttaacatcaaaccagccgaaaatgttaaaattcgatttgattaccaactaccaaaggggataaaacaaacgcctaaaattggcaagaaaaagaagaagccggaatatttcttaaactttttatttaacaactaccgaaatccccaaaaactcttggatcacaatacactcgtcagaaaactgaaaatgcgacgaactggcaggcgattgttgcccaatggaatgcccaatccttataagtactttccgcttaaaggcgaagatatgtagatacaatctactttactatctatagatttgcttactaacaagcagaccgaaatgtttactcattgataataaaaatagcttttgagtgcttattcattcacaaaaaaaaaaaataccccaagagtcaaaacgattttgttctaattttgataagagcgagttggtaatcatcatttcttatcaaaacatgttaacgatatattcttgaacttgagcttccgaagggtgattaaatcataaattttaagtgcatcaacttcgttagctagatgttattaaaacataattagggtatttaatcaaatgccggacaccttctagataaaaaaaaccagacctaggagacatcgacattgttatctcacacttttttgcgtgctttttgctagactagaggaaataattgtcaaaatgcaacagtgtttgaaatggatcgatcacaaaattggttcttagataagaactttgaaccttagataaaagtgctaaatttttcgtatataaagtatggaaaattcgcaattatctttagtttcaaattcaaacatgaaaataatagtagtcggtattttgttggtgatctccttagttggacacgagacaaacgcaaaaagtgtggccaacaccttggtaattgaatataaagagaaatttgaaaagcactattattgaattttaaactttaggccaaccaaatcggtcaggatgcttccgatttcggtaatgaattaggccaagaggtcatccaatatggccaagaagctgccaacagcggcttgaagtacggagaagcagcggtaagaattaacaaatctgagggatgtcctgatttttggaaatatatcatcatttgtaggaaaatgcctcctccggttgggaacttggaatggatggcagcatttttggtcacgaattgggagatgagggcaatttgttgggacaggaggtttccaatagcgctattaactttggacatcaagtgtcccaggaagcggtaagttaaacaagaacagaagcaatttaaaattcttcaaatatttttcaattctttgtaggaagaggcagccagtgcagaactcaaagccatggcaagccaatctgccaatcaatccagtaaggtatgtacatatatcttttacaatgataaatatgtaggtgcatattccacaatcgaatgttacttttgttcttcgcagaaatctgtcagtaagcgtgatttaacaagtagcaacgagaatccttcggttacctgtgcttgcacctgttccaccgatggcgctgcttccaaagtgggaaataaggtagcagagtcggccggaaaggcagctcatgatgtagccggcggtgctggaaatgtggcctcgagtgttgctggtgctgctggcactattgcccacgatgctgcaggtgctgcatctagtgttgcaagtgatgctggacacattttccacgacgccggcaaggttggaggtgacattggaaatgctgctggaaatgtcgctggaagtgcagcaaatgctgctggaaatgtggcctcgagtgttgctggtgctgctggcactattgcccacgatgctgcaggtgctgcatctagtgttgcaagtgatgctggacacattttccacgacgccggcaaggttggaggtgatattggaagtgctgctggaaatgtcgctggagatgcatcaaatgctgctggagatgttgcgcatgatgctgcaaatgctgctggaagtgtcgctggaagtgcggcaaatgctgctggagatgttgcaaatgccgctggaaatgtagctggggatgcagcaaatgctgctggagatgttgcgcatgcagctggaaatgcggccggagatgttgcaaatgccgccggaaatgttgctggaaatgcatcaaatgctgctggagatgttgcaagtgctgctggaaatgttgctggaagtgttgctaatgctgctggaaatgtagctggagatgcagcaaatgctgctggtgatgttgcaaatgccgctggaaatgtcgctggagatgttgcaaatgccgctggaaatgtcgctggagatgttgcaaatgctgctggaaatgtcgctggagatgttgcaaatgccgctggaaacgtagctggagatgtagctaatgctgctggaaatgttgcacatgatgcaagcaacattttccattccatattttagagtttctctctacttttctactcatttgtcctaataaatgaacgagcaaattaatgacccatacacttgtcatactttaagcactaaatctctagaaaatccatttacatttctgttttgacttctgaacgcttgcagtcgatttatttttagctttctgtgactaggacctacttgagactgtcgtttatagattaaatcactttatagataccgtaaggaaaaccctgaaactaaatcaaatgagccatcaatcagaatcgaaacttaccgccaaacagttgggaatcaagaaacactcatgtgtgattcgttattattggcggcgtcaaagaagtcgttaactcccacataagccaaacgataagaattgcctataaatgtagtgttgctaatagaagggactcagtaattctctgatattacgaaaagcaataacatgcagtcttttacaattctaacccttttcaccatcgttttgatggtccaaaattcaagagctggaactctcagcattgggtccctgatgggagatgtgtcccaagtggctgttgctggggagaaggtcatccatcaactggaaaacgctgtggccagctctcaatcggattttgtccagccaaccactttgaacattctaagcgacatgggaaacgccttgggtgatctggctgtattctactgtatttatatttgtttgatgtttacctaaaatatttaatattcttgcagaacgcccttactagtttaagagtggataacgattatatgcaacccgaggccaccaatctcttgggcaatgttctgggtggagtgggcactggtcttggagatttggctgtaagtaacagatctggaaagtccgttggaaacttccaagaataagctcattcttttctgctcatagaatgccattaccagtcttagtgttcagatgacgaacgcacctcaggctcgcagtctttcggtatgtgaagttttaaaacttataatattgaattaa

SEQ ID NO: 20537 - DNA, 1374 bp, DROSOPHILA
atgaaaataatagtagtcggtattttgttggtgatctccttagttggacacgagacaaacgcaaaaagtgtggccaacaccttggccaaccaaatcggtcaggatgcttccgatttcggtaatgaattaggccaagaggtcatccaatatggccaagaagctgccaacagcggcttgaagtacggagaagcagcggaaaatgcctcctccggttgggaacttggaatggatggcagcatttttggtcacgaattgggagatgagggcaatttgttgggacaggaggtttccaatagcgctattaactttggacatcaagtgtcccaggaagcggaagaggcagccagtgcagaactcaaagccatggcaagccaatctgccaatcaatccagtaagaaatctgtcagtaagcgtgatttaacaagtagcaacgagaatccttcggttacctgtgcttgcacctgttccaccgatggcgctgcttccaaagtgggaaataaggtagcagagtcggccggaaaggcagctcatgatgtagccggcggtgctggaaatgtggcctcgagtgttgctggtgctgctggcactattgcccacgatgctgcaggtgctgcatctagtgttgcaagtgatgctggacacattttccacgacgccggcaaggttggaggtgacattggaaatgctgctggaaatgttgctggaaatgtggcctcgagtgttgctggtgctgctggcactattgcccacgatgctgcaggtgctgcatctagtgttgcaagtgatgctggacacattttccacgacgccggcaaggttggaggtgatattggaagtgctgctggaaatgtcgctggagatgcatcaaatgctgctggagatgttgcgcatgatgctgcaaatgctgctggaagtgtcgctggaagtgcggcaaatgctgctggagatgttgcaaatgccgctggaaatgtagctggggatgcagcaaatgctgctggagatgttgcgcatgcagctggaaatgcggccggagatgttgcaaatgccgccggaaatgttgctggaaatgcatcaaatgctgctggagatgttgcaagtgctgctggaaatgttgctggaagtgttgctaatgctgctggaaatgtagctggagatgcagcaaatgctgctggtgatgttgcaaatgccgctggaaatgtcgctggagatgttgcaaatgccgctggaaatgtcgctggagatgttgcaaatgctgctggaaatgtcgctggagatgttgcaaatgccgctggaaacgtagctggagatgtagctaatgctgctggaaatgttgcacatgatgcaagcaacattttccattccatattttagagt

SEQ ID NO: 20538 - protein, 456 aa, DROSOPHILA
MKIIVVGILLVISLVGHETNAKSVANTLANQIGQDASDFGNELGQEVIQYGQEAANSGLKYGEAAENASSGWELGMDGSIFGHELGDEGNLLGQEVSNSAINFGHQVSQEAEEAASAELKAMASQSANQSSKKSVSKRDLTSSNENPSVTCACTCSTDGAASKVGNKVAESAGKAAHDVAGGAGNVASSVAGAAGTIAHDAAGAASSVASDAGHIFHDAGKVGGDIGNAAGNVAGNVASSVAGAAGTIAHDAAGAASSVASDAGHIFHDAGKVGGDIGSAAGNVAGDASNAAGDVAHDAANAAGSVAGSAANAAGDVANAAGNVAGDAANAAGDVAHAAGNAAGDVANAAGNVAGNASNAAGDVASAAGNVAGSVANAAGNVAGDAANAAGDVANAAGNVAGDVANAAGNVAGDVANAAGNVAGDVANAAGNVAGDVANAAGNVAHDASNIFHSIF

SEQ ID NO: 20539 - DNA, 5503 bp, DROSOPHILA
ccgtgcaattcccaggctaaaagaagagttaaaagtcggcacagggcatgtgggattggtggagaatgggagttcagctggcaggactactactattaactgcccagcgcctacggccacgcccaatggccatcagtgtgtgctctctgctattattattattattttcactattgtctgcagcatttccttccgctcggtgcgtctggtttggtcagccagcgcatgcactcacacctatatgccatttaccaacacacacacgtacacacacacatgcaggccgagaaacaaatatatcccagacccaaatcctcccgaaaatccatgtatacatgttacacaagctcacaaaaaatagcaggggatgcctgaaaagtaaactcaaaggaatttttagtgcgaaagattgcggaagattgcccaataaattttaaagtgcaacgattatgttatgcatgttatttataaaaattttaaaaagaaagaaagtttagatatttaaatcgaaatggtaaacaatttttactgcacactttatgagaaaatgtttaatcgcgggtaacttattttgccgaattttcaatatacatcgagcaaccctcgctttaaccatttgcttagcattcattttgtggtgtcgactcctgcttacccctttctacttccccctcttctctctccactcatcttgcctcttcttcatctgtaggcgttttgttgccgacatgaaacaaaagtgcaaatgcacataaggctgtgtgtgtatgtgtgtgtgtgtgatggtgggtggtaaggaaaaatcttgtcccttttggtttcttggctgaaagcaaaatatttgctgtttttgttgcttgatcttctctccaaactataaatgtttgtgtgtgcgtatgtgtgtgtgtgtgtgtgtgtgtgtttatgcccacgtgttctagtgtttgtgtttgtatttgtgtgcattttgttgatagttgggattattttggggcaatttatgcgaaacaaggcgaaagctttcgttgacccatgccacgcccccctgttgtgtgttggctgtcaccgcccctgtatgcatttgggcttaaattgagcaacaataaagttttggccacacagcacacaagaaataaagaatggagacagaagcgacaacccaaaaggaaagaaagtagaagagttcccctagcccttaaccatatctcactctgtttctatctccatacacatactcatatctatcttgctgactcttcatttcttctctgtgtctccagatacaaatattcggctacaattcccagctgtatgcaaatttctcagatgccctcaatcgcgcccagggcatcgtcggtgtctccattctgctgcaggtaagttattccccaaggtgctcaaaaatgatgagcgataagcaagaagagcaatcctctttagatataaaatgcctagcttatggataatgtatttaaattctattaaggtttcttaaatggattatatgaataacctcccaattatatcatattcattagcttggagatctctcgaatgcggagctgcgcatgctcaccgatcagctggagcgcattcgctatggcggcgatgaggccttcgttaagcgtctctccatccgcggactgctaccggacacggatcactatatgacctacgatggatccacaacggcacctgcctgccacgaaacagtcacctgggtggtgctcaacaagcccatctacatcacaaagcaacaggtatgtacatttaccaattaaaatatattagataagtaaagtaccttaaaaaaaaaaccgtactttagcaagttttctgtttttggaaattttttaataatattctacaatacccacataaagctcatgccagtcagaaacaattcttagctcaaagtgaataagtcaagagaatactttttttccaaacgaattcatcaagttgctctggtcgctccacttttaccatttcgcccaatctccgtttcccccaaataaaaaataagaaaacattttgagcgatgggcaccttaatgtttgttaattagtatacagtgctacgatgtccgctggtccccggcttcttctgttttattagctaatttcatttaagttttaaattgagttgctgctgctggtgcttctgctgctggaggagcaacaaagtggatagcgtccataactcaaaggaatggcgaccagcgaaaagcgagcgagaacacacacacacacacacacactcgcgttcagttgaaaacagagggagaaaaaatttaacacaaatgtttattaagtgcagcgctgtaataaagacgccagcggtgggcggtgaatggcggggtatgagtggttttctggagcggttgaatggtggccagcggcatacgtgtaaacaatgtaaacagggcgggcaggaaagagagggagagagaccaacaccaacactcacactcacaagcacacacacacacacacacactcccacacacatgcacatgcgactgcagcaggcagactcataaaaacttcaacaagctcaatggcacccatgggcacatgattacaacttgtggcagccatggaggactccggtccacgagtctcccagcaacgtaatttactggctgcaccgcacactcacaaactcacacacactcgcacgcgaagaaagggatggcaaaggtgtgtcagaaagagagagcagaagacagcaccttgctggcaaaacataatttaccaaattaaagttacaccggtgaggagaggggtcaggtgagaagtggggggggggtgcagctgaaagcccaggaagctgcgagacatgagctgaaattgcaattaacccattaacgtgcgctctctgtcacagccggaaagggaaaacgttagcgtccaaagggttaagtcgagtcacagatcgctcaaaaagtcacagtcggtagttgttcatactacttatttccaaaagattagaaaaaacagactgagctgaaggtactaaagttatgtttaacattccatctgtggtggttatatttatattttgtatttcccatttaaagcattttttttaatttccggcttcggttgtcttatgtttttggctaacgctccatgtttataagaaatccccttcagtttaaaaccacaatacaatctaaccggaaacgggctttaatccttgagtgccatttagtgttgcatactttcggggcatcacacacacacaggcacacacacgcgcgcacacacgtatacccaacttaattcacacttgaatgggcagcgggggggaggggaacccttaacccccggcagcccccgctttcctcaatcaatatcaacccggccacgttgtcgtgaaaagcgattttgacggaagtcaattgataaacagattgagtagattaagtgttattgactcgttgtcgtggttgttgttgttgttgttgctcctgtcgtctcatcgctgcttttctctctctctctctctctctttatttctctccatgtatgtgtgggtccttagtgcttcctttttttcagttttttgttcagcaagcgcttatttttaggattagcaatttgtgtcaagcttgattttttgccaaagcgcggatcgatgatgttgtgtgtgcgctaaagtttataattatgcacgttaaacgctcgacagacgggtaaaatcggttcgatgggctcgccggcttatctccatcggatgtttggcttattgtcgtgccattgttgatctacttccgtgtctcgatggtgatgaaagcactacagaaattatgtttgctttaaagccaaagcattgaatcattagcttatgataagcttttagttttgatatttcttgttgtttactttgtccaactaagaacacatagttatcatagtaatgaacgcatagcagctaagcgaggtcaaaaacattatttttcacttattactcatacgcaatgttggcagtagatattgcgttgcagttaattaagttctgtatttatattgtacggctaggaaagtaaatttgattgaagtaattgatatagccattaaattagatttcacctatttccttacagttgcacgccctgcgccgcctgatgcagggcagtccagaccacccgaaagcgcccctgggcaacaattaccggccgccccagccgctcctgcaccggcccattcgcaccaatattgatttcaagacgacgaagtcgaacggcaaggccgcctgccccaccatgtaccgcgaggtctactataaaggtaattataaatatcattttgtctacataatactgccagaaatttataggatttttataggataaatctccactttcgttttactgtttctagaattgtacaatcttttaccttgtcaattgttgatcctttattcttatccttgttgttgttgatccttatcctttatctttattctcttgcagcgaccagttggaaacagaactagaagtcagcgacgtgatgtcgtaacgtaacgtatcgtaagcgtaagcgtatgacgtaagtagcgagcggcatgcaacaggagcttccactaaacatacatataaacaaggcgatgccgagggaaaaggacacggaccgaaaggattaagatggaagaggaatgggacaaggagtgggatagaggatcacaaaggaatcagtgcagcagcggccaaagaatggcgattggaattacacacatctataaatataaataggcaaaagaataatatggatagcgattacgattacgataattagcattaaatgtgcattttttttttgtctccccctaaacgaaaatcaatcagaccttgattgcagtcagaggttacttttttttgtgtgtgcatagcgtaagtacaataacgattaaaaacaagaaaaacaacagcgatgaatagtaatcataattacggacataaccattaacgtaatccataaaaccaaatactattgtatattttaagttaggccggacaacgtgaaaagatcaaaataatatatacagcaagcatacaaaatacgagtatcgatagttggcaaagtgttatggcaggcattatgcaaaacccacccaaagaacagaccttaaatccatacccataccgttggatgtatgaaaacattctgtttatgccccctctaaatgtgtatagagcgtactttgtgtgtgtgcgtgtgtgtttgtggacattaggtaataacattaacaataatcaagtgttaatctttatgagagagagtacatcaatgcgaaaaaaaaactaccacaatgctattaatttttattgcacgcgttgcatagcctgatattttcatatattgccgttcatattttaagatttaatcctgtactttaacaacatatttttgattattgaaaaatataattatttacctttgcctttttttttttgtacattaacttaatgcttcagcttattattttagtgtctaaa

SEQ ID NO: 20540 - DNA, 549 bp, DROSOPHILA
atgcgaaacaaggcgaaagctttcatacaaatattcggctacaattcccagctgtatgcaaatttctcagatgccctcaatcgcgcccagggcatcgtcggtgtctccattctgctgcagcttggagatctctcgaatgcggagctgcgcatgctcaccgatcagctggagcgcattcgctatggcggcgatgaggccttcgttaagcgtctctccatccgcggactgctaccggacacggatcactatatgacctacgatggatccacaacggcacctgcctgccacgaaacagtcacctgggtggtgctcaacaagcccatctacatcacaaagcaacagttgcacgccctgcgccgcctgatgcagggcagtccagaccacccgaaagcgcccctgggcaacaattaccggccgccccagccgctcctgcaccggcccattcgcaccaatattgatttcaagacgacgaagtcgaacggcaaggccgcctgccccaccatgtaccgcgaggtctactataaagcgaccagttggaaacagaactag

SEQ ID NO: 20541 - protein, 182 aa, DROSOPHILA
MRNKAKAFIQIFGYNSQLYANFSDALNRAQGIVGVSILLQLGDLSNAELRMLTDQLERIRYGGDEAFVKRLSIRGLLPDTDHYMTYDGSTTAPACHETVTWVVLNKPIYITKQQLHALRRLMQGSPDHPKAPLGNNYRPPQPLLHRPIRTNIDFKTTKSNGKAACPTMYREVYYKATSWKQN

SEQ ID NO: 20542 - DNA, 4516 bp, DROSOPHILA
agcggcctcatcgacgaggagcctttgcgattccggggcgaagtgtaccacggctatcacttcagttgcacggcctgcggcacagagttggattccactgctcgggaggtcaagagccggccaggattggctgctaacgatatggtgggtttttttttctttagcaaataagaagcaactgaattattattccattatagaacgaactgtattgtctgcgttgtcacgataaaatgggcattcccatatgtggtgcctgtcgtcgtccgattgaggagagggtggtaacggcgctcggaaagcactggcatgtggaacatttcgtgtgcgccaagtgcgagaaacccttcttgggtcaccgacactacgagaagcggggattggcctactgcgagacgcactatcatcagctctttggcaacctgtgcttcgtctgcaaccaggttattggaggcgatggtgagtaacttaattgaactatattctgggtttatttaatgcgctcattccataatgccaacagttttcactgccttgaacaaggcctggtgtgtgcaccactttgcgtgctccgtgtgcgacacgaagatgacacaaaaatcgaaattctacgagtacgacgagaagccggtgtgcaaaaagtgctatgaccgatttccaaacgaactcagacgacgtctgcgcaccgcccacgagatgacaatgaaaaagaacacctaatgccttggagcgagtctcagatccacaccaaacagtgcctttgtcgttgtagacccgctttcactaccatttttaacatttgagaaactaaaaccaaacaaactaaaacctcttgtgcatgtcctttccgtctgttgtaatccggttgtgtgtaacttaaattttaaatcgagaatcaacggcatcaatagctagggaacataacattgtgtattaaaagcctttaacgttgttatttaatggaattttatttatatataaatgtttttaaaattataaaacgtaatgcttattcgcaataacttcgtaatgtgtttgacccgatttagttgtggtgtcaagtaaatggcatttgatgcacttaaaatttacaagctcaacagcttctgaataagacttcccgatttaattacggctatatggttgatatatttgatactatcaatatgaactgactgatggaccttcaaaacctcagccagataggaaacctgtgctgcattcgggttgtgcgggaattctataaagtgtttgttcaaatgttatgctcaagacaaatgtttaatatccataccgtcaatcacgcaaaggtttgtggcacagggagcggtgaagtctaatggatagcgacggatatccatttcggttatgtcctctacattcgtgtaatcgaggtacattacccggtactttgtctgctgccgtggaacaactataatctgttccactttgccacgataccaggaaccctcaaatctggcaagcacatattccctgacactgtcaaaaatgttaattaaatataaacttacattggtatggttatagtatagttacactggcttataaggctcgcagtctgtaatttctgataaacgagagtgcaaggcggaaaattcggaggcgtaggtgctgtcaaaggccccaaaaatacctcgatttttttttgtactatccacaacgatgagatcaatgccttccttagattcgattgaaaatctacgcatctcaaaaggctaataaataaattaataaaatgtggctctcaatgagaatttatattatcaactcacaggttttaggacatgttcgtttttcgacattacgattccatttgtttgggcattagttttatggataacgggaagttccaaattttttttatggtttggaagttgtaacggataattagcttttggtgttaagcattgtgttaaggaatgttttacgtcttcatctttaggctttggtgcagtgtcctgatcagttttagttgccttatcagcaagatcaataaagccaagcatcttattagaggctccttctgtaaccagtacattagttgattttgattgatcaatttgtccggagttctgttgcttgagtatctcctcacactcattctgtacctctggtttcgttaacattttcttacattcgattgcaggaattgcaatgggttgatcaatatgtgaaggttgcggaccttctaaggaacatgacttgatattctcggccgcagaattagggtttcgtagcaacttcttactgttgaaaaatgcgtttaactgttcatttaccgaaaagttcatctccgtgtttactagttccacgaggtgtaatccagggcactttttaatggttgccatatatttcttgcccacgaatttcgagttgaaggcaatgacatcattggaatagtcacaattcaatacattcttgagctgcaccagttggctggaacagggcaatgcttttaactcatcattgatatccttaaaatcgaaaaaaggtccagaatgtttgattccaagatcgaccaaaaataagtgggaaacctcacggagcttcttacacatcttcgctcgcacatacatgccattaaagtggactaggcacaatctatttggtggtggattttttattctgggcaataacgtagctatggtattaacctgtgaagatacaacactttttaattcgaaatagtctcgtcaacagtagaattagaaaaaaaaactcgatttgctagtatttaagtatccaaatagtatacagttttacacgcaacactatttctttgataatattcatttatagaatttgctatcatgcacgcattttacttctaatttaggaattttcttggattgaagaaatttgactccatatataacaaaccttcttgcaaacttcgtcaaacgctctttcagcagattcgctggcatcgcgaatatagcaacgattactggatatgaagtccgtaatgtataccatagcaccgctgggcgggatgatcgcttttggcggagaaacgggaatatcatctttggctgcaatgatgctggaacggccggcgttattgcactgcaaatccggaagaataggtgaacggctgaggggtattggcgacgcctcaactacagatttgtcagcgtttaacgaacaggccccctccaaagttgattccctgtcgctctggaacacggaatattcattgggagaaaccaacgcgggcagcgggatgcagatgtaacgatgacgtagccaatcttgccgctgacaatgcttggagcagtaaaagtccccgcagcgctgacagaccctttccgctgcgtttgcgcaatggacgcattttcctttggcttgcgcaagctgaattacaaaacaatattttggtgttcggctacttttttaaaagttggttcttacttcatcagcaccggcaactgacttttgtgctagcatgttgtcacactttatttccgatcgaaaaggaagagtttttcagcgttagttctccaatgatacagctgaagccccacggtgttaccagatacggaaatccgattaacggaacttagaagtgcacattagtaatgaaatgccgttttcccacttatttatttataacacgttaaactgacaaatatttgttggctgttagtattaaatatattcatatatttatattcataattaattattatcttatagtttggaagtagttagctcttaatatatgagacatactttaaagtgtagtttagtataatcagctgtttgttgcttatcggtcttatcgataattgtgggtagctgcatttgatttggcagttcaatttttaaatatttgcaagcttttaactgaaaatgtcgccaccatctggtgaattccgttgccgagtttgtcttaaacaggatgaacttctggtggatatctatgagatcgtggaggagatgcaagtggacctgtgtaccttgcagccaatgtatttatgccaggagtgcaccaacgagcttctcatcgccgccaagtttcgcaaaatatgcgtggagtcggagaagttgcgcgatatggctccggagataaacatagacacggcagaacccctagcttcggaggaaataattattattgatcccagcgactatattgaacagctctccgctgtggaggatcccgaaaatgaacctattggagtttcacgctggaactgccagcattgtggcgctggtttccagctatcggaagtactgcgtcggcacatccaagaagtacatgcttcaataactattatagactgtagggagcgcaggcggatctttacgaaattgggttgctaccaggtccacaattgctcctatgccaagacacccaaacgtgggcacaagtgcctggagtgcggtaagtgccttcaatccgcctctagtctggcaagccacattcgcctgcacaccgacgaatggcccttcacctgcgatcagtgcgccaaggccttcaggaccaatggag

SEQ ID NO: 20543 - DNA, 1918 bp, DROSOPHILA
taacgctgaaaaactcttccttttcgatcggaaataaagtgtgacaacatgctagcacaaaagtcagttgccggtgctgatgaacttgcgcaagccaaaggaaaatgcgtccattgcgcaaacgcagcggaaagggtctgtcagcgctgcggggacttttactgctccaagcattgtcagcggcaagattggctacgtcatcgttacatctgcatcccgctgcccgcgttggtttctcccaatgaatattccgtgttccagagcgacagggaatcaactttggagggggcctgttcgttaaacgctgacaaatctgtagttgaggcgtcgccaatacccctcagccgttcacctattcttccggatttgcagtgcaataacgccggccgttccagcatcattgcagccaaagatgatattcccgtttctccgccaaaagcgatcatcccgcccagcggtgctatggtatacattacggacttcatatccagtaatcgttgctatattcgcgatgccagcgaatctgctgaaagagcgtttgacgaagtttgcaagaaggttaataccatagctacgttattgcccagaataaaaaatccaccaccaaatagattgtgcctagtccactttaatggcatgtatgtgcgagcgaagatgtgtaagaagctccgtgaggtttcccacttatttttggtcgatcttggaatcaaacattctggaccttttttcgattttaaggatatcaatgatgagttaaaagcattgccctgttccagccaactggtgcagctcaagaatgtattgaattgtgactattccaatgatgtcattgccttcaactcgaaattcgtgggcaagaaatatatggcaaccattaaaaagtgccctggattacacctcgtggaactagtaaacacggagatgaacttttcggtaaatgaacagttaaacgcatttttcaacagtaagaagttgctacgaaaccctaattctgcggccgagaatatcaagtcatgttccttagaaggtccgcaaccttcacatattgatcaacccattgcaattcctgcaatcgaatgtaagaaaatgttaacgaaaccagaggtacagaatgagtgtgaggagatactcaagcaacagaactccggacaaattgatcaatcaaaatcaactaatgtactggttacagaaggagcctctaataagatgcttggctttattgatcttgctgataaggcaactaaaactgatcaggacactgcaccaaagcctaaagatgaagacgtaaaacattccttaacacaatgcttaacaccaaaagctaattatccgttacaacttccaaaccataaaaaaaatttggaacttcccgttatccataaaactaatgcccaaacaaatggaatcgtaatgtcgaaaaacgaacatgtcctaaaacctaaattacagactgcgagccttataagccagtgtaactatactataaccataccaatatttgagggttcctggtatcgtggcaaagtggaacagattatagttgttccacggcagcagacaaagtaccgggtaatgtacctcgattacacgaatgtagaggacataaccgaaatggatatccgtcgctatccattagacttcaccgctccctgtgccacaaacctttgcgtgattgacgaattcccgcacaacccgaatgcagcacaggtttcctatctggctgaggttttgaaggtccatcagtcagttcatattgatagtatcaaatatatcaaccatatagccgtaattaaatcgggaagtcttattcagaagctgttgagcttgtaaattttaagtgcatcaaatgccatttacttgacaccacaactaaatcgggtcaaacacattacgaagttattgcgaataagcattacgt

SEQ ID NO: 20544 - protein, 593 aa, DROSOPHILA
MLAQKSVAGADELAQAKGKCVHCANAAERVCQRCGDFYCSKHCQRQDWLRHRYICIPLPALVSPNEYSVFQSDRESTLEGACSLNADKSVVEASPIPLSRSPILPDLQCNNAGRSSIIAAKDDIPVSPPKAIIPPSGAMVYITDFISSNRCYIRDASESAERAFDEVCKKVNTIATLLPRIKNPPPNRLCLVHFNGMYVRAKMCKKLREVSHLFLVDLGIKHSGPFFDFKDINDELKALPCSSQLVQLKNVLNCDYSNDVIAFNSKFVGKKYMATIKKCPGLHLVELVNTEMNFSVNEQLNAFFNSKKLLRNPNSAAENIKSCSLEGPQPSHIDQPIAIPAIECKKMLTKPEVQNECEEILKQQNSGQIDQSKSTNVLVTEGASNKMLGFIDLADKATKTDQDTAPKPKDEDVKHSLTQCLTPKANYPLQLPNHKKNLELPVIHKTNAQTNGIVMSKNEHVLKPKLQTASLISQCNYTITIPIFEGSWYRGKVEQIIVVPRQQTKYRVMYLDYTNVEDITEMDIRRYPLDFTAPCATNLCVIDEFPHNPNAAQVSYLAEVLKVHQSVHIDSIKYINHIAVIKSGSLIQKLLSL

SEQ ID NO: 20545 - DNA, 2392 bp, DROSOPHILA
ggattcttctttagtgatatgggagcatttgtttcaaattgtattattggcttgtaacagttaaaacgatttatagttaatgggttttaagaatttaaaaataaataagtgcacaaaaatcaataatacagaaaacttatttataaaaaagtaaatttaagtacttataatacataaataagaaatccattggaagaccatagaaaaacatggttaggtaacattttttataagaatataattgtgaaaaacaatttgttaaattaaaattaaagtaaccctactctaaaagtaaacgtttttatgtacactacatatatgtatgtgtagatgaacaactgattgtgaggctggggaagtgttcctagtgtagcatagaggtcctgcgactcacttagttgcgtttcatctcctcgatctgcttcagtaagagctgcatgcgatccttcatcaagggctgtcccttttgggtccttttgctgatggccttggttttctccaaacgtttctttttataggccttcacctgggcatcccggtccgctctaactttctcccgctccgcagcctcctgggcagccttttccttgcgtttcatgttccgaatttccggtttatttggcttttcctgggaagataatgcaaaaacatgtgtggtgtataccatttcagagtacatacttgattttctcgcttacccctttggccttttggttgttcttgttcttgaagtagggtttctggttgtggcccaccttaccagcgcctctgtttggttttccattgggttttccttggcttttttgcgatctcggtttcatttttgtgttttattaaatataaattaagctgcgaactaatcgatttatcgatggttgcacgcatgttacaatctggaatttaccagcactgccgaacagctgttcacagctacacggagtagtaatcgatatcgttctacgataacacgaggtaaatattggaaataaaaatatttagcatgttgaaattaggaaagtttctggcacaaaatggtgagtgaaacagttgatctatctattgaagtcgtaataattattaatttaatagccacgttggtcaatctggtgggcagacagcagctgggaaccgtcagccgcctctattcagctgccccggagtcgtccgacttggatctgccgatcgacataaagaatccctatgaaaaggacccccagcagtgcatcctatgcaagcacagcatcgagccgcactacaagaacgtgaagctgctctcccaattccaatcgccatacacgggtcgcatttacgggcgtcacatcaccggattatgcaagcgccggcaggagcaagtggagcaggccattctgcgtgcccagcagtgcctgctgatgccgggataccacaaggacctcgacttcctgcaggaccccaagctctttgatcccgagcggcccgttcgcccacacaagtactagttttctgataacttttagtttcctctttgttgcaatgggaatatagagtttcttaatgttaaatcttaaagctatgtttaactatggacactcctcctccagatagcgtagcatctcgtggggaatgcccagccgagtaaggagatcgcttcttgagagtcctggctccgccatagttagtaggtcacccacagaagctttgaatccctgccgccagatttctatatcgccctgtagctcaacgattttactgctctgtggactgttttcaagctggttcttctggttgccgtgctcctgtatctcctctggcgcatcaagagcctcttgagcatcattcctttcctttttatccttttttgctgttttcttcactatttcccgttcctcgtccttaattccgtgggccgcagcaaactctagcttcttcttggacaagcctgtcctgcttttggacaatcctatcctgcgagagctcagcgataaaggcggtgcccgcggagtctcctgttcactacattttggtgtatttgcagcggaatcgtctctctgaagtcttattaagggcgttgactggcaaccacgcctactcaatccgagtcggggtctccgtccggattgaggcgtgttatttgcctcaccaggcattaaaaattagaaaaaacgtactaaccaaaaggattttgaaatatcgcagaacagatgtgtaatcagctgttctcttcgatatcgataacacgcgaaaggagtagtactaagagagtgacagtagagggcgccacaaaggaatgtaggttaccatgaagagaatgtaaattattatgtaaaaaataacaaattagatttttttgatatataacgtaaaaaataattcttaagtgagaaatgtaaacatattaaaaaccactattttg

SEQ ID NO: 20546 - DNA, 337 bp, DROSOPHILA
atgttgaaattaggaaagtttctggcacaaaatgccacgttggtcaatctggtgggcagacagcagctgggaaccgtcagccgcctctattcagctgccccggagtcgtccgacttggatctgccgatcgacataaagaatccctatgaaaaggacccccagcagtgcatcctatgcaagcacagcatcgagccgcactacaagaacgtgaagctgctctcccaattccaatcgccatacacgggtcgcatttacgggcgtcacatcaccggattatgcaagcgccggcaggagcaagtggagcaggccattctgcgtgcccagcagtgcctgctga

SEQ ID NO: 20547 - protein, 112 aa, DROSOPHILA
MLKLGKFLAQNATLVNLVGRQQLGTVSRLYSAAPESSDLDLPIDIKNPYEKDPQQCILCKHSIEPHYKNVKLLSQFQSPYTGRIYGRHITGLCKRRQEQVEQAILRAQQCLL

SEQ ID NO: 20548 - DNA, 2974 bp, DROSOPHILA
aaatatcaacttcttggcaaaatccgtttttccgaatttcggtcttcagaaacagtttttttgccataactttaaaaataattgtctgaatatggaatgccatatatcattgtgctcgtaattaaatttccaatcaaactgcgtttaaatatggaaataaaatttttttgccattttttgcaaattttgatgatgttaccccttacaaaaaatgcaaaaattggccgaaaaattaattttcctaaattcttcaaaaagtgatagggatcgttagcactggtaattagctgctcaaaacagttattcttacatatatatgagcatttttagccaagttatgacgaaaattccgtttgtatatatcaagtttttggcaaaagccgtgtttccgagttttggtcatcaaataatcagttatttacatattctttcatctttatgagcattttcagccaagttattacgaaaataccatttgtaaatcagtttattctttggctattagctatttaaacgacaaaaaagcgttagtatcgaattttttccaatagtcgttttctgatgtcccaccattgaggcattcgctttttcaccataacaacgaaaacaatggtccagctgcattaaaccgggtgttcttttaaaagtttagttgagatgccgtgtgtaagttgaacttgatggattagtcacctttacaattgcaataagtagccgtaaatatttctcttttcccattttttctctattacattctggagaattctccggctctccgctacctcccgccttttacatttcccaagtctcattttttctaggcctctctcttcgctcgccgaaaatgcatttctgttgcccgacgactttctcgccgagcttcgtagctcgaaaacccaatggcgcagcccaaaagccacaagatacccaagaacttggtcaagtggctacgactgcggctgcaaacgggtttcagtcgattgtggggcctcagaggcgatacacgatattcaagatttgagattcgagatccacaattgcgatgactaattcattgaccatcgccgtctttttggccagcctgtgcctctttgccagttgtggtcaaatgcaggcagcctccattgtctgcggatcggaggctaagtctgcagaggatggtgattcggtgaccactcccagtaccagtgaggtcaacaaattcgtccacagcctgcaatgcactctggagaaggccaagccctggatagccaatatcgagaaggaggccaagatcttggaggagaaggccagggatgccaccatatcgctcttccagcgcataaataaactggtcaatgtgctcgcctcaccggttaaattcgaaaaggataaggaaaaggataaggatgagcagaaggaaccggaggaggtcaccaccacgaccaccccttccacatcggaggcttcgagttcctccaaaaacgatcttaaggaggaactaaccacttctgcgccgccagttcacttggactggctggaggatcatgccaatgaggtggactacattccagagaagaattagtgaagcacttagttaagcactatgctaatatatatgtatactaattaataaattatgttgctctttattcgatgagcctttcctatttatgaatttacagcatttaatttaatatatttttatataatctattttgtaaaatatcaaatgtaaaatgtacgaactcgtttgctgattcatcattgcaactggtatacatatgggtaagttcaagtatacaacacatttcatatattattatttctaatacatctttttgtttgcagaattcactttcgaaatgatttaaatagatcaaatctaaagggtcaatgtgtttgtagttcaagtccggtgtttacaaaagaaatcttgaatttagcataactggaacccaaaaacttgttgtgactacagagccaattgggtttaagttcttaatgaaccgcttcctccgctttggtgactcacttcacttgattgtgattctttcccgactttctcttctggacttttcttgccactgtggttattggccaaaaataaacaaacagcctgctaactgaagccctgcaactccggcataacttgtgagccggttttggtctcaacggatcagtgaatcagtgaatcatcccagcgacaggagtctcattgggccgatctcactggatgggcttcaattgctaattgccagtcgtcgggaaagatgcagcttctgggcaccagcggactactgataatcatcgtcatcatctccctgtcattgccaattatccaggggatggtctggtcgggatttatatgctctgcaagggatcatcgcggctgctgctacaattgggtataccccacacgtcccaggccgccatgtgccccccaaagaagtcggaattcgggtcaaaagaatgggacacccaaatgagtaattcgagctctacaagcacaagaaataatatatattttttaaattattataaaaacaaaacaatgcactttaaaggcctaacaccacaaagaataaatttcacagcgctaacggactcacagtataaattgcaactgtagtcagatatattataagcaaatatttttttgtagcgtgaataaagaaataatgatcttataattatctatatctgaaatgaaatgattgtttttctttcacaacttatctgtaacatgggaaagtaaattggggtgcaaataatattaaattgagcgttggttgacaacatttgatagttgtttgatatataaaaacgcttccgtagctttgttcatttaagttgattatccatcaatttcgcgtaaaatttgtataaacaataagtaaacatttaatggagcacacttttcacacagaaagccagaatgtaagcgaataaattgaaataaacatatcattcacgttattcatcaataattttc

SEQ ID NO: 20549 - DNA, 911 bp, DROSOPHILA
tacacgatattcaagatttgagattcgagatccacaattgcgatgactaattcattgaccatcgccgtctttttggccagcctgtgcctctttgccagttgtggtcaaatgcaggcagcctccattgtctgcggatcggaggctaagtctgcagaggatggtgattcggtgaccactcccagtaccagtgaggtcaacaaattcgtccacagcctgcaatgcactctggagaaggccaagccctggatagccaatatcgagaaggaggccaagatcttggaggagaaggccagggatgccaccatatcgctcttccagcgcataaataaactggtcaatgtgctcgcctcaccggttaaattcgaaaaggataaggaaaaggataaggatgagcagaaggaaccggaggaggtcaccaccacgaccaccccttccacatcggaggcttcgagttcctccaaaaacgatcttaaggaggaactaaccacttctgcgccgccagttcacttggactggctggaggatcatgccaatgaggtggactacattccagagaagaattagtgaagcacttagttaagcactatgctaatatatatgtatactaattaataaattatgttgctctttattcgatgagcctttcctatttatgaatttacagcatttaatttaatatatttttatataatctattttgtaaaatatcaaatgtaaaatgtacgaactcgtttgctgattcatcattgcaactggtatacatatggaattcactttcgaaatgatttaaatagatcaaatctaaagggtcaatgtgtttgtagttcaagtccggtgtttacaaaagaaatcttgaatttagcataactggaacccaaaaacttgttgtgactacagagccaattgggttt

SEQ ID NO: 20550 - protein, 173 aa, DROSOPHILA
MTNSLTIAVFLASLCLFASCGQMQAASIVCGSEAKSAEDGDSVTTPSTSEVNKFVHSLQCTLEKAKPWIANIEKEAKILEEKARDATISLFQRINKLVNVLASPVKFEKDKEKDKDEQKEPEEVTTTTTPSTSEASSSSKNDLKEELTTSAPPVHLDWLEDHANEVDYIPEKN

SEQ ID NO: 20551 - DNA, 2574 bp, DROSOPHILA
cacaagaaataatatatattttttaaattattataaaaacaaaacaatgcactttaaaggcctaacaccacaaagaataaatttcacagcgctaacggactcacagtataaattgcaactgtagtcagatatattataagcaaatatttttttgtagcgtgaataaagaaataatgatcttataattatctatatctgaaatgaaatgattgtttttctttcacaacttatctgtaacatgggaaagtaaattggggtgcaaataatattaaattgagcgttggttgacaacatttgatagttgtttgatatataaaaacgcttccgtagctttgttcatttaagttgattatccatcaatttcgcgtaaaatttgtataaacaataagtaaacatttaatggagcacacttttcacacagaaagccagaatgtaagcgaataaattgaaataaacatatcattcacgttattcatcaataattttctataaatttaaattaaaattgcaacaattttttttaattgaattcaaaacaagctttatgaattatttataataattacccgttaatcgcaagtttttttgttgattaagactattatttaataatcatagatataaatattctaataaatagacaaaaaacgttcgaagctcaaagtaatgaaattcattttaacaagctaagaaaacactatagatttttttttaattttttatgttttaagataaacattatatagttgatcttttcagggcctttaaaaacatctatctactttctcgcagtgcagtaaagcttacattacaaaaaagctagagcagctcgcattgagtgagcgccaaacaaccgatcgcacgaacgcaacttgtttgggatttagttttcagccagggtggataagttgcggcgggcgggatgggaggggcgtaaccggttggcggagatccgagatttcagatcgtagaccgccgtctcggagcggagcgatcagtcagtcgcgttgtcaagctgaaagcgtaaagatgaaatcgctcgttgtgtgctctttgatcggattggtcctgcttatggccgctggccaagttcgtgccgagtgcgacgaggccaagagtcccgaggacagcgaattcaagcacttcttcaagaacctaggctgcaaggtcaaccagggggccaaggaggtggccgaggccgccaagccctacaccgacaagatcggcgagggcgccaaggagtttggcagctcggtggcccagaagtacgacgaactgaagcacaagctgaccgatgagccatcgaccacgcccaaaattccagtggcctatgacgcccccaccgagaaggtccttttagcccccatcggaggacccagcaccccgatcccatgaggtcagcccgcccattcgatccgaaccaaaagcccagtttattgacagcccattaatcttatgattacagggattttgcaatcgcttgaaggtcccctccgtctcgttgcataagttttctttgttttttttttttttctttgtgatctatattaataaaaactaaagtgatgttggaatcgtgagctgtgttttttgcgactttagtatggctgataagcggggatcacagatcgatggttatcagttgggggctaattaagttagacacacaggggaaacaacaaatcaattatttgggaatctttcacccaaaacgacgtacacattcaaggagaacaagaaaatctaatcacaatataaccaaaactaaatagaataaactacaatgaactagaaagcagaaaacgatcaaaatgtctgctactaatcaccacttcgtaaccattcattttgtagaacagacagttcaatgttcttttccctcaagtacacaaagttttgatgttgagttattgggaagaaaacaaggtaacaaaaagcgacacattaaagcaataaacaactggatggcatagcaagccgcaagtgatttacatttgaatcgtaaatcgcaccgtaaacatttgcttctgagaattgcgaacataaagacaaacatcatcgtaccctctccccctttataaacattgacgatccatcatcaacgttcattcaccgccgatcgaaattatatagccgagatgctgctgatcagtcaccatgacgggcagtctgtttattttgctggcctgtaatttatgagggatttattcgagttggcatcggggaaaccacggaatacattgtttagcattaaattaatatatgtatttgaaagtgatctagttttgaattggcatgctcttttgtcgaagggaaacaaattacaagtgggtcgatataagccaaatacatatgatattcacatcagaaaagagagaagcagtcatgcaaataaaagattgaaaagtaaacgttttaggcaagaataaatatttatttacgataatagcttatcgtataacttaaaaattgcctactaagttaagttactatttcaaattatacatcttaccttagttcccttataagttatttttaattaggaaaaaaagtggtaggttccccttgacataa

SEQ ID NO: 20552 - DNA, 505 bp, DROSOPHILA
agtcgcgttgtcaagctgaaagcgtaaagatgaaatcgctcgttgtgtgctctttgatcggattggtcctgcttatggccgctggccaagttcgtgccgagtgcgacgaggccaagagtcccgaggacagcgaattcaagcacttcttcaagaacctaggctgcaaggtcaaccagggggccaaggaggtggccgaggccgccaagccctacaccgacaagatcggcgagggcgccaaggagtttggcagctcggtggcccagaagtacgacgaactgaagcacaagctgaccgatgagccatcgaccacgcccaaaattccagtggcctatgacgcccccaccgagaaggtccttttagcccccatcggaggacccagcaccccgatcccatgagggattttgcaatcgcttgaaggtcccctccgtctcgttgcataagttttctttgttttttttttttttctttgtgatctatattaataaaaactaaagtgatgttggaa

SEQ ID NO: 20553 - protein, 121 aa, DROSOPHILA
MKSLVVCSLIGLVLLMAAGQVRAECDEAKSPEDSEFKHFFKNLGCKVNQGAKEVAEAAKPYTDKIGEGAKEFGSSVAQKYDELKHKLTDEPSTTPKIPVAYDAPTEKVLLAPIGGPSTPIP

SEQ ID NO: 20554 - DNA, 12161 bp, DROSOPHILA
acgcgtccgattgccagcgccgtttaagttcgactgagtttgtggcgcgttgttcgtgtgctacggaggccagaaatcagaaatccagccgccaatgctgcgacctccaatcgggctgaaaaagggttttagtcacgaaagtttttcttgaaacaattaatcatttatatcactgattaaaattattttttttgtaattttttccttagtttttgaatttttaaaagcaattttcttgaaaagccttttaaccttttggttttcaagacattctgcttttgccagcctgcacattttgagcacccgctgcaattttacagctgccagcttgtgtcagtgtgcacaattggagagactaagtttgcgtattcagtattttttaggtatattgtaaactacttttacaatattgtttagaaacaaactctctcattttcctagtttctattcggtctacaatacaatttctttaaaaaacaacattaatacaattacgatatctgaccggaacggtggaatatcgaacatggggcagttttttatttatatattcttttgttatttataggtgaattctaaacaatataaatgcaaaaaatgttaaaaaaaaaaagatctaactatctatgttcgacctaagtttagagaaaaatcgactccccactctttggggtatatctccactcgtaggacatttctttaaggacatttcaggaaaaatgtagttgccataaaaaatgtttacctagtttttgagataatggcactcatatcattattattatggactcatattaaataccattcttatttttaacaaattttattcttgttcaaatgtacttttagaggctcaagtttgaataaagttgttgaagtgaaatggcgcaaagtaagaccctttcatccagcagtattatttgttcggtatttttgctggtattttcggttcgaatgtttttggaaatggaaaagcagagcagagctaaattgcaatcagatctcgacgcgacggcggtgaagaagcatcagtaaaagcgcgcggaaagtgtatgtttcaaaactccgctcagaaaaccatatttgttattgtaaataatattcccttagaagtttggaatatttcccgcgacaatttttttttcggtgaaatttcataccgttttgccacaaaaaaaaaagaggaaaccaaaacaacggaaatagttaataacaaagtgcgtgagccttttttttattattatttttcgtgtgtgtaagagcggtgatttggcgctgtgtgtgtgtgtgtgagtgtattgtgcatctcactgttacttgtggtcgtgtaggtcaaggtgaagcagctgcaccgttagttttccacccattgactatgcagttttcaatcgcaaaatgcatttgatattatgcatatgtgtgtgcagaaaccctaaaaagtcaatattgcagttagtagctctctttcgcactgcccaccctgcctgcctcccaaccaccctccctcccgctcgcacctcatcgagtgagataagcactagataagcatgtgtacgtaagttactgttaagcttaacccttagtgaacaacaaacttgcacgcaaatgaaatgtgaggtttaaaaatatatagaacacaattaaacaaaaatatgaaacagtaattaaagtgtgggagttaatccccccaaaaatcgcaactataaccgattaatatgcgctaataaaactaaatatatatattttcagtacttacctatgttataaattagttgcccattttatattaacttttagtgtcaatttaatgtggcagcactagcagctggcaacgtgcagcagtaacaacaaaaacataaaacaacaccggattgtgcaacctgcaacttgcaacacaagcggcaaaacggcgtttctaccgcagcgtcgcctcttcggcggcggcaatgtgcccccctcggcgaccatgaagcatcagccgccgcccccgccactcccgctcagccaaccgcccacgatgggcgctacagcggcggggggcgtggccagcgtcataagcacgatgaacggcagcagcagcagtggcattgaggcggttaaatgccgaccacccatttaccccaaacgtaagtaaaagcctctttccatgctgcacacaaatttgtaaaaaaaaaaaaaaaaaaaaaaatcagaaaagaagcagacgaaaacatcaaggggttgatgaagcagtttacaaaggggttcaccgttgtattgtattgtattggtattggcactacttacttctaatgcgtaaaacgcattcccagaaaactctggtattctcataatttgactgaaaaaagacaatactgaacacagtaaaattcctggaaatatgaacgtaatgaaatgatgtaatgtttgtgagattttcgaaatcatcaatcaacgaaagataaaacagatcaccaccattttcgctcggttaagcttttatttggaattattaattaatttcttagtaactcatatctatgatgcatagctaaacgaagcctacatcataacatggctcaagttatcataccaaattgataacgagaacgacctttaaagataagcggttgattagctacaggcccagttaaccgaatgacattagtttaaagaatgttaggaatattataatattaacatttaggcacaactccacatcttggcttacagtgcatttgggttcccttttttccacgggccaattgcatttggctggatcgatcttatctggtatttggcattcggtatctggtaactgggatctggaatatgggatctcgataggctgccccattacgtggggcccacttcgctgcttttccgccgacaagaaaattgactggccaccgtaactacgtatgtatatgtacaaatatatatgtatgtatatatgtacatactgtatgtattttccgatggttttggtttcggttttggaggaaagtcgacggcggcggcttcctttcctttttgcccacttcactttgttttggcttcgctttcgccttggatttttttcatcaactttttcttggcttttcgactggggagtttggactgagttggttgttggttgcgactgccgtatttggtaggcgtagactgtgtttttattttattattatttttttttttttttttgccccatgttttctattttgttcctacttctcagcttgtgtagtgtggccgcacccaaaaccacccagcacaatcccaattgcagatcggtctgggccttgggtctttggctctttggtcttggccatttggctacttggcattggccttaacttggtaacttggttacttcggtgggcaacgtgaccgcagctaacggttctcctggttgacatgtcgttagtggccgatgaacatttgtgtcgccgatatcgggctacggccctcctaacttggccgaacgacctattggaatctatgtttactatgctacaccgcaagaaaacgaggtcaattataagcttttcaattgtatttgatgtctatctcaataacttctcaatggtcatatttttgattaaaattaaaagaacacagtaacgtcttaaagtaaaagattacattgatcccaagatgttatcatcatacttattattatattattaatcacttatgttctaagacatttatgactcagtaagatttgttaatatccattaaattcaattggaatatattcccagccggttcatatggagtgtaatatttttatatgcatttattaatcgattcacaatttggtgagcaatagtttttctcacttcattcagctagcaatgactagcaaacacatgtttacatacagacatctagaataaaacgtgataagataaacgcaatatttataaattttcactgagctcacctcaactggtgttttattttgttagtggattatacagtgtttactagccaattatagcaagtaagccagtttgaaaatattggcatattatggatatataatggatacaatcaaatacagtgttaagtcagtcaactctccccaaatggcgttcaattagttgcattgggaaaaatcacgctcatcgattgtctaagtttagtcatccatttccatttccatttgctatttccatggtgcattcctttcgcattccaagttttccaagttgcagttccaatttttattatggaaggctttcgttggttagttccaattaaaaatgccgcagcctagcgtttaaaaactcattaggagccaacttcattgttatggcaaatgaatacacatctatgtacatacatacatatctaccgcaattgtggttgtcgttccctttgcccgatgtcagcgatatgttctactatatgttttctctcactcattgttcgcatgatgtgggggcgtttatgtgcagttgtacagcagcggtcaagaaagtagcaagtagtcaagtagtagaattcaaatgaatgtataatggttttggtttatcttttatttgcactgaagtttttgattactattcacttctcagcaataccgactctacttttctgacctcgtctgtgcgcagtgcacagtgggagtggaattttcatggcaattagggaaatcagtgcataaagctgtcaaattccccatttactgaaaaggggttaagtgtctgatgttttcggctatgcatgtattattaatagaatgcgtaaatctagacagggtgcatttgggcctacatatcagcagagaagtgttgggatgtcagatcaatttcagagatcaaagttttagactgacatcgactaacaacaattgcggttgaagtaataataacatatacacatatgtagttatttaaaacatcttgtctagtctgcctaatcgaatgcaagttgtgtaaagctaaatttacagattttgaaaatctgatcgattaaacgatcaaaaacagatggatgtgtatatgttgaaatctgaattgataatacttttgattccccattggttcttatttacccctgtaaagatacgaatttgtatggctattttctgaattttggatcgggtttaaagataaacaattttctgtgtgtggaaaccgaagaagttcgaaatcgtaacgaatggaaaatgcttctttggatgcgtgaaattcccttgaagatgccctgtgaaaagttgttttggggcaggggtagacaagggtggtggggaaatggatgtggaatgggaggcggtaaacctggccagctacttcaaatgccgtcaattgttttcaaaagttttcagcgtgtcaagagcagagatgcggctatttatggaacagtgcaacacggcaccaacgaatgcccttggatgtgtggacaggcgtacagtggagcctggccaagacgatccagggagttgatagggtgggaaagaatatgcaaacagtttcaggcgttactaatataaattagatgctctaaacagtgatttttaaatatctcaacgaaagtgtaagatattttcgattaggtaagaagcttggctatagatattggtcatattggaaccactgccactatggctcctgtccgcttgcctttgtttgcccaaccaaatgcctgtgattctggtctgtgaaaatggctgaaaagtgagcggcaaagaaacccaatgccgatgcacgttcgatggctgcatcgagcgagagtcactccaagcccccaaagacccagaagtcccccaggtcccccaagtctccgcctccagattcccatttcttcgtctgggcactcgtgcgtttaacgagccactcgaactccagaaagaggaggaacaagatgcgtagggctccaagaaaatataacaagattgcagggcaccgaaatcgccgatactctactataaattccagtctaaatgatattgtagtgatacaatataatatatacgtatatatatatatacatatataaatgtttatatgtatatacatataacaattattcatagatcttttttattgtaacaagtgtctttaccatttgagttgagaaccccgcctaaaaaagtacttaatcctatttggcatagggtaaaaaagcgcacttaagaacatacaaaaaatgagctgcattttgccgcataactcgaattgaacttaattgaaatgaaatcgagacgggtcggtgaagggggggggggggtcgaaatgaatgagcgaccgagattgaaattgatgtgtcgccaagtgttaaatggtctgtcataatgccgatcaagatcgagtgtgtcgagtggaaaatagggaaaatcatttcccaggccatttgccagcgattccgatcaaacgttgaaatgctcaagtgtttgacacccaacaacctatctaataattcccatgggcattgcaactgccactcgggttaacaacggaatggaagggaattctgccagagatgcctctttttatttatttatattttttgagtgtagtacatttagcgacagacgacccagcaataatgacagcgacaagtctagtcaatgaaccacatcgcagtggggctgaacgcggggggaaagtgggtggggaaagatgaaaactgcaacgcccacagaaaagctctttgggataaacaaacgacaataagcagcggcgattgagatcgagatcttcgggcacagtaagaaatattggacagaggaggcagctatcagatttacggaatagagagctcagattttgtcggaagacgagtgtgggtgggtctggaaaatgggaaaaaggaaaatgggaaatggagatagctgggtggtgggggtattacacatacgggttgtgggtgctgtctgtgggcgttttcacatctcaactgatgatggaaaagataaagcaagtgaaggagaagagccaaaagttgaaagaactctacttttcctcaatttggcttgcattttacacatcacatttgtaaatactattattatactattaattacgagtgttatatatatatatttttatacatcaaacatttggcaagcattctaataaaattcaaaaaaaatgtctatatttgggattcaattaaatttcgctcagtgcattttgcatctcaccctttagaatcccgcttgcccctgccccttcttgtttacacaagccaatctttcagccgggccaagtcattgtgctcattagccttccttgcggtctcggtccgatttcgcacatttatccgacagatgaagatatgcaaaagatataaagatatctgtggagataactgtatctgggccctaagtcccaaacaaatatcttagtccattccatgtttgcacgcgattcgcaacaattgaacaaagtttccacaaaatatttcgagacatactgcgatgatcatgcgatgagttttgtgggggggggaggtaaaaagaggtattttccaactgatatatcccgatttggtagcgtgacgagggtgcataacatctatgctttaatcttttgagtaacacataaattaagcaaatatctcccaaactttttttttaataaataattatttaatatatatgcattgcaatctcacggaccataaattttctgtatttcagcaaatttattgaaatactttctttatggcaacatctatagtttttttgcttaatcttagttgccaaaactgaaaactgagtccacatttcctttggccagtgtcattaggccgttttaaggtttggacacttcaggaagagggtttgtactcgagttgcactgtgtcaccctgcagaagagtccttattccatatcccttggccttgccagctgagcgcttttcaaactcgatttaatgcgaaacgtgagcgggaacaatgaactgactgtctccccgctgagtgacacccttaggaactcaggaatacggtaacttgggaaatcagggggtgagtgctttaccaatccgcgggggtgggcccgcaaccagtgctaccatatcgcaggaagcgtggaaggggaagtacccagactgtcacggggtgtgaatacaaaacggtttgtaaacaaatgcaagtaacctgagaagaaactctgactggggcattgcaatttaaaaaaaaaggaattcgacaagaattatcaagttaatatggttccaattctgtcacattaactagtgttttaattgagaaggcctttcctaagattaaaatatggaatataaaaccatttatttgtatgatcaaaagtttttgaatttcatgggataaaccaatttcgcaactatctggcagccccgctgagcgcccgttattccatcacttacggccaaaaagggtcccgtaacatctggcccacttttttccgggcttccgttagtttgagccaggtccttgagcgcacgcgccgagagaacgcgactagatgggggtgatagtacgggtgaaagttgcatttcggtgttgccacttaacgtaacatccttggaaccggatagtgggcggtgggcggagagtgagggcgtgtggccgaagggcgctaaggagagcaagcaacagagagagagagagagagagagagagagtgtgtgtgtaagagataccattaaatttggatggttttagggcagttcgctcgccagttgcagctccaccacaatacaataaagtgttcatcaaactcggggatttattttttcaacgaccaaacaacaaacaactactgactctcactacgaacgaatatcaaaccaaaaataatcaacgcttaaacaagcaaacaaatccaactatgtggcaaatttgctgataagcaggaaaataaagtgaaaacccggaaggcagaaaaagtggcgaaggcttgggccaattacgttttaagtaggcgttccgtatacacacgaaagtcggcgggaaagggcggcacaggcggcaggaggcggagggagttacaaggaccaaaggaccaggacacacaccagcagcagaaacatgtgtaaggagcatccaaggggcacagatggaatgcatgggcttcttcccccgcatcgcaaaagctgtcagcccttcactcgacagtcattgccaacatttcatttgcctaatgagacggcgatgaagtcgctcaagagccgagattcaagacccaagtgcaaggtccttcagtcgattagcccgttttgagttctcactcctcaattaaacactcgaagaataaatcggtgaccgagcacttggtttgatttaaagatgcatctataccatctgatatattatcagtttttcaaggcattcaatcatagtattttcatccttcgaacctttactttaaagtcttttactataattaactataattaataactctactaatattttcttatagctaaaacgccgtcgttcgacaaggatcgcgattacataggctttgccacgcttccagagcaagtgcaccggaagtcggtgaagcggggcttcgagttcaccctcatggtggtcggcgagtccggactgggcaagtccacgctgatcaacagtctctttctgggcgatctctacaagaaccggcagatgcccaatgtggaggagcgcatcgagaagacgacgaaggtggagaagaagacgatggacatcgaggagcggggcgtccggctccggctgacggtggtggacaccccgggattcggggatgccatcaactgtgaggacagctggcgcgtctgcacccagtacatcgacgagcagttccgccagtacttcaccgacgagagcggcctgaatcgccgcaacatccaggacaatcgggtgcactgctgcctctacttcgtgccgccatggggccacaggtaggatcctaaataattttcattgttaattatgctaaaaaatttaatatatggattacatgaggcttgaagaaatgcttacatatttatttattagactagaattcattacatatagagttttaatattagcgtttcatgttgttttatttatatattaatttttttgtttgtttagtaaatgccacgataatgcgaaatccactttgagcaatttttcatgcgtaacaattattatgttacgtatattatatacgatgattcttgattattgtggaatgtttcatgacaaattttgtgcgttcttgggtttctggatagcgaaaagtactttacatatttttgatattattgtagaaatatggaatatagtgatgttaacttcaatcctattttcagcctgcgacagatggacctcgatttgatacggcggctgcaccgcaaggtgaacatcgtgctggtgatcggcaaggccgattgcctcaacaagcaggaggtgcgcaagctgaaggagcgcatcctgcaggacctggaggacaaccacatccagctgtatcagttccccgaatgcgactccgacgaggacgacgacttcaagcagcaggaccgcgaactgaaggcctccattccgttcgccgtcgtcggcagcaacaccattctggaggtggccggcaagaaggtccgagggcgccagtatccgtggggcgtggtaaacgtggaggatccggagcacagcgacttcatcaagctgcgcaccttcttgatatccacgcacatgcaggacctcaaggacaccacgcaggtgggtgatactattttatactacttttagagcgaaaaaaaaaatgccgccttatctttgagcattactaatacatatactcttgaaatgtttcaggacgtgcactacgagaacttccgggcgcagtgcatctcgcagatttcgcagcacgcgctgcgtgagcgcggcaagttgaagcgggactcgattagctcgaccaatggattcgacgcggccatctcggagacggacaggctgctcctgcaaaaggacgaggagataaggaggatgcaggacatgctcacccagatgcaggagaagctcaagcagacccatctcatggagatgaagaagaatgacagcgtgatcgacgtctagggaacggaaatgggaacgtgttcaattttgcaccgccatatatgcatctacctactatataggacttatatggtgacccagagaaatcctggagcagctgcaaccaaatcgactttgtttataagctagcacagactttttaaaaacaaaaacaaagacacccaattaaattcaaacaaaaacaaaactgattaagacaacgactctccccccccaaaaagcacaaagaatccgacgaaccaaaaacttcagacatcacacagcctttttcaattttgtagctaaagtaacgatttcgttaagaactaacgattaaatagaacacgtctatctcgagacattagatattgatcaacacgataacgatattataccaaagtttagggagtttcaaaaacttaacgcaagtaaattgttaatggaaaagatcaagaaaccacagaggcacatagaagtaccgataacgataaacggaaagacatagacagatcccaaaaatgttttaatttattgtacaagtataattttgatatatttgatttccttttgttttggttttaaagagcaaaacttgagaataggtgagttataagcaagtttgctttatttatgtgtaaagaacttataccatttatattgtaagaatatatcagatcggatgatataggacaaaccgctggaggttttggcactgaatttccatgaatcgactttcagcaagttccaattatttatgctaattacgtattatcagatatatgtatctatgaacaaaacctattttgttgaaacgaattgttaatgaatttattttaaattaatcgattaagccttcacgcaacaaccataatatttaaatgaaattatagtcgaaaaattatatataaacatagcgattgctaaaaatcgatttcaaataaagataaaaacaatttaaatggtgcatttacaaacgacattgccttggagaactctttttaaatttgcagattggttttccttttaaggaaactactcgaatgctttgaattaaaagcggctaagtgaattaatggaaaccaacaactaatttagcagtctatgattttaaattttgaaaacggcccgtgtatcccgctttgaactgcttatttctgacact

SEQ ID NO: 20555 - DNA, 1811 bp, DROSOPHILA
atctcgacgcgacggcggtgaagaagcatcagtaaaagcgcgcggaaagtgtatgtttcaaaactccgctcagaaaaccatatttgttattgtaaataatattcccttagaagtttggaatatttcccgcgacaatttttttttcggtgaaatttcataccgttttgccacaaaaaaaaaagaggaaaccaaaacaacggaaatagttaataacaaatgtcaatttaatgtggcagcactagcagctggcaacgtgcagcagtaacaacaaaaacataaaacaacaccggattgtgcaacctgcaacttgcaacacaagcggcaaaacggcgtttctaccgcagcgtcgcctcttcggcggcggcaatgtgcccccctcggcgaccatgaagcatcagccgccgcccccgccactcccgctcagccaaccgcccacgatgggcgctacagcggcggggggcgtggccagcgtcataagcacgatgaacggcagcagcagcagtggcattgaggcggttaaatgccgaccacccatttaccccaaacctaaaacgccgtcgttcgacaaggatcgcgattacataggctttgccacgcttccagagcaagtgcaccggaagtcggtgaagcggggcttcgagttcaccctcatggtggtcggcgagtccggactgggcaagtccacgctgatcaacagtctctttctgggcgatctctacaagaaccggcagatgcccaatgtggaggagcgcatcgagaagacgacgaaggtggagaagaagacgatggacatcgaggagcggggcgtccggctccggctgacggtggtggacaccccgggattcggggatgccatcaactgtgaggacagctggcgcgtctgcacccagtacatcgacgagcagttccgccagtacttcaccgacgagagcggcctgaatcgccgcaacatccaggacaatcgggtgcactgctgcctctacttcgtgccgccatggggccacagcctgcgacagatggacctcgatttgatacggcggctgcaccgcaaggtgaacatcgtgctggtgatcggcaaggccgattgcctcaacaagcaggaggtgcgcaagctgaaggagcgcatcctgcaggacctggaggacaaccacatccagctgtatcagttccccgaatgcgactccgacgaggacgacgacttcaagcagcaggaccgcgaactgaaggcctccattccgttcgccgtcgtcggcagcaacaccattctggaggtggccggcaagaaggtccgagggcgccagtatccgtggggcgtggtaaacgtggaggatccggagcacagcgacttcatcaagctgcgcaccttcttgatatccacgcacatgcaggacctcaaggacaccacgcaggacgtgcactacgagaacttccgggcgcagtgcatctcgcagatttcgcagcacgcgctgcgtgagcgcggcaagttgaagcgggactcgattagctcgaccaatggattcgacgcggccatctcggagacggacaggctgctcctgcaaaaggacgaggagataaggaggatgcaggacatgctcacccagatgcaggagaagctcaagcagacccatctcatggagatgaagaagaatgacagcgtgatcgacgtctagggaacggaaatgggaacgtgttcaattttgcaccgccatatatgcatctacctactatataggacttatatggtgacccagagaaatcctggagcagctgcaaccaaatcgactttgtttataagctagcacagacttttt

SEQ ID NO: 20556 - protein, 427 aa, DROSOPHILA
MKHQPPPPPLPLSQPPTMGATAAGGVASVISTMNGSSSSGIEAVKCRPPIYPKPKTPSFDKDRDYIGFATLPEQVHRKSVKRGFEFTLMVVGESGLGKSTLINSLFLGDLYKNRQMPNVEERIEKTTKVEKKTMDIEERGVRLRLTVVDTPGFGDAINCEDSWRVCTQYIDEQFRQYFTDESGLNRRNIQDNRVHCCLYFVPPWGHSLRQMDLDLIRRLHRKVNIVLVIGKADCLNKQEVRKLKERILQDLEDNHIQLYQFPECDSDEDDDFKQQDRELKASIPFAVVGSNTILEVAGKKVRGRQYPWGVVNVEDPEHSDFIKLRTFLISTHMQDLKDTTQDVHYENFRAQCISQISQHALRERGKLKRDSISSTNGFDAAISETDRLLLQKDEEIRRMQDMLTQMQEKLKQTHLMEMKKNDSVIDV

SEQ ID NO: 20557 - DNA, 3212 bp, DROSOPHILA
aatcccatctttctgctttaccaatagtagtcattgttgcacttgggctttattttgcacgaaatatgtgagtttgactttttgctttgcgctttgtttggctttggcctgacttttcgagctgttttcgatgtttttacatctttttttttcagagtcagagccacgacgaacgattatttcatgctcgcaaggaaagtaaatgacctctttgttgtcatgttgtcatgggaagttgggggggatcgagaaagagagctgctcgctctgtggctcgatggctttgggcatagctatagcaatggctataggaacgtgccagttttggccagccttttctggccaatttcgcagagcacgagtcgaacggcggcgagtcgaggggaaagtcgagagcacaagtcacacaaagaggcagcgaagcatcaaaaataaaagcgtcgcgccgtccgtttgacttcgtttgccacttaacgagacccccatttagcttctgcgcaccgccgcccctgtcttcctggcacacatttgcactttcctgaccccgctgatgacctcttccttcgccccgctgcaaaagctcctcctcttcttccaccaccccaataggccatcacttctcactgggccatgttttaatttttgcatcctcttcgagtgacaaatgactacagcaacaaacttcaggacgttttgtatgttttaggaaattcgctggattcgctgaaagaagggtagttagggttttagtttcttctcgttaattaaaatgtacaatagcaaaatacaaccacgatattgaaatcaaataacttttttatttgccaatgtatattcaaaatacagttcaatctccaggggcttccatagtttaggtcgtaagtctacgtgccacagagattgctcataagatttgaattagaattttgatgcaacataacaagttcaaacacatataaaactaaatgatcaatttttgattgttaattgattgagctgcctaggagatcagcatattagggttcagccacatgcgtatcatggcctggttctgggccaaaaatgcggccgactcgagatccccgcgtctgaatagtcgctcatcgaagtcgaagagggatcgattggttggcagctggacattttgtttgcaggtcttcacttggccacggttgggatacggcttttgaccagccgtttgctcagccagaaagcgctgcattttctcatggtgatggtccagataggcgttggaatcggagaacttcggcggagaactttgattatcacaaggtgataaagactttggtgaggctggctgctccggagaagtagcttctgatcgtggttgattttgctttagcttttgggatttcttcgacttgggtttctttttgtttccgccaggtggcgctaagttattcgacttgttactcacggtggcatcgcgggattggggcgggacctgggccatattgcgcttcggatttagctggatattgtgtgtcttagactgcgtcggtgggatcgatttgaccttggcgttgggtgaatttttacggttcggccgcttgatcggcggctgattgccggaccgcttgagacgtggggatagcaccaccttgaccttgagcctagatatggggagtgattccaccgcagcggcataactcatcggacgatcctggtccgataaataggaagaggatgtggttggacgactggaggtagatggctgttcctccagcatcatgtaatcactgaggggcttacgccgcaccggaacaagctggggcggcgacctattctcagatccggaactaccagcaccggtataacttgctcggaaataagttcctctggatttactaccaatggacttgcgtccagtcgatgtacctccttcggaattatttcctgccgaataaccacttccggagaaagctgctctggaattacccccctcggaattgccgctagtggagcctcctgctgctccatcaatggaatttcggcgattccggcgcttcaccaccaccgtcgtggatctcgattttggacccgccagtttagtattagtcttgggctctagtgctgtaggtgtttttgctggctctggcttacatcggaattcgaatcgggaattatttcacctgatggacgacattaaacaagcacttactttggcttttcgggtgtactgggatttcattttcttctttgagtctccacgattcgacagtcactagtctgatagaaatttgacaactagctactctgttagtttgacaatcagggttgtcatatctatacaatttttgtagcaggctattaaatactatatatcgatagtaatttaaaatcgttaacgatttaacttctccaagcttttgcaatttaacaagaatatattattagatagaaaattgaaaactacaatcccaaattttaagttataaagtgtgaatcaactgcgctttcggtttcatccgaaataaaaactataatttaaagacttgagagcattttgcatgtcaaacggtagattgacacaatttttctttctgtgcctcactcaaaaccttttcgctttcggaagccacgatggataggagaagaagaatgacaatagctttatgtatttatttatatacattttctccactcttgactgagcctcttcacctcgttcacttcactcaaaactcgaaactaaagttcacttttgcatgacaatcaatttttcactcgacggtagatggacaatgatgcggggctacaaaagggaaaggtggggaaaatggtcggcgggaaaggggaaaatggaaaatgggagtgggttgtctcaattgaggcatgaaaataaaagtggtcaagcaggcggatagaaagagatatgcagatgcagatacgatatagggggaccacatttcgacttgtcactgtctttgtttcccctttattgcaatttgcttcccgtctttaactttgtatatcttttcttttaaatcagatttattatatatgtgtagtgcataattgaagatatagtctttaaagaaaactttgtatgggcaagttatttaaaatcttgtttagtttttctaagtccaagtaatgtcttataaagattattgagattattattgcacttacaaaagaccataaggtaatatagaaaactgcaataaatgagccttgtaatttatgaa

SEQ ID NO: 20558 - DNA, 1149 bp, DROSOPHILA
atgaaatcccagtacacccgaaaagccaaaccagagccagcaaaaacacctacagcactagagcccaagactaatactaaactggcgggtccaaaatcgagatccacgacggtggtggtgaagcgccggaatcgccgaaattccattgatggagcagcaggaggctccactagcggcaattccgaggggggtaattccagagcagctttctccggaagtggttattcggcaggaaataattccgaaggaggtacatcgactggacgcaagtccattggtagtaaatccagaggaacttatttccgagcaagttataccggtgctggtagttccggatctgagaataggtcgccgccccagcttgttccggtgcggcgtaagcccctcagtgattacatgatgctggaggaacagccatctacctccagtcgtccaaccacatcctcttcctatttatcggaccaggatcgtccgatgagttatgccgctgcggtggaatcactccccatatctaggctcaaggtcaaggtggtgctatccccacgtctcaagcggtccggcaatcagccgccgatcaagcggccgaaccgtaaaaattcacccaacgccaaggtcaaatcgatcccaccgacgcagtctaagacacacaatatccagctaaatccgaagcgcaatatggcccaggtcccgccccaatcccgcgatgccaccgtgagtaacaagtcgaataacttagcgccacctggcggaaacaaaaagaaacccaagtcgaagaaatcccaaaagctaaagcaaaatcaaccacgatcagaagctacttctccggagcagccagcctcaccaaagtctttatcaccttgtgataatcaaagttctccgccgaagttctccgattccaacgcctatctggaccatcaccatgagaaaatgcagcgctttctggctgagcaaacggctggtcaaaagccgtatcccaaccgtggccaagtgaagacctgcaaacaaaatgtccagctgccaaccaatcgatccctcttcgacttcgatgagcgactattcagacgcggggatctcgagtcggccgcatttttggcccagaaccaggccatgatacgcatgtggctgaaccctaatatgctgatctcctag

SEQ ID NO: 20559 - protein, 382 aa, DROSOPHILA
MKSQYTRKAKPEPAKTPTALEPKTNTKLAGPKSRSTTVVVKRRNRRNSIDGAAGGSTSGNSEGGNSRAAFSGSGYSAGNNSEGGTSTGRKSIGSKSRGTYFRASYTGAGSSGSENRSPPQLVPVRRKPLSDYMMLEEQPSTSSRPTTSSSYLSDQDRPMSYAAAVESLPISRLKVKVVLSPRLKRSGNQPPIKRPNRKNSPNAKVKSIPPTQSKTHNIQLNPKRNMAQVPPQSRDATVSNKSNNLAPPGGNKKKPKSKKSQKLKQNQPRSEATSPEQPASPKSLSPCDNQSSPPKFSDSNAYLDHHHEKMQRFLAEQTAGQKPYPNRGQVKTCKQNVQLPTNRSLFDFDERLFRRGDLESAAFLAQNQAMIRMWLNPNMLIS

SEQ ID NO: 20560 - DNA, 13444 bp, DROSOPHILA
aaattgtataaaatatatatatatatatatagagagacaatctcgatattataaataaatgtttctttgtccatttattgaacatgctcattcaattcgattatttgttattaaggaatatcacacctgtatacactgtacttggcacgtcgccaaaaaagcaacagtttagccatataccgacttaatagtgacacaatgattgtggttaaccaacttgtacttttatttttgaataacacgacaaaataaggaacaatttcaatgctttctaaaagaaaaatggtgctgccactgcaggagcaaggaaacgagttggctgaatgagtcgggcgccagttgcagggaatggagcagtagccaggatgcgggcaggagcagtcggagcaaaggcggcattaaactggttaaagtagtccaagcgctggctgctggatacggccaggggagatgcacccaaaggattaaccaaaggagcgccagcaaagggaccagcagcataggcgccagcaaaaggtccacctgatcctggatagagtccgaaagtagaggccgaaggaaacagtgctggatccacagctggcttggctgccacactggccagcagtcccagggatacgagaatcaactgaaaacagaaaagagccaaatcttacaaaatccttgccaaagaatttgcttaccatttgctgcatttcaaaagagattgctgctgccacaagatccaaaaactgaatatgcattggcttggatcgactcaaaggttttatagttattgtgggcgtagaagaccacagctggcctggctaattggcgctccaaattgtcaaacacttggctccaaaagcggcctaaatggcaggtgctggcagagcagccaaccgccacccatttgcatacgatccgatatggctatatatgttggctatgtatgttgccacacaaaattcagtaatcaaaagtttggaaacgacttgacttgtccaaataaatgaaaccatttgtaatatgcttctcacagtttaattaatagaacaaaatgacgggacaaaaaccaatttttacatcccctacacaaagggacttgacaataactatcgtattcgtataattgcattacatatatatgtataagaataggttcgtatgtataattatcgtatattatttagctgtttgggagttacttgatcgttcagtttcagttgcttgttcagttacgtataaatatatagttatgtataatatatagtcaaatcataaaaacacattgccgtggaattaaactaattagtcgttagttaactatgtaatcaaacaatcatacaaattatgcttgtagtatgcaaaaacataaacgtaccctaggaatatatgtggtattgtatgctagcacaatggttgcactttggataattcgatatatatggaatagacgacatctagcataggcaattaattagttgctttcgatttgcggatcgattgatgattcggggcgggggcgtgagtatttcgttatttgacgagtggggagtagctttaacaaacacttgttctcgtttaagttttctctatggcttgcttggaatcgactgctggataaatctatatatacaatctggctttggaataggatcagagctgtgtgatgttttggcttgggcagaactgggagtaagagggaactctacagtcctcgttggagtgttacgatattgcaagtttaaatggcgattgagttgactagatatatgtggcgaattaaatatcgtatggtttctttatttctctctcttctctaagactgctcctcatcttcccaatccgccaatcctaccacagcacatcataatcgtacacatgctccgaggacgcaataatcagacactttagaaagtcatctagggtgcgcttgagtttccactttttcggcttcctcagcagctgctgcagcggcttcgacttgacctttggctcatgccagggacttgtagatgtggcgatggatttcttcatcggctgattcacttgctcctgcaactgctggactggcaagttgcagtaaacatggcgattcaagctctgtcgcaggctgtgcagtcgctgctgctgatagtagtgattgagattggccagaaatgaaaagtccgtgtcgttgaccacatcgatctccgcatagttgtggttatcgatgtccggatccggtcgctgccccgatgccttggcaaacagttggtcaaatcacatgttttcatcgaactttgcaaagttcgcgtcctcgctccactgaaatttgccgccctcagtgtcatcattgtgctgatccatggcctgttcctggtctggtgatttaaagaactcgtcatcctcgaagggatcctcctgctttttggcaaatatgtttaccgactcggatttcttgatgagctcctggcgctgctgcagcttgctggttcgcatattttgcttcctgctcatagcaccagatcctccggcacctgctgtggcagaacccgcttgttccttttcaaaatcgaatgatgccttggcgaagtcatcctcaaaggcagcatcatcgaattgggagaccttaacattatcgtcaaatcgcagtttttgcgtaattggtggtgttgaggttggcggtgtatccatctcaaactgctcccgtttctcgcgatccgaaaaatcattggagaagcggaacaggctcttcgatccgccgttgttcgcatttgccgaaactggacccgccggcgtggaattgcaactggaggcggtacctgctggcgccggcggcggagagctctgattaaaatctgactcaaatccatcgtcaaaattgaacttggaacttgtaactccagcggaggactccccgccactcatcatcaggccacccggtccagtgctactggcattcgaacgtggcgtgggagttggagtctgctcgtaactgtccacaaaaccatagtcactgttagccacgacgcctcgtgtacgattctggcccggaagcttcgccagcgatggcggctgatggcgttccatttgccgacgttcggactccagcatccgctggtgcatctcatgtcgccggcggttcaacctctcgaacttatcctcatccgttggcggttcatcatccacgtagtcctcatcatcatcgtcgtcgtcatcgttacgctggcctggacatatatagtcatagttatccctgatgccacgcccatagctcgatctggacggggcagaagtactagcgctgggagcaccgacggtggctaaatctttggcactgcgggctcgggttttcttgcggaatctgagggataaatgaggtgttaaataaaatatttactcaattcatgaaataatattccccaaaccttcgttctttttctccatcggagggagtttgacccaaagctaccgctctgcgactctcagccagtcgcctttcggtttcagcagcgctggctggacgcttccaagatttctgaccaggcaaggccggttctgcaatgcgcatacaattaaaacgagagaaccgatatgaattacaaacttgagacacataccctctccgtcccagggactggagccgctgcttttgcgcaatcgctgtggacccactaccgcattggagggcagcaccacatcaccgcctagctgattgggacgctgcaggcttcgtactccagatcgctgctggaagtcctgctccgagtcctgctcgtaatcaatgtcgccacttatccggagctttccagacgtagttgttggctttcgtaatgaacgggtcttcatctgctcgcgatcacgttcacgatccctttccctatcgccacggtaatcatcgcgactatctaggctgccataaacatcgtttccactaccaaaactgcgacgacgacgggtggcgctctcataggactcgagactttcccgatcgaaggattttcgatcgcgctcccgatccctgtccctttctctgtcatacagataatcaccaccacctcttcctggcttgtaggccaacggtgaacgacctccacgctcctcgtagacgttttcgtagtcgaaatcgtagcttggacgagcataatcccgatactctcggtcgcgatcacgctctcgttccctatccctgtgatctccgcgatatttgcctctcagttgtccacgtttgtcgtagatgggtggcggtgggccatagctggatcgctcgtaagcagtacgatcgaaagatcgtacgcgcacctgctcaatctcctgaggcgaccatgtgtggtgcgccgggtgatgataccagctgggggattctgcaggaacacaagtatcgtttaaagaatgattcaaaaatcagtcttatgaagtatatgaactcacccaattcaaagttatccctgctgcgagaaagtccgtgcttgaactttcgctgctgctgttgatgttgtggctgatctcggcgtgcaacgaattccccatcgtagctacaaatattaaagatatggggaattattattttattacctatataattattcaaagaagtggacttactcgtagtcctcgtcgcaagagttcattcgcctggcgtgtcgcatgtagtatccatgccgatccgtatgctgaggtggagcttgcatagggggctgatggggatgagccatttgagcggcggccaactgtcgccgcttcagatactccggcgtttcatcgtcccagggacttaggtctcgggatgatgaggatgtctgctggcgctccttcttcgcccaacgacgctgttgctttgaccagccgtcatcccggggatccgaactgcaaggcgattctaccgtatccggttgcgaagtgttggatgcaggaggtggtggcggcggaagcgttagcctagccttgccttttgccttcggggaatcgaatgtagcccaggattgcttttcccgatccttgtcgcccatcatttgtttggttgcggtatcgatgagttgggacacggccgaaagctgcgacggcacaggcgatgggcccatgcctggtttctggaggggaatcggcgacgtgctgacatcattgaattgcgagggcgtgtgcaagccgggagccccacgtgatggagctgccgaggaggtggcgggcgaaactcgatcccttgagtccagggagagattcgaaattgcacgatgcatgagctcgtcgatctcgatgtcatctttcgttccaccaccgggagccgttaggatggagaggaatttttgatcctgctttggaggcagggattgctgctgcagctgctgcacatcctctagagccggagcagctgcatctagttgttgcgtcgacgtggatagcttttcatactgatcctgaccgctgacaggctctgcgtccttttcattgctatctagactgctctcaccacccgcatcagcatcctcgtcctcatcataatcgcccacggtcagagcggaagacgaaggctctgttggaaagcccctgctgtcgaccaagccatgacgatcgcgggcatgagtctgaacattctgatgatccataatttggcgaaggtcatgatcctcgttgaactcatcactgaactcaggaaagtcttgcaacagatccttttccttctcaggctgagtgtcggttgctattgctggtttatcaaagagattctccactaggattatgtcccgcagagctgcgtaacgatctttggcctgggcgacaacttcggtgatttttgtgtcaatcttcggcgcaggtttgacatctaaggcatcaattggtagctccgcacccacattgttcacctccaagccctctgaaatttccttggcctgggtctcatccactggcggtggtgtcaaatcgcccataagatccgtttcctgctgttgctgctgaagctcctgatcgatgatctcgcgaaatacggcataccgatctgctgagggcactgtcgcaacaactggcgatactgtcggcaccggagttggtgcatcgttaaagttggcgaagttagccacaaaggtggagtccgaagaacccgaaggcatcactggttcgtcttcgccaaaagtgtcgtcgaacttggccacaaaggaggtctgctgatcaaaattaaccttaaacacagctgccgtggaagctggtgcaggagctgtgtttgctggcgaagatctcctctcttgactgtgaacttggcttttttcactggacaaatactcggagagataggctgtcaactggaccagagtcatggtgctcagtttgctggcgggaacgttcagtttgatagccaaatcatccattcccagggtgagcaattgagttagggtgatatcgggagccaaggtattgctagagggcgctacttccggggcctgggcctgcgcctgtgcttgagcctgcagaatctccgccttgttttcgtagatatcctgcggcctgcctagcgaagcctgccgttgaggtctcgcgcgagccgaggatccttggctgggtggcggcagcaatggcggtggagctcccaacggagctagataatcatcctcggtgtgtccaggttttcttggccttcccggacccggaaagcagccatcagagcgaccaacacggcgcgatggcaatggaatgggtggtgcgtcaacggaggaggcagtccttcttgccgtgacattactgttcaaatactcataccttccgctagttggcggttgagtggtatttgcaggtgaaggtcggatgaccagatcgctgaactgcttcttgggtggcaggggcggaggttccgagtacggagtcgagtctggacgcggcggtggctcgggagctgcctctgtttcactcaacgaatcgctctcctgcaggcggcgcatgttaacacttgaaccaatatccgaaccagatttgccaaatgatctggcctggccaaaaaggtgcggcatcttcttgttgcttatactggagatcacatcaagggctccgccacttggaagtgcggaaacagatgctgtgggacggttcctcaccgtactcggaggctgctgaagctgcaactccttctctggtggcaattgcacctgaagtggtccattgaatacattcgcttttgtctccgtggccaaatttggaatcgagggagctggaaccgccggcggagcctcgaactcgaaagcatccagtttggcaaagagatcgctttcctggaagggatctggatcgctctttttccgagtgggcgagaacggatccgtatccctgggcagaagtacgggatccgccggcggatggggattctccagcgagttcagcgttggcggttctgtggtataatagtggccggtgggattaggtggattagtgacatggccaagcaacagtttcagctcagcgctcggggtgatcgaatgggaaatagatgtgggtatggaaatgggagcgggcagcggatcgggattgagagcaaccgtggacaggagctgtcccagactggcggcggtgctagcggtggatgttagtgtgttagccgagttctgttgcggatttcctgcggtgcaagtgcaaactttagatagctgcttactcaaggcgatttctaattgcacagagaaaaaatttcgccaaaaatgatgcacaactcgtttatcgtaataaagaatatgcatttcagttgttaatgatttttttctctgtgcaataatggtgttggaattgcgattggttagtacctgcggtgatgttagtagctgtggtggtggttgtggagatggtggtgctatcctccggaaagaggccatccaactgacccagagagagacccagaccgagacccgcctggctgccggagctgagctccttgagcagcttcttcggcggattcttcagctcttggaagaagtatttcttatcgacatacggcctggtgcgtcctgtgcctagcggatccaaatccgtgaacgcatctgaacaatggaacagaagggatcaggaaaacgacagggataacaagcaatgagagcagctcccaagcggagactccgaattcgcatttggcacaaaatcaaaaacaggagaaaaactcaaagagctcagaagaaatggaagaagaaagcttatatcttcggtaagttccgaagacaacaaatccacaaacgaagatccctatttaaaagacatataagttaatttgttgtaagtagctttgaatataggatgagcacgttactaaccaaaaccacaaataaactaagattaaaaaagtaacgtaaagaggggacaaacctaaaatgtttaataaacaaaataagattggagaataataagaatataagtcacataaaaaaaaaataaagaatgaaggcgttttcaaaactatacaaaatatatgtttagatttttaagagtttctttacacattcagtgtataatttacatttgtttagctttactaattattattccacaggttttgtataattacaaagaaatctaaattttgttaaatgttttacccccgaagattccattcagttcaattaatttgacccaagaagactaccaattgttcccttgccgggcggacacatctagttccactgaccactccccacacgatcacagacagctcttttatcgcttcaatggagatgacaaagcgatcaaatttcacacaagacgcgacaatttcgatgatgtggaaaagtaggaggagcgatgctcttttcaactcacccaatgacaaaatggtggaggtctgttcctcatttcccaaggccgtacttagtccaatatccagatcagccagaggtccagatcctgcagcaacctccgtcagttgttgggtgggagtggccgtggattcgctggaggccagcggagccatggccaaaaccgaacccaatccactgctgctcaccactttggacgtgtcgaagacatcattttgttggtccagttcctgcagccagttgtcatcgtcgttatctgcagcctgtagtccagcggaggctgagccgtgggagctacttgtaccaggaggtggcgaaagcattgcatccaaactggtcaccgcatcaggtgttttgttgggcggcttgtgcctgttgcgtccggaatcaggtggcggtggcagtatgctatacgagggcacatagataaacgagtctccgaaaggatcgtcctcgctggctgatttcgctagagatggatggccagcaccaccagtgctactggtggtcggctcgtttggcgttatccgttccatctgactgattccccgctgaagcgaggtaagctcctgctccaagtccacaagatcggccacggattccggagagacctataaaatatagtgttgtaatgaaaaatagtttgaaatagcatatgactgggtaacgaacctctttggccgccgatccggatgccttggccacgtcaagactcacgcccagcctgctcgttccattcgtggtgctaagactactgcccagcagggtgagggcatggccggatgagattcctccgctggccaaatccgagtggcccagacccatgccacccaggccggaggacttcagcgacgacagggaggccagctggctggaatggtcgtgcagggacttaccctggatctgctggcgcgccatctcaatctcctttttctttagctcgaaaactacctggaagagatcgcgcatggccagcaccacctggctggccgccttgtccgtcttgatgccgaagaaccggtgaccactgtccggcgatccgaagatatagccaaaggccctcgagtcagtcatatcctgcgcgatgaaggagatcttatgcaccggatgatggtacagggagtcacccgttttctcatccctcagccgcagaccatcgatggtcacatggatggttatccgctgcttgtgctctccagccgcccggatggccattttgagatcttgcagcgcctcctggcacatccgatcacctcgggcctcgcccaccttaaatttcgaaagatcacaatgttagatactgaaatttatccaaaaagtaaactcttacctccagaatgccgatgagctttgccttgaactgaacgccatcgccgaaaaagcgtcccggatcattgcgatctggaaaatgagcccaagaatcgaatgccaaaatgagtctttgtgtttgttaaggtgtgtattcggataattttggtttggcgaaaatgttttacagagtgtagtggtcactcgtcagttttggaagccgtgggatttggggtgtggctgatttattttgagagaacccacatttatgaacgtttttatttagcactgttacaaattttggcaacatttcaaaaaatttaaacataaaaaagttacaaaaggagtatttaggaaacggaactataatataattaaaccatctagtccgaaattaaaaagaaaatgctttaatatttgcaatataagatgaaatggcaagcaaactaattactcattagtttatcaaaagaagtataatccatttcgacaaaactctatggattgtgcacaaatctgggtttattggaccgaatccccattaaaatattttgaatgattcatttttcaaatttttcgagtaattatgtgcttgaatgaacacttgtgttcctcgttggatcatccaatatttaaaatgatgctttgatggaatgcaaaatctatatggattatatattttttattgtggtatatcaaatttgaaattttaaaaatcttcattcaagatcaagaagactttcattgttctattcaatatttcgcatcacttttcattccttccgctgggaactatgatttaaaaacagttttattatttctttgccttccgaagcatctttattacaattttatactgaatgctaaaacagttttgaacgtctaagtagaatttaaaagatttttaaacatgtatgtacactgaaaaacttcttctgatcatcttctttatcttcagatttttttataaagaactcgattctttgaatatcagcatttattgtattagtaaatctcaatttgctatagtgataggaccaatattgattttttatatatagcttcgtcttatcagcacaatatcaaaaaaaattttcactgtgatcttcgcatatgtttgtatcttggttttgtttgccctttctcactgcggaggggccactgtgttcgtttgtttgttatttgtgtatttgcttagtttgttttcgctaacgttttgcgtaattcgtttcctctgccgcgccgctgccgccgccaaaggtgctggccaacgagagattggaggaggctgtggacaacttggccaccagggacttgaccatgtttcgcccggccgaagtctcagtgggtactgctcctgctcattgggaaaacgctggctggaaaaactctggaattctggaactctggtcaccgaagtgtcaacagaatcagtgtagcattccgggcctctctgttgtgtgtgtgtgtgttgacatttccattgggacgcggacgatgacgagagggtgttggtgctggagggggcacacaatgggggacaaacaatacataaattccacaacgatttttcgcgacgctatagatttaattaaattctagcggagaacgatgcgcgatcatggaatgaataaaagcgaatgagagcgtggaaacgattcgaatgctctcacggtgactctctttttcgactggactggattgtcgcagtttgttcaattgaaataataaacaaaaacacacacacacactctttgaggcactcgtgtgtacacatagatttcactctattatttagtgatttttgtggcgcaaaatacagtacagaaaacgagcagctctctcggccattgttgatcttttttgggaaaactgcaacacctgcgacgccggcgcagcagctgctattcgattggcggatgctgtctgagacgcttatcgataagccgggtctagcattgaatcgagggatcgatcaataggatatatcggaatttgaaaagctagcttcggccagaaataaacctaaaacgtttagttttacttaatggtgaggaatttactttgtccctgctcataagtatgattagctttttaagtaaacaaaggagaacgctatggtcgaattacgcagataatagaagtgcgagggagatgcaggaaggaaagtagaaaagttgactgacaaaatatttaccacctagaaaaggtctatcatgtctctacaacatggcgtatgagtgtaatttgatatgcagtgctgttaaaagggcaaagtatctttaaagagaaacaatttaggacagtttttcttttactgatttcagaaatattactttagaacttcgaagtagggatgcctgtgttcaaaatacataatataccctaattcaattgacaataccaaataaattcgttgttgacataaaacactgcaatttaaatcaatgtgaatggcttgcgtttttagttgataatttcatcattcctcactagcaaaaatttcaagaaaaaaaatttcttcccacaagaagaattactttaaaaagactttatagatgaaaaaattccgttttaaggtgttatttgtattacttacatttacaaggactcgttttcttgcgcagcgtctgcattttgctcagaaaaagctgattggcattcgtgtagtaattcctttggccgcgtataatgttgcgaataatgattgagccttaaagagctttatttatttatgatttattggacttccttcgttgttttattgctaattgccttttgtgatttgtttacacttgtttcgctctttgcgtcttccgtctctttcgcactccccaacttcctgacagtcagcgttttgttgttgttgttattgtgccagtcggtcgatagaacacaccggcatttgtctcactcacactcgcacgcgctcacacggacacggcacggattatcgattttccaacgggggcctctgtgtgcgtgtttacttccactttgcctactttaaggcgttgtggggggtgggaaagggatgtagctacgcctttcattatgcagcggtaagctatctaacttcaattaactgttattcgttgtttttgatcctttcccgtcttaatattgcacaacacgcgcagctttctttgtctggcagccaggaaaaaaagtgaagcacaaagaagtgggtgacacactcgtgattttggctgagcgaaaaaaccaattcgactcttttggcaaatatttacaagctgatttttacgttcttcctgctttgcatgttattggccattaatttaacccaatttgaatgggtttgtagtttaatttgggtcctacgccctgggagcagcaggatatgcacacacaccgaaaattcgatagtaaaa

SEQ ID NO: 20561 - DNA, 8833 bp, DROSOPHILA
gaattagggtatattatgtattttgaacacaggcatccctacttcgaagttctaaagtaatatttctgaaatcagtaaaagaaaaactgtcctaaattgtttctctttaaagatactttgcccttttaacagcactgcatatcaaattacactcatacgccatgttgtagagacatgatagaccttttctaggtggtaaatattttgtcagtcaacttttctactttccttcctgcatctccctcgcacttctattatctgcgtaattcgaccatagcgttctcctttgtttacttaaaaagctaatcatacttatgagcagggacaaagtaaattcctcaccattaagtaaaactaaacgttttaggtttatttctggccgaagctagcttttcaaattccgatatatcctattgatcgatccctcgattcaatgctagacccggcttatcgataagcgtctcagacagcatccgccaatcgaatagcagctgctgcgccggcgtcgcaggtgttgcagttttcccaaaaaagatcaacaatggccgagagagctgctcgttttctgtactgtattttgcgccacaaaaatcactaaataatagagtgaaatctatgtgtacacacgagtgcctcaaagagtgtgtgtgtgtgtttttgtttattatttcaattgaacaaactgcgacaatccagtccagtcgaaaaagagagtcaccgtgagagcattcgaatcgtttccacgctctcattcgcttttattcattccatgatcgcgcatcgttctccgctagaatttaattaaatctatagcgtcgcgaaaaatcgttgtggaatttatgtattgtttgtcccccattgtgtgccccctccagcaccaacaccctctcgtcatcgtccgcgtcccaatggaaatgtcaacacacacacacacaacagagaggcccggaatgctacactgattctgttgacacttcggtgaccagagttccagaattccagagtttttccagccagcgttttcccaatgagcaggagcagtacccactgagacttcggccgggcgaaacatggtcaagtccctggtggccaagttgtccacagcctcctccaatctctcgttggccagcacctttggcggcggcagcggcgcggcagaggaaacgaattacgcaaaacatcgcaatgatccgggacgctttttcggcgatggcgttcagttcaaggcaaagctcatcggcattctggaggtgggcgaggcccgaggtgatcggatgtgccaggaggcgctgcaagatctcaaaatggccatccgggcggctggagagcacaagcagcggataaccatccatgtgaccatcgatggtctgcggctgagggatgagaaaacgggtgactccctgtaccatcatccggtgcataagatctccttcatcgcgcaggatatgactgactcgagggcctttggctatatcttcggatcgccggacagtggtcaccggttcttcggcatcaagacggacaaggcggccagccaggtggtgctggccatgcgcgatctcttccaggtagttttcgagctaaagaaaaaggagattgagatggcgcgccagcagatccagggtaagtccctgcacgaccattccagccagctggcctccctgtcgtcgctgaagtcctccggcctgggtggcatgggtctgggccactcggatttggccagcggaggaatctcatccggccatgccctcaccctgctgggcagtagtcttagcaccacgaatggaacgagcaggctgggcgtgagtcttgacgtggccaaggcatccggatcggcggccaaagaggtctctccggaatccgtggccgatcttgtggacttggagcaggagcttacctcgcttcagcggggaatcagtcagatggaacggataacgccaaacgagccgaccaccagtagcactggtggtgctggccatccatctctagcgaaatcagccagcgaggacgatcctttcggagactcgtttatctatgtgccctcgtatagcatactgccaccgccacctgattccggacgcaacaggcacaagccgcccaacaaaacacctgatgcggtgaccagtttggatgcaatgctttcgccacctcctggtacaagtagctcccacggctcagcctccgctggactacaggctgcagataacgacgatgacaactggctgcaggaactggaccaacaaaatgatgtcttcgacacgtccaaagtggtgagcagcagtggattgggttcggttttggccatggctccgctggcctccagcgaatccacggccactcccacccaacaactgacggaggttgctgcaggatctggacctctggctgatctggatattggactaagtacggccttgggaaatgaggaacagacctccaccattttgtcattggatgcgttcacggatttggatccgctaggcacaggacgcaccaggccgtatgtcgataagaaatacttcttccaagagctgaagaatccgccgaagaagctgctcaaggagctcagctccggcagccaggcgggtctcggtctgggtctctctctgggtcagttggatggcctctttccggaggatagcaccaccatctccacaaccaccaccacagctactaacatcaccgcaggtactaaccaatcgcaattccaacaccattattgcacagagaaaaaaatcattaacaactgaaatgcatattctttattacgataaacgagttgtgcatcatttttggcgaaattttttctctgtgcaattagaaatcgccttgagtaagcagctatctaaagtttgcacttgcaccgcaggaaatccgcaacagaactcggctaacacactaacatccaccgctagcaccgccgccagtctgggacagctcctgtccacggttgctctcaatcccgatccgctgcccgctcccatttccatacccacatctatttcccattcgatcaccccgagcgctgagctgaaactgttgcttggccatgtcactaatccacctaatcccaccggccactattataccacagaaccgccaacgctgaactcgctggagaatccccatccgccggcggatcccgtacttctgcccagggatacggatccgttctcgcccactcggaaaaagagcgatccagatcccttccaggaaagcgatctctttgccaaactggatgctttcgagttcgaggctccgccggcggttccagctccctcgattccaaatttggccacggagacaaaagcgaatgtattcaatggaccacttcaggtgcaattgccaccagagaaggagttgcagcttcagcagcctccgagtacggtgaggaaccgtcccacagcatctgtttccgcacttccaagtggcggagcccttgatgtgatctccagtataagcaacaagaagatgccgcacctttttggccaggccagatcatttggcaaatctggttcggatattggttcaagtgttaacatgcgccgcctgcaggagagcgattcgttgagtgaaacagaggcagctcccgagccaccgccgcgtccagactcgactccgtactcggaacctccgcccctgccacccaagaagcagttcagcgatctggtcatccgaccttcacctgcaaataccactcaaccgccaactagcggaaggtatgagtatttgaacagtaatgtcacggcaagaaggactgcctcctccgttgacgcaccacccattccattgccatcgcgccgtgttggtcgctctgatggctgctttccgggtccgggaaggccaagaaaacctggacacaccgaggatgattatctagctccgttgggagctccaccgccattgctgccgccacccagccaaggatcctcggctcgcgcgagacctcaacggcaggcttcgctaggcaggccgcaggatatctacgaaaacaaggcggagattctgcaggctcaagcacaggcgcaggcccaggccccggaagtagcgccctctagcaataccttggctcccgatatcaccctaactcaattgctcaccctgggaatggatgatttggctatcaaactgaacgttcccgccagcaaactgagcaccatgactctggtccagttgacagcctatctctccgagtatttgtccagtgaaaaaagccaagttcacagtcaagagaggagatcttcgccagcaaacacagctcctgcaccagcttccacggcagctgtgtttaaggttaattttgatcagcagacctcctttgtggccaagttcgacgacacttttggcgaagacgaaccagtgatgccttcgggttcttcggactccacctttgtggctaacttcgccaactttaacgatgcaccaactccggtgccgacagtatcgccagttgttgcgacagtgccctcagcagatcggtatgccgtatttcgcgagatcatcgatcaggagcttcagcagcaacagcaggaaacggatcttatgggcgatttgacaccaccgccagtggatgagacccaggccaaggaaatttcagagggcttggaggtgaacaatgtgggtgcggagctaccaattgatgccttagatgtcaaacctgcgccgaagattgacacaaaaatcaccgaagttgtcgcccaggccaaagatcgttacgcagctctgcgggacataatcctagtggagaatctctttgataaaccagcaatagcaaccgacactcagcctgagaaggaaaaggatctgttgcaagactttcctgagttcagtgatgagttcaacgaggatcatgaccttcgccaaattatggatcatcagaatgttcagactcatgcccgcgatcgtcatggcttggtcgacagcaggggctttccaacagagccttcgtcttccgctctgaccgtgggcgattatgatgaggacgaggatgctgatgcgggtggtgagagcagtctagatagcaatgaaaaggacgcagagcctgtcagcggtcaggatcagtatgaaaagctatccacgtcgacgcaacaactagatgcagctgctccggctctagaggatgtgcagcagctgcagcagcaatccctgcctccaaagcaggatcaaaaattcctctccatcctaacggctcccggtggtggaacgaaagatgacatcgagatcgacgagctcatgcatcgtgcaatttcgaatctctccctggactcaagggatcgagtttcgcccgccacctcctcggcagctccatcacgtggggctcccggcttgcacacgccctcgcaattcaatgatgtcagcacgtcgccgattcccctccagaaaccaggcatgggcccatcgcctgtgccgtcgcagctttcggccgtgtcccaactcatcgataccgcaaccaaacaaatgatgggcgacaaggatcgggaaaagcaatcctgggctacattcgattccccgaaggcaaaaggcaaggctaggctaacgcttccgccgccaccacctcctgcatccaacacttcgcaaccggatacggtagaatcgccttgcagttcggatccccgggatgacggctggtcaaagcaacagcgtcgttgggcgaagaaggagcgccagcagacatcctcatcatcccgagacctaagtccctgggacgatgaaacgccggagtatctgaagcggcgacagttggccgccgctcaaatggctcatccccatcagccccctatgcaagctccacctcagcatacggatcggcatggatactacatgcgacacgccaggcgaatgaactcttgcgacgaggactacgactacgatggggaattcgttgcacgccgagatcagccacaacatcaacagcagcagcgaaagttcaagcacggactttctcgcagcagggataactttgaattggaatcccccagctggtatcatcacccggcgcaccacacatggtcgcctcaggagattgagcaggtgcgcgtacgatctttcgatcgtactgcttacgagcgatccagctatggcccaccgccacccatctacgacaaacgtggacaactgagaggcaaatatcgcggagatcacagggatagggaacgagagcgtgatcgcgaccgagagtatcgggattatgctcgtccaagctacgatttcgactacgaaaacgtctacgaggagcgtggaggtcgttcaccgttggcctacaagccaggaagaggtggtggtgattatctgtatgacagagaaagggacagggatcgggagcgcgatcgaaaatccttcgatcgggaaagtctcgagtcctatgagagcgccacccgtcgtcgtcgcagttttggtagtggaaacgatgtttatggcagcctagatagtcgcgatgattaccgtggcgatagggaaagggatcgtgaacgtgatcgcgagcagatgaagacccgttcattacgaaagccaacaactacgtctggaaagctccggataagtggcgacattgattacgagcaggactcggagcaggacttccagcagcgatctggagtacgaagcctgcagcgtcccaatcagctaggcggtgatgtggtgctgccctccaatgcggtagtgggtccacagcgattgcgcaaaagcagcggctccagtccctgggacggagaggaaccggccttgcctggtcagaaatcttggaagcgtccagccagcgctgctgaaaccgaaaggcgactggctgagagtcgcagagcggtagctttgggtcaaactccctccgatggagaaaaagaacgaagattccgcaagaaaacccgagcccgcagtgccaaagatttagccaccgtcggtgctcccagcgctagtacttctgccccgtccagatcgagctatgggcgtggcatcagggataactatgactatatatgtccaggccagcgtaacgatgacgacgacgatgatgatgaggactacgtggatgatgaaccgccaacggatgaggataagttcgagaggttgaaccgccggcgacatgagatgcaccagcggatgctggagtccgaacgtcggcaaatggaacgccatcagccgccatcgctggcgaagcttccgggccagaatcgtacacgaggcgtcgtggctaacagtgactatggttttgtggacagttacgagcagactccaactcccacgccacgttcgaatgccagtagcactggaccgggtggcctgatgatgagtggcggggagtcctccgctggagttacaagttccaagttcaattttgacgatggatttgagtcagattttaatcagagctctccgccgccggcgccagcaggtaccgcctccagttgcaattccacgccggcgggtccagtttcggcaaatgcgaacaacggcggatcgaagagcctgttccgcttctccaatgatttttcggatcgcgagaaacgggagcagtttgagatggatacaccgccaacctcaacaccaccaattacgcaaaaactgcgatttgacgataatgttaaggtctcccaattcgatgatgctgcctttgaggatgacttcgccaaggcatcattcgattttgaaaaggaacaagcgggttctgccacagcaggtgccggaggatctggtgctatgagcaggaagcaaaatatgcgaaccagcaagctgcagcagcgccaggagctcatcaagaaatccgagtcggtaaacatatttgccaaaaagcaggaggatcccttcgaggatgacgagttctttaaatcaccagaccaggaacaggccatggatcagcacaatgatgacactgagggcggcaaatttcagtggagcgaggacgcgaactttgcaaagttcgatgaaaacatgtgatttgaccaactgtttgccaaggcatcggggcagcgaccggatccggacatcgataaccacaactatgcggagatcgatgtggtcaacgacacggacttttcatttctggccaatctcaatcactactatcagcagcagcgactgcacagcctgcgacagagcttgaatcgccatgtttactgcaacttgccagtccagcagttgcaggagcaagtgaatcagccgatgaagaaatccatcgccacatctacaagtccctggcatgagccaaaggtcaagtcgaagccgctgcagcagctgctgaggaagccgaaaaagtggaaactcaagcgcaccctagatgactttctaaagtgtctgattattgcgtcctcggagcatgtgtacgattatgatgtgctgtggtaggattggcggattgggaagatgaggagcagtcttagagaagagagagaaataaagaaaccatacgatatttaattcgccacatatatctagtcaactcaatcgccatttaaacttgcaatatcgtaacactccaacgaggactgtagagttccctcttactcccagttctgcccaagccaaaacatcacacagctctgatcctattccaaagccagattgtatatatagatttgtttttatgatttgactatatattatacataactatatatttatacgtaactgaacaagcaactgaaactgaacgatcaagtaactcccaaacagctaaataatatacgataattatacatacgaacctattcttatacatatatatgtaatgcaattatacgaatacgatagttattgtcaagtccctttgtgtaggggatgtaaaaattggtttttgtcccgtcattttgttctattaattaaactgtgagaagcatattacaaa

SEQ ID NO: 20562 - protein, 559 aa, DROSOPHILA
MVKSLVAKLSTASSNLSLASTFGGGSGAAEETNYAKHRNDPGRFFGDGVQFKAKLIGILEVGEARGDRMCQEALQDLKMAIRAAGEHKQRITIHVTIDGLRLRDEKTGDSLYHHPVHKISFIAQDMTDSRAFGYIFGSPDSGHRFFGIKTDKAASQVVLAMRDLFQVVFELKKKEIEMARQQIQGKSLHDHSSQLASLSSLKSSGLGGMGLGHSDLASGGISSGHALTLLGSSLSTTNGTSRLGVSLDVAKASGSAAKEVSPESVADLVDLEQELTSLQRGISQMERITPNEPTTSSTGGAGHPSLAKSASEDDPFGDSFIYVPSYSILPPPPDSGRNRHKPPNKTPDAVTSLDAMLSPPPGTSSSHGSASAGLQAADNDDDNWLQELDQQNDVFDTSKVVSSSGLGSVLAMAPLASSESTATPTQQLTEVAAGSGPLADLDIGLSTALGNEEQTSTILSLDAFTDLDPLGTGRTRPYVDKKYFFQELKNPPKKLLKELSSGSQAGLGLGLSLGQLDGLFPEDSTTISTTTTTATNITAGTNQSQFQHHYCTEKKIINN

SEQ ID NO: 20563 - DNA, 2795 bp, DROSOPHILA
gttctgaatataaaaacaagcccaactctgaccagtttcaaatgcaaaatgactaccaaacacttatgacagagatcaaggcatgtttcgtttacttttggaattcataatgagtacttccagttattcgattccatttgcttatctttctgaacaacgttctcaatgcaaaatctgcggcaagccctctaaatgctgaactggttttctgttgtttccccaaatcttaaaatcacaatatgttttcgataaatcgaatattttattaggatatgctgtactgaaggtgttgaacaaacacttcgtttctttccatcaaggtctgcattgcgctccttgtaggattcagataagttttcagccagaatgaccatgaacaccatgtcccacaactggaccatggcctacaactggaccatggcctacaactggaccgtgtccaacaggaccagcgtgtcccacaggtccgtggccagcattgactgggtgtcctccgtgtcctacaggaacatggcgcagatcaccgggagttgcctggacggtagccagggcaatgaggaggaaggcacacagagcaaagaacttcatcgtttcaaaatttgatacactttgaggtgctggaagatcttatatacctaatatcgtaaccgtttacagttatctttttttttataatttttcgttattttttgggtcacaaaacactaaattatacgaaatgtatttcaatatataggttgcccgttaattagcgattatgaacaggtgcgatcattgaataccggtcattcttgttatttctgcatttgtttgtgcaaacaagtttaattatattatttatggcaactgtgctttgtataaaaaatatccaaatttttaaagcctatatttaggcttttaagtaaatgtaaaataggcttgctgctgaatttgatttattaatactcgacgtcgaattgcagatgtaaaataatctgtgtgtttgtgagatttcatgcaactaatcggatcctccgattaattgcaaaatgtccaggaatatgttcattacatccatgtaaatatttagggcagcgaatatgtactcctcgggactaatggagtacctatgcttgcctcccatcatcaattgtgtatcgtaaactaaataaacggagaagagcagagcgctcaatgaggcatatatggtggtgaccatatgtccgcccacgaagatggtcacaattccaaagaagagcagtattatcaggcagctcaccaggaggccacccatgacggtaaagtcgtaacgcgtctgcagagcaaaaagggtgagtccaaggcaaactgacgccgtgattagcacggccatgaaaatctccattggggcataacgacaggctgccacgcccagcagaaaggactcggctatcgtgaaggcagataggaagatgaagttagctggggtctgacgacgcagatcctcattgcagcccagagccaccagagagaagaccactattagtatggccaccacaaatatccaggtgctttctgccaccatcagacgcacccgtttatcagcagtaagtgaaactataaccaccagggaagtgatcagttgggccaacaggatgaggtacaccttccggatgaatcctcgccggatgctggcgctgcagaatcccaagcccttgtctggatcatcctgtccgatttccgatccgtaagctgtatatcttcccagcggaatacactccgcctggtggctccgatttccatactgatgtactggttcttgtaaaatatccagcattgtgtccttcgaacacaactttcaagtaactgctaattcttaatttaataacctttgtcggaaattgaagtatagtatgacagaagagtcaacgttaaatggaatttacttcttagaaactataaatcttcttttcataattagtaactatcataaacataactttaacttcatttctttagaattcgaaaattcacaatattataatattataataatatatatccaatactgtcttccgtcttatatacatttgcagtaatgcgtatttattaaattcaaacaacaattttatgtaaagatttaaatatgtgactaatttgagcaaaaacggacttacggataactaaatgactatatggctatatacactctgctgttaatacttattatttatacatattttaaatggttgcaaatgtaccccttagtgcgttgcaaacttctgtctgaaatcattataccctctgcaagggcatacaaataaatacaacaaattctgctgctaaatagaatatttattccaatattcaagtagctttcgtgaaattataaattatccagcagttttcttaaggttcccttcagagatcgcactggtctcaggagaactattggcctggacggcagccaggatgaggagcaaaaaggcgcacagagcgaagatcttcattttggtaactttaatgaatacagtctaacagttggcatggcgcttttatactaccgtttgcagtcgattgagaccagtttataatttctatataattagcatatttaatcaaattcttatgctcgtattaatagaattttagcaatactttgaaaacaagttggattgcgtcattaacaatcacaaaaaatgtgctccctaatataaaataaaattatttataatactattatactaattcctataattccaaacggctgccattgtagcttaagagaaataaaacacgcttattacattttgacttttaataaaagaatacaatta

SEQ ID NO: 20564 - DNA, 795 bp, DROSOPHILA
atgctggatattttacaagaaccagtacatcagtatggaaatcggagccaccaggcggagtgtattccgctgggaagatatacagcttacggatcggaaatcggacaggatgatccagacaagggcttgggattctgcagcgccagcatccggcgaggattcatccggaaggtgtacctcatcctgttggcccaactgatcacttccctggtggttatagtttcacttactgctgataaacgggtgcgtctgatggtggcagaaagcacctggatatttgtggtggccatactaatagtggtcttctctctggtggctctgggctgcaatgaggatctgcgtcgtcagaccccagctaacttcatcttcctatctgccttcacgatagccgagtcctttctgctgggcgtggcagcctgtcgttatgccccaatggagattttcatggccgtgctaatcacggcgtcagtttgccttggactcaccctttttgctctgcagacgcgttacgactttaccgtcatgggtggcctcctggtgagctgcctgataatactgctcttctttggaattgtgaccatcttcgtgggcggacatatggtcaccaccatatatgcctcattgagcgctctgctcttctccgtttatttagtttacgatacacaattgatgatgggaggcaagcataggtactccattagtcccgaggagtacatattcgctgccctaaatatttacatggatgtaatgaacatattcctggacattttgcaattaatcggaggatccgattag

SEQ ID NO: 20565 - protein, 264 aa, DROSOPHILA
MLDILQEPVHQYGNRSHQAECIPLGRYTAYGSEIGQDDPDKGLGFCSASIRRGFIRKVYLILLAQLITSLVVIVSLTADKRVRLMVAESTWIFVVAILIVVFSLVALGCNEDLRRQTPANFIFLSAFTIAESFLLGVAACRYAPMEIFMAVLITASVCLGLTLFALQTRYDFTVMGGLLVSCLIILLFFGIVTIFVGGHMVTTIYASLSALLFSVYLVYDTQLMMGGKHRYSISPEEYIFAALNIYMDVMNIFLDILQLIGGSD

SEQ ID NO: 20566 - DNA, 12138 bp, DROSOPHILA
ttaagttcgactgagtttgtggcgcgttgttcgtgtgctacggaggccagaaatcagaaatccagccgccaatgctgcgacctccaatcgggctgaaaaagggttttagtcacgaaagtttttcttgaaacaattaatcatttatatcactgattaaaattattttttttgtaattttttccttagtttttgaatttttaaaagcaattttcttgaaaagccttttaaccttttggttttcaagacattctgcttttgccagcctgcacattttgagcacccgctgcaattttacagctgccagcttgtgtcagtgtgcacaattggagagactaagtttgcgtattcagtattttttaggtatattgtaaactacttttacaatattgtttagaaacaaactctctcattttcctagtttctattcggtctacaatacaatttctttaaaaaacaacattaatacaattacgatatctgaccggaacggtggaatatcgaacatggggcagttttttatttatatattcttttgttatttataggtgaattctaaacaatataaatgcaaaaaatgttaaaaaaaaaaagatctaactatctatgttcgacctaagtttagagaaaaatcgactccccactctttggggtatatctccactcgtaggacatttctttaaggacatttcaggaaaaatgtagttgccataaaaaatgtttacctagtttttgagataatggcactcatatcattattattatggactcatattaaataccattcttatttttaacaaattttattcttgttcaaatgtacttttagaggctcaagtttgaataaagttgttgaagtgaaatggcgcaaagtaagaccctttcatccagcagtattatttgttcggtatttttgctggtattttcggttcgaatgtttttggaaatggaaaagcagagcagagctaaattgcaatcagatctcgacgcgacggcggtgaagaagcatcagtaaaagcgcgcggaaagtgtatgtttcaaaactccgctcagaaaaccatatttgttattgtaaataatattcccttagaagtttggaatatttcccgcgacaatttttttttcggtgaaatttcataccgttttgccacaaaaaaaaaagaggaaaccaaaacaacggaaatagttaataacaaagtgcgtgagccttttttttattattatttttcgtgtgtgtaagagcggtgatttggcgctgtgtgtgtgtgtgtgagtgtattgtgcatctcactgttacttgtggtcgtgtaggtcaaggtgaagcagctgcaccgttagttttccacccattgactatgcagttttcaatcgcaaaatgcatttgatattatgcatatgtgtgtgcagaaaccctaaaaagtcaatattgcagttagtagctctctttcgcactgcccaccctgcctgcctcccaaccaccctccctcccgctcgcacctcatcgagtgagataagcactagataagcatgtgtacgtaagttactgttaagcttaacccttagtgaacaacaaacttgcacgcaaatgaaatgtgaggtttaaaaatatatagaacacaattaaacaaaaatatgaaacagtaattaaagtgtgggagttaatccccccaaaaatcgcaactataaccgattaatatgcgctaataaaactaaatatatatattttcagtacttacctatgttataaattagttgcccattttatattaacttttagtgtcaatttaatgtggcagcactagcagctggcaacgtgcagcagtaacaacaaaaacataaaacaacaccggattgtgcaacctgcaacttgcaacacaagcggcaaaacggcgtttctaccgcagcgtcgcctcttcggcggcggcaatgtgcccccctcggcgaccatgaagcatcagccgccgcccccgccactcccgctcagccaaccgcccacgatgggcgctacagcggcggggggcgtggccagcgtcataagcacgatgaacggcagcagcagcagtggcattgaggcggttaaatgccgaccacccatttaccccaaacgtaagtaaaagcctctttccatgctgcacacaaatttgtaaaaaaaaaaaaaaaaaaaaaaatcagaaaagaagcagacgaaaacatcaaggggttgatgaagcagtttacaaaggggttcaccgttgtattgtattgtattggtattggcactacttacttctaatgcgtaaaacgcattcccagaaaactctggtattctcataatttgactgaaaaaagacaatactgaacacagtaaaattcctggaaatatgaacgtaatgaaatgatgtaatgtttgtgagattttcgaaatcatcaatcaacgaaagataaaacagatcaccaccattttcgctcggttaagcttttatttggaattattaattaatttcttagtaactcatatctatgatgcatagctaaacgaagcctacatcataacatggctcaagttatcataccaaattgataacgagaacgacctttaaagataagcggttgattagctacaggcccagttaaccgaatgacattagtttaaagaatgttaggaatattataatattaacatttaggcacaactccacatcttggcttacagtgcatttgggttcccttttttccacgggccaattgcatttggctggatcgatcttatctggtatttggcattcggtatctggtaactgggatctggaatatgggatctcgataggctgccccattacgtggggcccacttcgctgcttttccgccgacaagaaaattgactggccaccgtaactacgtatgtatatgtacaaatatatatgtatgtatatatgtacatactgtatgtattttccgatggttttggtttcggttttggaggaaagtcgacggcggcggcttcctttcctttttgcccacttcactttgttttggcttcgctttcgccttggatttttttcatcaactttttcttggcttttcgactggggagtttggactgagttggttgttggttgcgactgccgtatttggtaggcgtagactgtgtttttattttattattatttttttttttttttttgccccatgttttctattttgttcctacttctcagcttgtgtagtgtggccgcacccaaaaccacccagcacaatcccaattgcagatcggtctgggccttgggtctttggctctttggtcttggccatttggctacttggcattggccttaacttggtaacttggttacttcggtgggcaacgtgaccgcagctaacggttctcctggttgacatgtcgttagtggccgatgaacatttgtgtcgccgatatcgggctacggccctcctaacttggccgaacgacctattggaatctatgtttactatgctacaccgcaagaaaacgaggtcaattataagcttttcaattgtatttgatgtctatctcaataacttctcaatggtcatatttttgattaaaattaaaagaacacagtaacgtcttaaagtaaaagattacattgatcccaagatgttatcatcatacttattattatattattaatcacttatgttctaagacatttatgactcagtaagatttgttaatatccattaaattcaattggaatatattcccagccggttcatatggagtgtaatatttttatatgcatttattaatcgattcacaatttggtgagcaatagtttttctcacttcattcagctagcaatgactagcaaacacatgtttacatacagacatctagaataaaacgtgataagataaacgcaatatttataaattttcactgagctcacctcaactggtgttttattttgttagtggattatacagtgtttactagccaattatagcaagtaagccagtttgaaaatattggcatattatggatatataatggatacaatcaaatacagtgttaagtcagtcaactctccccaaatggcgttcaattagttgcattgggaaaaatcacgctcatcgattgtctaagtttagtcatccatttccatttccatttgctatttccatggtgcattcctttcgcattccaagttttccaagttgcagttccaatttttattatggaaggctttcgttggttagttccaattaaaaatgccgcagcctagcgtttaaaaactcattaggagccaacttcattgttatggcaaatgaatacacatctatgtacatacatacatatctaccgcaattgtggttgtcgttccctttgcccgatgtcagcgatatgttctactatatgttttctctcactcattgttcgcatgatgtgggggcgtttatgtgcagttgtacagcagcggtcaagaaagtagcaagtagtcaagtagtagaattcaaatgaatgtataatggttttggtttatcttttatttgcactgaagtttttgattactattcacttctcagcaataccgactctacttttctgacctcgtctgtgcgcagtgcacagtgggagtggaattttcatggcaattagggaaatcagtgcataaagctgtcaaattccccatttactgaaaaggggttaagtgtctgatgttttcggctatgcatgtattattaatagaatgcgtaaatctagacagggtgcatttgggcctacatatcagcagagaagtgttgggatgtcagatcaatttcagagatcaaagttttagactgacatcgactaacaacaattgcggttgaagtaataataacatatacacatatgtagttatttaaaacatcttgtctagtctgcctaatcgaatgcaagttgtgtaaagctaaatttacagattttgaaaatctgatcgattaaacgatcaaaaacagatggatgtgtatatgttgaaatctgaattgataatacttttgattccccattggttcttatttacccctgtaaagatacgaatttgtatggctattttctgaattttggatcgggtttaaagataaacaattttctgtgtgtggaaaccgaagaagttcgaaatcgtaacgaatggaaaatgcttctttggatgcgtgaaattcccttgaagatgccctgtgaaaagttgttttggggcaggggtagacaagggtggtggggaaatggatgtggaatgggaggcggtaaacctggccagctacttcaaatgccgtcaattgttttcaaaagttttcagcgtgtcaagagcagagatgcggctatttatggaacagtgcaacacggcaccaacgaatgcccttggatgtgtggacaggcgtacagtggagcctggccaagacgatccagggagttgatagggtgggaaagaatatgcaaacagtttcaggcgttactaatataaattagatgctctaaacagtgatttttaaatatctcaacgaaagtgtaagatattttcgattaggtaagaagcttggctatagatattggtcatattggaaccactgccactatggctcctgtccgcttgcctttgtttgcccaaccaaatgcctgtgattctggtctgtgaaaatggctgaaaagtgagcggcaaagaaacccaatgccgatgcacgttcgatggctgcatcgagcgagagtcactccaagcccccaaagacccagaagtcccccaggtcccccaagtctccgcctccagattcccatttcttcgtctgggcactcgtgcgtttaacgagccactcgaactccagaaagaggaggaacaagatgcgtagggctccaagaaaatataacaagattgcagggcaccgaaatcgccgatactctactataaattccagtctaaatgatattgtagtgatacaatataatatatacgtatatatatatatacatatataaatgtttatatgtatatacatataacaattattcatagatcttttttattgtaacaagtgtctttaccatttgagttgagaaccccgcctaaaaaagtacttaatcctatttggcatagggtaaaaaagcgcacttaagaacatacaaaaaatgagctgcattttgccgcataactcgaattgaacttaattgaaatgaaatcgagacgggtcggtgaagggggggggggggtcgaaatgaatgagcgaccgagattgaaattgatgtgtcgccaagtgttaaatggtctgtcataatgccgatcaagatcgagtgtgtcgagtggaaaatagggaaaatcatttcccaggccatttgccagcgattccgatcaaacgttgaaatgctcaagtgtttgacacccaacaacctatctaataattcccatgggcattgcaactgccactcgggttaacaacggaatggaagggaattctgccagagatgcctctttttatttatttatattttttgagtgtagtacatttagcgacagacgacccagcaataatgacagcgacaagtctagtcaatgaaccacatcgcagtggggctgaacgcggggggaaagtgggtggggaaagatgaaaactgcaacgcccacagaaaagctctttgggataaacaaacgacaataagcagcggcgattgagatcgagatcttcgggcacagtaagaaatattggacagaggaggcagctatcagatttacggaatagagagctcagattttgtcggaagacgagtgtgggtgggtctggaaaatgggaaaaaggaaaatgggaaatggagatagctgggtggtgggggtattacacatacgggttgtgggtgctgtctgtgggcgttttcacatctcaactgatgatggaaaagataaagcaagtgaaggagaagagccaaaagttgaaagaactctacttttcctcaatttggcttgcattttacacatcacatttgtaaatactattattatactattaattacgagtgttatatatatatatttttatacatcaaacatttggcaagcattctaataaaattcaaaaaaaatgtctatatttgggattcaattaaatttcgctcagtgcattttgcatctcaccctttagaatcccgcttgcccctgccccttcttgtttacacaagccaatctttcagccgggccaagtcattgtgctcattagccttccttgcggtctcggtccgatttcgcacatttatccgacagatgaagatatgcaaaagatataaagatatctgtggagataactgtatctgggccctaagtcccaaacaaatatcttagtccattccatgtttgcacgcgattcgcaacaattgaacaaagtttccacaaaatatttcgagacatactgcgatgatcatgcgatgagttttgtgggggggggaggtaaaaagaggtattttccaactgatatatcccgatttggtagcgtgacgagggtgcataacatctatgctttaatcttttgagtaacacataaattaagcaaatatctcccaaactttttttttaataaataattatttaatatatatgcattgcaatctcacggaccataaattttctgtatttcagcaaatttattgaaatactttctttatggcaacatctatagtttttttgcttaatcttagttgccaaaactgaaaactgagtccacatttcctttggccagtgtcattaggccgttttaaggtttggacacttcaggaagagggtttgtactcgagttgcactgtgtcaccctgcagaagagtccttattccatatcccttggccttgccagctgagcgcttttcaaactcgatttaatgcgaaacgtgagcgggaacaatgaactgactgtctccccgctgagtgacacccttaggaactcaggaatacggtaacttgggaaatcagggggtgagtgctttaccaatccgcgggggtgggcccgcaaccagtgctaccatatcgcaggaagcgtggaaggggaagtacccagactgtcacggggtgtgaatacaaaacggtttgtaaacaaatgcaagtaacctgagaagaaactctgactggggcattgcaatttaaaaaaaaaggaattcgacaagaattatcaagttaatatggttccaattctgtcacattaactagtgttttaattgagaaggcctttcctaagattaaaatatggaatataaaaccatttatttgtatgatcaaaagtttttgaatttcatgggataaaccaatttcgcaactatctggcagccccgctgagcgcccgttattccatcacttacggccaaaaagggtcccgtaacatctggcccacttttttccgggcttccgttagtttgagccaggtccttgagcgcacgcgccgagagaacgcgactagatgggggtgatagtacgggtgaaagttgcatttcggtgttgccacttaacgtaacatccttggaaccggatagtgggcggtgggcggagagtgagggcgtgtggccgaagggcgctaaggagagcaagcaacagagagagagagagagagagagagagagtgtgtgtgtaagagataccattaaatttggatggttttagggcagttcgctcgccagttgcagctccaccacaatacaataaagtgttcatcaaactcggggatttattttttcaacgaccaaacaacaaacaactactgactctcactacgaacgaatatcaaaccaaaaataatcaacgcttaaacaagcaaacaaatccaactatgtggcaaatttgctgataagcaggaaaataaagtgaaaacccggaaggcagaaaaagtggcgaaggcttgggccaattacgttttaagtaggcgttccgtatacacacgaaagtcggcgggaaagggcggcacaggcggcaggaggcggagggagttacaaggaccaaaggaccaggacacacaccagcagcagaaacatgtgtaaggagcatccaaggggcacagatggaatgcatgggcttcttcccccgcatcgcaaaagctgtcagcccttcactcgacagtcattgccaacatttcatttgcctaatgagacggcgatgaagtcgctcaagagccgagattcaagacccaagtgcaaggtccttcagtcgattagcccgttttgagttctcactcctcaattaaacactcgaagaataaatcggtgaccgagcacttggtttgatttaaagatgcatctataccatctgatatattatcagtttttcaaggcattcaatcatagtattttcatccttcgaacctttactttaaagtcttttactataattaactataattaataactctactaatattttcttatagctaaaacgccgtcgttcgacaaggatcgcgattacataggctttgccacgcttccagagcaagtgcaccggaagtcggtgaagcggggcttcgagttcaccctcatggtggtcggcgagtccggactgggcaagtccacgctgatcaacagtctctttctgggcgatctctacaagaaccggcagatgcccaatgtggaggagcgcatcgagaagacgacgaaggtggagaagaagacgatggacatcgaggagcggggcgtccggctccggctgacggtggtggacaccccgggattcggggatgccatcaactgtgaggacagctggcgcgtctgcacccagtacatcgacgagcagttccgccagtacttcaccgacgagagcggcctgaatcgccgcaacatccaggacaatcgggtgcactgctgcctctacttcgtgccgccatggggccacaggtaggatcctaaataattttcattgttaattatgctaaaaaatttaatatatggattacatgaggcttgaagaaatgcttacatatttatttattagactagaattcattacatatagagttttaatattagcgtttcatgttgttttatttatatattaatttttttgtttgtttagtaaatgccacgataatgcgaaatccactttgagcaatttttcatgcgtaacaattattatgttacgtatattatatacgatgattcttgattattgtggaatgtttcatgacaaattttgtgcgttcttgggtttctggatagcgaaaagtactttacatatttttgatattattgtagaaatatggaatatagtgatgttaacttcaatcctattttcagcctgcgacagatggacctcgatttgatacggcggctgcaccgcaaggtgaacatcgtgctggtgatcggcaaggccgattgcctcaacaagcaggaggtgcgcaagctgaaggagcgcatcctgcaggacctggaggacaaccacatccagctgtatcagttccccgaatgcgactccgacgaggacgacgacttcaagcagcaggaccgcgaactgaaggcctccattccgttcgccgtcgtcggcagcaacaccattctggaggtggccggcaagaaggtccgagggcgccagtatccgtggggcgtggtaaacgtggaggatccggagcacagcgacttcatcaagctgcgcaccttcttgatatccacgcacatgcaggacctcaaggacaccacgcaggtgggtgatactattttatactacttttagagcgaaaaaaaaaatgccgccttatctttgagcattactaatacatatactcttgaaatgtttcaggacgtgcactacgagaacttccgggcgcagtgcatctcgcagatttcgcagcacgcgctgcgtgagcgcggcaagttgaagcgggactcgattagctcgaccaatggattcgacgcggccatctcggagacggacaggctgctcctgcaaaaggacgaggagataaggaggatgcaggacatgctcacccagatgcaggagaagctcaagcagacccatctcatggagatgaagaagaatgacagcgtgatcgacgtctagggaacggaaatgggaacgtgttcaattttgcaccgccatatatgcatctacctactatataggacttatatggtgacccagagaaatcctggagcagctgcaaccaaatcgactttgtttataagctagcacagactttttaaaaacaaaaacaaagacacccaattaaattcaaacaaaaacaaaactgattaagacaacgactctccccccccaaaaagcacaaagaatccgacgaaccaaaaacttcagacatcacacagcctttttcaattttgtagctaaagtaacgatttcgttaagaactaacgattaaatagaacacgtctatctcgagacattagatattgatcaacacgataacgatattataccaaagtttagggagtttcaaaaacttaacgcaagtaaattgttaatggaaaagatcaagaaaccacagaggcacatagaagtaccgataacgataaacggaaagacatagacagatcccaaaaatgttttaatttattgtacaagtataattttgatatatttgatttccttttgttttggttttaaagagcaaaacttgagaataggtgagttataagcaagtttgctttatttatgtgtaaagaacttataccatttatattgtaagaatatatcagatcggatgatataggacaaaccgctggaggttttggcactgaatttccatgaatcgactttcagcaagttccaattatttatgctaattacgtattatcagatatatgtatctatgaacaaaacctattttgttgaaacgaattgttaatgaatttattttaaattaatcgattaagccttcacgcaacaaccataatatttaaatgaaattatagtcgaaaaattatatataaacatagcgattgctaaaaatcgatttcaaataaagataaaaacaatttaaatggtgcatttacaaacgacattgccttggagaactctttttaaatttgcagattggttttccttttaaggaaactactcgaatgctttgaattaaaagcggctaagtgaattaatggaaaccaacaactaatttagcagtctatgattttaaattttgaaaacggcccgtgtatcccgctttgaactgcttatttctgacact

SEQ ID NO: 20567 - DNA, 2103 bp, DROSOPHILA
aagcatcagtaaaagcgcgcggaaagtgtatgtttcaaaactccgctcagaaaaccatatttgttattgtaaataatattcccttagaagtttggaatatttcccgcgacaatttttttttcggtgaaatttcataccgttttgccacaaaaaaaaaagaggaaaccaaaacaacggaaatagttaataacaaagtgcgtgagccttttttttattattatttttcgtgtgtgtaagagcggtgatttggcgctgtgtgtgtgtgtgtgagtgtattgtgcatctcactgttacttgtggtcgtgtaggtcaaggtgaagcagctgcaccgttagttttccacccattgactatgcagttttcaatcgcaaaatgcatttgatattatgcatatgtgtgtgcagaaaccctaaaaagtcaatattgcagttagtagctctctttcgcactgcccaccctgcctgcctcccaaccaccctccctcccgctcgcacctcatcgagtgagataagcactagataagcatgtcactagcagctggcaacgtgcagcagtaacaacaaaaacataaaacaacaccggattgtgcaacctgcaacttgcaacacaagcggcaaaacggcgtttctaccgcagcgtcgcctcttcggcggcggcaatgtgcccccctcggcgaccatgaagcatcagccgccgcccccgccactcccgctcagccaaccgcccacgatgggcgctacagcggcggggggcgtggccagcgtcataagcacgatgaacggcagcagcagcagtggcattgaggcggttaaatgccgaccacccatttaccccaaacctaaaacgccgtcgttcgacaaggatcgcgattacataggctttgccacgcttccagagcaagtgcaccggaagtcggtgaagcggggcttcgagttcaccctcatggtggtcggcgagtccggactgggcaagtccacgctgatcaacagtctctttctgggcgatctctacaagaaccggcagatgcccaatgtggaggagcgcatcgagaagacgacgaaggtggagaagaagacgatggacatcgaggagcggggcgtccggctccggctgacggtggtggacaccccgggattcggggatgccatcaactgtgaggacagctggcgcgtctgcacccagtacatcgacgagcagttccgccagtacttcaccgacgagagcggcctgaatcgccgcaacatccaggacaatcgggtgcactgctgcctctacttcgtgccgccatggggccacagcctgcgacagatggacctcgatttgatacggcggctgcaccgcaaggtgaacatcgtgctggtgatcggcaaggccgattgcctcaacaagcaggaggtgcgcaagctgaaggagcgcatcctgcaggacctggaggacaaccacatccagctgtatcagttccccgaatgcgactccgacgaggacgacgacttcaagcagcaggaccgcgaactgaaggcctccattccgttcgccgtcgtcggcagcaacaccattctggaggtggccggcaagaaggtccgagggcgccagtatccgtggggcgtggtaaacgtggaggatccggagcacagcgacttcatcaagctgcgcaccttcttgatatccacgcacatgcaggacctcaaggacaccacgcaggacgtgcactacgagaacttccgggcgcagtgcatctcgcagatttcgcagcacgcgctgcgtgagcgcggcaagttgaagcgggactcgattagctcgaccaatggattcgacgcggccatctcggagacggacaggctgctcctgcaaaaggacgaggagataaggaggatgcaggacatgctcacccagatgcaggagaagctcaagcagacccatctcatggagatgaagaagaatgacagcgtgatcgacgtctagggaacggaaatgggaacgtgttcaattttgcaccgccatatatgcatctacctactatataggacttatatggtgacccagagaaatcctggagcagctgcaaccaaatcgactttgtttataagctagcacagacttttt

SEQ ID NO: 20568 - protein, 427 aa, DROSOPHILA; identical to SEQ ID NO: 20556

SEQ ID NO: 20569 - DNA, 6173 bp, DROSOPHILA
gctaaacgatatgatatgataactgaaagtattccccagtgtgcctataaacacaaacaacttgtaaaatgagaaagaaaatattaatacttcaaatattcaaatattatgaaaacaattatatatatatttatatatttctttcatatttacgtatatttagatagagtaaagaattcaatcataaaaataccaacgtcttacattaaatattatttaaaaaaaggcctaatgcgcttaaatttgccttatcaatagaaaatattatgtccaatactgacaatacatctcaccaaagatttaatttagctaggaaccagttctctatggctcatttttttgaccagtggcgataacgatgacagcaagatcactaaaagactagcgttgcatgtttatcatatacaagctaacattgcgtaaggtgaatctgcaaattatatacaaattattagtaatttactcatttatttatgcgaaatcgcaaatacaacaccgtgtttacatccgaaagctctggcaaaaaaagcacatttcttaatgcagccgtctggcaacgccacatatttttcgagacgcagaacgcaagatattttcttatctctcgttaaaaaatggattatttcggttcaatcggtgcgtatctgggaaaatcgcatgctcgttggcagtaaagaacgccacgcactttcacgtcccacgcccagcgcactcccgcctgacgggaaaatgggaaagcaactatatctggcatccgtatcttcgtccgtcgcagccgtcaaaatgttcgtcgcgccagttatcgactcggcaatctccatctcctaaggcacacacacactcaatagaacgcagtccagcactcacacaggcagccacctacgtaacctggcagcggaagcgcccttaatcttggccagaaaccacagcaggcagaaaacaacgagggagcagcagcaggcggagggaaacggaggcgccgctagcactagcacctaacatgtccgagaagcacggccagctgggtgcgcagtggacgaaatcagcggcgccagcagcaacaacagcaccagtctccaattccattcccatacctcaaccgatccctgtggcactacccctccagaaacccaacgccaatccctatgggaactgcagcctacagcccgcggatatagtctacagcgcaaccagatttcaaggacctgctatccatgcaaagggctctcctttgaccattacgcccgtgggccctgtcggcggagcacctgcctctgcccagatctcgcccacgagtcacacccatgtacctgtacctgtagccacgcccagcggctttgtgccgcctccgttttccaatgccaccagcgccagtggaggtgtctccacttccgtacttactccgaatccctttgccacggcgagtgcaaatgctgctggcctggcctttgccaatgccttcagctttagcacagcccagcaactgggtctgggcaagatcatgcacgctatgggcggagctactgcgggagtgccatcggcgccagtaccagtcaccacgactccagcgacagctgctccttcgaccccaacaatagctggtccacggcatccgaacgagggcgttccagcggccagtggagtgataaactccaccattgctgaaaacgtaatgaatgctttgagcaactccaactcagcgggatcagttcccagtgaggagaagatgagaagggtgctgcaggtgattgagaccagcttggagtaagtgttgtttgaagaatcctatgtttatccttgctaatttgtgtgcgtcttcccgttcagcgacaatgcgaagctgcagatttcacagattctagagcgtgtctcgggactaaagcccattgagaagctattcctctatcttcgtttgcctggcgaatgcgcagacaccgatccgttgaggcagccacaaaatccactaggaacgcgctcggagattaaccataccattaattgggtgcgttcccatctggagcacgatgcacaggtctccataccaaaacaggatgtgtacaatgattacatgtgagttcttttcattcttattcaaagcattattgaaactaagacggtaacagtgaaaatgtatttcattcatttttcgcttgagaagtctaaatatgtattgtatatacaaaaatgctgcaaatcagttgaataatcatactattactagcattttttttttagcatagccctaaaattaataattggtttatttcaccattcatttatagagcttattgcgaacgcctcagcatcaaacctctgtccacagcagacttcggcaaggtgatgaagcaggtatttccgggcgttcgtcctcggagattagggacgcgtggaaactctcgctattgttatgcggcaatgcggaaaaccaccaagctgacgcccccgcaactgccgcagctgtgcaagacggagcagatcgtagcgggtgattccaattcggacccgagtcagctaactagtgcctccagtttgggtggcttaccatcgacaggaggtgactctgagtgctgggatgtggtgcgcagttgggcagaaaaattgctaaacactaagctagagagcgttgcggatctaagctcccgtatcaagagcaacaatgcaacagtttctacaaaaaaatacactcctcgggagcccaaggaaaagcgagttttagcagtaagtattaaaatattccctaattagagagtcctaatgcagtattctttaacaggacattggacctttgaaaaagcggcgcaaaaagaaacgcaagggatccacgtcctcggagtccagctgcaatcaattggtaactggccaagacgcgggtagcagccaggaggccagcgacgaacagatactgaagatcaagcaggagatcatcgactcacccattcatccccagcagcctccaataggttatctacagcaggtaacgcccatgaacctagccacagatcagcgaagcagtagcgctgtccgcaacctcacgcccaaaatcctggagatgggctcgccggccgtagtactcacccagcaggaggtatcccccacgggcatcgtcataaaagatgaggtggaggactacacctctaatattttctgcaagaaggttttgaaggcgcagcagacaaagggattctgggcgaattctccaagcagtgggacaacgagcggtgttggtttactggttccacctacgatcactacaacctcggccacaccgccaccgccaaactctgagacatccccggttccgggacctggactttccatgggcccaccctcacagatgatgagcaccagttcggtgagtccgtcgagcactgtggacaccacacctaaagtggcctcccgaaaccaaatgatgattctgagagccaagcgtttgatggcagcggaaaatgccgctttggcagccgccgaagactctggattgcctgagaatctgggactgcccagggagcgagtgataagcatctgtaacatggacaagcatgagctggatgactactttctaccaggcgaggacgaggagaactccgaggagcccgacaacgagctgctccaatattttcagatgggagacgctgaggaaaaacaactgaattccttggatgctgccgaacagaacaagaatccacaagagccaccgacgatgggctctgcaccggaggcgatgcccgcccccggacgcggagcagcagtcgtcgccgctgcagcagcgatgctggcgccggtgccggcaccttcgatgttgcccgcacaggcaggagtgggttctgcctcagcgtctctggccctaatgtcaaaaaagcatcaacagcagaaccagcatcagaacctgcaattgcagcgttccaagcagctgccgcttatcagtaacaacaagagaaagatcagcctcagcaacgcctccagcaatggtagcaacaagaactgcattttcctaccaatttcaccaaacaccaatggatcagtgactacaccaacagccacagggtcgtcgaatcccagtcaaaattgcttcgctagtcccgggttgactcggatgaagcaaagacccaacttgttgagcaagcagcaatcacttgactgcgacaaccgggatcccatgataggggctcatcgcaagggtcgaggatatgtgtacagctaccctacaagcacgtctgcctccgcaccaccgagtccatcgattcttccccaatggatgtgtagaaactggtcgctaggaggcggcaatatatccagctttgcagacagcagccacagtgctgatccgctggtcaatcagaactcaatggacctggagacaagtctggcgctcacgggagaaaatgagttagatacatcggagatgcagcgctcacaatcggtgccgttgtcacaattgcaacggagaggcagccaacaatcgccaagcttgaacttctactcggagaacagcaacagtcagcagtctgcgcctctaaaagaaacaggattactgtacgaggaagtggaagtagactcgcttctctcagcgaatttcaccagaaagtttaacagcataacccagcaaacagcaacaacctgcagctcctcggcgggctcatcttccgggtacagtagtggcggctctgcgggaattgtttcgcgatcagtgccctcaactccactgccacatcaacagcaaaatagcctcacatcgttgaatggaggcggtggtgcagcgtccagcggaggaggtgtcatgggaatcggaaatgggggcaactgtggcgtcggaaatggtttcttcaccatctctgactcgtttaattgggaaggatctacgtccaataacagtcagttgggttacgcacactcctacagtgcccgcaattcactagacatatccaagtctatgccaacgacgcccattgcaactcaacgtttccgatacagtccggcggaggtgcaccgcgatttcctcataaatggcaacaccatcgatagcttaccgtcatctgcctttgcaggaggagttgttccgaccgatcctacgctggcactcagcacggacaccctcatcgacgacagtgccccgagcagtgcagatgtggttgaggccatgattggtgtcacaggcatactcgacgatttttagaatttgcatgaagagaaagcccagggggagatcgaaatatcagagcagcaggagccggatgcggtggaggagaacgaggttcagtcagctgcaaaagaggatgccaatgtggtggcctgtctgctccagcatgtggaccaattgtaaatcccactatcatccgcctactgccgtattgatgtctcgtttgattagtttgtgtgttatatattaagtagtcctttattattgttcctgttccgagtatatggaatttctgttttgcctagtatgaaccgaaactcgatataattcagaaactggttcataagcctcttgacgtcccccgcacatgagctttctcttcgtgccacgcgctagctaagaaaccctcaacaaaatccaatcttccctctgtttaaactaatcaacagcttaactgtgcctcttattggtttcaaaagtgtccaacatcattagaggtgtgagcttgagccgacttctttaatctaacgttaccctcaggccttgttgtatgtatgcaattggcatattgttataattactaaacaataacattaacacgctgatgacgatggtggggcagccagtccgttgctgcccctgctgtatgtagtgcatagttttattgttgaacaacattacaaatgaaacgaacttaaagtctgaatgaaggaaacgtgtgcagcggttttaaaaacgaaacaaatttacaaaatgtatctgtaaacgaatgtacatctagaactatagaaccaaacctcggcgctcgacgagtttgtcttcctgcgatcctcggttgtacatatataagtatatatatctatatatttctagagggatttccacatggattttaaagtggatcgcagggagctagactcagttcaaaattgtcaaatttaaatgtgtgtttgtatggtgttgtaaggtatcgagaataacgagcttcgtcaattgttcatcgactggttgggctcctaggtgtagtcctttgatt

SEQ ID NO: 20570 - DNA, 3843 bp, DROSOPHILA
atgtccgagaagcacggccagctgggtgcgcagtggacgaaatcagcggcgccagcagcaacaacagcaccagtctccaattccattcccatacctcaaccgatccctgtggcactacccctccagaaacccaacgccaatccctatgggaactgcagcctacagcccgcggatatagtctacagcgcaaccagatttcaaggacctgctatccatgcaaagggctctcctttgaccattacgcccgtgggccctgtcggcggagcacctgcctctgcccagatctcgcccacgagtcacacccatgtacctgtacctgtagccacgcccagcggctttgtgccgcctccgttttccaatgccaccagcgccagtggaggtgtctccacttccgtacttactccgaatccctttgccacggcgagtgcaaatgctgctggcctggcctttgccaatgccttcagctttagcacagcccagcaactgggtctgggcaagatcatgcacgctatgggcggagctactgcgggagtgccatcggcgccagtaccagtcaccacgactccagcgacagctgctccttcgaccccaacaatagctggtccacggcatccgaacgagggcgttccagcggccagtggagtgataaactccaccattgctgaaaacgtaatgaatgctttgagcaactccaactcagcgggatcagttcccagtgaggagaagatgagaagggtgctgcaggtgattgagaccagcttggacgacaatgcgaagctgcagatttcacagattctagagcgtgtctcgggactaaagcccattgagaagctattcctctatcttcgtttgcctggcgaatgcgcagacaccgatccgttgaggcagccacaaaatccactaggaacgcgctcggagattaaccataccattaattgggtgcgttcccatctggagcacgatgcacaggtctccataccaaaacaggatgtgtacaatgattacatagcttattgcgaacgcctcagcatcaaacctctgtccacagcagacttcggcaaggtgatgaagcaggtatttccgggcgttcgtcctcggagattagggacgcgtggaaactctcgctattgttatgcggcaatgcggaaaaccaccaagctgacgcccccgcaactgccgcagctgtgcaagacggagcagatcgtagcgggtgattccaattcggacccgagtcagctaactagtgcctccagtttgggtggcttaccatcgacaggaggtgactctgagtgctgggatgtggtgcgcagttgggcagaaaaattgctaaacactaagctagagagcgttgcggatctaagctcccgtatcaagagcaacaatgcaacagtttctacaaaaaaatacactcctcgggagcccaaggaaaagcgagttttagcagacattggacctttgaaaaagcggcgcaaaaagaaacgcaagggatccacgtcctcggagtccagctgcaatcaattggtaactggccaagacgcgggtagcagccaggaggccagcgacgaacagatactgaagatcaagcaggagatcatcgactcacccattcatccccagcagcctccaataggttatctacagcaggtaacgcccatgaacctagccacagatcagcgaagcagtagcgctgtccgcaacctcacgcccaaaatcctggagatgggctcgccggccgtagtactcacccagcaggaggtatcccccacgggcatcgtcataaaagatgaggtggaggactacacctctaatattttctgcaagaaggttttgaaggcgcagcagacaaagggattctgggcgaattctccaagcagtgggacaacgagcggtgttggtttactggttccacctacgatcactacaacctcggccacaccgccaccgccaaactctgagacatccccggttccgggacctggactttccatgggcccaccctcacagatgatgagcaccagttcggtgagtccgtcgagcactgtggacaccacacctaaagtggcctcccgaaaccaaatgatgattctgagagccaagcgtttgatggcagcggaaaatgccgctttggcagccgccgaagactctggattgcctgagaatctgggactgcccagggagcgagtgataagcatctgtaacatggacaagcatgagctggatgactactttctaccaggcgaggacgaggagaactccgaggagcccgacaacgagctgctccaatattttcagatgggagacgctgaggaaaaacaactgaattccttggatgctgccgaacagaacaagaatccacaagagccaccgacgatgggctctgcaccggaggcgatgcccgcccccggacgcggagcagcagtcgtcgccgctgcagcagcgatgctggcgccggtgccggcaccttcgatgttgcccgcacaggcaggagtgggttctgcctcagcgtctctggccctaatgtcaaaaaagcatcaacagcagaaccagcatcagaacctgcaattgcagcgttccaagcagctgccgcttatcagtaacaacaagagaaagatcagcctcagcaacgcctccagcaatggtagcaacaagaactgcattttcctaccaatttcaccaaacaccaatggatcagtgactacaccaacagccacagggtcgtcgaatcccagtcaaaattgcttcgctagtcccgggttgactcggatgaagcaaagacccaacttgttgagcaagcagcaatcacttgactgcgacaaccgggatcccatgataggggctcatcgcaagggtcgaggatatgtgtacagctaccctacaagcacgtctgcctccgcaccaccgagtccatcgattcttccccaatggatgtgtagaaactggtcgctaggaggcggcaatatatccagctttgcagacagcagccacagtgctgatccgctggtcaatcagaactcaatggacctggagacaagtctggcgctcacgggagaaaatgagttagatacatcggagatgcagcgctcacaatcggtgccgttgtcacaattgcaacggagaggcagccaacaatcgccaagcttgaacttctactcggagaacagcaacagtcagcagtctgcgcctctaaaagaaacaggattactgtacgaggaagtggaagtagactcgcttctctcagcgaatttcaccagaaagtttaacagcataacccagcaaacagcaacaacctgcagctcctcggcgggctcatcttccgggtacagtagtggcggctctgcgggaattgtttcgcgatcagtgccctcaactccactgccacatcaacagcaaaatagcctcacatcgttgaatggaggcggtggtgcagcgtccagcggaggaggtgtcatgggaatcggaaatgggggcaactgtggcgtcggaaatggtttcttcaccatctctgactcgtttaattgggaaggatctacgtccaataacagtcagttgggttacgcacactcctacagtgcccgcaattcactagacatatccaagtctatgccaacgacgcccattgcaactcaacgtttccgatacagtccggcggaggtgcaccgcgatttcctcataaatggcaacaccatcgatagcttaccgtcatctgcctttgcaggaggagttgttccgaccgatcctacgctggcactcagcacggacaccctcatcgacgacagtgccccgagcagtgcagatgtggttgaggccatgattggtgtcacaggcatactcgacgatttttag

SEQ ID NO: 20571 - protein, 1280 aa, DROSOPHILA
MSEKHGQLGAQWTKSAAPAATTAPVSNSIPIPQPIPVALPLQKPNANPYGNCSLQPADIVYSATRFQGPAIHAKGSPLTITPVGPVGGAPASAQISPTSHTHVPVPVATPSGFVPPPFSNATSASGGVSTSVLTPNPFATASANAAGLAFANAFSFSTAQQLGLGKIMHAMGGATAGVPSAPVPVTTTPATAAPSTPTIAGPRHPNEGVPAASGVINSTIAENVMNALSNSNSAGSVPSEEKMRRVLQVIETSLDDNAKLQISQILERVSGLKPIEKLFLYLRLPGECADTDPLRQPQNPLGTRSEINHTINWVRSHLEHDAQVSIPKQDVYNDYIAYCERLSIKPLSTADFGKVMKQVFPGVRPRRLGTRGNSRYCYAAMRKTTKLTPPQLPQLCKTEQIVAGDSNSDPSQLTSASSLGGLPSTGGDSECWDVVRSWAEKLLNTKLESVADLSSRIKSNNATVSTKKYTPREPKEKRVLADIGPLKKRRKKKRKGSTSSESSCNQLVTGQDAGSSQEASDEQILKIKQEIIDSPIHPQQPPIGYLQQVTPMNLATDQRSSSAVRNLTPKILEMGSPAVVLTQQEVSPTGIVIKDEVEDYTSNIFCKKVLKAQQTKGFWANSPSSGTTSGVGLLVPPTITTTSATPPPPNSETSPVPGPGLSMGPPSQMMSTSSVSPSSTVDTTPKVASRNQMMILRAKRLMAAENAALAAAEDSGLPENLGLPRERVISICNMDKHELDDYFLPGEDEENSEEPDNELLQYFQMGDAEEKQLNSLDAAEQNKNPQEPPTMGSAPEAMPAPGRGAAVVAAAAAMLAPVPAPSMLPAQAGVGSASASLALMSKKHQQQNQHQNLQLQRSKQLPLISNNKRKISLSNASSNGSNKNCIFLPISPNTNGSVTTPTATGSSNPSQNCFASPGLTRMKQRPNLLSKQQSLDCDNRDPMIGAHRKGRGYVYSYPTSTSASAPPSPSILPQWMCRNWSLGGGNISSFADSSHSADPLVNQNSMDLETSLALTGENELDTSEMQRSQSVPLSQLQRRGSQQSPSLNFYSENSNSQQSAPLKETGLLYEEVEVDSLLSANFTRKFNSITQQTATTCSSSAGSSSGYSSGGSAGIVSRSVPSTPLPHQQQNSLTSLNGGGGAASSGGGVMGIGNGGNCGVGNGFFTISDSFNWEGSTSNNSQLGYAHSYSARNSLDISKSMPTTPIATQRFRYSPAEVHRDFLINGNTIDSLPSSAFAGGVVPTDPTLALSTDTLIDDSAPSSADVVEAMIGVTGILDDF

SEQ ID NO: 20572 - DNA, 3415 bp, DROSOPHILA
ttaattcacttagttggagcttgggcttaaaatcaaattagtttttaacacacacttcgaagttttttatgtgcagctaatgggtcaaacgaaattaaagaccattaacgtgcgcctttaaatccttttcaatttacacgctgggaatgtaagccctttggcacactttttatgaataaataaaataaattgtagagctcaactggattttttaatggaaataattaaagggcattttacttcatcactgaagtatttgtgtttggtcaactttaattaaaattgttacatttttaataatttacgtaatgggaaatataattttttccaatattgaaattaatgaattcctttgattagcattttaatgagccaccaagtgagatgccagctagagagatccttgctgatacctccaatggttccagatggctggacttatccgggcaatcattgcgcaagcttatgtctccatttatggactttgggcgatgggcgatgcaaatgctcctgccattgaatgcattatttttccagctaataccatggagaccggccacttgggcagtgtgcgtgaccttggtcctgcgctaccgatgccctgtcgtgctgcccgttgccatggcatcgagtggcatttgtggtggaaatatggcaggacatttgtctgtggaccaggaaagctcaactttgcagtgcgcttatcaaatatcgtgtaatataaatgtcctgctacggctacggcagacacgcataaaggtagttagcatggagaggaagcggaagtggagaaagtgaaaggcatttccgctgacgaaaccgaaccgagcgaatcgagcacaaaaagcacaatacaaagcgaacaaaaaggtaatcatctaagcgcgatgggtgcccaaagtaggcggcaaaaactgaaacaaatgagtctctataaatacacacgtagcaatgcccacccattcacattcacattcgcattcacacaccttatgcatcgttactttggcgtgctacatactacattatgggcgtgcttccaccacgcacccctccaaaaggcgtcgccagatcgaatactatgccgactgaggagttcgccacaataggtgaacattaggagctcgaagatggtcagtcccaagtactgtagctggttgacaatccgcaggacctctcgagtacccgaaacgcccacaaagaccagcaggcaaagctgaaaggtgatctgcagtgacttgaccagacaatatggactgaatagattctccaactcctgtgagcagtgcagaatgaagcgatgcaagcgaatgcattccaccaaggcgttgtgaaacgcatttccttggtcaggacattttcgtcctgccgacaatctcagcagatccgtcggatgctcctggagcaaaacgtactgatttaattccctcttcgagtcccccagcagcaactcctcttgcagcgaactaaaataaaaagtcattagtattaacgaattaaaacttaaaatataaaaaacaaagaataaaagttgaattgatttaaagttgtaacacgaaaacaaaataagttgcaagaacggaaagtttttgaattgaatttctgtggaacagataccaacctcaggccatttacagactccccgcccagcaacttggtatgggcatccaggttcttcaggctgcagtagagcacatcgaattgtcccaggagtagcaggctcagggtgacaaacagtgatcccccgaatccaaaggtcatgcccaccatgatctgaccgaaaagttgtgtagcatagaccgccgtatatgtgccgggacccagggcgtcgaagggataccaacattggagcggcagcatccggatgcccagcatcagtggcgaaacgccccaggaaatcacgcccagcaggcaggacattatccacaccaccgtgaagtttctggacatcctaaaggccgcatggctactcacaaaggtcaccccggccagcgaatgatggcgatactcccggttcatgtgctccatgtaggccaagaggcgccgggagcgcaggcaccagtagatggtgccgtagcccgtgaaaaagtatattatggtcatggtgagggcatccgttatggcctgcagctcccccgtcggcaggacatccagtgtggttttcgtgaacaggacacccaaatgcagggaggtgaaaatcaccatggaacaataggctttgggcagcactttaccaatcatttccagccgctttggccaccatttgggtaaccgcggcgatggcttcgtgccattcgccaactggagtcccattagcagacggaagagattcgattccctagccggatccaggctaatatcatacctgatgtccgcatcgacgttgccgtggaactgaagactggccatcgactggatttcggctgcctaatcgagctgcttatggactcctacggtcttttggggctcctatttaagggaccatgattttatgcattaatgagtttttaaaagttttcccccgccgagtagggaaaggtgtctgactgggcgtggcttataattaactgactaaatgcctaattgcttctgaaaggcaaggttggcgaatatttcgaaatatatagctcaatttaatcacgaagtggcattataaattataatttataatgagttcaaggatataccagaaattgaagttttatctgtgtctgtttatgcaaataaacaatcaggtgaattaacatacacacaatatatattttgaaacgtattatgtttgctctagcacacaaataaattaagaatttttcttggcagaaatgaagtttatactcataactatttagaaacattagtactaacattcatcttttaaaaaatccctcgcaatgtgcgtcatttcactcattttcctaatagatgacatgctggattatccatttaatacaaatactaaccccttttgtacattgtttctaccattattgaaaaactgaaaccacaggcaatttgacttgtatacatatgcgttgttatttccattgagctatcctttcctacgcattttttgcattgcagacatgcggaatagcggataacgtcaaacttgaccttcgtgacagaaatttccttaaatataattgccgcgcaatttgcatttattgaatatgaacgtgaaaatccatatagttggcattactaacgcctaattgccaacagaccttcgtggcatgccactttccgcattcgagaatcgacattggggaatcaagaaaggaaacgggtgaaatggctcatagaaaatgctaattgccaagtgaactttgcacaccttgcaggtggcaaaaagcaaaccatatgctagcgtgtcgtgatcatgtaaattagctctgccgtcaagccatttaattag

SEQ ID NO: 20573 - DNA, 1260 bp, DROSOPHILA
cagtcgatggccagtcttcagttccacggcaacgtcgatgcggacatcaggtatgatattagcctggatccggctagggaatcgaatctcttccgtctgctaatgggactccagttggcgaatggcacgaagccatcgccgcggttacccaaatggtggccaaagcggctggaaatgattggtaaagtgctgcccaaagcctattgttccatggtgattttcacctccctgcatttgggtgtcctgttcacgaaaaccacactggatgtcctgccgacgggggagctgcaggccataacggatgccctcaccatgaccataatatactttttcacgggctacggcaccatctactggtgcctgcgctcccggcgcctcttggcctacatggagcacatgaaccgggagtatcgccatcattcgctggccggggtgacctttgtgagtagccatgcggcctttaggatgtccagaaacttcacggtggtgtggataatgtcctgcctgctgggcgtgatttcctggggcgtttcgccactgatgctgggcatccggatgctgccgctccaatgttggtatcccttcgacgccctgggtcccggcacatatacggcggtctatgctacacaacttttcggtcagatcatggtgggcatgacctttggattcgggggatcactgtttgtcaccctgagcctgctactcctgggacaattcgatgtgctctactgcagcctgaagaacctggatgcccataccaagttgctgggcggggagtctgtaaatggcctgagttcgctgcaagaggagttgctgctgggggactcgaagagggaattaaatcagtacgttttgctccaggagcatccgacggatctgctgagattgtcggcaggacgaaaatgtcctgaccaaggaaatgcgtttcacaacgccttggtggaatgcattcgcttgcatcgcttcattctgcactgctcacaggagttggagaatctattcagtccatattgtctggtcaagtcactgcagatcacctttcagctttgcctgctggtctttgtgggcgtttcgggtactcgagaggtcctgcggattgtcaaccagctacagtacttgggactgaccatcttcgagctcctaatgttcacctattgtggcgaactcctcagtcggcatagtattcgatctggcgacgccttttggaggggtgcgtggtggaagcacgcccataatgtagtatgtagcacgccaaagtaa

SEQ ID NO: 20574 - protein, 417 aa, DROSOPHILA
MASLQFHGNVDADIRYDISLDPARESNLFRLLMGLQLANGTKPSPRLPKWWPKRLEMIGKVLPKAYCSMVIFTSLHLGVLFTKTTLDVLPTGELQAITDALTMTIIYFFTGYGTIYWCLRSRRLLAYMEHMNREYRHHSLAGVTFVSSHAAFRMSRNFTVVWIMSCLLGVISWGVSPLMLGIRMLPLQCWYPFDALGPGTYTAVYATQLFGQIMVGMTFGFGGSLFVTLSLLLLGQFDVLYCSLKNLDAHTKLLGGESVNGLSSLQEELLLGDSKRELNQYVLLQEHPTDLLRLSAGRKCPDQGNAFHNALVECIRLHRFILHCSQELENLFSPYCLVKSLQITFQLCLLVFVGVSGTREVLRIVNQLQYLGLTIFELLMFTYCGELLSRHSIRSGDAFWRGAWWKHAHNVVCSTPK

SEQ ID NO: 20575 - DNA, 2609 bp, DROSOPHILA
cgatttgtataatataatttgattttgaacgattgttcgatcgagttcaattcataaagaggaaaaccagttttgaggggtatttaacgcttcgtttcccgtaaaaaatgaaacttttctatataaacacagccgtagcggaagaatttaatagaatcttgaatcttgcaaagatgaacacatcaacggcaattagttttgtggccgctttagtgctttgctgcttaggtaatcaatcagagtgtgctcaaaccccaaacgggctaataggctaatcaagttctcttccccatcagctctatccgccaatgccctgcagattgaaccacgcagcagttggggtgcggtgtctgctcgatcgccttctaggatttccggcgccgtcgactatgtgatcatccatcattcggacaatcctaatggctgctccacatccgagcagtgcaagcgcatgatcaagaacattcagtcggatcacaagggtcgccgcaatttcagcgatattggatataactttatcgtggccggtgatggcaaggtgtacgagggtcgtggtttcgggctccagggatcacactcccccaactataatcgcaagagcattggcatcgtcttcattggcaacttcgaacgcagtgccccatccgcccagatgctccagaacgccaaggatctaatcgagctggccaagcagcgtggatacctcaaggataactacacgctgttcggtcatcggcagaccaaggccacctcctgcccaggtgatgctctgtacaacgagatcaagacgtggccgcactggaggcaaaactagaaagcaaagttacatatcttaagtaaaataaacttttaaaaattaatgacatttgtctaaaaaatgtgtttatttggtaaaatgtacaattatttacatcaatttagctacagagaatgggtttcaagatatatttatgttagggtctccatctttcatcaacactcgaatgattcatatggaaacctaaggctttggtcgccaatttggccactttttgagctcgttgagaaggtgtattcccggacaagcagtggccttcgtttggcaatgacccaccacggaatagttgggcgaaacctggcgacgctgcacagcgatttggatgagggttcgggcagcctggagcatctgcgaaggaggtaatccagctgaaatacagacatagtattaaagaaaatgacacagggtaattgaatgggatgacttactctggaagttgccaatgaaagcaatgccaatggactggctgttatagcggggagcatgctcgccacggatgccgaaacccaagccctcgtagattcgaccatccccgccgatcaggaaattatagccaatatccctgaactttctgcgcatatgatcggctcgaatttgcctaagtaccaactggcactgatgcggattgaagcaaggggccgtgactgtatgatggatgataatcagtcgcaccggtaccatgagcctgggcattcgcggcgagatgggcacaggacaccaggagctgcggggaacaatctggcccaaggccagagtcaatccacatagaacgagagccaactgtagcttcatgttgtttacttctggatgtatgtgctctttcggtcaccgatctgcttttatagtcaaccgaaatatctggccaggaatctctatatttactcagatgttttgatcaatgggttcgatcgttgtattactgcagcataattaaatggccagcctttgtgttgccacaaattccgcttgcgtcatctttccaaagatatttatttgtatatacttaaagccctccaagcttcgctggcttctcttctttgggaatgcatagctgcccttggacgaggcggtggcccacaaatggttggtcatccataaaagggtggttgcatttgaaagtcaaatccaatctcggcgtgctataaaagcagcctggttgggttacaaatggacagtcggtcggtgatcgagtggcccaggttacttaccctcatcatgaagagcgtgagtacccttaaggataaatgtacttaaagtgtataatctcagcattatcataatccagctttttgctaccatgttgggctacttgctccttgggttggtgctgtctcatgccagctttgcaactgccacaaatggagttattccagcagtgattccggcagtgcccgctactgttcctcgcctggttcccgtggccaccagccatcagtttgtcactcgaaactggaatcgagttttcgtgccccccgccacggtggccacttatcccaacacctatgttaagtacagcggtggctatccggcgtatcccgcctacaattacccatacgccaccacctatccgtacacctatccctactactatcccacttataacgttggatatggttacaagggtgtctggtgatctgcaacggacatagcctacctttaatacattgtgataacactcgataccaaatgatattatattatgatatatatgacaaatttaatcaaaaacttatttcatattagattcatacaacaaattgtataaaatatatatatatatatatagagagac

SEQ ID NO: 20576 - DNA, 549 bp, DROSOPHILA
atgaagctacagttggctctcgttctatgtggattgactctggccttgggccagattgttccccgcagctcctggtgtcctgtgcccatctcgccgcgaatgcccaggctcatggtaccggtgcgactgattatcatccatcatacagtcacggccccttgcttcaatccgcatcagtgccagttggtacttaggcaaattcgagccgatcatatgcgcagaaagttcagggatattggctataatttcctgatcggcggggatggtcgaatctacgagggcttgggtttcggcatccgtggcgagcatgctccccgctataacagccagtccattggcattgctttcattggcaacttccagactggattacctccttcgcagatgctccaggctgcccgaaccctcatccaaatcgctgtgcagcgtcgccaggtttcgcccaactattccgtggtgggtcattgccaaacgaaggccactgcttgtccgggaatacaccttctcaacgagctcaaaaagtggccaaattggcgaccaaagccttag

SEQ ID NO: 20577 - protein, 182 aa, DROSOPHILA
MKLQLALVLCGLTLALGQIVPRSSWCPVPISPRMPRLMVPVRLIIIHHTVTAPCFNPHQCQLVLRQIRADHMRRKFRDIGYNFLIGGDGRIYEGLGFGIRGEHAPRYNSQSIGIAFIGNFQTGLPPSQMLQAARTLIQIAVQRRQVSPNYSVVGHCQTKATACPGIHLLNELKKWPNWRPKP

SEQ ID NO: 20578 - DNA, 4003 bp, DROSOPHILA
cagcgttatagcttgaatatattaaaacataatgacgaaccacgaatcacgggtttatctaaatattgtttccacatcaaccaatccgcctgcatgtgacgaatgaaggagtacctgttaaataaatcgaaggactgctccttcttgctcttatcgagctgttccctcatctgttgaattcccctttaagtaagccttatgagccctttttagaaatgctgaccaatttgactcaccatctgatggtattggctttataagataacttttcagcgtagccttccaatttggagaccagatcgtcttccatgttcagaaggtcatccatattcaccacagatcttgcaaagcgcggctgggtagcctcaatttgacccatgctgagacttaagaaaaatataaccacaaataaaagtttaagaaccggcatgtcgtgcgtctcacgacaatcttatcttaagcaatatgtagtaaaattcttcacagaaacttcaattattcggccattaggtacgccttaatcatcaatttgcaatgcatcataccttatatctgaaatagtaaccatgtcatataaaaagaaaaacgcaacagttttgtatgaagctttttattcagatataattgggctatctccataagtatagtatcgtcttaactgaccatcaagccactaacatctgcgtattatgccatttccacattagacccacaactgttattatctaaccaaaaccagttgccggctcaacgaacccggcactttctttgggtgcgtgtgagaactggtttccgatagactagaccctctgattcttgacttcttgctgctattgtaatattccgaggggtcaaatgccgccatcagttggaaccgaagagttctcgagagcggatctcagacagaatgattttcccggtgttttcagtacttttcctgctatttcaccaagcaatcccctccgtttctggagtcgagttcttttcctccatacatgagatgaccaaagtgtttggctatgaacagaaaatggtgctgcatatgcagaaattcctatccgataatcaggataagttggattttctgaaagcgtaagaaaaatttgaattaaaggtataagtctttgtttatttattatgatttatttaacagccgactgcgagagttcgaaaatgagaggaacgaggctcgtgaatggggtccatcatattttgagagtcctattaacaaatatttgctgaacaagagactcacagtagactggcagcgagtggagaatctcatggcgacttcaacaggcgagagtaagattaaaacacattgctttaaaagtaatactactgattttccacttttagaaccgctgactcgccttaggaaattccgaaatcgtgagacaatgcccgataaaaaagagctcgaaggagccattgatgggcttttaaggttacagtatgtttatagattgaaggccaaggacctggccagaggtatcttggatggagtggattatgggtaaacggaaatagcaacttaatgtattgaacatactaaagatttctatatcacttagcacccaattaaactcggagcactgtgtggacatagccagactggctctacgggatcagcatccacgtttggctcattcctggctaattgaagctaacgatcgtttgacgggtggggaaaaggaggagcaactcaagcctcagattctggctcttcttgtgcaggccaagaaggaattggaggacttccgtggtctgaatgatacctaccaggagttaatcgggattcaatcagccagtgaggagcacgccaagaattacgaaacctttttgaatgctctgagtgagaaggctctactaaatgaatccaaacccatcctagaacatgctgtaagtgattcgtactaaagaaattcaagtctgttattataatttattttcattatagcccattccggaggagggtgaaccggtgggcgagttccaggcctacagcctaacctgcagtggccactggcgactcactcccaaggaacaacgtcatctgcgctgtggctatgtgactgagacacatccgttcctgtggatagctcctctcaaggcagaggagctcttccaggatcccctgctcgtactctaccacgatgtcatataccagagcgagatcgatgttataagaaaactgaccgagaacaggctgatgagggccacaataacgagccacaatgagtcagtcgtgtccaatgtgaggactagccaattcaccttcatcccagtcacggctcacaaggtgctatcaaccatcgatcaaagagtagcggacatgaccaacttgaacatgaagtacgcggaggatcaccagttcgccaactacggaatcggaggacactacggccagcacatggactggttctaccagacgaccgtgagttgggatatatatttcagatagatatttggtttatctatttttccactaacagtttgatgccggattggtctcctctcccgaaatgggcaaccgcattgccacagttctattttatgcaagtagttggaattttaaaataagttcgatttaacattccaccatttacagctttcggatgttgcccaaggtggaggtactgcgtttccgcagctaagaactctattgaagccaaagaaatatgcaggtatacttctaaaatattttaatatttacgttttataaaaaaagatctacatttcagctgcattttggcacaatctccacgcctctggagtgggtgatgtaagaacacagcatggtgcgtgtcctataatcgccggttcgaagtggggtaagtttttagttatatcaaattcataattttataacctattattttgaaagttcaaaatcgatggatccgtgagaatgatcaatctgatcgtcgtccctgtgaactttgggatgattcgttggccacctatgcgcagattttggagttaaacaaacaaaatgagtgaaagtcagcttctagttaacgtagcagctaactaaagaaccccagttaagctttaagggaacatagttctagaataaaaataagaatattaatatacttacattcatttccttagtcaccccaaaaaaagaaacgtgattgaatacctgaggttccgccaggagtgggaacccctttcaaaaatttgatttatttgtgatctgatcgctcgctgcgtgtaacattcgccagctaagttagaaccaacactaattaatgtgtaattgctagtactagctggagccccgcccaccgccccttctaaggggtcgggggtcgcggggtcacgcctttggcttgcagctgttcctccctttctgttccgatttgatctggatctggtctgctctatccgcaatatgtgtgtatttgaataaattcaatagagtatgtcttaaaacaattttcatatgtagttgtataagtaatgcatttaaatccagcaacaacatttatgtagtaattatttctctgcgctgcgcataatagtacaataataatgacaataatctctgctatatgtataagttgaaaagttcaccgctctatccatcaaaacatttatataaactctgcactttttttttgtttgatttttctttgatattttgtcacatttttttttttttttgttgattttctgcgaaaatgatttttcaggtagggaaaacagttcagtggagcttttcgcaatgttgcatttaaaaaggacaccgagtgagatttactttttttgactatgcaaatgtgtcgtgtgtatagaggtttaaattcgctttgccatgtctttcaatatgttctcattttctggctcgtggtgggtgaatcgctagactgtcaccagttaagtaatagtttagtttcagttacagctttagcattagctttagtttagttttgtttgctgccaagggattgtcttggtacattcatggtacttgaaacatcgatatacaaataca

SEQ ID NO: 20579 - DNA, 1488 bp, DROSOPHILA
atgaccaaagtgtttggctatgaacagaaaatggtgctgcatatgcagaaattcctatccgataatcaggataagttggattttctgaaagcccgactgcgagagttcgaaaatgagaggaacgaggctcgtgaatggggtccatcatattttgagagtcctattaacaaatatttgctgaacaagagactcacagtagactggcagcgagtggagaatctcatggcgacttcaacaggcgagaaaccgctgactcgccttaggaaattccgaaatcgtgagacaatgcccgataaaaaagagctcgaaggagccattgatgggcttttaaggttacagtatgtttatagattgaaggccaaggacctggccagaggtatcttggatggagtggattatggcacccaattaaactcggagcactgtgtggacatagccagactggctctacgggatcagcatccacgtttggctcattcctggctaattgaagctaacgatcgtttgacgggtggggaaaaggaggagcaactcaagcctcagattctggctcttcttgtgcaggccaagaaggaattggaggacttccgtggtctgaatgatacctaccaggagttaatcgggattcaatcagccagtgaggagcacgccaagaattacgaaacctttttgaatgctctgagtgagaaggctctactaaatgaatccaaacccatcctagaacatgctcccattccggaggagggtgaaccggtgggcgagttccaggcctacagcctaacctgcagtggccactggcgactcactcccaaggaacaacgtcatctgcgctgtggctatgtgactgagacacatccgttcctgtggatagctcctctcaaggcagaggagctcttccaggatcccctgctcgtactctaccacgatgtcatataccagagcgagatcgatgttataagaaaactgaccgagaacaggctgatgagggccacaataacgagccacaatgagtcagtcgtgtccaatgtgaggactagccaattcaccttcatcccagtcacggctcacaaggtgctatcaaccatcgatcaaagagtagcggacatgaccaacttgaacatgaagtacgcggaggatcaccagttcgccaactacggaatcggaggacactacggccagcacatggactggttctaccagacgaccctttcggatgttgcccaaggtggaggtactgcgtttccgcagctaagaactctattgaagccaaagaaatatgcagctgcattttggcacaatctccacgcctctggagtgggtgatgtaagaacacagcatggtgcgtgtcctataatcgccggttcgaagtgggttcaaaatcgatggatccgtgagaatgatcaatctgatcgtcgtccctgtgaactttgggatgattcgttggccacctatgcgcagattttggagttaaacaaacaaaatgagtga

SEQ ID NO: 20580 - protein, 495 aa, DROSOPHILA
MTKVFGYEQKMVLHMQKFLSDNQDKLDFLKARLREFENERNEAREWGPSYFESPINKYLLNKRLTVDWQRVENLMATSTGEKPLTRLRKFRNRETMPDKKELEGAIDGLLRLQYVYRLKAKDLARGILDGVDYGTQLNSEHCVDIARLALRDQHPRLAHSWLIEANDRLTGGEKEEQLKPQILALLVQAKKELEDFRGLNDTYQELIGIQSASEEHAKNYETFLNALSEKALLNESKPILEHAPIPEEGEPVGEFQAYSLTCSGHWRLTPKEQRHLRCGYVTETHPFLWIAPLKAEELFQDPLLVLYHDVIYQSEIDVIRKLTENRLMRATITSHNESVVSNVRTSQFTFIPVTAHKVLSTIDQRVADMTNLNMKYAEDHQFANYGIGGHYGQHMDWFYQTTLSDVAQGGGTAFPQLRTLLKPKKYAAAFWHNLHASGVGDVRTQHGACPIIAGSKWVQNRWIRENDQSDRRPCELWDDSLATYAQILELNKQNE

SEQ ID NO: 20581 - DNA, 7759 bp, DROSOPHILA
agactccagacgagcccctcccccagaggcacttccctgcccccctctctttcaccacactggcattggcatttcaatgtttcctacaacggctaaaattgcttaatttattcagcagttttcgtgtgacttgagctaactgaaacaataaatccagttaagtgcataaaaaataagtgtaaataaaaaaaaacattacccaaaatgaaaggtaactggttctggagggtaaatgtatctatgggatatacatgagattccgtatcgatttcgattccgattcgaaagtatctttactaaagtttaactaaggccaggcggatgttgtgatcatgcaaagaatatacctacatatgcataagctgtgatttaatcggggtgattagcaagggatttaactattccgattcatgctggaccaatgtccatagatagacagaccctcccctacaattagcccccagtccgacctcatcgcgatgatataatgtactagcatcggggctcattgtgccgcgaaatatcaccgatcattggatattttgttggttctctgtttgatttacgtgcggaaatgttgggtgacagctcaaggaaattactccatgtaaatgtcacaccgtatcgaactgagtggtcagctgaaatgatctaaaagagggctgcattaacatctgaatgatctttccggtgaatgggagtactccgcttcctacaaacgatctttcaaggttcccagatcaactccggcgcacaaatatgagtgatttcaatagcattttgtggaatatacgatatattataattgttttgttaacgcgaaattaggctaaattattgatctttagaaaatatatcgatctcttcactctctttaaagtatgaaagaagcgaaaatatgaatagggaaatccattcaagactggtctgtatgccacctcgatttagaaaagtaaacaactaaactgtttaatatgcatttacaataacaacatgatttaaatatcacaaaagggttttattcagtttcgagtcttttaaccttagtacaaattataacatctatacataatatattacaaagacggttagacgaacttagagatacgagtagcaatcgaatatggcaaggctctttctctcctttttaatcatatttattttcttatctaagcagagccagcagtagaatgcccatcagactccaactgacagcaccgctagcaccacttgtcctggcttccgccggcagctgagccatggccaccagctgctgctcctcatccagcttgggtctgtagctccaatcgatggtgtttgtcttgcagagctgggcgaatactctcgccgagatcttgggcgttctggtgcgttgcggtgagttgaagtccacatgatagagaccgaatttctccgagaagcctgccttccactcatagctgtccatcagactccaggcgatgtagccactgatattcgctccatcctccatggcatccagaaccgccgacagatagagattgtagtagtccacgcgggcatagtcctccagaccaccgcgatcactgactccgttctccgtaacgattatctcgggcgcattgtactcccggtgtatccacatcaacagattgtacattcccttgggatagacctgcaggaacagagaggagatgaagtacaaccacgctgtcaatagggttcattcacctgtgcgccacctgggcgaaagtcaccctcttttctgattccttgctaactagtttactcggcaaaccataattcaaactctaagtggggataagtcaaccctcgagttaccccaagcactccaccaagttaattacaccacctcatcctggacgtgggggatttctattcctcatctctgctctccagagggtgagggccacaatcaatttagccgactaagcgaaagataattgaagtcgtgcagatgaaggaaatatgtttctggtgttaaattgtgagcaagacggaaagttttcagacctttttatgtaattattctgggatatagaaaacttttaaagtgcttaaaaatatgtataatgtgtatctgggctaaacactaaaagctcttcatttgacagtgggtaccttaactagtgtcaggttattaaccttttctatatttgttaattggtccttttagacagcctaatagcttatgttcctgttctgactacccaggattataatctccaagctagtatcaaactcaccttgagccaaacggatccggaaccgggccaatcgacgccctcctggctctcgaccacgcccatgtcgtgattaaaggatggaactggaaacttgccggtattattgtgaccattggaggtgaccaggttgctggtataggaattgatgccgaagaagtcggaggtgccgcgtatgcgatgaatctcctcagtggtgaactcaggcagtctggatcgtgctccgaaaccctgctccttgctcaagttccgaatgcgctcgatcatcaccttgggatagttaccgtgcttggaaaagatgggatgaccgaaccagcctacatagaactgcatggctcgctcggaggcctcacgatcctcggcggagttgggatccctgggctctggccacgacgtatccagtgtgatgcccatgcgtccaccttgacgcggctggaagagctcccggtacatgtgcaccacctcggcgtgagccttcagcagattgtgaccacagaggtaggcgggaatgcctggatagttgtacgaaggtgccatataatccactccgtaaccgtgctcacacacatgccacggctcattgacggtggtccagatcttcacccgatctccgtacatttccagcaccaggcgagcatagtccttgaaaagcggaattatctccggattggtccagccacccagctcctgcaacttctgcggcaattcccagtgatagatcgtcaccatcggagtgatgttgtaccgcagcagttcgtcgatcaggttggaatagtacttaatgccggctgtactgacgtggttcatatagccaccgggcataattcgtggccaggacagggagaagcgataggtgcccacgtgcagctccttgaccatttgcacatcgcgcttccactggaaaaatttcaattgacatattaaattaatattaattaatagtgttggaatcaaagtaacagcttacacttctaaattgatttgttatagtatttttccagctgattaagaacaaaaatccccttaatttgaatgcatatcaaatctgtttgactgatgctgatattaaatgatattctctatttaacaacattttgccgtagtaaagaacgtatcaatttatttaaccaattaaagtcaaaatatgagaaaccagtacgcaactagtcgtacataatccgcctgcttagttggaccataaaatcgaatcgaaactagccaacctaatttaataattgatatggacaaatcaaaaccataacattaatgtccactggtcatttaaattgaaatgtgagcagataaataaacctgctaatggacacgttaagtgtcggaaaatgagactaaggcattctgacttttttagtgtggattgatttggtttttctttgaaacgatgccaagaatgccgggccaaatttccgaaaaaacccaaattgggaatggaaaaccagttggccggccggtcattggcgacacattccacgcccaatggtcattgtcacaacttggcccggagctctgactttggctttggatttggctcgctctattgctaattatgtgactttgaattgaaaaaaacaatttgaatcgcgatcgccgagtattgcatttgaaaggaagggggcgtttaagctgtctgtccaaccatttaatccatttttcaaatcgcctgccgccgctgacaacaataacaaaattaaaaaaaaaaaatacaaaacaaaaaaacttacaaaaaactatgacacctgatgcaaatgcagcagttggcacctgtagcgaaatcggcaaatctattgattggcattagcagcgaattgtgacagtattaaccaattctacagcacagtcaacatgataaattgataattcagtgcaactatgttgcagatatttcaatgtgaattcattgagtatttattcgggtgaatcttgcaaggagatcgagatatgtatgaatgcatgcaaatcttaatcttattaatctcgggcttatatttaaatgtagctattaaatatacaaaaattattgtgatttctagatccgccctggattataaattgtttcactaacctccgactgagaaataaacaattaacagcaattaatagaaataatttatatctcatgtcctgcatttattaaatgttgtagtggataagataaaaattaaatgaaagatatcaccaaatagtatttgctcttttctgtgcacaattctttttatacccattgttaagacctttaattgactttgtgcaaataaaacaggtctaaacaattataatcataatcatatcataattagcagtgtgcttagccaacttatctgctcatatcagtgtctctttggaaatgggtcacatggcaaacaatttcatttgatacaagtatgcaaagatctttatcaggtctaaccagattgttgtacaatattcctgctaatagaaaccgtcgaaaagttccctactgctttacatttagtaggcccacaaaacaggtaacgccctagttttctgccctttaagtcggcttattgctggaagatcattaattcagccagcaacagcgatcggcagtcattaatcaattaagcgaacaaatggtgcaaatgcaatgtgctgaaagtcacagatggagacaagtttattatcggaacacagtagttaatcaaacaaacaaagttccaaacaggtgtccccatgccaaaggcctgctgctcatgatttatgcggttcttggctaatgattttgtggtcagaaccaatgcaaattactttacggccgtaatgggatgcaatatttgcatcgatttgcatcgcatgtccacgcttgaggatgatattctggcctattgaattatggttattgatcagagttatgttatctaaacataattggccggtgatcttgacttcgaattaattgggggcacaattgtagtttatctgatgattcgagaagctatttgcagaagctacacatttattcatgactaaagatcattcgcatatactttaaatattatttagtcacaaaactagaagaactataagatactatatgtatcttaatttaatgggacataaagtaaattctttcttaatcagattatagcacacttctctagttaaaaatcccttggctattaatcacttgaatctaattgattagccatggcggattcattgaagtgatccactgatctcctcctccaaagatcaccgaccgacttcttaactcccatctggttagatcagcgtcaagagctctagataatatcacgtaattagctgtgtaactaatagacatcggagtgcatcaattgccagatgcctacatattttgcagtcgattacctcagctagtcgactggagatcttgaactctttgcataacttccaatcaaactgagatgccaaacgaaccgactcattctgattctcaatcgaatatctaccattatcgatttgattgaattctccgctcacctgatgatagctgtccgccgagacatcgccattggatcgatcgactattttctcgggatgagtgtgggtgagaaagtcccagatcgactcccccttgtcatccgcgttccagccgccttcgatttggtatgaagatgatccaacgccccagagaaagtcgttggggaatcgacgggtttggctcaccggactgccaagacatctgcaaaaatgcgttaatttgttattggttaatcgaaaaggtgttgctaacacttaaatctaaaggctaaaattcagcaaatccactgctaatcaagtgacattcaaaactgacaagtgttacgacaatttttatttactttttaattttatatgcgtctttatgatattggccagtcgtcgttgtttataacaattgccgatcgaccgatcagggtcagtcgagattaaacacaaatttgtagctttctttgagccaaattagcttttttggcagcttgtttttttagccaaggcggtttggaatagatttaaatggctaagtaatgctatagtacaagtggtatgtataactattaatagtgcactatatttctcgttctaaccttttttgtataaataaataaatatagattttgggttttttttgggataagaacaggattaaaaaaaaaagctttttattttgacaatgtagaatttacaaagtagacatagtgcattttgaacaaccttacttaggatggccttaatgaaatttagaattaggagaaatttcaaaatttcaaaatcagattatgatgttaagaactttgttttcctagtctttgcttgcacttacgaggcagtcagcacaaaaagaggcagtattatttgcatcatgtttttttttgttttatatccttaaggtatatccttgggcacgaaactaacgtatgcgaaacgaaaactttgagcaaaaaaccgagcgtttttttgcccgaaactttttcgccgagttttgaaacttttcgcgattctttcgcagcgcccacgattcccgagcgagttgtttagatgttgaacggccagcgaaacgcttgcaaatgagctgcggcgcttttatgtcctaccgttataagcgatcgctggagcgggctccacgttatagacaagttctcagcgtcgcccgcctccccctcctaacgagatggggaacaccgaacaggtggcaatataatctcttttgttttttgtattgagtttgttgtgtttgatacgtgaattctgcacacatgtatcaaatggagagaaggaaatattagtaaggtgtagaaatttgtgcaaaagcagaagaaaatcagaaatcccgacaaataatagtgaaatgtagcgttataatatttaaattaatcacaatctacggcgggcttagcatacattatatgataataaatattccaagtgagccgtaaaattcccacgaagagcacgattatggaattgttatgtgttttattgccactgattcgatttttgccttttctcgcttttagttttggaaggcacgtttatcacataaagctatcaaacatttctaaaacagtttttaatataagccaatgcttattagcttcataattgggtgttactgtgaacctttatctataagtcatttatatatgataccaaacccgtttatattttttcattatataaggtattatttggagaattatttgtttgattgcaaaatgtgtactgtaaaagttctaattaatataatttcacatgtaagcaaacttaggatgttctctaccggcttacaaagtaagtttgagtaagcttctgctgcttaaagttaccactaaagtaccaaaacacaactcaatagaacgcagtaggtggagtcttcaattgcacgactgctacttttacccccttttcttacttcaaagtctttaattaggtttcagtaactaaaaagcgaaaacaatgtttaattaagggcaagtaaaagcagacacaatatttccccggcttgattgataaggaaa

SEQ ID NO: 20582 - DNA, 1954 bp, DROSOPHILA
tcgtgggcgctgcgaaagaatcgcgaaaagtttcaaaactcggcgaaaaagtttcgggcaaaaaaacgctcggttttttgctcaaagttttcgtttcgcatacgttagtttcgtgcccaaggatataccttaaggatataaaacaaaaaaaaacatgatgcaaataatactgcctctttttgtgctgactgcctcatgtcttggcagtccggtgagccaaacccgtcgattccccaacgactttctctggggcgttggatcatcttcataccaaatcgaaggcggctggaacgcggatgacaagggggagtcgatctgggactttctcacccacactcatcccgagaaaatagtcgatcgatccaatggcgatgtctcggcggacagctatcatcagtggaagcgcgatgtgcaaatggtcaaggagctgcacgtgggcacctatcgcttctccctgtcctggccacgaattatgcccggtggctatatgaaccacgtcagtacagccggcattaagtactattccaacctgatcgacgaactgctgcggtacaacatcactccgatggtgacgatctatcactgggaattgccgcagaagttgcaggagctgggtggctggaccaatccggagataattccgcttttcaaggactatgctcgcctggtgctggaaatgtacggagatcgggtgaagatctggaccaccgtcaatgagccgtggcatgtgtgtgagcacggttacggagtggattatatggcaccttcgtacaactatccaggcattcccgcctacctctgtggtcacaatctgctgaaggctcacgccgaggtggtgcacatgtaccgggagctcttccagccgcgtcaaggtggacgcatgggcatcacactggatacgtcgtggccagagcccagggatcccaactccgccgaggatcgtgaggcctccgagcgagccatgcagttctatgtaggctggttcggtcatcccatcttttccaagcacggtaactatcccaaggtgatgatcgagcgcattcggaacttgagcaaggagcagggtttcggagcacgatccagactgcctgagttcaccactgaggagattcatcgcatacgcggcacctccgacttcttcggcatcaattcctataccagcaacctggtcacctccaatggtcacaataataccggcaagtttccagttccatcctttaatcacgacatgggcgtggtcgagagccaggagggcgtcgattggcccggttccggatccgtttggctcaagttcctgcaggtctatcccaagggaatgtacaatctgttgatgtggatacaccgggagtacaatgcgcccgagataatcgttacggagaacggagtcagtgatcgcggtggtctggaggactatgcccgcgtggactactacaatctctatctgtcggcggttctggatgccatggaggatggagcgaatatcagtggctacatcgcctggagtctgatggacagctatgagtggaaggcaggcttctcggagaaattcggtctctatcatgtggacttcaactcaccgcaacgcaccagaacgcccaagatctcggcgagagtattcgcccagctctgcaagacaaacaccatcgattggagctacagacccaagctggatgaggagcagcagctggtggccatggctcagctgccggcggaagccaggacaagtggtgctagcggtgctgtcagttggagtctgatgggcattctactgctggctctgcttagataagaaaataaatatgattaaaaaggagagaaagagccttgccatattcgattgctactcgtatctctaagttcgtctaaccgtctttgtaatatattatgtatagatgttataatttgtactaaggttaaaagactcgaaactgaataaaacccttttgtgatattt

SEQ ID NO: 20583 - protein, 457 aa, DROSOPHILA
MVKELHVGTYRFSLSWPRIMPGGYMNHVSTAGIKYYSNLIDELLRYNITPMVTIYHWELPQKLQELGGWTNPEIIPLFKDYARLVLEMYGDRVKIWTTVNEPWHVCEHGYGVDYMAPSYNYPGIPAYLCGHNLLKAHAEVVHMYRELFQPRQGGRMGITLDTSWPEPRDPNSAEDREASERAMQFYVGWFGHPIFSKHGNYPKVMIERIRNLSKEQGFGARSRLPEFTTEEIHRIRGTSDFFGINSYTSNLVTSNGHNNTGKFPVPSFNHDMGVVESQEGVDWPGSGSVWLKFLQVYPKGMYNLLMWIHREYNAPEIIVTENGVSDRGGLEDYARVDYYNLYLSAVLDAMEDGANISGYIAWSLMDSYEWKAGFSEKFGLYHVDFNSPQRTRTPKISARVFAQLCKTNTIDWSYRPKLDEEQQLVAMAQLPAEARTSGASGAVSWSLMGILLLALLR

SEQ ID NO: 20584 - DNA, 5628 bp, DROSOPHILA
tcacacagcctttttcaattttgtagctaaagtaacgatttcgttaagaactaacgattaaatagaacacgtctatctcgagacattagatattgatcaacacgataacgatattataccaaagtttagggagtttcaaaaacttaacgcaagtaaattgttaatggaaaagatcaagaaaccacagaggcacatagaagtaccgataacgataaacggaaagacatagacagatcccaaaaatgttttaatttattgtacaagtataattttgatatatttgatttccttttgttttggttttaaagagcaaaacttgagaataggtgagttataagcaagtttgctttatttatgtgtaaagaacttataccatttatattgtaagaatatatcagatcggatgatataggacaaaccgctggaggttttggcactgaatttccatgaatcgactttcagcaagttccaattatttatgctaattacgtattatcagatatatgtatctatgaacaaaacctattttgttgaaacgaattgttaatgaatttattttaaattaatcgattaagccttcacgcaacaaccataatatttaaatgaaattatagtcgaaaaattatatataaacatagcgattgctaaaaatcgatttcaaataaagataaaaacaatttaaatggtgcatttacaaacgacattgccttggagaactctttttaaatttgcagattggttttccttttaaggaaactactcgaatgctttgaattaaaagcggctaagtgaattaatggaaaccaacaactaatttagcagtctatgattttaaattttgaaaacggcccgtgtatcccgctttgaactgcttatttctgacactgcttgccaactgcttgccgtgactgccagtcaacgagtgcaacagttgcgcatcactggctgatttgcacacggttatcgataagtgcttgatttgttgcaatgccgaagggcgggaaagaagaggagattctagttaatttaaacaaattaaaaccaaattaattgtgacatatatgatttatttttgtagttgttgctgttgttgtgacagagaggcgaatcgtttcgataacatggcagcgatgacgtcacgcgccacgcagctgggacagcaacaaaaacaattggatttgaaccggcaagaactgaatattttggcattattattaaaaattcagtattttggcattggcgcgggccaagatacactcatacacgcaattagcacacacacgcacaccgcaagtgcgagcgagatagcaagcacttactcatgcgagcggagaagaaaagcaaaaacaaaataaacgaaactgagagaattctgcaatatcatattcggatgtggatgtgattgttatattttgttattagttcagcgacgccactcgtcgtcacccgtaaacgatgtccgaagatgccaagagtaagtgcacccagtgagctggcacttaatgccacagacccattaaaatcgaataaaactccaggtccaggaccacgcacacggaacatcatcgagaatcagctgttccgccggcagcgtagcctaaaattggaggcactgcagcgccagcggaccttggattccaacgatggggtggagggattgggcgcagatacggaacccttcgacaaggtcagttattttgcatttcatgaggtgctgcgcatggtttatttacgacagatcttcatctatcgccaacaacagacgcacatcgtcatcatctttacggagaaggccaagctaagacactgtcaggatgtggagaagatcattcaggagtttggcatccagaccacgctggagatcgtagggtaagatgggattgcgttagatacataaagaacagcaaatcatacaagttgtgtgcttgaaaactactaagaagtactaagaaaatttaaatatttaagccatggaaaatcatttatataacgcattagaatataaatttacagaaaatattaatgctgtagtattataaagtctatattattaactcatacgcaaaaacaaaaatgattttacataatcaatagtaacaaaagaaaacttgaatgaattacataaattattcaacgagaaaatgtagaaaatatagtttaaaaatcttcacagatgttacattaatggctgttcctataaaattatagcaaactttcaatgaaaaacaattaggatttaggacacatcagtaaatcattttaaattagcaaacaacaagtgcattgtttataatacaaaaaccagatcttttgatctccaatttgtttagaaatgaaaatcgatttaactatttgtttacgaaagtgcctggttaagcactcctccagattggcaagcaactaatccaattaaatttcgtacaggaaaaccgaaaagtatctctacctatcggccagcgtggatactctgctccgtttggccgatgccgccgagctggagaagatgaccaccacgcacagcatgcaaaagttcaatcacggctgcatctcggactttctactgcccgggatgggcaaagagcagatcctgcgctactgcgagatacctgttctcatcaaggacgtaatccaggacggcattaagtcctacgtgcaaaagggctacatagaggatatgtttcccctccacgatatcgtaagttataaatatatcctaattatatacatggatagattgtctaatgttatgcaatgcatcaatctatacacttagctgtatctcgaacgcttcaactggaacctgaaacgcaccaagctgcccatcgaggacatccggaactactttggttccagtataggtctttatttcggcttcatcgagttctacacgaaggcactgatctttccctccctttttggtatactccaatatgtattcgatctgaacatctcgctggtctgcagtttctacgttgtttggaccacggtgagttaaattgttaattttcaaggcgaaacaaagtaaacctttgcacaataaaaataaattgcttttacagcttataaatctaagtatagcatcacttaagtgctcttaagttggaaacttttaagtgctatagtaaaaatagctagcatgtatgtattttgatcttgcagttttaccaattttcaagtttgaatagtttaaatatatctatacaccgactaaatcattgccacaaaaaacagttaactaaagattaaatacactagagctggcataaaacgttatggttttggtcttccaatcgattttatattaacatattcctatatttttagattttcctggagttgtggaagcgtaagtgtgccggctactcgtatcgatggggcaccattgagatgagcagcctggacaagccgcgatccgcatatacgggccaattgaaaccggaccccatcaccggcaagatgacactccactatccgatgcggtacacatacctgcagatgtactgcatctcgtatccggtggtgctgggctgtgtggttgccgccggctggtttgccctctaccagtttcagatcgaagccgaggtgctggcggatttcggaccagactcctggctgctgtacgtgccggttattgtgcagtcggtgctgattgcgatcttttcgtgggcatacgaaaagctggccacattcctcaccaacctggagaaccatcgaactcgatcgcagtacgatcgtcatcgggtcaataagctgatgctcttcgagatcgtgaataacttcttctcgcagttctatattgccttcgtgctgcacgatctgcgccagctgaagtaccagttgatgatgcaactgctggtcttccagctgctgtgcatcgcccaggagattggtataccgctgctggcggtgctgcgccagaagtacgccgagttccgtcatcgcgaggtggccgaggagaagctgcgatccatcagtgatctgccgcgctacgagcaatcgttctacgaatccggactagatgaatatcattccacgtacgaggactacctgcaggtatgcatccagtttggattcgtggtcctgtttgccgccgttgccccatttgccgccattggagctctgctgaacaacgtctttgcggtgcacattgatatgtggaagctgtgcaacatctttaagcgaccatttgcaaggcgcgccaagaacatcggcgcctggcagctggccttcgagctgctctcagtgatgtcgttgcttagcaactgcggtctgctcttccttcagccgaatgtcaagtgagttttggcctttttctgactttcttactgataatcatcctttttttaatccatcagggacttcttctctcactggctgccatcggtgccggatctttcgttcgtaatcttcgaacacttgctgctgggcctgaagtttctcatccacaaggttattcacgaaaggccgcgctgggtgcgcatcggactgctaaaggcggacttcgagaccagccaggctctcaagcaactcaagtgggtgtaaaacgaattcaatggagaaacaataaaacatctaacgaactatgtacttgcagaaaattcaaggcggaggccaacaagatggcctgatgggccacaagatcgccggatctcccactccactccttttggtgctaatgaaaccagtccattttaaatgttattatttataaacatacgactaatcgcgtttaccgcgaatgttcgagaccaacggaagtaaggtgccttaaacctaaaactcatataaatatgtccacagagtacttaagatactgcttttgtctggccgggattagcgtgcgcctcggaagtgccggaacgccaagtaggcatccagggcatgcaatattcccgctgcatagcccatgtactgaaagttaaggagtttaaagggatttttggttaaatataggcatattttttatttaaatcagcagtacttacatagcaggctgtcatggccggatatgcccagaatccgggtcgcaccaggaactgcggatgtagccataccacgcaggcgaaacccatgtaactggatgagctgaagtacatgcagctggcgaggccattgaacaaggtctcctggaataagagcaatcaccatatcgttagatcagaaaaaattaaaattaaaatgcatccttcaatttgaattgaattttgtgttcgagcaagttagtagagaatctattcttcacttggaaaagcgctccaagtcaacctacgaatagtgactgccgaatgagactgtaggatttgtcggagaaggcgtagcacagtagcaggatgccagtggtggtgaagcagtggccggttgtggccaggaagctggttagcgcctggccaatggaatcggcgtatggtacgccgtagcggatgagcagtccctcgcagagcatggccaggcccagttgcatcagcttcaggaggccgatccgcgacagaacgaacccgaaattgatgcaggtgcagacgcgacaacagcatatccgaatgcccagcggctggcccattcctcgaactccaaacgaggccatggtctgattgcaactgatccggcgatgcagcgactccgctttgttgt

SEQ ID NO: 20585 - DNA, 2396 bp, DROSOPHILA
ggaaagaagaggagattctagttaatttaaacaaattaaaaccaaattaattgtgacatatatgatttatttttgtagttgttgctgttgttgtgacagagaggcgaatcgtttcgataacatggcagcgatgacgtcacgcgccacgcagctgggacagcaacaaaaacaattggatttgaaccggcaagaactgaatattttggcattattattaaaaattcagtattttggcattggcgcgggccaagatacactcatacacgcaattagcacacacacgcacaccgcaagtgcgagcgagatagcaagcacttactcatgcgagcggagaagaaaagcaaaaacaaaataaacgaaactgagagaattctgcaatatcatattcggatgtggatgtgattgttatattttgttattagttcagcgacgccactcgtcgtcacccgtaaacgatgtccgaagatgccaagagtccaggaccacgcacacggaacatcatcgagaatcagctgttccgccggcagcgtagcctaaaattggaggcactgcagcgccagcggaccttggattccaacgatggggtggagggattgggcgcagatacggaacccttcgacaagacgcacatcgtcatcatctttacggagaaggccaagctaagacactgtcaggatgtggagaagatcattcaggagtttggcatccagaccacgctggagatcgtagggaaaaccgaaaagtatctctacctatcggccagcgtggatactctgctccgtttggccgatgccgccgagctggagaagatgaccaccacgcacagcatgcaaaagttcaatcacggctgcatctcggactttctactgcccgggatgggcaaagagcagatcctgcgctactgcgagatacctgttctcatcaaggacgtaatccaggacggcattaagtcctacgtgcaaaagggctacatagaggatatgtttcccctccacgatatcctgtatctcgaacgcttcaactggaacctgaaacgcaccaagctgcccatcgaggacatccggaactactttggttccagtataggtctttatttcggcttcatcgagttctacacgaaggcactgatctttccctccctttttggtatactccaatatgtattcgatctgaacatctcgctggtctgcagtttctacgttgtttggaccacgattttcctggagttgtggaagcgtaagtgtgccggctactcgtatcgatggggcaccattgagatgagcagcctggacaagccgcgatccgcatatacgggccaattgaaaccggaccccatcaccggcaagatgacactccactatccgatgcggtacacatacctgcagatgtactgcatctcgtatccggtggtgctgggctgtgtggttgccgccggctggtttgccctctaccagtttcagatcgaagccgaggtgctggcggatttcggaccagactcctggctgctgtacgtgccggttattgtgcagtcggtgctgattgcgatcttttcgtgggcatacgaaaagctggccacattcctcaccaacctggagaaccatcgaactcgatcgcagtacgatcgtcatcgggtcaataagctgatgctcttcgagatcgtgaataacttcttctcgcagttctatattgccttcgtgctgcacgatctgcgccagctgaagtaccagttgatgatgcaactgctggtcttccagctgctgtgcatcgcccaggagattggtataccgctgctggcggtgctgcgccagaagtacgccgagttccgtcatcgcgaggtggccgaggagaagctgcgatccatcagtgatctgccgcgctacgagcaatcgttctacgaatccggactagatgaatatcattccacgtacgaggactacctgcaggtatgcatccagtttggattcgtggtcctgtttgccgccgttgccccatttgccgccattggagctctgctgaacaacgtctttgcggtgcacattgatatgtggaagctgtgcaacatctttaagcgaccatttgcaaggcgcgccaagaacatcggcgcctggcagctggccttcgagctgctctcagtgatgtcgttgcttagcaactgcggtctgctcttccttcagccgaatgtcaaggacttcttctctcactggctgccatcggtgccggatctttcgttcgtaatcttcgaacacttgctgctgggcctgaagtttctcatccacaaggttattcacgaaaggccgcgctgggtgcgcatcggactgctaaaggcggacttcgagaccagccaggctctcaagcaactcaaaaaattcaaggcggaggccaacaagatggcctga

SEQ ID NO: 20586 - protein, 646 aa, DROSOPHILA
MSEDAKSPGPRTRNIIENQLFRRQRSLKLEALQRQRTLDSNDGVEGLGADTEPFDKTHIVIIFTEKAKLRHCQDVEKIIQEFGIQTTLEIVGKTEKYLYLSASVDTLLRLADAAELEKMTTTHSMQKFNHGCISDFLLPGMGKEQILRYCEIPVLIKDVIQDGIKSYVQKGYIEDMFPLHDILYLERFNWNLKRTKLPIEDIRNYFGSSIGLYFGFIEFYTKALIFPSLFGILQYVFDLNISLVCSFYVVWTTIFLELWKRKCAGYSYRWGTIEMSSLDKPRSAYTGQLKPDPITGKMTLHYPMRYTYLQMYCISYPVVLGCVVAAGWFALYQFQIEAEVLADFGPDSWLLYVPVIVQSVLIAIFSWAYEKLATFLTNLENHRTRSQYDRHRVNKLMLFEIVNNFFSQFYIAFVLHDLRQLKYQLMMQLLVFQLLCIAQEIGIPLLAVLRQKYAEFRHREVAEEKLRSISDLPRYEQSFYESGLDEYHSTYEDYLQVCIQFGFVVLFAAVAPFAAIGALLNNVFAVHIDMWKLCNIFKRPFARRAKNIGAWQLAFELLSVMSLLSNCGLLFLQPNVKDFFSHWLPSVPDLSFVIFEHLLLGLKFLIHKVIHERPRWVRIGLLKADFETSQALKQLKKFKAEANKMA

SEQ ID NO: 20587 - DNA, 4402 bp, DROSOPHILA
aatacttacacactatatatatatgatacatatatagccatggtctctgaaaacaatttactgctattgaattatgaaatgcttaaacataaatttaacttatggttaaacacacaaaacaaatgaaaaacatacaattgtataatgtaatgatatcttactttatatgacataatgcaatgcttttaaaatacaatttttaaaaatcatgtaaaaactttaaaattaaataaaaaaaaaactacaaaaaatattttacgatcgatttgtgtgattgatttgggtgggccttcatttacatagacaataaagactagtttttataattattcatttcaattgcttaaactacagtatagatttgctgttgaaatgctcgaatggcgaacttttcatacgcaatacgctacattggctaaaaatagtcagacttcctttcctccgtacaatctttgttagctttataagataggaagggattatacagtagcgactagataatagatcagccatcaaaaaaccaccttgctgcactgtatctcaacactttcgattattaggcgatctttcaaccccaagatcttaccaaaacacaactgggtgtagatgggtaactgtgaagatcaatacttaagctgtgaataagtagtgcacacttgattatcgattcgccacagatccacgctagattaatggaaaaatttcgattatcaataggggacacttgtgccagttggctgaccgacaattccaagataaacactgagaaggggcggatgcagggggctttgatcattgtcaagaccgatttgtcgtctttatggaaccgctgtggatccaactgaaagatacaacctgtatcccgcttccacacacgacacgcgtcgagatctgggcaaacagcctccggagataagagcgcgtgacgcagccccttggatcatcaggttccggcggcgtgtcgtccaacccatcagtgcacgcacagatctcgcccagaatgtccacgctggagaacgaggtgaccttccgcaaacaggcggaggttaatcagaatctggaggcgcagttcgacagctcctccacggacttcattctaattaccgaccatcgcacttcgaagagtaagagcctggagcagttggaggcctccaaggagtcgaaaaaccccgagtcctgctgctcccgatatgcccggaatatcttccggaagaagactctcctgaagcgtttgccctttctcacctggctgcctcactataaccggcaagactgcatcggtgatttgatagccggcttcactgtgggactaaccgttatcccccagggattggcctattctggggtggtcggcctaccaccggaggttagtaaccatgcactcaataagtggtattaggtccataagttgcctacctttttttaaaattttatttttacattttcttactcgttccccttttgattggttaatcaagttatcattatgttttccgagcttgttagcaacttcacgccaacggaaaagaaccgagttaaggtgcagctgacggcttgatcattgattgttagggcgtctcagtagaagcaagtttcagcggttaaaattgcacttcagattcctctgatcctgtagatcctttgacctatcaaagagtaactctgcttctctccaacagtatggcctgtatggatccttcatgggctgcttcgtatatgtccttttgggaacctgcaaggacagcacgattggtagcacagcggtggcttcactcatgaccttccagttcgcccaaggatcctggcagagatccgtactgctgacctttctgaccggcattatagagattctgatggccatcttcaagcttggatgtttggtggagttcgtttctggaccggtgagcgcaggatttacgagtgccgttgccttgattgtgtcgacgtcccagatgcgttcgatgctgggtgtcaaaagtgatggtggatcctttttggcaacgtggataagcatgttccgggatatcgaaaacgtgcgcgtagccgacacctgtttgggctttggatgtgttatcctgcttctggccatgaggagtctcggaaagttcaccatcggtccaaaggacgaatcgagaaggaacgggttccagcgagtagtgaacacggtgatcaagtttctgtccacctcgaggaatgcctcagtggttattctgtttaccgctgttaccatgtacctggatgccaatggaacgaatcctttcagactaactggaaatattcccaagggaatgcccacgccctcacttcctccgttttccatcgaaccgcagcccggcaacgaaacagctgggatccctgctgttgagggacagacttttcctgaaatggtgcagagcttgggatatggactagttatcgttcccctaatggccctactggaaaccatgtcggtttgcaaggccttcgccaagggtaaacagatagatatcacccaggaaatgattgcctgtggagtcggcaacattgctacctccttgttctcaggatatcgatgcaatggaggattggcccgatcggcggtgaataatgccagtggctgtcgcaccaatatgtccaacctgtacatcggtgttatcgtagtgctcgccctgaactttctcaccgaatacatcgccttcattcccaaggcggtgctggcagcgattattatatcggcagtgatcttccaggttcagtaccaggtcgtaacgcccatgtggcgcagcaaacgtgagttgagacttccttgattagtatttatattcctaagttaccttcaacgttgcaggttccgatctagtgcctggcatcctggccttcgtcacctgtttggtactgcccctggaaattggaattatggtggccattggtgtgaatcttctctttatcctgtactatgcagccaggccaaaggtcacgctggagcaactggaaacccaacaaggtatcagattcgtgaagatcacccccgacagatgtctgatctttccttcggtggagtttgttcgaaatatggtactgaagttgggcagcaaatccacattgccagtggtcatcgattgcacctatatctatgctgcggatttcacagccgccaaagtaatatcctccattgtggacgacttccgccggcgtcagcaaaagatcatattcttcaacttgaagcccagtgtagtgagtgtcttcgagggattgaacacgaggctggtgctttgctacaacacccatgccctcaaccaggaactccggcccgacgagccggatctttcgaggtccgtggactcactcgaccacgccgagtccggaaacggaactagtgaatgcgtgagcatggccagcactctttcactagctagaagttagtcttacaacgcccaaataaaattagctaagttatatctataccattacgaacattaatctagtagtttcacttgagtaaagtctttgtttttacactcctgtccttttctatcaagaatatactacaaaacttgtattatttatatcaactattatattcagtctgataatggagctttcaaatgttttaaaattagttatataagctatttccagaactttctgatggacatgttcttctcggagtccttcatcattaccttggagacggccatttcaaagtcctcctgggtgacatggacccgtctttccctcagagcatacattcccgcctcggtgcaaacacccttgacttcagcaccagaagcccccggcatttcttcagcaatcttgcgaagattgatgcctctggtgaggttcatcttgcgagaatgtatcttcaggatatccaatctggcctcttcgtttggtggcggaaactcgatcttgcggtcaattcgaccaggacgcagtaatgcctgatccaagacatcgatgcgattggtggccatgatcaccttaatgtttttagtagcctcgaagccgtccagttggttcagaagctccagcatggttcgctggacctccgaatcccccgttccggtttccagtcgagcggaaccaatcgagtcgatctcgtccatgaatattatggatggagcgtgttccctagccatcacaaaaagctcccttaccattctcgaaccctcgccgatgaatttctgaaccagttccgaccctgaaacccgtataaaagtgcactccgtgtgatgggctacagctcgggctaacagggttttcccagttccaggcggtccgtagaggagcactccctttggctgggtaatgcccaaggcgtcaaataattccggatgctttacaggcagctcaatcacctccttgatctcctggatctgcttgtccaagccacccaccatttcgtaggtggagtcgggcacct

SEQ ID NO: 20588 - DNA, 2031 bp, DROSOPHILA
atgtccacgctggagaacgaggtgaccttccgcaaacaggcggaggttaatcagaatctggaggcgcagttcgacagctcctccacggacttcattctaattaccgaccatcgcacttcgaagagtaagagcctggagcagttggaggcctccaaggagtcgaaaaaccccgagtcctgctgctcccgatatgcccggaatatcttccggaagaagactctcctgaagcgtttgccctttctcacctggctgcctcactataaccggcaagactgcatcggtgatttgatagccggcttcactgtgggactaaccgttatcccccagggattggcctattctggggtggtcggcctaccaccggagtatggcctgtatggatccttcatgggctgcttcgtatatgtccttttgggaacctgcaaggacagcacgattggtagcacagcggtggcttcactcatgaccttccagttcgcccaaggatcctggcagagatccgtactgctgacctttctgaccggcattatagagattctgatggccatcttcaagcttggatgtttggtggagttcgtttctggaccggtgagcgcaggatttacgagtgccgttgccttgattgtgtcgacgtcccagatgcgttcgatgctgggtgtcaaaagtgatggtggatcctttttggcaacgtggataagcatgttccgggatatcgaaaacgtgcgcgtagccgacacctgtttgggctttggatgtgttatcctgcttctggccatgaggagtctcggaaagttcaccatcggtccaaaggacgaatcgagaaggaacgggttccagcgagtagtgaacacggtgatcaagtttctgtccacctcgaggaatgcctcagtggttattctgtttaccgctgttaccatgtacctggatgccaatggaacgaatcctttcagactaactggaaatattcccaagggaatgcccacgccctcacttcctccgttttccatcgaaccgcagcccggcaacgaaacagctgggatccctgctgttgagggacagacttttcctgaaatggtgcagagcttgggatatggactagttatcgttcccctaatggccctactggaaaccatgtcggtttgcaaggccttcgccaagggtaaacagatagatatcacccaggaaatgattgcctgtggagtcggcaacattgctacctccttgttctcaggatatcgatgcaatggaggattggcccgatcggcggtgaataatgccagtggctgtcgcaccaatatgtccaacctgtacatcggtgttatcgtagtgctcgccctgaactttctcaccgaatacatcgccttcattcccaaggcggtgctggcagcgattattatatcggcagtgatcttccaggttcagtaccaggtcgtaacgcccatgtggcgcagcaaacgttccgatctagtgcctggcatcctggccttcgtcacctgtttggtactgcccctggaaattggaattatggtggccattggtgtgaatcttctctttatcctgtactatgcagccaggccaaaggtcacgctggagcaactggaaacccaacaaggtatcagattcgtgaagatcacccccgacagatgtctgatctttccttcggtggagtttgttcgaaatatggtactgaagttgggcagcaaatccacattgccagtggtcatcgattgcacctatatctatgctgcggatttcacagccgccaaagtaatatcctccattgtggacgacttccgccggcgtcagcaaaagatcatattcttcaacttgaagcccagtgtagtgagtgtcttcgagggattgaacacgaggctggtgctttgctacaacacccatgccctcaaccaggaactccggcccgacgagccggatctttcgaggtccgtggactcactcgaccacgccgagtccggaaacggaactagtgaatgcgtgagcatggccagcactctttcactagctagaagttag

SEQ ID NO: 20589 - protein, 676 aa, DROSOPHILA
MSTLENEVTFRKQAEVNQNLEAQFDSSSTDFILITDHRTSKSKSLEQLEASKESKNPESCCSRYARNIFRKKTLLKRLPFLTWLPHYNRQDCIGDLIAGFTVGLTVIPQGLAYSGVVGLPPEYGLYGSFMGCFVYVLLGTCKDSTIGSTAVASLMTFQFAQGSWQRSVLLTFLTGIIEILMAIFKLGCLVEFVSGPVSAGFTSAVALIVSTSQMRSMLGVKSDGGSFLATWISMFRDIENVRVADTCLGFGCVILLLAMRSLGKFTIGPKDESRRNGFQRVVNTVIKFLSTSRNASVVILFTAVTMYLDANGTNPFRLTGNIPKGMPTPSLPPFSIEPQPGNETAGIPAVEGQTFPEMVQSLGYGLVIVPLMALLETMSVCKAFAKGKQIDITQEMIACGVGNIATSLFSGYRCNGGLARSAVNNASGCRTNMSNLYIGVIVVLALNFLTEYIAFIPKAVLAAIIISAVIFQVQYQVVTPMWRSKRSDLVPGILAFVTCLVLPLEIGIMVAIGVNLLFILYYAARPKVTLEQLETQQGIRFVKITPDRCLIFPSVEFVRNMVLKLGSKSTLPVVIDCTYIYAADFTAAKVISSIVDDFRRRQQKIIFFNLKPSVVSVFEGLNTRLVLCYNTHALNQELRPDEPDLSRSVDSLDHAESGNGTSECVSMASTLSLARS

SEQ ID NO: 20590 - DNA, 13499 bp, DROSOPHILA
ctggtggcctcgcaaaagagtgcccaaaacctgttccccggctacggcgtacgctttattgatccacctaccttcaagcccctgcaattcctgcacacctcggcactcctaatccgggacattgcttttagtgactcacagcacttgctcactgtggccagtcgggaactaaagatcaagatattcgacataagaacacggctttgctcgtctatgttcaccgctcatgacaagatgctgtggtcttgcgccctggatcgcaacgagcgcgaacactttctatacggcggagatctgcgaggtggagtttatatctacgacttgcggtttcccgagaacattctctgcgagttccaagccgaaggtgagtgtgatgaatatgcaaacgttaatacccgcttaaatcatttacttattccctacagtgaacttaagtcctgtgatacacatagctcctgtgcaacccaataagatttttaccagcggtggcttcctggtctgccaacttacggcccttacattctacgagtacgctgcggccagtgatacggctgtgcccactcggctaaatgtggagggaccctttctgtccatgcaatacgatgccgtgcaggacacggtgctcatatcggcacgatccaatccgaatttcccccagtctcgcttcatacttggtcgaatggacaagattgacggaacgccggtgctgaaggtcaaggccaccatatatggatcgaaggccacaccggttatgacgcgaccgacccaactggccgtcgaggataataccttagtggttggctatctccaggatagtaagcagctgatgatgcatgatgtgcggcgggaggagcgagtgcaaacaatgccggtcaacgaggtgatctacgacatctgccctgtggctacccaggccggatcctatttggccgccctcaccgacaataagtgtagagtttacaaagtgaacagttccatgcgatgatatatgtatgtgtgcattagttttccgtgaaaataaccaaaaaaaattttcttttagctaatttctgtgaaatatgtgactactgatataaacgagcttttaagctaagttattagttataaatttttcattatttccgtttattaaacatttgtcaaccttaaggttcgcgtacaagattaatctgaacataattctatattgtgtgtactccatgtttttgtttttgatttttgatttcaatttgtgaatgctcaaagtctgttgtggataagtcttgtataaagcaatagaaaatgttggttcgattaataatatacatataaagctatacaaaaatgttttatccatacaatatccgatttatatatgtatatgcgtaattatagatactcctaaatgaaatgtggaaatgaacgaatgtttaaatagatgtctaaattcattcctgacagtctcgaaatgtttgcaacacttcaaacttttggaaaagtccttcgatctcagacttgcaacgagtctgacatttccaagcccaagtaaatgtttatgaattcggttttcttctctcttgagtcttgagttttgtaaaattctatcaaaaaatgttcgtcgttggtcgtttgctggttttttctttttttttcgtaaatcaaaaacctctgtggcatttactcctataaagttgtatatggtttatagtattgtatatagattagtgtgttgaatagttgaaagacgcagatctatactttttaagtataattttgtatattttgtgatgttttatttgtgtttttgctgtttgtgtctgtgtgtttatgtgttcgttaatgttaagattagagaatacgtactcgtatgaagaaacgtatggagtcagcataacttaagactttcaacttaaactttaagagaactaaatatccgttacacatatatttatatatatataaacattagattaacttatgctaaactaaacacgaaacgaagtcgggaagtattaagctttgattaggtaatcggttcgtattaaatttaaagaaatcgattattacttaaaaatccaatggctaaagtatttttaaattttcgaaatattccagataactttaagtttaatagaaaccgaaggcgcaacaaagccgaatgagataatcgatcccaggcggaccaatacaggtgaaaaagtttagaagcgagggcctatctgttgggattttggtttgcttaatcgacgcgcgcataccgcggcacaatatccttgctgatccagtagttgcagggcaagtagtcctcttccggctgcgcatcctggccaacattgatgacccggcggttctggacaaacgactgcaccgtgccgtgcgagacatagtagtagaacagctgctgcatggccgaaacgaagcggcgctgctctacggtgtgcggctcatagcggccgagaatggcctggacatcggcgtccaccgtggccagctgatcgggtccctcgccttgggtgacaacatagaacggcacactgggctgctgtctcgcattcgtcagcagcgggcaaacgctgcgaatgtccgaaatgatagaaaccagcgacgcatagctgctggcgttgtacttctcgataacctcgtcggtgaggcccaatgctccaatctgggagttttccagataggcacgcacctcctctcgcgtccagttcgcatgcaattcgcgcagtttctcggtgtgcgcctcatgcgccgtggcgcccataaccagcaccggcttgtcgttggcctgttcgcgcttccaggtatcggaaggatgttcaaagaccacatctccatcgagaaccaaccattcgtgacggctaccgctggcattcgcctcctgcggctgcggcagatccacggggaagtgcagccaggtgtcgggagtggcggcccaaagtcgttcgctggacgcttcacgcaggcactggatatcagcacactcgagggtggccatcagctgctcgttttgtttaccagactcgctcaatggtttaccaggcagaattgctgatccagatgatgcccaggccctggtgtacagacccttgaccttttgtgagttaactagaagagtcaccagagtggctccggcccgatgacccagcagggtgacggattgcgggtcgccaccaaaatgtacgatgttcaacttgatccagttcagcacggcaatgatgtcggtgagcgcatagttgcccgaagttggcgggtgtgcctccttggtcagagcgtcgagggctaggaagccgaagacacccaaacggaaattgggacgcacaaagatcacatcgtgcgatcgagaatagcgagccgatggacggagaatacccggcgaaggaccagccaaagattctgctccgatcaggacgaccacaggcaaggggttattgtaccgcacatggggagtaaccacgtcaaggtatagacaatcctcgtcgccaactgtggtgccattgcccaatcgctgcgtgcacaccacactgctgttatgggtttgcagtgtatcattccagcacatattgatgtcatcaatcagttcagccggcttccatctcagtctgtctacgggtggctttgcatacggaatgccacggaaggcaaaggctccatcttccttaacgccctccacaggtccgcaccccgtcactgccattatgtagcgtccttcccgcagcggcggcgaggtcaaagtctcgtgggttagtacataaccaatcacgcccaacaggagcacaaatagcaggatgccaaacacaatcagggcatcgtccacactgcacttgtagccacgcagacgggttagcaaggagacgggtcggttttgctcctcctcctcggcggctagtttttcctccgccgccagcttctcatcctttagctcgccctttagttcctcggtaccgttggtcttgacgggagcccgatccactgtgtcttgatccttaagggaatcatcgagggtctccatcgaggccagaccggccttgcccaagcccagctccacatcatcgttgctcttctttttcggtatcatgttagcgattggcagcttgatggcgttcaaaagtccacgctttggtggtgcatcggaggcatcttcagcgggcgttgcttcagctgtggcttctgcaaaaatggaagcaaattttttagagtttgatttacaaaacttattttgatttaacttaccagacttggcatccgcgtcaccgttgaccagctgcttcttttccttttcggcggatggcttgcgggcaaagaagctgcgcaggcgttctcccagtcctgggcgagatttctgttcgtccttgccggaaccggtggcggcatctccattggcttccttatccttatcctcttccttctccttttcgagcagctcgccctcggccccatcaccatctgccttcggcttgttcttcatgaagaaaccaggcagtttgagacctccgatcggtatctttttgggcttgacctcgcgctcctccttgcttatctttttgtcatcagcgctgtctggctttgtgccattctcggcgggaatatcgataatctcttctccattgcctgatttggatttcgctaattcagcatcgtcgatctttttctcggccactggtgaggatttcttgccggcatttggagatgcgggcttggaggtctgtggactgggtgtcttctccttggcgtcctcttttttgtccaacattttgtccgtttccttgggctcctctagcgcctcttgctgggcggctgtcgtctcagtgggcggggtttccttctcctcgagttcgcccatattgtcgatgaatcaagatcgtttagagaactctgcgagaattctgtaaaagtcaaggaaaagcctttgattagtttatgttctagattgaatgttcactctaggataatataccttgacttagttgtgcaaaaaaaaaataactaagttacactttggttctggttgcaagtgacttttttaaggatctgcgatctaggatctatcacgatcgatggctgaaatgcttctagctgccgctttcagccgcacaggatttttatacgattccggcagaaattcctaacctaaaggacaagcagctgatcctggcaaatggcaacgccggctgctcgctctccttttgtccttgcacaattgcttgagggtttccctccctttctctacctgaatcctctagctttgaatcctacctggaaaatgttgtcccattcaggtaggccgcggaaaattcgctcgtatttccctcaacatatcctagcaatatggcactcttttcggggcgggaagaccacaaatttattaagcgagcagatccagctgcgtacccatcagtttttgatccgatccccgtaccagattccttccttcttaaacttttcttgagcatccctactttttgctgtttggtacgtgcgcctgttcgcttttcacgcgtcccacattcttggaaaaacgctcttaattagcgaaaaactatgaaaccaacgtggaaacatccaaggacatttgacgtgtccttttgcatcattatgccaaaaacgccgctcgcagcgggattgcagtagcaaatcacgtccagactaattgaccgcaccagaaagtgcgagaagtcatgagaattttcttttttaaaaaacatcttcccgactttttttaatgagccgcacattagattgccattagccaaaagagacgaaaaaatcgtgataatttaagaaacatttgggtttctagaaggaattgactccactttaagtctcttctaaatgtataatgaaatgtattataaataatatgattgcctcattttaaaatgggaaaaccatcgaccatctcattatttgcttttatttaaagattaactatattttttagagaccctaaatatgattgacttgcatcgcttatcactccaagtaaaataggctcaattattaatctcatttttgtccagctgacccattgaatgtatatagctccatgtcatcgtctattactacactgtcgtctgtctgcccattgaactgattccccttttatttccccatcgggggagcattacaagtccattactcgcacgcattgagggaaaaccaaagcgcaaagagacgaactaaaagatatggcaaaggaaaaacgatgccaagtcgcgacctctgtcatgtaaatcaaccgaaattccattaaaatgtgaacttaaagttcaaattgcgttgcgtgccataatcttgcaacattatcagtgttcattcccgcgtttctaccgctctcgggcgatttggtcaactggaagagtgacaccgccgaggaaagcacaaaatgaaaatgtggaaaatcgaaagcaactcgacaatgttgcgtatcgaaagtgaaaagagtgtcacacggggtgttctaaagagtggggctgaaacaatgcgacgcattacaatccaattgaatcggatttcaaagtattaccacgactggcgggaaagggcggagataagttgtctggccaaagtgtggaaaagtcatggggccagaggcatataagcctccttgttgttcttgccgcctttccaatggctatactatgtactcgtactattcctcctctcaacggggaagcaggtcaaagtaattacagttcactggaactggagtatctggaggcactatctccaatgtgcatctttatagctcgcactgaaaatcttgacacgtcgataaatcgtagggtttgaattgagatcattctggcaaggaataattaaatctttattgtcttagttttcattacatttctttatgatcagcgcaataaaaaactcagtttcgagcaaatagtagtttagtttacttgtagttctaactacaaaatttctttaactgcactttcgacgccttatcaattaaaaccaagatttaaatggcaaaaactccacttttattcatagtatcatatggcagacacatttctcatagcgatcattgttaattagctgagaaatgtctgcggaaatgtctattctttggcggggggtcaagcaaacaaagttgacgcacccaaaacgcaatgaaacgcgctaaaagggaaaattgttccatgtcgccaagtcacgcagtccaacatattttccgccccattccatgattcttttggccgcatatatgagcggtctgtaattggtcttggctcgtaaattaaatcaaattcgaaacttgcgtttgacatgccattcgacttccttctcatagccaacaccctccctcctccctctgtttcctttttttattatccctgaattttattctgttctctggcttttagttctgcacatggaaattgccgttaaaacattaacaattgaccacagcatgttgggggatatgccagccaagtgagcactgtacagtggaacaagatcaggagaaaacctataatagtatatcagtccctttaggtgattaaacaatttgcagatggatagttcaatatggatagtatatttgactttaaaaaatccttaactaagcttatggaacgcacttaagaacattattttctgattcgaatattatgtgcactcaagtctctcattttttccaccaccgttcccgaaatcctactagattatcctgccgcatgagcaaccaaaaagttggcccaactaaccctcgtagatatcccagcttaagcgcaacaaataaattctggtgaaatatctcgtatctcggaacacgtcaagaaacactttgaaatgcataaaaacgcaattgctctaggccatttattttgcccgagggagtgaaaagcagggaatacatactgagtactaagttgcagttgggggagataaccccatgtcgggagtggaaaagcgacaactggcataaaagtttcgggcacaaactgccgctaaagacgcaacctgtgtccatgttgctcagtcttttttttataatatttatacatttatacttttagtatacaagggtatacttttttgtattttatttatgttatgaaaacttttgtcatggtaagcaaaatgttggttttaaatgctatttttcggctttagtttttatcaagaaatacttttttgtttcgatattataataatttaaatttttatcccgtttatatatttatataccaacaatctttgcttaactggattgctcgatatcaaatagtcgcaacactcacctacatatagctttttacttgtttttttttgtattcgcccatctaactgcagcgaagcatgaaacgaaaacagtgcgaaggaaatgacaaaaggagggtgatgaataaaggggaaagaggcatggagaggggggcaaccagtagttgggggaggagtgtgggagggttaaccgatctgcgtcctgttattattatttattacgtttcctgctggcttcctacctctccccctctctttcacacactggctttgacttgcggccggaaaaaaatgctgttgcctatcgccagatggcgtcttggccatttatcgtgtgcgtgtgaacgggcagtaaagtgtgcgagcgagatgacagaaggtggataacaaaacaaaacaaaaatgaaaaaggacattctattttgacatgcactttcagtgtttttgtgtgcgggtgctgtttatgctcaattaaacaggatattccaacaatttcagaacactccacagcacggacattcagatctactgataagaaacgcttaagcctgtttataattatatgtgcgaggaaatttgtctagacagtcaaaacaacaaacagactcaacagcaatgcaattttaggaaggatacacacgaaaaaacgtaacattatttaatatacatttgcaataacatgatacttgacatttgtaactataaggactttaagcccctgaatctcctacgtttttcagtgcatcgtttcccaactcggagcacccgcaatcagcgatttagattcaataacctcaggcataataatctttcaatttgcgcctccaatttccacgtcggaaaagaggcagacatcgagggaaatcgcaaacttctaacgaagtcaatttgtcatccggacgccatgctaatggacttctggtggggattgggtctcctcctcctccttctcctgctttataacatggcctctggtcattttaaaattaactttaaatattctgatctaacgatttatcatgccgtgttgtggatttttgttcaagttgcttaatttcatggcaatttattgaagttggccaagtgggagaatggaaaatgatgagccacatattcgccaggcaatcaaaagaagggtgattaatgatcaaagctgacacgtgttcaaagaacaatgcggaaggggtcggaaagatgaagggggagtgaagttcactggagcatgagaaacacttagaaaaaataaagaagaaacataggtaagatagatcgcaagttgcaacaaatgttgaaaacctttaaaaatatacaaacttgtttgttaagaactacttgaggacatactataataattcataagaaatataagactgaatttatttccagtacaaaaggggcagaaaccagaaaccgcaagactcaaaggtttatacacgtgcgatgcgaattcacagtcgtctcccctcattttattttgatggataacaatctcctggggcaggtagagagcggaaactggtaaaggggcacagagtcccacaaacctcaaaggatcagcggaaggcgcctagttccaggacaaggggattggcacaacaaaaatggaataaatggagtttggagtgggaagagcaaacaaaatcggaacgagatttccacttcaaacaggccatttttatgaatttgtaattactctcgaggggcaaacaactcttgaagatatgggataggatagccctgagttgcgttggttggttcaatgtttgtgcataccgcgtactcttggatttgatgaggtagacacatcttatatcttatattcaagaatatttgttggagaatgttataacattaactgagtgcattgaaccacgaagttcctggtgcatttaaccaatattatgtatgcaattagttgtttcttaaatggaagtactgggtatctgttaagtctgcatacactgccttcctcacaactcatggctgtccttccactatatcattccattttattgcacaatattttctagcaccacgttgcctttttcaggcagataagcgaagatttcctccgcgataagaaccctgagaattccttgaagccaggctccttgcagggccattggaattgtcaacaacaaatatttatgatttgcgctggggtttcttgtaaccctcattagtcaattgtcagcagctcttgaggggattcgagttttgggatcgtatcgcagcacttgactctcaagttcttattgctgatggatttacaatttcctaaatgaaaactccatttttgtttaaactgtttgaccatgaactccagatgtaaatagccgagttttgtttatcattgagagcgagaaaaagtgttgaaaatcgtgctttgtattcttgttgcatttgccttgttgtgtttttccttaattgttgtttacttttcgagtggaaagcaggcaacacttacataggaacaacaatttaaaattgaattgtaaagacgaaaacttttgattacacacattttggggtaaattgggaaaatgagatactgaggcacacacatcaacatcatcatgtcggctcttgtcttttgaaaacttggcaaaacaatgagggaagttggagcgaaaagtcaatgggcgggggagttgcctccataaatctctttccgaatgcaaatgttgcgtcagcgtggcatcttcacgttttcctaccccatttgttgtgcctctgtttggctttgttgatgcttttctcactttttagttgctcgattccccggaagtctttttttctttttctggagcgaatcgaagagcagcagctgccaactcgaactttctctgaagatcccgggaattcgtgatcatttccatgcgcctattaattcatcattgaattattgccctttttcccggtatccgtatcccttcaacaatttcctttgcatttgtttacggaatgactatttggggatttattcaagccggcgtctgactgtgcatacaaatgataccaaaggggtcgcgctatttttggggcaactccatccaccaaactctggatgttgatggattgaaatatctgaggattaacacacattatgtttatgaaatgttcaaaaggatttgtcagggccgtgatttatgtcaaatggttatgtttttcatacggagccgcgacacaagccattagaaaggatggaaaatgggaattattgagggaaagagtccgtctgatcattgacacgagccattagacctcaagacgcgtaagatgatgatgacgatggggtgggtgtgcttcgttacggagggattatatcaatgaatcgtgaagccccattaatcttattaagagctcggaatgaaatgtttttcgagacgccatttaaattgttttggtaagatgtttcctcggtaattatggattgtggaggattataaattaatttagagccgtcaagatcggataccgacatattttaaaagttttcaaattaagctcttatatcttttatcttctacttttcacaaataactcagatttcaattgctacggcattagcgtttttcaataaactttttggccaaaatctttacatttgtataaaactaaataaatatgcatgtaaattgttttattcaattataatcacattttaatctttcaagtttgaagtgtccatattcacttgttaaattattaaagttggcagacaaatttgacttcatttacaattcatcgatttgttttcaactgctcttcctcttctacaaatccccgaggtccttcacacgaatttgtaatcttacctttttcaattctcgcaaacactgtgtaaaatgtgtgttgcttttttcgaacttgttgaaatgtggcaattgggaataatccgttggtccttgaaaacagcgggtggcgtaaatgaacccgatgtccttcctgcaggacacttaggtgtgtataacaaacgcacagattttttgatttgttgcggttttttcttttctccgctccttcggcacagagcaaaacaaaatgcacaaaagtagttgcggtgtttttgttagatttgtgtaaatatatttcttgcacttaatacaacatacgatgcacaataggaatataaaaagttattccttgtttgcgccgaatttgattttgttttcttttggtcgcgtctgtgcggcgagagtgtgtgtgtgtgtgcgatgcgaaagcgagcacaaccggagcgagggaaaacgcgtgcggcttccaaaacagaacaaaactgactgacgccgtttcgatgtcatgcaattcatgcggcttcgaaacggttaacagagtcttaacagcaactgttaatgttaattttcttggatttgtttttattcggggaactggaagtggaacgtgttttcggcgagaacatgtttctctcttgaaaaaaagaaaaaacataatttaagatataacttgtaagtttataatagtatacaaattatgtcaagcaacagtgattagcattgaaaacacctacacaacgaattgttgtaatattttataagtaatttaattaaacttattagacatgatcataattcatgtttatgatttagttcgaactggaccactgtgcactggaactggaagcagccggcattgtaaatttataaatcataggggtggctggaaagcagcagtaaaagtagcggctttgttttcctgtacagtaagtgcaaaatgttcgatggtgattttatgaaaaaggtattgtagttttggtaaagcgtttattgttagtgaaacaagacacctcagatattatgatcagatcagatactttatagaacatgtaggagaacatagggtaaaattgttataaattgttcaagtcaacacccaaaacccaaagtagaggtattacgtagtctacagctctttataaatataaaacttaaagttattaaaaatttctgagttgtacatgcttcaaatagaagtagatgccgatctccctatatttctttgttattaatttttcttaaaaagagagggaagctggcaaggggaagggaaagaagtttgttgatatggcacttttgtttgagtaaaggttttgatttcggtttttgaaactcgttttcaaatgcttatcaactggcggcaagtgttgaagcgcagtttatgccgatgggaacatctggcatatgtagggaaattccacgtcctgatgcgtcattacagcacaaacccttacccttggctacctccaacccaacacccct

SEQ ID NO: 20591 - DNA, 4263 bp, DROSOPHILA
ttttgttctgttttggaagccgcacgcgttttccctcgctccggttgtgctcgctttcgcatcgcacacacacacacactctcgccgcacagacgcgaccaaaagaaaacaaaatcaaattcggcgcaaacaaggaataactttttatattcctattgtgcatcgtatgttgtattaagtgcaagaaatatatttacacaaatctaacaaaaacaccgcaactacttttgtgcattttgttttgctctgtgccgaaggagcggagaaaagaaaaaaccgcaacaaatcaaaaaatctgtgcgtttgttatacacacctaagtgtcctgcaggaaggacatcgggttcatttacgccacccgctgttttcaaggaccaacggattattcccaattgccacatttcaacaagttcgaaaaaagcaacacacattttacacagtgtttgcgagaattgaaaaagaattctcgcagagttctctaaacgatcttgattcatcgacaatatgggcgaactcgaggagaaggaaaccccgcccactgagacgacagccgcccagcaagaggcgctagaggagcccaaggaaacggacaaaatgttggacaaaaaagaggacgccaaggagaagacacccagtccacagacctccaagcccgcatctccaaatgccggcaagaaatcctcaccagtggccgagaaaaagatcgacgatgctgaattagcgaaatccaaatcaggcaatggagaagagattatcgatattcccgccgagaatggcacaaagccagacagcgctgatgacaaaaagataagcaaggaggagcgcgaggtcaagcccaaaaagataccgatcggaggtctcaaactgcctggtttcttcatgaagaacaagccgaaggcagatggtgatggggccgagggcgagctgctcgaaaaggagaaggaagaggataaggataaggaagccaatggagatgccgccaccggttccggcaaggacgaacagaaatctcgcccaggactgggagaacgcctgcgcagcttctttgcccgcaagccatccgccgaaaaggaaaagaagcagctggtcaacggtgacgcggatgccaagtctgaagccacagctgaagcaacgcccgctgaagatgcctccgatgcaccaccaaagcgtggacttttgaacgccatcaagctgccaatcgctaacatgataccgaaaaagaagagcaacgatgatgtggagctgggcttgggcaaggccggtctggcctcgatggagaccctcgatgattcccttaaggatcaagacacagtggatcgggctcccgtcaagaccaacggtaccgaggaactaaagggcgagctaaaggatgagaagctggcggcggaggaaaaactagccgccgaggaggaggagcaaaaccgacccgtctccttgctaacccgtctgcgtggctacaagtgcagtgtggacgatgccctgattgtgtttggcatcctgctatttgtgctcctgttgggcgtgattggttatgtactaacccacgagactttgacctcgccgccgctgcgggaaggacgctacataatggcagtgacggggtgcggacctgtggagggcgttaaggaagatggagcctttgccttccgtggcattccgtatgcaaagccacccgtagacagactgagatggaagccggctgaactgattgatgacatcaatatgtgctggaatgatacactgcaaacccataacagcagtgtggtgtgcacgcagcgattgggcaatggcaccacagttggcgacgaggattgtctataccttgacgtggttactccccatgtgcggtacaataaccccttgcctgtggtcgtcctgatcggagcagaatctttggctggtccttcgccgggtattctccgtccatcggctcgctattctcgatcgcacgatgtgatctttgtgcgtcccaatttccgtttgggtgtcttcggcttcctagccctcgacgctctgaccaaggaggcacacccgccaacttcgggcaactatgcgctcaccgacatcattgccgtgctgaactggatcaagttgaacatcgtacattttggtggcgacccgcaatccgtcaccctgctgggtcatcgggccggagccactctggtgactcttctagttaactcacaaaaggtcaagggtctgtacaccagggcctgggcatcatctggatcagcaattctgcctggtaaaccattgagcgagtctggtaaacaaaacgagcagctgatggccaccctcgagtgtgctgatatccagtgcctgcgtgaagcgtccagcgaacgactttgggccgccactcccgacacctggctgcacttccccgtggatctgccgcagccgcaggaggcgaatgccagcggtagccgtcacgaatggttggttctcgatggagatgtggtctttgaacatccttccgatacctggaagcgcgaacaggccaacgacaagccggtgctggttatgggcgccacggcgcatgaggcgcacaccgagaaactgcgcgaattgcatgcgaactggacgcgagaggaggtgcgtgcctatctggaaaactcccagattggagcattgggcctcaccgacgaggttatcgagaagtacaacgccagcagctatgcgtcgctggtttctatcatttcggacattcgcagcgtttgcccgctgctgacgaatgcgagacagcagcccagtgtgccgttctatgttgtcacccaaggcgagggacccgatcagctggccacggtggacgccgatgtccaggccattctcggccgctatgagccgcacaccgtagagcagcgccgcttcgtttcggccatgcagcagctgttctactactatgtctcgcacggcacggtgcagtcgtttgtccagaaccgccgggtcatcaatgttggccaggatgcgcagccggaagaggactacttgccctgcaactactggatcagcaaggatattgtgccgcggtatgcgcgcgtcgattaagcaaaccaaaatcccaacagataggccctcgcttctaaactttttcacctgtattggtccgcctgggatcgattatctcattcggctttgttgcgccttcggtttctattaaacttaaagttatctggaatatttcgaaaatttaaaaatactttagccattggatttttaagtaataatcgatttctttaaatttaatacgaaccgattacctaatcaaagcttaatacttcccgacttcgtttcgtgtttagtttagcataagttaatctaatgtttatatatatataaatatatgtgtaacggatatttagttctcttaaagtttaagttgaaagtcttaagttatgctgactccatacgtttcttcatacgagtacgtattctctaatcttaacattaacgaacacataaacacacagacacaaacagcaaaaacacaaataaaacatcacaaaatatacaaaattatacttaaaaagtatagatctgcgtctttcaactattcaacacactaatctatatacaatactataaaccatatacaactttataggagtaaatgccacagaggtttttgatttacgaaaaaaaaagaaaaaaccagcaaacgaccaacgacgaacattttttgatagaattttacaaaactcaagactcaagagagaagaaaaccgaattcataaacatttacttgggcttggaaatgtcagactcgttgcaagtctgagatcgaaggacttttccaaaagtttgaagtgttgcaaacatttcgagactgtcaggaatgaatttagacatctatttaaacattcgttcatttccacatttcatttaggagtatctataattacgcatatacatatataaatcggatattgtatggataaaacatttttgtatagctttatatgtatattattaatcgaaccaacattttctattgctttatacaagacttatccacaacagactttgagcattcacaaattgaaatcaaaaatcaaaaacaaaaacatggagtacacacaatatagaattatgttcagattaatcttgtacgcgaaccttaaggttgacaaatgtttaataaacggaaataatgaaaaatttataactaataacttagcttaaaagctcgtttatatcagtagtcacatatttcacagaaattagctaaaagaaaattttttttggttattttcacggaaaactaat

SEQ ID NO: 20592 - protein, 846 aa, DROSOPHILA
MGELEEKETPPTETTAAQQEALEEPKETDKMLDKKEDAKEKTPSPQTSKPASPNAGKKSSPVAEKKIDDAELAKSKSGNGEEIIDIPAENGTKPDSADDKKISKEEREVKPKKIPIGGLKLPGFFMKNKPKADGDGAEGELLEKEKEEDKDKEANGDAATGSGKDEQKSRPGLGERLRSFFARKPSAEKEKKQLVNGDADAKSEATAEATPAEDASDAPPKRGLLNAIKLPIANMIPKKKSNDDVELGLGKAGLASMETLDDSLKDQDTVDRAPVKTNGTEELKGELKDEKLAAEEKLAAEEEEQNRPVSLLTRLRGYKCSVDDALIVFGILLFVLLLGVIGYVLTHETLTSPPLREGRYIMAVTGCGPVEGVKEDGAFAFRGIPYAKPPVDRLRWKPAELIDDINMCWNDTLQTHNSSVVCTQRLGNGTTVGDEDCLYLDVVTPHVRYNNPLPVVVLIGAESLAGPSPGILRPSARYSRSHDVIFVRPNFRLGVFGFLALDALTKEAHPPTSGNYALTDIIAVLNWIKLNIVHFGGDPQSVTLLGHRAGATLVTLLVNSQKVKGLYTRAWASSGSAILPGKPLSESGKQNEQLMATLECADIQCLREASSERLWAATPDTWLHFPVDLPQPQEANASGSRHEWLVLDGDVVFEHPSDTWKREQANDKPVLVMGATAHEAHTEKLRELHANWTREEVRAYLENSQIGALGLTDEVIEKYNASSYASLVSIISDIRSVCPLLTNARQQPSVPFYVVTQGEGPDQLATVDADVQAILGRYEPHTVEQRRFVSAMQQLFYYYVSHGTVQSFVQNRRVINVGQDAQPEEDYLPCNYWISKDIVPRYARVD

SEQ ID NO: 20593 - DNA, 4768 bp, DROSOPHILA
atctgtatggacttcactttcctttgctccccaagagctggcagctcaatcacattgtttacctgaacctttccctggagcagagtgccagtgcaaacggttccctggccctttattccgaagcaatgatcaacgtacatgaagagtggatcggctaggtttctctgcggctgaaagtaggcttctctaagtacttctcgcaactccgcgatatgtgttccttgcaaagcagacacagcacatatgggcacttgaccaccgaatgtggtggcttccaaagtttttgcgagccgcaagcgtagcttctccagcttggacgccctctgattttctggataaacatctattttgttgatcactacaatcagctttttctgcagcagctccccgataatgaggcattctgctgtttgggtttgtttgcctttttgggcgtccaccaccaggagcatgagatcaatgatctgggcacctgcaattgtttagtttagctaagggatcttagaatgacattaaatgttatcaatacctcctataatagtgcgtataagacttgcatggccggggcagtcgacaaaggtgaactggagctgttctccttgaggtaagtgcgcaggagcatccaccaaaagtccactaaagcccaaatccaaagttatgcctcgctccactgattgcggattcttgtcgaaggcggccgtgctggaaatcgaacttaaagccttggccaaggtggtcttgccactgtcaacatgtcccagcaagccaatattaaagttgatcggcattgtacgccgaggaaaaatgaggtaaaaaatagactgcactaaaccaaacaatagaaatccaattgagatggaagtctttcgattttctaataaccgataacagtggtgttagttaacagagaagtgtaacatgctgctattgaccgatatctgtgtttagtgagatgatcgcaagtgatctaaaacttgctatcagtttactaatttgagtcttaacatctgtgggggcaaacctattttttttttgttggtattcaaatcttatcttattaattgtgcttaccaccctgatgtcagcgtaataaggtagtaaagtggagtatgcatccgattaaattttgacctgggatccagcgattacccagataacggttgcgccataacaaagcattcaatcaaaaacactcgtatcgaaagagcaaagactacaagtttcacttatatttatgaagagccatcggctgttttaaagtcagtaagcggtcggtgctcttggcgcgcagttcgcaggttttctaaatctagttgttatggcctcttccacttcggttatccctaccaccgtaaatcccgatctgcagaaggaacgagatgcagccagctttaacagcgaagaattcgccgcttggtgggcggggggcgaggaagtgctaaagttcaaccgcggcgttcgtaagtccataaaactaatcatcgctccgcttatcagtgggaacagataatttggggtcatgctgactgggctgtttttctctatgaccaggtgaatatatggagaaggatgtggatttgtcggagatgctgcagctgcaaaacaaaacccacgaagagatcatcgagttttccacgcgtggagcaatcgaaggcgccaagaagctacgccgcctgcaggaggagcgcaatcctggcggagatgtctactggccgtgggtgtttcctgcttaccgatgccaagtacacgaataatgactgattaccttactcttctaggaatttgtatgacgctcaagtgatgtggggtctcgttcccggtggcaatccttttggtgtgatgtacgtgatgctggtgaaagctctgcaggctcagtgcactccggagcagtatgaagaattcggcaagcgggtggaactcttcgagatttgcggcacctatgcccaaacggaactgggtcatggaacctacctgcgcgggctggaaacgcgtgctgattttgatcgaaagactgatcaatttgtactcaacacccccaatatttcctcctacaagtggtggcccggaggctgtaagttctggcatggtgatccaatcggttttcagatattaaagtttaactataaattttcagtgggccacagctccaatcactgcctggttatggctcagctgtacatcgacggcgactgcaagggtccgcacatgttctttattcaggtgcgtgatgaagacacccacgaaccactgcccggcgtccacatcggtgatattggcaagaaaatgggcttcattggcgtaaacaatggtttccttggattaaagaacgtacggattcctcgtacgagaatgctgatgcgacatgctcaggtgaaggctgatggatcctatgttagtagtcccaccaatgtgcttacctactttgccatggtccgcacgcgttgtgtaattgccaaaaacaatgccgtgatgttggcttctgctgccaccattgcaaccagatactcggctgtgcgccgtcagagcccaattaatcccaagtaagttgttaacaacgtagatacatttattcgaattcaattgtcccttgtttattttcagcgaacgagagcctcagatcatggatcatgttacacaacaaatgaaactcttcccagagattgccacaagcgtggcataccgaaaggccggtgattacttgtggaatctgtacgatgtgaccatcgaggatatagaaaacggaaaatacgaacgtctgccggagttgcattctctgtcctgcgctttgaaagttacctgctccatggactccgcttctggtgtagagaaattgcgactggcctgtggtggtcatggattcctcacctcatccaacatgagcagtatatacgttagtgccaccgcagcttgcacgtatgagggtgagaacaccgtactgcttctgcagatcggtcgctttttaatgaagacgtggcgagccgcgttgactggagctccgttgccgcccaccgttcgctatttggccgaggtgcaaaagaatccggagtttggcacctggactggaagttgggagaacatggttaaggccatgcagtatgcagctgccaatagaacacagttggcattcaggagcctttccaaacgtatgtcaaggggcgaaactgaagcgaacgcagctaatcacacgggcattgagttcacccaggcggcagaggttagtgtgctaaagtgacttggactgtgccctaccgatttctgaaaaactctaaattttttcttgcccatagctccacggacgtgcttttgttttcagtgctttctatgaagcagtcaccggtcctcaatctaagacgcgctcagctaacttcaatcgagtcctggagaacctgttggagctgtacctagtcaaggagacacttaatcaaatgggtcacctgctgagagtgggtttcaattatttagcctagaatgtgttgaatgttaacttaatatattcttattccacagttcattaacttgaccgatacggatctctccgggctgcaggatcgcttggaaacagtgctcaccaaactgcgaccagatgctgtggccattgtggatggctttgacttcagcgatctgcagctgaactccactctgggctcttacgatggcaatgcctacgagcgtatcttcgatgcggccctcaagaatccgatgaaccaaaaagcagtgcctaagtacttccatgagatcctgaggccgttcatgaagtcaaacatctagtgccttggacagctgtttattaaaccacctatctagagttaggctcaatgtaatgtattgtaaataccccatatgtattggtgttttgtattatttttgtaaataatactctttaataatatagacccaacatataccgctctttaaatgaattctttgccaagccatgaacatctgctgctttgtcgatcagctttctctcttgaaaagctgtcttgtgcactttgcccccccaaaagcttttcattctcgccgatccatccactttcgctcagtagtcgcgtggagctcacagctgttgattggatctagtggtggatcatagtttagttgttaacaattccgtatttttattttgcacacaacaatgtcgcatattaaaaacctaataccgagcacagtgaatccagatcttcaaaaggaacgtgctgcagctgaattccatgtggaggaattctccgcctggtggcacggtggtcaagacaaactgaagaagaagcgcgaaatcggtaattgttaaagataaaaatcattagcgtcacgccggtgttcgtgatatggcacaggttttgttcaattaaagcttctttgccatcaaaaaaatcggggtccaaacagttcatcaaatggcccgaagtccaattattgttatacattgttgagcagccgaattaaaacctttattgctttatcaataataaaagatcgtgatagcacttgtgatatctacgattccctgcaattgcaaataagctaattttcttatcagcttaaagggctgctctacacccccaggtgataacgaagggcacagtcacactttataaatcgaaccattatctttacgactgattctatcttttattgctaccacttattctgttcataattgaaagttgtataagaagtgtaatttctaatcgacagagaaagcgatcttcagcgatcttgaggatggctatggcctcaaccatgagtacatgtcccacgaggaggtcta

SEQ ID NO: 20594 - DNA, 2352 bp, DROSOPHILA
ttaacatctgtgggggcaaacctattttttttttgttggtattcaaatcttatcttattaattgtgcttaccaccctgatgtcagcgtaataaggtagtaaagtggagtatgcatccgattaaattttgacctgggatccagcgattacccagataacggttgcgccataacaaagcattcaatcaaaaacactcgtatcgaaagagcaaagactacaagtttcacttatatttatgaagagccatcggctgttttaaagtcagtaagcggtcggtgctcttggcgcgcagttcgcaggttttctaaatctagttgttatggcctcttccacttcggttatccctaccaccgtaaatcccgatctgcagaaggaacgagatgcagccagctttaacagcgaagaattcgccgcttggtgggcggggggcgaggaagtgctaaagttcaaccgcggcgttcgtgaatatatggagaaggatgtggatttgtcggagatgctgcagctgcaaaacaaaacccacgaagagatcatcgagttttccacgcgtggagcaatcgaaggcgccaagaagctacgccgcctgcaggaggagcgcaatcctggcggagatgtctactggccgaatttgtatgacgctcaagtgatgtggggtctcgttcccggtggcaatccttttggtgtgatgtacgtgatgctggtgaaagctctgcaggctcagtgcactccggagcagtatgaagaattcggcaagcgggtggaactcttcgagatttgcggcacctatgcccaaacggaactgggtcatggaacctacctgcgcgggctggaaacgcgtgctgattttgatcgaaagactgatcaatttgtactcaacacccccaatatttcctcctacaagtggtggcccggaggcttgggccacagctccaatcactgcctggttatggctcagctgtacatcgacggcgactgcaagggtccgcacatgttctttattcaggtgcgtgatgaagacacccacgaaccactgcccggcgtccacatcggtgatattggcaagaaaatgggcttcattggcgtaaacaatggtttccttggattaaagaacgtacggattcctcgtacgagaatgctgatgcgacatgctcaggtgaaggctgatggatcctatgttagtagtcccaccaatgtgcttacctactttgccatggtccgcacgcgttgtgtaattgccaaaaacaatgccgtgatgttggcttctgctgccaccattgcaaccagatactcggctgtgcgccgtcagagcccaattaatcccaacgaacgagagcctcagatcatggatcatgttacacaacaaatgaaactcttcccagagattgccacaagcgtggcataccgaaaggccggtgattacttgtggaatctgtacgatgtgaccatcgaggatatagaaaacggaaaatacgaacgtctgccggagttgcattctctgtcctgcgctttgaaagttacctgctccatggactccgcttctggtgtagagaaattgcgactggcctgtggtggtcatggattcctcacctcatccaacatgagcagtatatacgttagtgccaccgcagcttgcacgtatgagggtgagaacaccgtactgcttctgcagatcggtcgctttttaatgaagacgtggcgagccgcgttgactggagctccgttgccgcccaccgttcgctatttggccgaggtgcaaaagaatccggagtttggcacctggactggaagttgggagaacatggttaaggccatgcagtatgcagctgccaatagaacacagttggcattcaggagcctttccaaacgtatgtcaaggggcgaaactgaagcgaacgcagctaatcacacgggcattgagttcacccaggcggcagagctccacggacgtgcttttgttttcagtgctttctatgaagcagtcaccggtcctcaatctaagacgcgctcagctaacttcaatcgagtcctggagaacctgttggagctgtacctagtcaaggagacacttaatcaaatgggtcacctgctgagattcattaacttgaccgatacggatctctccgggctgcaggatcgcttggaaacagtgctcaccaaactgcgaccagatgctgtggccattgtggatggctttgacttcagcgatctgcagctgaactccactctgggctcttacgatggcaatgcctacgagcgtatcttcgatgcggccctcaagaatccgatgaaccaaaaagcagtgcctaagtacttccatgagatcctgaggccgttcatgaagtcaaacatctag

SEQ ID NO: 20595 - protein, 677 aa, DROSOPHILA
MASSTSVIPTTVNPDLQKERDAASFNSEEFAAWWAGGEEVLKFNRGVREYMEKDVDLSEMLQLQNKTHEEIIEFSTRGAIEGAKKLRRLQEERNPGGDVYWPNLYDAQVMWGLVPGGNPFGVMYVMLVKALQAQCTPEQYEEFGKRVELFEICGTYAQTELGHGTYLRGLETRADFDRKTDQFVLNTPNISSYKWWPGGLGHSSNHCLVMAQLYIDGDCKGPHMFFIQVRDEDTHEPLPGVHIGDIGKKMGFIGVNNGFLGLKNVRIPRTRMLMRHAQVKADGSYVSSPTNVLTYFAMVRTRCVIAKNNAVMLASAATIATRYSAVRRQSPINPNEREPQIMDHVTQQMKLFPEIATSVAYRKAGDYLWNLYDVTIEDIENGKYERLPELHSLSCALKVTCSMDSASGVEKLRLACGGHGFLTSSNMSSIYVSATAACTYEGENTVLLLQIGRFLMKTWRAALTGAPLPPTVRYLAEVQKNPEFGTWTGSWENMVKAMQYAAANRTQLAFRSLSKRMSRGETEANAANHTGIEFTQAAELHGRAFVFSAFYEAVTGPQSKTRSANFNRVLENLLELYLVKETLNQMGHLLRFINLTDTDLSGLQDRLETVLTKLRPDAVAIVDGFDFSDLQLNSTLGSYDGNAYERIFDAALKNPMNQKAVPKYFHEILRPFMKSNI

SEQ ID NO: 20596 - DNA, 3767 bp, DROSOPHILA
ctatttatggctctacttgataaatttagcgggcggaaatctttaggtatctattgtggcaaaaaggttggtttttttttattgaatatgttacggtttcgattttctgcagaacgcaggaaatatattttcaatagtgagccaaaaattcatgtatgctttgggctgcaaaaagtatctgctttcactgcagataagatacaccactaaattaaatacaagttacagctgcggctaaaacaatattttgccatgttatgaatatcgtgatattacaatcagacattagctaatatctaaaatgaacatttagatgccgtaataaaaacgtaagattaataattttgcataaaattttattagaacacatacaagcaagcggctattatgctgaccgcaattgtgcgtacaatacacactccatgctgataactcccacgccactccagaaaaatcaccgatggaattgttttgcagctgttttaataataaagtgaattactgagagcattttgcttgtttgcttcgcgaacacattcagatgttttgttataattaaaagtaattactgatacagggcaccacagcatcgcaggcgctgtgctagtggcttctcgaataacaatttcaatttccaaatacatacgcgcttttaataatatactcgaaactggttgcggttgctctcccctcttccagagggaaaggcaatatttgtgactgcgttttgtttgacttccatagcttagcttaaattctaattaagtgttcaattgaaactcttgtgatgctgctcgctggctggctggatggcaggcctgttgttccattctattacgttctggtctggtttcggctttttcctggctgcttcgattgctgtgctttcgtttactttcatggttattgttctgttccggttttccgtttcgttcatctcgggtggcgtgctctagctcaattaaatttcttggaaggccgttcagcttttaacaacacacttttccgcttccgagcttcgaaatctcccagggccacaagcttcagctttacttagcgggcgaggagccaccatagaatggctcctcccacttgtggtgcacctccggcgtcaggtggctaatctgcacgtgcacggcctggtgcttctcatacttgggcggaatggcgcacagacggtatttgacctcgtccccgggcatgggcacatattcaccttcgatgctgtgggaagattacatttttgtaggtcttacagagccagcgcaaaggtcgccgcgcatgcaatattcattcacttactcggaaacgtggcaaaaaacgtcctctccgccggcgttgggtgtaatgaagccgtgtcctttggtgcggctgaaggatttcaccataccggtcacaaccggattttccaaggcccgagcggagctatgttttttcagcgttattttgagtttgcgcgtgtttgcgttttggcagcgtttgggaaaagaattaagcaggaagagacaagttaatcaatggaggatgcgcatggggatatgagggggaagaatttaagtacgtggattatgttcgaaagggttccgagagcttataaattcggcagcgactgatttctgaatgtatgtatgtatgtacaatgaaataattgaaaaagtatggggtttacaaatttaaactttcaaaaaaaatggtccttacggttataaaaatatttataagtatatacacataaaaataaatatattaaatgtaaatgtggaaccaataaagtgttccatgttcgattactaattactgtttgtttcattatgtttgctcatctaattcaacaaatgcagtttaaaacattatagaaagcttttgctttagaaattacaagcttccatgctattcttttactatttcaaaaggttgtatttggttttcatacaaaagagcgaaccttgtgaaataatgtgaactttcggcgcctatttggccccataaaggctctgcataggggccaagttccccttggggtcaagtgtgtgtggggccagtagtgggtgggtggttttgctggttgggtgggcagggcagtgcaggaggacttacgtcgaggccgtgcgagtgcgcctcgtgatgatgggactgggcagctgcagcgaggcattgggactatggctgttgtggtgtaaaaccggcggcttggcggccagcagcttctcgggcgtccttggttcggtcatggctttcttacactgctcgtttacttgccgatttatgcgttcttcccctttcttcgctcttttcctctcctctcttcagacagtagaagcggcttgcgcgtgtgtatatatgtgcgtatgtgtgtttgtgggtgagtggacggcagccaagtctgtcgagttcaaggccacggggggcgggttagtcagtcagcaaattgcgttgcacttaattcacgtgtactcggtcagcttaccgacaacttcacgccctctttcctagcaccttgataattggcaatccaaaaatcctggcttagcttcttttttttttgcgaaacacccacacactgatgcaaattttaccgctgtgcgaaacgccggttgccaatgttatttgtaccccctaaatcagtcctgcgcggtatgacttttatcaactttggaatctgggatttttttaaacttttttatcaattattacaccggcttgatgcgcgctttttaagaatttcagttttttaacgaatggcggcggaggcgtcaaagtcagacctcagagtgaacgttttggaatgttccagaaatcccaaaacctatcgcttagcctaattggcaatcgatgtttatagcaacatgaataaaatttgaaaatcaaatttaacgaacaaacaggattaattacaagttactccaacttgttggtagaataaatagatgtgaaaatttaattgaaagcatttataattattttaaacaattaaaaaattgcattttccgcacaaacactcaactcttatatagattctttttttatatgcttgatatacgaaaaaaatgtgttcagactaatatgttgtccacactaacaatgaatatttaaatatatttatttacatgtagtactcgatagtttcaccccgttgttccatcactaaagcatctcgatcttgaccatccctagcttgaaatttagcgtcctattgcaggaaagtcgcgaaatagataaaataataacaagaactttcatgttttccaagaggaaaacttgattgagaccatatataggtgaaacggacagcgaaggtttcgcaaaaggcgacagcgccgtggatccggaaatatactcatcgggcagcagggaatgcgatcagtctgaagcgagaaagcggaattcagacatcctgctgcaaggaatggagaatgaaaccgaagctcttgatccggaagtttatgccgatgagacctctacagatgatagctctggtgatgatgaggtaatcctcaatccagttgaaggtctgcagccggcggttgagattgatgaacaacgtgaccagcctggtgagaacgcggaacccgagcaaccgagagttccgcctttaattctggtagatcctccgcatttgcccagtcccccgagaaattcccgccgcaatcaaggcgaagagcaggaggtgatctcattagaaacgccatcaccgcccaagaaacgtaaacgtctctccgctgctgccgataaaagccttaaaaagtcgcccgagggcaaaccaatag

SEQ ID NO: 20597 - DNA, 933 bp, DROSOPHILA
aggtctgactttgacgcctccgccgccattcgttaaaaaactgaaattcttaaaaagcgcgcatcaagccggtgtaataattgataaaaaagtttaaaaaaatcccagattccaaagttgataaaagtcataccgcgcaggactgatttagggggtacaaataacattggcaaccggcgtttcgcacagcggtaaaatttgcatcagtgtgtgggtgtttcgcaaaaaaaaaagaagctaagccaggatttttggattgccaattatcaaggtgctaggaaagagggcgtgaagttgtcgacttggctgccgtccactcacccacaaacacacatacgcacatatatacacacgcgcaagccgcttctactgtctgaagagaggagaggaaaagagcgaagaaaggggaagaacgcataaatcggcaagtaaacgagcagtgtaagaaagccatgaccgaaccaaggacgcccgagaagctgctggccgccaagccgccggttttacaccacaacagccatagtcccaatgcctcgctgcagctgcccagtcccatcatcacgaggcgcactcgcacggcctcgacctccgctcgggccttggaaaatccggttgtgaccggtatggtgaaatccttcagccgcaccaaaggacacggcttcattacacccaacgccggcggagaggacgttttttgccacgtttccgacatcgaaggtgaatatgtgcccatgcccggggacgaggtcaaataccgtctgtgcgccattccgcccaagtatgagaagcaccaggccgtgcacgtgcagattagccacctgacgccggaggtgcaccacaagtgggaggagccattctatggtggctcctcgcccgctaagtaaagctgaagcttgtggccctgggagatttcgaagctcggaagcggaaaag

SEQ ID NO: 20598 - protein, 143 aa, DROSOPHILA
MTEPRTPEKLLAAKPPVLHHNSHSPNASLQLPSPIITRRTRTASTSARALENPVVTGMVKSFSRTKGHGFITPNAGGEDVFCHVSDIEGEYVPMPGDEVKYRLCAIPPKYEKHQAVHVQISHLTPEVHHKWEEPFYGGSSPAK

SEQ ID NO: 20599 - DNA, 4920 bp, DROSOPHILA
aaaagaatccggagtttggcacctggactggaagttgggagaacatggttaaggccatgcagtatgcagctgccaatagaacacagttggcattcaggagcctttccaaacgtatgtcaaggggcgaaactgaagcgaacgcagctaatcacacgggcattgagttcacccaggcggcagaggttagtgtgctaaagtgacttggactgtgccctaccgatttctgaaaaactctaaattttttcttgcccatagctccacggacgtgcttttgttttcagtgctttctatgaagcagtcaccggtcctcaatctaagacgcgctcagctaacttcaatcgagtcctggagaacctgttggagctgtacctagtcaaggagacacttaatcaaatgggtcacctgctgagagtgggtttcaattatttagcctagaatgtgttgaatgttaacttaatatattcttattccacagttcattaacttgaccgatacggatctctccgggctgcaggatcgcttggaaacagtgctcaccaaactgcgaccagatgctgtggccattgtggatggctttgacttcagcgatctgcagctgaactccactctgggctcttacgatggcaatgcctacgagcgtatcttcgatgcggccctcaagaatccgatgaaccaaaaagcagtgcctaagtacttccatgagatcctgaggccgttcatgaagtcaaacatctagtgccttggacagctgtttattaaaccacctatctagagttaggctcaatgtaatgtattgtaaataccccatatgtattggtgttttgtattatttttgtaaataatactctttaataatatagacccaacatataccgctctttaaatgaattctttgccaagccatgaacatctgctgctttgtcgatcagctttctctcttgaaaagctgtcttgtgcactttgcccccccaaaagcttttcattctcgccgatccatccactttcgctcagtagtcgcgtggagctcacagctgttgattggatctagtggtggatcatagtttagttgttaacaattccgtatttttattttgcacacaacaatgtcgcatattaaaaacctaataccgagcacagtgaatccagatcttcaaaaggaacgtgctgcagctgaattccatgtggaggaattctccgcctggtggcacggtggtcaagacaaactgaagaagaagcgcgaaatcggtaattgttaaagataaaaatcattagcgtcacgccggtgttcgtgatatggcacaggttttgttcaattaaagcttctttgccatcaaaaaaatcggggtccaaacagttcatcaaatggcccgaagtccaattattgttatacattgttgagcagccgaattaaaacctttattgctttatcaataataaaagatcgtgatagcacttgtgatatctacgattccctgcaattgcaaataagctaattttcttatcagcttaaagggctgctctacacccccaggtgataacgaagggcacagtcacactttataaatcgaaccattatctttacgactgattctatcttttattgctaccacttattctgttcataattgaaagttgtataagaagtgtaatttctaatcgacagagaaagcgatcttcagcgatcttgaggatggctatggcctcaaccatgagtacatgtcccacgaggaggtctacaattccacggtgaagaaggtggctgaggcagctgttaagctcaaggctctgcagaacaagcttaatcctggaggaactgacatctggccgtaagttaaacacgcaagtgtgtaaaaggtttcttcaatcttatttccgctcgatttgcagtggaggactattcaatgcacagagctttggactttttccggctaatcatccgattgccacccacatcaccatgttcgtggatgtgatcaaaggtcagggcactgccgaacaggtggagaagtggggcaaggcggcggagaactgcaacattatcggcacctacgcccaaacggagctggcccatggcaccaatgtccgtggcttggccactcgggctgactttgatcccaaaacggatgagtttgtgctaaatacaccgaacttggaggcctacaaatggtggcccggcggctgtaagtagtttaattatagttgtagtccaaatatgcatttaatccatccttatcatctctagtgggacacacggccaatcatgcaatggtagtagcccaactatatatcgccgatgttcatcatggcgtgcaaatgtttattgtgccgttaagagattccgaaactcacatgccactgccgggtgttgatatcggtgagattggcaagaagctcggcatggcatccgtgaaccagggcttcctgggactgaaccacgttcgaattccgcgcaccaacatgctgatgaagttcgccaaggtggagcgggatggcaccttcaaggccagcccggcatcgaggattaactacctgaccatggtgtacacgcgctgcttgatcgttagccagaactccacgttgctcctggcggcggcaaccatagccacgagatactcggcagtgcggcgtcagagtcccattgagcccaagtaagttgcgatggtgtttgcaggaataaaaacttaatgtctatgtaccgacagtcaacccgagccccagatcatagatcatgtgacccagcgcctgaagctcttccctgagatcgctacgggaatcgcctaccatctggccaccgagtacatgtgggaaatgtatgcccagacggtgcaggaagccaacaacggcaagttcgagcgactgcccgacatgcacatcctgtcctgcgcgctcaaggtcctttgcaccactgacggctgtgctggcattgaaaaacttcgtctgtccactggaggacatggttacctcatcgccgccaacttgagcaacatctatggcaatgctgtggctgcgtacacctacgaaggcgagaacacggtgctgcttctgcaaattggacgagctttagttaaggcatgggcttcgttcgtggacaagaaaccattatcggcatcctacagctactttgccagctccatgcagctgaaggagttccccaaatgggacgactcctggcagtgcatcatcaaggctttgcaatacacggctgcacagtgagtttgacttaaatgcatctttttaacttagtgcttacatgattaatttgcagcaagacccgcattgctttcgagaatctagcgaatcgcatggccagcggtcagtctcaaggtgtggcggccaataacacgggaatcgaactgactcgtgcagctgaggtaagtaatataaacaaagttagagatgaccacgtagatgactatatttgacaattatgcaaacatatttcagctgcatggccggcagtttgtgtgccaaacattcctggagcagatcactggtgccaaggcccagaagcgatcccccgcactgaacaagatattggagaacgtgctggaactatttctggtccaaacggtgcttaataaccttaatgacattttaagagtgagttttcctctcatttccatttactgcattgttaattatgccattttgcttgccagttcattaaactaagcgatgcggatctgcgatcgctgcaaaaacgcttggaggattcactggcgcagttccgacccaatgcggtggccatatgcgatggattcgagttccacgaccgtgtgctaaactccgtgctgggcagctacgatggcaatgtgtatcccaggctcttcgattcggccaaacgcagcaccatgaaccagaagcccgtccaaacatcatttgagacctacctgaagcccctgatgaaggctaagctgtaaagcaaacacgaccgacccgagtcatgtgtatagagagttatattgaagtagagaaactacatgttttgtttaaattagttttataccagttttatttagcaaatcaaaaccaatttctcagtacattcagcgcatttttaaaaaaaactaacaaactaaacgcttacaaagtagcaaaaaaagttgatgtaaaatttgacaaaacgtactatgggtcgagagttgaacaaacatagtacttgtacatatcaaaaacgatgcggttgcgttttttacagtgtagaaaaagttgtgttcagaaaaatgttttagttcctgttgcagttgctgttgctcatgttttcttgtttgcttgtgtgtgtgtgtgtgtgtgtgtgtgtgagaagtgtgtgcatgtttttgtgtgtaagttgcagttttgattccggaaaagggggaaaatagttttcacttctctgatgatgttcgaaagttccctttgttatatgctctgctgtcaaagtagtagtaggtttaattcattatttatgcattatacacagttacacacacaattgatttatgttgctaattatatacttatatgttatatattagttttcgtttttcgtaacttcttttcgcaatgaaaatatggcatgagagttggagagagaatattggttgactaacaattaaacaagtattgcagctaattgattggtatgagggtgtgggtgagtataacatttgttgctggactgttttgttttagtttaatttgaaatcgccttgtaaacttaacaattaattttcactattgcatgtgattatgatttgttgctgtggttcttgttgttgttcttcttctcctttttgttgttgttgtcgttcgtattcgcttttgtattttgcttgcaaaactaaacaattgtcagtgacagcgaacgtaaaaactaaataaatgcacaataattaatgcgttaatccgattttgattcttagccatggaagaagcagt

SEQ ID NO: 20600 - DNA, 2137 bp, DROSOPHILA
ctttcgctcagtagtcgcgtggagctcacagctgttgattggatctagtggtggatcatagtttagttgttaacaattccgtatttttattttgcacacaacaatgtcgcatattaaaaacctaataccgagcacagtgaatccagatcttcaaaaggaacgtgctgcagctgaattccatgtggaggaattctccgcctggtggcacggtggtcaagacaaactgaagaagaagcgcgaaatcgagaaagcgatcttcagcgatcttgaggatggctatggcctcaaccatgagtacatgtcccacgaggaggtctacaattccacggtgaagaaggtggctgaggcagctgttaagctcaaggctctgcagaacaagcttaatcctggaggaactgacatctggcctggaggactattcaatgcacagagctttggactttttccggctaatcatccgattgccacccacatcaccatgttcgtggatgtgatcaaaggtcagggcactgccgaacaggtggagaagtggggcaaggcggcggagaactgcaacattatcggcacctacgcccaaacggagctggcccatggcaccaatgtccgtggcttggccactcgggctgactttgatcccaaaacggatgagtttgtgctaaatacaccgaacttggaggcctacaaatggtggcccggcggcttgggacacacggccaatcatgcaatggtagtagcccaactatatatcgccgatgttcatcatggcgtgcaaatgtttattgtgccgttaagagattccgaaactcacatgccactgccgggtgttgatatcggtgagattggcaagaagctcggcatggcatccgtgaaccagggcttcctgggactgaaccacgttcgaattccgcgcaccaacatgctgatgaagttcgccaaggtggagcgggatggcaccttcaaggccagcccggcatcgaggattaactacctgaccatggtgtacacgcgctgcttgatcgttagccagaactccacgttgctcctggcggcggcaaccatagccacgagatactcggcagtgcggcgtcagagtcccattgagcccaatcaacccgagccccagatcatagatcatgtgacccagcgcctgaagctcttccctgagatcgctacgggaatcgcctaccatctggccaccgagtacatgtgggaaatgtatgcccagacggtgcaggaagccaacaacggcaagttcgagcgactgcccgacatgcacatcctgtcctgcgcgctcaaggtcctttgcaccactgacggctgtgctggcattgaaaaacttcgtctgtccactggaggacatggttacctcatcgccgccaacttgagcaacatctatggcaatgctgtggctgcgtacacctacgaaggcgagaacacggtgctgcttctgcaaattggacgagctttagttaaggcatgggcttcgttcgtggacaagaaaccattatcggcatcctacagctactttgccagctccatgcagctgaaggagttccccaaatgggacgactcctggcagtgcatcatcaaggctttgcaatacacggctgcacacaagacccgcattgctttcgagaatctagcgaatcgcatggccagcggtcagtctcaaggtgtggcggccaataacacgggaatcgaactgactcgtgcagctgagctgcatggccggcagtttgtgtgccaaacattcctggagcagatcactggtgccaaggcccagaagcgatcccccgcactgaacaagatattggagaacgtgctggaactatttctggtccaaacggtgcttaataaccttaatgacattttaagattcattaaactaagcgatgcggatctgcgatcgctgcaaaaacgcttggaggattcactggcgcagttccgacccaatgcggtggccatatgcgatggattcgagttccacgaccgtgtgctaaactccgtgctgggcagctacgatggcaatgtgtatcccaggctcttcgattcggccaaacgcagcaccatgaaccagaagcccgtccaaacatcatttgagacctacctgaagcccctgatgaaggctaagctgtaa

SEQ ID NO: 20601 - protein, 677 aa, DROSOPHILA
MSHIKNLIPSTVNPDLQKERAAAEFHVEEFSAWWHGGQDKLKKKREIEKAIFSDLEDGYGLNHEYMSHEEVYNSTVKKVAEAAVKLKALQNKLNPGGTDIWPGGLFNAQSFGLFPANHPIATHITMFVDVIKGQGTAEQVEKWGKAAENCNIIGTYAQTELAHGTNVRGLATRADFDPKTDEFVLNTPNLEAYKWWPGGLGHTANHAMVVAQLYIADVHHGVQMFIVPLRDSETHMPLPGVDIGEIGKKLGMASVNQGFLGLNHVRIPRTNMLMKFAKVERDGTFKASPASRINYLTMVYTRCLIVSQNSTLLLAAATIATRYSAVRRQSPIEPNQPEPQIIDHVTQRLKLFPEIATGIAYHLATEYMWEMYAQTVQEANNGKFERLPDMHILSCALKVLCTTDGCAGIEKLRLSTGGHGYLIAANLSNIYGNAVAAYTYEGENTVLLLQIGRALVKAWASFVDKKPLSASYSYFASSMQLKEFPKWDDSWQCIIKALQYTAAHKTRIAFENLANRMASGQSQGVAANNTGIELTRAAELHGRQFVCQTFLEQITGAKAQKRSPALNKILENVLELFLVQTVLNNLNDILRFIKLSDADLRSLQKRLEDSLAQFRPNAVAICDGFEFHDRVLNSVLGSYDGNVYPRLFDSAKRSTMNQKPVQTSFETYLKPLMKAKL

SEQ ID NO: 20602 - DNA, 4200 bp, DROSOPHILA
agctaaattaacatgaaaagcggcaaaaaccactaaaacaagaatattaattgatattgtctcccaaattttgcagaactaccttaatgtgctgtggggcaagctggccgccgagattctgaccctcaactggaacactgctctggaggatctgacgcgtttgcgcgactacattgacaacgccaacttcagcaccatccaggccctgcagcaacgcacctggctgatccactggtcggtcctggtcttcttcaatcaccccaagggacgcgatctcattattgagatgttcctgtacaagcccctgtatttgaacgccattcagacaatgtgtccgcacatcatgcgttacttggccaccgccgtagtcatcaaccgcacccgccgcaatgctctaaaggatttgatcaaggtgatccaacaggagtcgtacacgtaccgcgatcccatcaccgagtttctggagtgtctgtacgtgaactttgatttcgagggagcgcgtctgaagctgcacgagtgccagacggtgatcctcaacgacttcttcatcgtggcctgcctgaatgagttcgtggaggatgcccgcttgatgatcttcgagacattctgccgcatccaccagtgcatcaccatcagcatgctggccgataagctgaacatgaagcccaacgaggctgagtgctggatcgtcaaccttatccgcaatgcccgtctgaatgccaagatcgattcgaaactgggtcatgtggtgatgggcacccagcccttgagtccctatcagcagctggtggagaagatcgactcgctgtccatgcggtcggagcatttggcaggtttgattgagcgcaagagcaagcagaagcagaatcaggagtcggccgactcctggaagtactactagttgctgactttttatccacaattaagttaagactctttgtaccctttaaaaaccgatgattgcgcgcagtcgagcgaataaattaacatcttactcattcgctcaattcaacatttgattttatttccttcggaatcaaaattagttatacaaaaaacaataccaaggcgggaatttgtaatttcgctagcctacagaatgcaaacgtctgctaatcctagaattagttgtttgtacctacaagtgggtgctggatctttatgacgatctggccccggatcacactattgattgctaccgcgatttctgcttgaccaccaaccaggatctgacgggcaggtcctgcaagtaaacgatccatttgcgcaccagcagcagccacactatgccgtacagaacgcaaatgcccgactccaagtagtacccatcgaaggttatctcgcacttgccagccgacgcttcacagctctgcgggagaaaattaagaaaaatatttgtttagttacttttatctcataactggcaaagtttatcttttcctggtttggggtaaaactttcaccatacatatgtatccatatacaataataataataatcttgtatgctgtagaatctctctctgagcactcacctgttgctcctccttgccctggcaggtattttccgcattattggagcactgcttccaggtgagcacgtccaccaaccacaacaccactgtgttgggccaattaccgcccagattgcacaatgtgttcaaaaatgtcatgtaagtgccaccgacggctggatcggagatcttggcgaaaaaggccatggcggccacaaacatggagtacaggaatacttggtagatggcataactggtgatcagcaggacgtagtaataagcaggcacggctcctccacggacaatatagggtgtgatgtaggccaagccagtggccactgttgccatgatgatgcgatagggaatggccttcagatagacgtccatcggacgtggtccgttcgtatatcgaccgaccgccagcggcagaatgagctgcagaggaattaggggaatggcgagtaaagccagcttatccttcggtacaccagcgtcaatgagttttaagctggtcactgcatcagaggctgcgaacgtgaccttcacggtgagcagaattacagccagaatttggacgggacgcatgcacaccatgtcccacaatatcttgtagctctcatggatgttcaactcgtgctcctccgtgtagcgagcgtccatatgcgcgtcttcgatgtcgttctccttcttgaaaattgccaccaaagtagtggctaccacaaatgtaatgccccagaaccaaaggaaacggggcaatgtgatcatgccatcctcgagtggcacgtctcttatgtaggtgttgcagaaatccttggactccagggcaatgaacaccacatagcccaagaagtagccagctgtttggcccacgctattgcaggtggatgcgtatccaacattgcatcgcttcagcatggtcaaggcccagccatccacggcgatgtcctgagtggcagccaggaagttaagcaggaagaagagcagcgtcaggagcggcacattgggatcgacaccgttcccgcccagccagcgatccacgtggagggagaggagtaacataaaggctcccagaaggtattgcactgggactagccacgatttccggcgtccaaatcgccggatgtacagggaatccacaattggagcccacagcagctttaagctgaatggccagtaggcgaatgaaaactccgcctgttgtttgtagctagctcctctattttgcagcaacattggtatggctgctatgagcccgatgggaatgccctgtagaacgtacaggaacagcagtatggctatattcctccggtctccacgaatatctggtttctggtgctccgccaccttttccgactttggtggctcgtcgatgagcaactcctggtcggcattgctgcccgttggctttctccttatggcggacatgctgatcaaatagcgataggtatatattataaagacatgctagtttgggggccacaggctcacctgtttttctaatcaccaacaaataacaccacgtcactcaaatgtagagctttttacgtattttcccgatacaattccctcgatgcctttaatttggttaaatgtacgatcgaatggctttctgaatatctgccagttcggtctttaattaattcattttccgttgaatcggaatattttctttcgtggcatatgtttgttgacgttccaatatatttttatagcaactctctgtcgcactacgcatgcagttgctataaaccgccgcatggtcacactaatcattcgaaattcaaactgagtggcgggagacttacgaaatggaaatccataattttaggagtatgagttggtttggctatttatggctctacttgataaatttagcgggcggaaatctttaggtatctattgtggcaaaaaggttggtttttttttattgaatatgttacggtttcgattttctgcagaacgcaggaaatatattttcaatagtgagccaaaaattcatgtatgctttgggctgcaaaaagtatctgctttcactgcagataagatacaccactaaattaaatacaagttacagctgcggctaaaacaatattttgccatgttatgaatatcgtgatattacaatcagacattagctaatatctaaaatgaacatttagatgccgtaataaaaacgtaagattaataattttgcataaaattttattagaacacatacaagcaagcggctattatgctgaccgcaattgtgcgtacaatacacactccatgctgataactcccacgccactccagaaaaatcaccgatggaattgttttgcagctgttttaataataaagtgaattactgagagcattttgcttgtttgcttcgcgaacacattcagatgttttgttataattaaaagtaattactgatacagggcaccacagcatcgcaggcgctgtgctagtggcttctcgaataacaatttcaatttccaaatacatacgcgcttttaataatatactcgaaactggttgcggttgctctcccctcttccagagggaaaggcaatatttgtgactgcgttttgtttgacttccatagcttagcttaaattctaattaagtgttcaattgaaactcttgtgatgctgctcgctggctggctggatggcaggcctgttgttccattctattacgtt

SEQ ID NO: 20603 - DNA, 1973 bp, DROSOPHILA
caaacatatgccacgaaagaaaatattccgattcaacggaaaatgaattaattaaagaccgaactggcagatattcagaaagccattcgatcgtacatttaaccaaattaaaggcatcgagggaattgtatcgggaaaatacgtaaaaagctctacatttgagtgacgtggtgttatttgttggtgattagaaaaacagcatgtccgccataaggagaaagccaacgggcagcaatgccgaccaggagttgctcatcgacgagccaccaaagtcggaaaaggtggcggagcaccagaaaccagatattcgtggagaccggaggaatatagccatactgctgttcctgtacgttctacagggcattcccatcgggctcatagcagccataccaatgttgctgcaaaatagaggagctagctacaaacaacaggcggagttttcattcgcctactggccattcagcttaaagctgctgtgggctccaattgtggattccctgtacatccggcgatttggacgccggaaatcgtggctagtcccagtgcaataccttctgggagcctttatgttactcctctccctccacgtggatcgctggctgggcgggaacggtgtcgatcccaatgtgccgctcctgacgctgctcttcttcctgcttaacttcctggctgccactcaggacatcgccgtggatggctgggccttgaccatgctgaagcgatgcaatgttggatacgcatccacctgcaatagcgtgggccaaacagctggctacttcttgggctatgtggtgttcattgccctggagtccaaggatttctgcaacacctacataagagacgtgccactcgaggatggcatgatcacattgccccgtttcctttggttctggggcattacatttgtggtagccactactttggtggcaattttcaagaaggagaacgacatcgaagacgcgcatatggacgctcgctacacggaggagcacgagttgaacatccatgagagctacaagatattgtgggacatggtgtgcatgcgtcccgtccaaattctggctgtaattctgctcaccgtgaaggtcacgttcgcagcctctgatgcagtgaccagcttaaaactcattgacgctggtgtaccgaaggataagctggctttactcgccattcccctaattcctctgcagctcattctgccgctggcggtcggtcgatatacgaacggaccacgtccgatggacgtctatctgaaggccattccctatcgcatcatcatggcaacagtggccactggcttggcctacatcacaccctatattgtccgtggaggagccgtgcctgcttattactacgtcctgctgatcaccagttatgccatctaccaagtattcctgtactccatgtttgtggccgccatggcctttttcgccaagatctccgatccagccgtcggtggcacttacatgacatttttgaacacattgtgcaatctgggcggtaattggcccaacacagtggtgttgtggttggtggacgtgctcacctggaagcagtgctccaataatgcggaaaatacctgccagggcaaggaggagcaacagagctgtgaagcgtcggctggcaagtgcgagataaccttcgatgggtactacttggagtcgggcatttgcgttctgtacggcatagtgtggctgctgctggtgcgcaaatggatcgtttacttgcaggacctgcccgtcagatcctggttggtggtcaagcagaaatcgcggtagcaatcaatagtgtgatccggggccagatcgtcataaagatccagcacccacttgtaggtacaaacaactaattctaggattagcagacgtttgcattctgtaggctagcgaaattacaaattcccgccttggtattgttttttgtataactaattttgattccgaaggaaataaaatcaaatgttgaattgagcg

SEQ ID NO: 20604 - protein, 525 aa, DROSOPHILA
MSAIRRKPTGSNADQELLIDEPPKSEKVAEHQKPDIRGDRRNIAILLFLYVLQGIPIGLIAAIPMLLQNRGASYKQQAEFSFAYWPFSLKLLWAPIVDSLYIRRFGRRKSWLVPVQYLLGAFMLLLSLHVDRWLGGNGVDPNVPLLTLLFFLLNFLAATQDIAVDGWALTMLKRCNVGYASTCNSVGQTAGYFLGYVVFIALESKDFCNTYIRDVPLEDGMITLPRFLWFWGITFVVATTLVAIFKKENDIEDAHMDARYTEEHELNIHESYKILWDMVCMRPVQILAVILLTVKVTFAASDAVTSLKLIDAGVPKDKLALLAIPLIPLQLILPLAVGRYTNGPRPMDVYLKAIPYRIIMATVATGLAYITPYIVRGGAVPAYYYVLLITSYAIYQVFLYSMFVAAMAFFAKISDPAVGGTYMTFLNTLCNLGGNWPNTVVLWLVDVLTWKQCSNNAENTCQGKEEQQSCEASAGKCEITFDGYYLESGICVLYGIVWLLLVRKWIVYLQDLPVRSWLVVKQKSR

SEQ ID NO: 20605 - DNA, 7896 bp, DROSOPHILA
ttctttcttgcctagatctatatcctgtttttagcagtgttaacaggccgaagaaagtagtaattaatacagagacactatcacacattcgccgattatattagctattaataaacgtttatcaataattactcttttcttcacgacactgcttcacttaattcgcacttttccgaaaactcagacaaaactgccacaaaatcctcgcaattattcgaacagctgatgaatcgatgatttcgtatatcgataatcgactgagattagtgatgacatcatttcgatagtaagtactcattttattcaatatgcgtctagattataataatttacatgcatactatgcatacattcagaagctgttttttcattgcgttttgaaagtccctgttcaagggctacttcaaaaatgtttctgaggcttttattttcgaaacgagtcatgcagaatagacacaacgacgacgtcatcgtgctgaaaacaaatagtagagctgatgtaaaactcaaatactactaaaatgttacaacagataaacaaaaacaatatcagatgttttgtttacttcctagaaatcagagatgtgtggagtctgctactttgccgatagtagccatccttctggcagcactagttgggtggaaaactccgcttactccaattctggatgggtgggtgcatttgctaagtacactgtgtcaaaaattgtcttactgttttgttttcggtataagcttgtaaaaaggtccaaaaattagtggtttgaattgtattatgtttcttgaatccaatttatggattttccttgccgaattatttagtcacagatatttagctgagtcgaatgcattacatttcggacttggtgttcttcatccttaaaatttagttttctccaatacccaaccaatcatggctgtgtcattttggcttgcgattctgcttttgatccttggctgttacagttttaaggctctaagtgagaaacaagtgcgggaaatgctgaatctagagcgcaatctcctgcagaatatgcgtgactatgccgaaaagctggaggagaagatcgaccttataaacaagtgcgtcagaaatcctttcccaatcgtaccaattgagatgaaaatatttttaatatagttatgtggaagattataacgtcgacatagaagatgccaacgaggatccggagaagtacctctccaatccgctgaactccttccgattgattagacatatgcaccaggattgggtcggctggcaggtgtacatggaggatctggtcgcacccgaggcggtgcagaaggtggagagcctactgccgcagcttcctcagaaggaagccttcaggaaagcggccaggagtgtgcatagcttgacccagttttacggctacgagcccgcggatctggttgccaaagatgaacgaagcaggtgggagtctatataagtgtttaccattttggaaacttaattccactagttccttgcatctttcacctttggactgctatcacttgggactggagctctacgaggagcaggactatctgggtgcagccaagtggctacaagtggctgcccataactacaccctctcgaggcacagagatttgttcaatccactgggcgcaccacgctggcaggtctatcgagatctgggcaggaccctacttaaactgagtgcggttcgcatactcccggacaaactaatgggtattaacaccaatttatctggtagatcgacagtgcgcatatgatgcctacgaatcagcacttcgattgaattcccaaaacgtgcatctcatgaaggaagctggacagatggagctattcagcctaagggatcccatggaacccatactggatcttcagccaaaaccgaccgttctggaaaaatattgtcgaggcgaagttccgcgacatcagggtcgtctgacgtgcgagcttaatgactgggtccattcgttccttgcctacgcacccattaagtttgaggacctgcaacaggacccttttattatcctctatccaggaagtatttacgaacaggaaattaggcatgtggagaacgcatacgagcggtgtccacccaacgatcgcttcgagcttaagctcggaattagtgggtgttccatctccgacggatatagtcctgtgttgaaacgcatcaacgagcggattttggacatggcaggagtagaaaagacttgggacaccttctacatagtcgagtacgctcagttggccccttttgagccgttcaaactgtttagaaactccacaaaggtgaagtaaggatatgggaaaatataaatcttcactgaatacgttcctctctgatttcagttcccaaagctgaaccttatgaatttcgaggatgtggaggccaaagtgataatattcgtgagtggtatacaaatgtaagttttccccaatcctgcatttttcccaatattccagctaaaagatgtgactttgggcggtgcctttaccatgccaaatggggatattcttgttcaacccaagaggggcaatgtattgataaccttcgaaaatgaggagcactccactacgatttgccccatcatcgagggcactggattaggtgtgtgcgatagcatcatatcccactataagttcaaactccctatctctcttttcagtcatgatcaaatttattatgaaaacagacgagtaagaccacctggtgtttctatatagagctaaaacgttaaataaattgaactaatttttaaaaaagaattgtcatggtttaatgaaattatccacggttaattgctagatcttttctaacagcatattagactcattttccaatcaaacagatcagtatttaactatgctgttcgaaaaggtgcacattcttataatatggcttatgttttgcaaagttgaaagcacattgaattgggagagccgtcaggaatttctagatacggaatcagcgaaaatggacttaatgcaattggacgtcgaattaattgataatctaatgaattacgccgaaaaaatagatgagaaggcttcccaactaaagaggttagcaagagataaagatgttaccactattctaataacactatattttctataacagactagcccaggaactaagacagcctttgcactctgcgaaaggtagagaagaggagtacttgggcaatcctctccacagttttccactcattcgacacatgtaccaggattggcggtacctggaagagtttatgaagaaaccagtgggagaaggtgggacatgaaacctctatatgagcatctatctttcattttattctcttaattgcagaggaaatccaatttctaagaagaaagttaccggaactgccctggcaggtggacaccgaggaagccagcgtctcaatcttcagaatagctgaaacctatggaatgatgccctgggatatggccaacggtctcatcgacaatgttcggttcaagtgagttactaaagatcttccttgtatcctaccgaacaatctgtgataccaatcattagctccacactgccagctctggattgttttgaagtcgcaaagatgtacttcaagtggggctacttcaagcaggcattacagtggataaccatcagcaaagctcggatgaaagaggagtactccggggtttatgaggtgctgggaatgaatcgccaggatgtggccctgctgcaggctcgctgtttagtggaattgggttggtgaagatttctgacgaaatgtattacacagatattacatattctatttcagaccggagagatgaagcccatgaggtacttctggatcaacctgatctcgcagacaattcgattagcttgctggaccaattcaaggccaatccttacgaggcaatagacagttcgcccaagttgggtgaaggctacaagagactgtgccgttcctcgttctctccgaacccttcaaaactccactgtcgctacaacagcaccacctccgccttcctgatcctggctcccctcaaaatggaggagatctctctggagccccatatagtggtgtaccatgacatcctgccggataaggatatccagcagctaataaccttggcggagccactactgaaacccacagaaatgtttgacgataataagaatgaggcaaggagcagttaccgcacaccgctcggtggaccacttttggatagcttgactcagaggatgcgggatatcactggcctacaaatccgccagggaaatcccattaatattatcaaatacggctttggagctccctacactaattactatgacttcttcaaaaagagaaactcggaatctaaaggatttggtgatcggatggccacctttatgttttatgtgcgtttttttatagaaaaagtccttggaaattcatatttttatgtttcagctaaatgatgctccttacggaggtgccactgtcttcccgcgtttaaatgttaaagtacctgccgaacggggaaaagttctgttctggtacaatcttaatggcgacacccacgacatggagcccaccactatgcacgccgcttgtcccgtctttcatggttccaaatggggtaagatggtgcattttgacaagttcgttgagtaataatgtactttggttctagtaatgacagcctggatacacgaatatgactagattttcattcaacccatataccgcgagggaaagacaatgaaacacaaataatattacagctaaaacttaagataaaacaacagacgttttatttcattgggaagtaactaactaagcataactaactaaccaataaacatatcgaattgaatgtgcagcgcataatacctttttaaaaccgactagacagtctttagatattattgaaatgattgctggaaactatgagctctgttgtattgtttgcagtctcatttattcttgttctaagctggatagctgagggctacagagatcgccaaaactatgtaatttcagtggaggagaagatggacctgctggagaaagatagagaactcattatcgtactcgatagttatgcaactgagctgaatgaaaaaatcatcatgttgaaaaggtgatttaagatataattagattacagcttattaatttttatattttagaatagttaaggagtttaaacagcctttagaaaaggctaaaaacagggaggaggagtacttgtccaatcccatagacagcttatccctcatgaggcagatgcacgaggattgggaaaaggtggagaagctcttaaagaagccagtggggcaaggtaagatctctgttcgttttgtatttaaattcaataactaaaaaaaatatcagagaaaattgcattagtcgagaaaatgcgagaggatctcccggtggaaaacgatctgatggaggccaatcaagccatgtttcgtatactacatacatatgatttggagccaaaggatgtgtctgcaggctggattgatggagttcaatatgggttagtccgtttagtaaatcccttcaagaccagtaacatagtatcttccatatttaatagtggtaagatgtctgccagtgattgctttaccatgggaacgttctccttcatggcgggtagctaccaaattgcctccaagtggctgagtgcagccaaggatttgttggtggatcaaccacgtaaataccatgaggtgatggggatcaccaaggcggatgttacattgctactcgctcgctctctaatagccagtggttggtacatgatgtatcctttaggaacatcaatctgaagatgaatcttttgcaggcaatgtatccatcgcaaccgacatgctgatgcgggatttcatgtttggtgaagctggtagtgcactcactgtacactttttgaggaacaaaccaaagccaagtattaacttggagtcctgggaatccgatgaatccttcaatcaactctgtcgatcctcgagcagaagacagatgggtgaatccaagccctcgaggcttcactgtcgctataataccattactacgcccttcttgaaactagccccatttcgaatggaagaactttctttggatccgtatgtgattttttatcacaatgttctaagtgatgctgagattgaaaagctgaagccgatgggcaagccattcctggagcgtgcgaaagtatttcgagtggaaaagggctctgatgaaatagatcccagtagatcagcagatggcgcttggcttcctcaccaaaacatcgatcctgatgatctggaggttttaaaccgcattggacgaagaatcgaagacatgacgggtctaaatactcgcagtggaagcaaaatgcagtttctcaagtatggcttcgggggtcattttgtgccacattacgactatttcaactcgaaaaccttctctttggagacggtaggcgatcgaatcgccacggtgctcttttatgtaagtgttaagggagatagttaatagtcagttaaaaagcccttttatctactatctaccagcttaataacgtggaccatggtggagccacagttttccccaaattaaatcttgctgtgccaacccaaaagggttcggcattgttctggcacaatatagatagaaagtcctacgactacgatacacgcactttccatggcgcatgtcctctgatatctggcacaaagttgggtaagtttacaagcaatatgattacaaactatctattccatataaatttaaattataattctgcagtaatgacacgctggatttacgagctggatcaaatgttccttattcccgcagtacttcctcctcgcagtcgaaactttagcaaatcacttcctaatccattctaacttatagttgtaccccaaaacatttcctagttataaacttatttacccttttagtatcttgctaactgatctgtatttatcagaatagttttccactcaattttccccccataccttgaacttcaatccgcactcgattcgctttcttggccggcattggtcatcagctcactgcaccattaagtgggcaattaaattcaattagccgcagctctccacctctcttccaatgaaacttccctgtggttctggctgccatttatcacgcctggctgaaggtcctcctcctttttgggcgtaagtcacccaaccattctcctcaagagttctgtgcaagtttgcacttcgatttcgattggcgctgctaataattttccagatttattgtttgctcgcatcctgtttgcttggccctcaaaaggaaagttttccaattccattgccttgccgacttggatttcaattaagattgatggcgtgcacttttctccttgcggattgcgcaatgcatttgtcttgatttcaccttctcgaattgagtcctttcatctgccagacaacacatgtatgcaggtttctccccccaaaaggtaacatcggcaatttatcaaaatttgcgcacaccctgcggatgagtgatgtgtttggaggggcaggaaagtgactacaattggcatgcgtagtctgctgctttcatttatttgttttttttttctcgccaagagcgatggcaaaggtactttattaagcttaggtaccagtcgggtgatgtgcctcatttaagaagtacctttgtaaaatagttaaaagtagaagtagtaattatacagtaaatggtttaatacttgtacttgtagttgtagtataccaacttgtacctacctatctagccatgttggtggtacggcaatctctcgccatctgtacttgacttaaattgcttttttcaatgccgatggctgctcctgtaaggacctcccatctgctccaccaggtcctgctcctgcacatcctgtcacatgcggagcca

SEQ ID NO: 20606 - DNA, 3888 bp, DROSOPHILA
atgctgaatctagagcgcaatctcctgcagaatatgcgtgactatgccgaaaagctggaggagaagatcgaccttataaacaattatgtggaagattataacgtcgacatagaagatgccaacgaggatccggagaagtacctctccaatccgctgaactccttccgattgattagacatatgcaccaggattgggtcggctggcaggtgtacatggaggatctggtcgcacccgaggcggtgcagaaggtggagagcctactgccgcagcttcctcagaaggaagccttcaggaaagcggccaggagtgtgcatagcttgacccagttttacggctacgagcccgcggatctggttgccaaagatgaacgaagcagttccttgcatctttcacctttggactgctatcacttgggactggagctctacgaggagcaggactatctgggtgcagccaagtggctacaagtggctgcccataactacaccctctcgaggcacagagatttgttcaatccactgggcgcaccacgctggcaggtctatcgagatctgggcaggaccctacttaaactgaatcgacagtgcgcatatgatgcctacgaatcagcacttcgattgaattcccaaaacgtgcatctcatgaaggaagctggacagatggagctattcagcctaagggatcccatggaacccatactggatcttcagccaaaaccgaccgttctggaaaaatattgtcgaggcgaagttccgcgacatcagggtcgtctgacgtgcgagcttaatgactgggtccattcgttccttgcctacgcacccattaagtttgaggacctgcaacaggacccttttattatcctctatccaggaagtatttacgaacaggaaattaggcatgtggagaacgcatacgagcggtgtccacccaacgatcgcttcgagcttaagctcggaattagtgggtgttccatctccgacggatatagtcctgtgttgaaacgcatcaacgagcggattttggacatggcaggagtagaaaagacttgggacaccttctacatagtcgagtacgctcagttggccccttttgagccgttcaaactgtttagaaactccacaaagttcccaaagctgaaccttatgaatttcgaggatgtggaggccaaagtgataatattcctaaaagatgtgactttgggcggtgcctttaccatgccaaatggggatattcttgttcaacccaagaggggcaatgtattgataaccttcgaaaatgaggagcactccactacgatttgccccatcatcgagggcactggattagttgaaagcacattgaattgggagagccgtcaggaatttctagatacggaatcagcgaaaatggacttaatgcaattggacgtcgaattaattgataatctaatgaattacgccgaaaaaatagatgagaaggcttcccaactaaagagactagcccaggaactaagacagcctttgcactctgcgaaaggtagagaagaggagtacttgggcaatcctctccacagttttccactcattcgacacatgtaccaggattggcggtacctggaagagtttatgaagaaaccagtgggagaagaggaaatccaatttctaagaagaaagttaccggaactgccctggcaggtggacaccgaggaagccagcgtctcaatcttcagaatagctgaaacctatggaatgatgccctgggatatggccaacggtctcatcgacaatgttcggttcaactccacactgccagctctggattgttttgaagtcgcaaagatgtacttcaagtggggctacttcaagcaggcattacagtggataaccatcagcaaagctcggatgaaagaggagtactccggggtttatgaggtgctgggaatgaatcgccaggatgtggccctgctgcaggctcgctgtttagtggaattggaccggagagatgaagcccatgaggtacttctggatcaacctgatctcgcagacaattcgattagcttgctggaccaattcaaggccaatccttacgaggcaatagacagttcgcccaagttgggtgaaggctacaagagactgtgccgttcctcgttctctccgaacccttcaaaactccactgtcgctacaacagcaccacctccgccttcctgatcctggctcccctcaaaatggaggagatctctctggagccccatatagtggtgtaccatgacatcctgccggataaggatatccagcagctaataaccttggcggagccactactgaaacccacagaaatgtttgacgataataagaatgaggcaaggagcagttaccgcacaccgctcggtggaccacttttggatagcttgactcagaggatgcgggatatcactggcctacaaatccgccagggaaatcccattaatattatcaaatacggctttggagctccctacactaattactatgacttcttcaaaaagagaaactcggaatctaaaggatttggtgatcggatggccacctttatgttttatctaaatgatgctccttacggaggtgccactgtcttcccgcgtttaaatgttaaagtacctgccgaacggggaaaagttctgttctggtacaatcttaatggcgacacccacgacatggagcccaccactatgcacgccgcttgtcccgtctttcatggttccaaatgggtctcatttattcttgttctaagctggatagctgagggctacagagatcgccaaaactatgtaatttcagtggaggagaagatggacctgctggagaaagatagagaactcattatcgtactcgatagttatgcaactgagctgaatgaaaaaatcatcatgttgaaaagaatagttaaggagtttaaacagcctttagaaaaggctaaaaacagggaggaggagtacttgtccaatcccatagacagcttatccctcatgaggcagatgcacgaggattgggaaaaggtggagaagctcttaaagaagccagtggggcaaggcaatgtatccatcgcaaccgacatgctgatgcgggatttcatgtttggtgaagctggtagtgcactcactgtacactttttgaggaacaaaccaaagccaagtattaacttggagtcctgggaatccgatgaatccttcaatcaactctgtcgatcctcgagcagaagacagatgggtgaatccaagccctcgaggcttcactgtcgctataataccattactacgcccttcttgaaactagccccatttcgaatggaagaactttctttggatccgtatgtgattttttatcacaatgttctaagtgatgctgagattgaaaagctgaagccgatgggcaagccattcctggagcgtgcgaaagtatttcgagtggaaaagggctctgatgaaatagatcccagtagatcagcagatggcgcttggcttcctcaccaaaacatcgatcctgatgatctggaggttttaaaccgcattggacgaagaatcgaagacatgacgggtctaaatactcgcagtggaagcaaaatgcagtttctcaagtatggcttcgggggtcattttgtgccacattacgactatttcaactcgaaaaccttctctttggagacggtaggcgatcgaatcgccacggtgctcttttatcttaataacgtggaccatggtggagccacagttttccccaaattaaatcttgctgtgccaacccaaaagggttcggcattgttctggcacaatatagatagaaagtcctacgactacgatacacgcactttccatggcgcatgtcctctgatatctggcacaaagttggttgtaccccaaaacatttcctag

SEQ ID NO: 20607 - protein, 1295 aa, DROSOPHILA
MLNLERNLLQNMRDYAEKLEEKIDLINNYVEDYNVDIEDANEDPEKYLSNPLNSFRLIRHMHQDWVGWQVYMEDLVAPEAVQKVESLLPQLPQKEAFRKAARSVHSLTQFYGYEPADLVAKDERSSSLHLSPLDCYHLGLELYEEQDYLGAAKWLQVAAHNYTLSRHRDLFNPLGAPRWQVYRDLGRTLLKLNRQCAYDAYESALRLNSQNVHLMKEAGQMELFSLRDPMEPILDLQPKPTVLEKYCRGEVPRHQGRLTCELNDWVHSFLAYAPIKFEDLQQDPFIILYPGSIYEQEIRHVENAYERCPPNDRFELKLGISGCSISDGYSPVLKRINERILDMAGVEKTWDTFYIVEYAQLAPFEPFKLFRNSTKFPKLNLMNFEDVEAKVIIFLKDVTLGGAFTMPNGDILVQPKRGNVLITFENEEHSTTICPIIEGTGLVESTLNWESRQEFLDTESAKMDLMQLDVELIDNLMNYAEKIDEKASQLKRLAQELRQPLHSAKGREEEYLGNPLHSFPLIRHMYQDWRYLEEFMKKPVGEEEIQFLRRKLPELPWQVDTEEASVSIFRIAETYGMMPWDMANGLIDNVRFNSTLPALDCFEVAKMYFKWGYFKQALQWITISKARMKEEYSGVYEVLGMNRQDVALLQARCLVELDRRDEAHEVLLDQPDLADNSISLLDQFKANPYEAIDSSPKLGEGYKRLCRSSFSPNPSKLHCRYNSTTSAFLILAPLKMEEISLEPHIVVYHDILPDKDIQQLITLAEPLLKPTEMFDDNKNEARSSYRTPLGGPLLDSLTQRMRDITGLQIRQGNPINIIKYGFGAPYTNYYDFFKKRNSESKGFGDRMATFMFYLNDAPYGGATVFPRLNVKVPAERGKVLFWYNLNGDTHDMEPTTMHAACPVFHGSKWVSFILVLSWIAEGYRDRQNYVISVEEKMDLLEKDRELIIVLDSYATELNEKIIMLKRIVKEFKQPLEKAKNREEEYLSNPIDSLSLMRQMHEDWEKVEKLLKKPVGQGNVSIATDMLMRDFMFGEAGSALTVHFLRNKPKPSINLESWESDESFNQLCRSSSRRQMGESKPSRLHCRYNTITTPFLKLAPFRMEELSLDPYVIFYHNVLSDAEIEKLKPMGKPFLERAKVFRVEKGSDEIDPSRSADGAWLPHQNIDPDDLEVLNRIGRRIEDMTGLNTRSGSKMQFLKYGFGGHFVPHYDYFNSKTFSLETVGDRIATVLFYLNNVDHGGATVFPKLNLAVPTQKGSALFWHNIDRKSYDYDTRTFHGACPLISGTKLVVPQNIS

SEQ ID NO: 20608 - DNA, 12871 bp, DROSOPHILA
cattaatgggggtccgctggcattgttcgactgcttctttttctacggcttgttaaacacggcagtttgagaaacgatttaactaattaatgatctgcgagaattaacaactaagcggggcgtatcaaatgtctctacttcttcgttggtttctaaaatctagggatggtcaattgtataacttaagctactcaagttaattattattatattatatttacaatttatttacatttacttaacattaaacttttcatgttagtccttttaccacgatcactttgcgtgtcacgctttcatctcgaacataaaaatcacggcacgtggcagctagaatacgtaaaacgaaaacattaaaagcaaaacaaccaattagttgccaaattagttgaattcattaaaaaattagttagcacttcgagagtatagtatgatgctcaatcttagcaaatcgacaaatacactatttataaagaatttatgatcggcttaggaaacgagttcacaatttatcagatcattgacccagagaactactgggaatgctgatctgaatttgggtgtggaccctaaatcacgacgagagtcgaaaaccgttaaagataagtaaagaaatgcctgcaatccagttccacaaacatgttcaggtccaataaataaattaaatttaaattcctctctttaagtgcagacataaaatccgaggagttacctcaattatttgcagaagatcaagctggtttcatcctacagcttgaatgatcgattttttcggtttgttgtttggctttcactaactaattggtattagcatatttaaatattttaagatgctgggttttttcgttttaatgttgtacgatctacaaatcgttttcattttgcttgcattagtttattgtgtggttggaaaatgaaaaagatttacatttaaaatgtgtaaaagtgacaagagtgcgaaatcgaaagtttacaagttaagttgagaatgttagattaattgaatttacacttggagaagtccatctcaggatgctgttgcttaaatctgcaagagtaaagataacctactattagtacagccttaggattggtgtacacttgtacttacttctcaagtatgtcctgttttttgcgatcctcgctggtgggaagacccaactccttctgtcgctgatcatacatcatcttctccaccatactgcgagtctccccatccagatcagaaagcttggaagactctggattgatcttgcgcgtcgagatctctggatcggttgtgaccaggcggctccaccagttcatcttattgatcttatcaagagtgatcatcacggttttgctgtcttgcaagacccacacggactcctccgtcttcacctcgccgcacagttcgccatcgatgatgggcgtttgacctttgatgcccaccttcagcgacttcttaccaatactgatcactagatcacgggcgcgtagaccgaatgttaagttgaacggaatcttgagctgtaacaataaaagtattgcagtttattagatttgtacaaacatgcagtaaacataaattatactaggtagtttcatcacaatgagaagcatctaaaacaatgtaagtccatttaaaatgttgcttgtgctttgccttttgtaatgcaaaagcaatgccgttaatgacaatcaaactagagtagagtggattggattattcaggggttcttcatgtaatcaaaatcaagcttggagtggcagctcttgtgattaatgatcggatttgtgtgtacatctacggagattctttagccagcctttgctttggtcattgcacaaccttggcggctaataacgatctctataaataaccaactgcaggggcacgtctgtgtgcatccaacaatccaacgatcatatcacagctgcccgatctgcccttcaccagatcaacggatcgaggcttcctttgttcaaggactcaattgtagaacgggaatttagttcagctgccagttcaaggacgtacagcggttcttcaggtccggttaagggagttagcatcgattccgattcctcacagccccccgcaacgaggagctctcaagaatgtcgctcaacaggttgcagtagatacacgcgaaataatctgacacgtttttacaatcgataccatcagagattgaattgcagtttacagatatctcattaaaataataatatgcgatttaaaagtaatatcaatcaaaaggaattttgtagtattatcacttgtaaataatggcttccataatgatccctcatttctttctgtgtaaagaagtaaagcaacctgcggatggatttatgcggctgcttggccaagttcacagcaattacactggcgtctagaattatgtgccacggctggccattaattataagtcgcacggatacatgcatacattaacacctttcccattagctcgcagcataattaaagccccaagttattagacaactgactgtgcaatcaattagcgaatcgcatgtggcagaaacaatgaggggtaaggtaagcctttaatttaaatctcacgacgccgtgccgcatccaactgaaccaaggacgctttcgttcggctcatgatagtatattataaactatccagtggggggttttcgtgtgggcagtcagccaaggtagtagcacctcgagttcttcttcgcgcagcacgcggctcatgtcatcggaagctcactgaacgcagcccatgtgggtggcaacttcatcaccagcgcgatcgccgttgataaaatgtgtcaaaagctgaaactgaagcggatgccaattggaaacattttgaattgtacacggatgtaaggcagctataaaaatagcctcgcggagtcagaataagaaaaaatacctggagacgtgggcaacgcgccaagctaaacgctcgacaacagacaaactcaattggtcatgttggccaatcattgcagtcatttagttgagaaatatgaaaagaattcagacttcagataggaaaataatatgtggacaatatcttgcgctaagtgcttggcaacagaaaatgtcaattaaaaaaaattataaaatttataggaagaaatattaattaaaaccttaaaaaccacggactgtggtacaaaactaaacagagggctactggaaatgaacgtacatgtttatcttaaccctaaaatgaaaggctatcaagggacacgcaatggcccaacgtgaatgtctgactttgtttttcaaactggaatttatgtaaaacttattaggtaaatgtaaatgtaagctttctcaagggacccgacgacttgaaaaacaaacccattctgcaccactgaaggttatgcaaatagcaacttaaagaacactatgctcgaaactaggaaatttacacaaatcataagtcaagtcagcagatccgcgctgacacctacggccattaaatcagctgaacaggtgggatacccatgcaaatgccggggctcagggaaaaacaatagaccctgggtaaaatgtgaggtatgaaaatgaagctgtgccaccaaaaaggtaaacacaaagctgaagagtcaccgccagtcaaagtcagagttcgcttttgagttcagagacgagcataaaaaaaaaaggtgtcgtcgtgaatgaattaatgaataataacaaaaattgatgactgcgacgacggcagaaatgagatgggaaaaaaataagcaagaaaatagcacgagacttggcacacttatccaagtgagagcggattcgcagactgatcgtctgacagtgggcgattttatgcaaatcgatcgggccccagctaattttaatgctcatactggccaggctgcatgttaaacctccaaccaaccaaccagttgatcgatcaatcaaatccccatcgatttgaacccaattctctctgtctctctgtaaagtgaaagacatctttgtcgactgccgtttggaactgttattcgtatttgttgctagatcacatttggtgctgttgcctctgattaattctataaaacttgaacagcatttcattttctttaaatatctagccgcaaataatttatgctaaaagatgcgatccggtgccaggcaccaccaaaaaaatgaaataggaaaaaagaatggtcgcaacaacaatatgagtagcgaccgaacaacaaaccgtccatttaaacaaaataaaaattggaagcaaaaaaaactggctttgctgatggagtcgagtgtttagaagtgtgtatctgcggagtagtattttgtattcgataatgttatcacagcaaaacagctgagtcgtccaagctcggtacagtgattggtggatcccttgaaatcagaaaaaataatattcagacattaattttttcgaactttatgcataaaatgcaacagaaaagttccacatacttggttttggttaaataaacactagtcaatatggtattctaaagtagtaattaaatagaaacacaattctgtaattaaccatttctaaaaaaaaaacctctatcgaagtgtttatctttacgagtgcctactgccagctcattaaagtcggcttaaacttgacttatttgtggccagaagtggagtggacccctaaacatctcaacacaaagtcagatgggatcgaattcgagcgtggcaaattattttttattcctttccatttagaattgttttgcgtttaattctgaaactagttcctactattgggaacgtcgctccactccattccactcgaatccaatccactgtactactccgatccaatcctccccagccaccaaatagctcggcgtacaatgagctctcgagtggcaacaatagaatccgtattgacatttgcatggtaaatgagatttgagagctcgatctggtagccatttgtttgcgctataagcggattacaaagcaaatgatactgcaaactccatccggttaacctagtcaattttgggggtatcccaaataattaactctttaaggtttcaaatttgctgagaaacgagatcttgtcaaaatggtttccaatttgtgaaaaactagatctttttgatatagtcaaagctataactgtcatcctgaatggtttcgcataaattaaaatcacagaaaaactcgaagaagctccgagaacagtagtataatgggaatgtaagcatagtttttaaaagtcgctagtttgacaattttagtttgctggttgcatagttggctcctttgctccattgctcattattaaagtttagaaatatatcgaacaaatgtaaaagttattagcatatctgccgaattgtaaaatatttcagtttatttatgttgatatcatctaaataaatttactaagtccacgataaattagcaaaacgtctgggaatcctgtcaatcgaagctgtagattgaatgattacttaaactttcaaataactcaagagaaaagttatttctaaaactatttgacctgatcttaaaactaaattcccaaccaggaaactgagatcttaaaggcggttagttaatttactgaaaggctttgtcaggttgaattctttgttcgcgttttgtttgggcttccaatccacaatttgcgaaaaagttgactatagcgtgatttataggagaaacccattaagaggtttataaacttagcatgtgttaaacggacaaataaaatatccgtttcatttttatataaccgcaattagacgtaaagttggcaataaaaattgaagtgtatttagaactcttttgtgatgaggtatcagtaaaatatttattaaatatttccgcttccttttcgagtgagtcagtcatcgagtcgtcaagaatttcgcatggaattcagcattaacttaagattctatttattaaatatagccccccccccccccccgaaggcggaatagccaaacgttttctatacgaaaattaagctttaatagccgcaatcagagaaatactggcctcagggccccacacaaataagcgtggcaaacgtcaacggatctatccagatagctttaagggatttccccgtttaagacgacaaaattatgaattctcacagaatttaatcccaattgttgtcacccaaaatggaacagaaagcgctgggcacgtaagttccgtccgtttgtcatcggcgtcactggaaactattttgcatttttaattgtatgcatgaaaaaaaaaaaaaaaacgatcgtttgtttgtttgtcttcggtttctatatggcgtttcgcgatgaggtgaatggtgttggattggtctcccattctattgggggaatgtctcggatcggatccgatcggatcggattcggcctgcgttctatagcaagtgtttggctcccattcgccgtcatcccatctctttgagtggtcgacgtccctcaatctttgccttttcaagtgatctcaaaacaccgcctgattttctgcctcgatttataattttcgttgctaatgcgattcgcgttcgtcggcgagtccattgccactgctctggtaactggccgtgtcaggtaatctttgtcaactctccgctgattaaatcgaccggactcgagtccagtccagcacttcacccataccatcgagtatgggccatacgaaaaaagttggaactggcggcaggccactcacttgtctcacttaaaaggtgataacaagatgctcgacagcaacatcaaacgacgaagcaacaaaagttattgccaaaaaaaaaaaaattagaaacatttgttgcctcttttgctaccgagaataacagatgaatgctgcgatttaagccaaagcaaacaaatttgtaatagaaatgttgggtttctctgggaatttattgtttatttaaccaattcccacagatcgttagaagtataatgttataataatatgagatcagtgttagattaggtaaacaactataccaatccgatccccaattcttggggatttttggcaatttgtttaactaattccgccaagagaaacgcaaacaatgtggctatattcattcaaattcattaatggaaaaccaaaaaacgtatttcttgatgactcacgttattatttttattgcgtcaatagtctgcagacatcgaaatattctcaaaaacatagctgaaaagtatgtttaccaaaatgaaaattttgaacctttgtaaaaaagaaaacctgattgggaattgacagaaaacttgtgcatccccacctaaatatcatgtttcgaatttctcattaattaattcattttttcaatttttgatcgcgttgatataaagcttttgttggcaccactgacattaaatgctttcttagaattcgaaattaaccaaaaatagacttgcttcgtcttctttaggacatttaaataatggccatattatttataagaccataaaccgttgatttaataatggaacatgtattaatcaaacattaatgggccctgggaacgatgctacagcaaatgggcggagctgccgcctgtaagctggtcaaggtttgcccccaattaagttaacattaaactagaattagggttttcccgcaatcaaacttcaatttctgggccaacgaaacggatctggaaaacgcccacacgcccaaatcgatcaagggcccttcactgaagatctcgagagtctaaaaaaaaaacaaaaagacagcacaaaaaccgaatattgcagcttaatgagcaaaagggcgggcggctataaaaagaacagccgaaagaaagttggcaaatcacttgatgaggtgatcaagccaaggcgagcagtctaaacatcaaagccggcaacataaccatcaaacatcattgaaacaaaagaatggactgaagaagtaagtggccgatcgttaagagctatataaatgtccgtacagtgggagctatttttagatgaaacgatttattgatatctccaatatagaaaatacttaactttgtaatattttttcgttacttagatctgcatttgtataagttatagctctaaattcgtactacaaattattataaactcttttaatgtgaaagctttgaaatgatgtaagtttctaaaaatgtcctgcaattgccttcattcgcgagtgcctactgtggctgtggcaacaaacgagaaccgccgaaatattatgacatgccaaatccgtcaagaaagccagcaacaacaaacatttacactcgaaaaggtttgcgcatcgcgcattcgacgccgacagaggcagcgacagcaacgccacgccgctgctcagttgggcagaactcaggtgagcagagatcttacctgtgagcccgacttagccgctaagctcgattcagttcgattcttgaggccgtttagatcggttctgtttggcgacaggcgcactgaaaaattcttcgctttgagaagaaaacgtgagaagaagaaggagaataccgccactgaagtacgagaagaattgcgaagagaatcgaatcggttaatccaaacagcagcttaatcagctgagtgtttcgcgagccgtaatttaaataaattatatacatcatcataaaaccctaattaaagagactgacaaccggagcgagactctgcttaaaaatactccagattgtgatactaattagcttaaattgtgtgtgtgataaatttgtgtaataatcaaacaaatcccgggaacaaaacaaacagaaaattgcgaattaacaaatgtaagtaaagtaacaacgcaagacgacacattaagtaaaccgaaaataacgctgtgtgaaaaaaacgaatcgaaaactggccaatcaagttgaatcaatacagagtgataagacttccgcatgcctaaataatatttacaataaataaaaagcaagaagcagcacgaacaaatttattaacttctgtgctgtgtaagacaaacgcacaaaacacacaaatgtatcgaacagagcaaaggcaaacaaaagactgaaggcacaaacttgaaatgcaactttttttttcactttagccactgttaatagaattctcatatatatttctttagaggggacaattgattgccacaattacgtcaaaagcaaacaatcggcaaagtctttcaaagagaaaggccccagatttaaaagcttgcccacaaaaaataaactgtcgactagccgaattaataatattaaatacaaatcaggcttttagccaaccaagaccggagaccataaatatcaaacaagttggcaactcaaccaaccaatgcaaaacaaagacaagccgaaagacaactcgaaagttcaggttttagatattggattttgatttcttctgatgctagcaccaccaaatggcaggaacaggggaacagagaacgggggctgaggctggggaagaccaaaatgtgtagcgcagaaattgtggagcacattgattgtgtcacgatctgcagaaaattccttaactcaacaatcacaataatattatccaactgtttacgtaaaataatgtctaaccaacatcttttcgatccccaacagatgcaggactattggcacattccccgcgcctcgctggcatcctcctcgagctcggccattagttcggccagctcgtccaagtcctcgaacaaatcgcactccaatccacctaccctaaaccaacgcagttcgcccagtaacactagcagcattcacaataacaataatacaagtgctgcagtaactgcggcagcagcggccgctgttctggcggctgccaagaggggatcgaggagctcccagggctccagcgacagtaacaacagcacgcgggtgagtaagccgagtccacgcaggctccggttgcggagaaccaaaccgtatcgaactgccgtgactcaacaaacattctcctctttttccattcgaattatacagagcgctgcttccggctcactgctgttgacggcagcgaatctggaacgctttgcggagatccacaagaagcaggagcgacacaacaagatgctgatgcccagtaatccctcctcgtcaaactataatgccaacctggccatcggcagcggcaaggatgcggttatcgccatcgagggtcagcagccagccgacgtcgatcccaacttgcagtatgtgaaaaccaaagacctggataccgtatccatcgctagctctatgcacttcacgatggtcaatggagagggtggtccaccgaagaaaccgaagcgcggtctatgcgatcgggggcgccaggtcaccgtgttgatagtcagcatgagtaccatcttcatgctgctcatcatgggcatggtctatgcgctggagagtaagttattccatctatcacctgtgtcagctaaattctaataactattcttctttcagtgcgcgcccgtgacatgcccaagagctaggatttaatacccctgcctagccaattagcttattatttattgtattgtctttgtcccccattattattaattttattattgttatcgtgtcgtcttggcgctagttgtataagatatttatttaaagattgtttggatggagtgtcaagtcagtcgaagctgggaaaattcattagtattaagcgcgctatgctatggagacagagaaacatacaagaaactaaatctggagcggatcggacaatagccgtctggtatcggataatgctgtactttctggttagcaaataagttatttatccctgtgatatgtttaataaagcgaattgtataattgtacacgaagggttgatgaatcacacctgtcgtgggttcaatgacttgggctttcagctatgaccgctgcctagcaaccagcgactaaggtattcgggcaagaaaacaccgattaagtgtttaagtaaattaataaataataactatgtctggcggtactcaaaaaccactagcacaattaaggacatcaattacgcattgaaagattgagcttctaaaattgctagctactgtataactatgacaacacctcactgggccaaataagagaaatacggcgttagcgacgtgcccggacttacctccacctcctccagagtttgggtccaggtgtagttttccaaggtgcagccattgcctgcattcggcatcagcttacccagctcactcttatcggattcatcgtccactttctcgatgggcttggagatgccatctcggttcgaggcagatggctctccaccagcgctatccagcagctgctggcgttttctgtatgggatttagacattataagatatacgaatgctaatgatacaacatatttaggataagaattgagctcggtttcaaactctttctttgaaaaggaatgctaatttgccattttgcaggaatttcacagcttttgccgagttacctgggtattttggtaaatgatctcattacgcttgcacttacttggtctcctcctccttgataatggccgctgcctcttcgtcagtgatatcacatattttattatcgtcaatctcctgcttgcgggccttcctttcggctctctccttctccgcctttaggcgctgggaagcttcgcgagcctttatcttttcgtagttttcagttacggccagcttggactccttgttgaagacatccagcagcagcttctcccactccgtctgcttggctcccgtgaagaagtcggtcttgcggcgcagaaaactggccaaagtgccaaggaacttagatataaaacacaaacaacatgattaaacaaaattgaaacaaagaagttgcgttctttgttattgttttacctcgggcacgccaccgtgatgcttctcggccacggccagcagtatgttgtcaaactttccctcctcagcagccatggtttggagtatttgtactggttttgaattagatttcgtttgtttctggacgcttcgattcgtttggtttttttatctgaagtttagctgccgacccggcacatgtagaaataatgtgacctgtcgtcgaacgtcaaaaaatacccacatactagaatataccgagtcgtcacatggcgtccagcatttgaaagtcagcagaattggtcataacggtactcgagttttgtgtattgcagcttttgactgcttggattttaaaaataatattttagtaccacatataatttagttgtatgcaataacaataatggtttttcctgcattggaaacttttagttatatcccttcactcttctggaaaatttttttaatatttacttaatttgccatacctttttgaacaagtaacaatttttttatattgtgtttgtatgaatttgttcgtgctgtgattgggaacaaaaaagtggtatgaacttggatactggaaagcgcatatccaatttaaatgagtctcagtgagattttgacagtgagcgcatcatgtaacggtactttgcgacaaactatgtgtaaataattgaagcaaccatttactgaaaatataagaatttatttctttatctagtaaaacttggtctttaataatttaaatttaattttaaggttaagagattacatggaagatagagttcgaaaaacaacatatgttgttgttgtttttgctctcacgcaacttttcgctctccgcttacttttgcgctctcttcggtttcggtttggggatagttgcgattttcgtcctattcttccattctcattcggtcttttgaaataaacgcacgtattctgaacacgcggaaaaccagaaaatattctaaagccaaatcgaagtggaagtgctataagcaagtggaaaagtgaaaaacttcaaagttcttggttttgtgtggacgcgcaaaatacgaaaatcagtgcatagtaaatcgttttatca

SEQ ID NO: 20609 - DNA, 1047 bp, DROSOPHILA
atggctgctgaggagggaaagtttgacaacatactgctggccgtggccgagaagcatcacggtggcgtgcccgagttccttggcactttggccagttttctgcgccgcaagaccgacttcttcacgggagccaagcagacggagtgggagaagctgctgctggatgtcttcaacaaggagtccaagctggccgtaactgaaaactacgaaaagataaaggctcgcgaagcttcccagcgcctaaaggcggagaaggagagagccgaaaggaaggcccgcaagcaggagattgacgataataaaatatgtgatatcactgacgaagaggcagcggccattatcaaggaggaggagaccaaaaaacgccagcagctgctggatagcgctggtggagagccatctgcctcgaaccgagatggcatctccaagcccatcgagaaagtggacgatgaatccgataagagtgagctgggtaagctgatgccgaatgcaggcaatggctgcaccttggaaaactacacctggacccaaactctggaggaggtggaggtaagtccgggcacgtcgctaacgccgtatttctcttatttggcccagctcaagattccgttcaacttaacattcggtctacgcgcccgtgatctagtgatcagtattggtaagaagtcgctgaaggtgggcatcaaaggtcaaacgcccatcatcgatggcgaactgtgcggcgaggtgaagacggaggagtccgtgtgggtcttgcaagacagcaaaaccgtgatgatcactcttgataagatcaataagatgaactggtggagccgcctggtcacaaccgatccagagatctcgacgcgcaagatcaatccagagtcttccaagctttctgatctggatggggagactcgcagtatggtggagaagatgatgtatgatcagcgacagaaggagttgggtcttcccaccagcgaggatcgcaaaaaacaggacatacttgagaagtaaatttaagcaacagcatcctgagatggacttctccaagtgtaaattcaa

SEQ ID NO: 20610 - protein, 332 aa, DROSOPHILA
MAAEEGKFDNILLAVAEKHHGGVPEFLGTLASFLRRKTDFFTGAKQTEWEKLLLDVFNKESKLAVTENYEKIKAREASQRLKAEKERAERKARKQEIDDNKICDITDEEAAAIIKEEETKKRQQLLDSAGGEPSASNRDGISKPIEKVDDESDKSELGKLMPNAGNGCTLENYTWTQTLEEVEVSPGTSLTPYFSYLAQLKIPFNLTFGLRARDLVISIGKKSLKVGIKGQTPIIDGELCGEVKTEESVWVLQDSKTVMITLDKINKMNWWSRLVTTDPEISTRKINPESSKLSDLDGETRSMVEKMMYDQRQKELGLPTSEDRKKQDILEK

SEQ ID NO: 20611 - DNA, 3863 bp, DROSOPHILA
gagagcatgtcaatcgaggcagtgatgacactctggctatcggaaaatgttgctatcgaatagtaaactaaaaaatctgacaacagtacttctactagctggcaaaaaataaataatttacatcaacgaacggttcgaatttggtttaagttttaaaattaacacttaattattcactatggcattataaataaaaatgaataattttccactccgagttttttatctctcaaaatgttaaattaaaatttaaaatttacaaaaaaccaaaaaaaaaaccaaaaaaaccaaaaaaaaccaaaaaaaaatttacaaaaaaaaaaaatttatgatacttctcgtttcgatacgtgtaaactggcagtcaattgtgggtgcctccgataacgataacaagaggagcaaccctagctgccgggccacgtacaattcgcgtcgaaaaataacaagaagtaattaaagctaaaattcaatgtaagagtgccgcaagtgtgttaaactaatagcttaaccggatcatcttatttctagtatggacgtaatgcagcgctacgtatcgcccgtgaacccggccgtttttccccacctcgccaccgtgcttttggtcatcggaaccttcttcaccgcctggttcttcatctttgtggtgtctcgaaagagctctaaggaaagcaccttgataaaggaactgctgattagcctgtgcgcctccattttcctgggattcggcattgttttcctgcttctaaccgtcggtatttacgtatgagataagacaccattccgcatagaaataaactgaagatctgatcgtgggcgttaacatacatgaggcctttgttttatttaggattattgttattataatttcaatttttaagattcaatttgcgcttaaaacttatcgaatatttttgatggtaacatataaatcgtctgcacgtgctcgcactaccccgtcgaataagaaatcacggcaactgttgaaatcatggctcttctagcccgctagaccggccttttgtctgcacttctgcatggtggcccgtaggatgaattgtttgcgggatagctgtcgcacgtgcttaagaaaggtctccagatcgatgacacctccgcggagaccctcgcccaagtaatatatggcatcctcggtggccgcttcgtcggcataggcattgagtaacctgcgggtggataaaccattaattatctagcatgaatcttggaatgcgcacgcagacattcaacttactgtcggtaaagtggcgctgtggtggtcaccgcctcgtcggggttaatggcctcggcgctctcaagatcttcaagagctttttccagctcctgctccttgtcctttaatatacttatgttcttttgcatatcaatatgttcgcgctcgaggcgctctataatggcatcgatcttggcactgccctcgagcaactcctgcttggtgcgattgagagtttcgatctcggcctgatactgattaactttctcctgaactcggcggcgcagcttgtcgtcgatagcgctaatgattgatgctttgatgtgctcctcggtaatagttcccgtggaactgggatttgagggattctgaaaagaataagctttaaacattaagaagtcgatttttggataataatctaaaacttacatatcccgcagctggtgggtacccaccggcggttggttgtatgaaattcgggtaggccggatatccggatccgccagctggaccagcgggtgtcggggggtacggtccgacattagatcccgtgggatacggtggaaagttgctaccaccagctccgccagctgtgggataaggcagaaacgagttgctgccaccaggtgcaccaggctgaggcatataagctggagaaatgtatcatgtaacttgtatattaagcaatgtgaagttcgtagaaagtttcaaacaaatcgtaaagtaatcaagaaattctgggatgctagtgaaattgagaactttgaaacttcacacttacagttcgtgggatatggggctgcgatttgttccttaggctttgagtacaccggcggatgatctccgaaggtaacgatcatcacctggatgagggagagaaggtcggaggagtgcggctgccagtcgtgcaagtaaggcagatataccttgccattatgatccacatacatcgatacctttatctgcatggtgggagtgggtttgacaaaacacatgggtgcattctggggatgagtgtccatcaaccaaatacaaataggaatgtagtaagtgttatctggtagaaagggaaatatacatgtcattatctcgtgctatcaatgggcttttataataaaatgaattacttttgtagacgacgggaatagtgccctgtatggtgaacaattccttggaactgccatcgttgaacactaaaagcagagaataatgtataaataatagatacacttacataaataagcgctttgccaggtgggatgcttttatcagctgatgcttaccgaacctctgcaggtcgtaggtcaagctgcggaacgatgtgactacgtccacaacgtccttcttggtggcagccacgtacttatactgaaatgaaatccatcatatcgttaatttcgtagcgtgcaaaagaaaggaaaaattcagaagagcaaaatttcgaagaatgggcgtattgtgatgactcatagacgggtcttaccttcgataggtactttgttatttgtgtctcctcaaccgcaggcattgtgcttggcaaaccagatcggcttcaattgaaatcctcttgaaattttgatagaattttaacttttgtcgttgtgttcgaagggatttagttgaatgaaaacaacaaatttgtcgtacagtgtggccaacgcttttctccctggtatttcaaacaacgcctttgataaatgtggatatctacttgacagaaaacgggtcacattggtaggcactatgttgtggagaattagcttttacaagttttttttaagttgcacttattacatgtaacaacaccctttaaaagtttttttattcacgttgtttctctttcaagctctcgattcaaactactccatctcgatcacactttggtttgttcttaagactatacaattaattctatcgatattaatgttacctagtatttcttttttataccccgtttacacttaatattttatatttttacacagtttacatacaagataattcgaaatacaagtttcgattagagcttaaacctaccactgatatactaaaacacaagattttggtattgttttttttaaagaccagcgttgccaagctacgttttttaacggtaagaaagaatttaaatgtagttaagacattgaagaaaaatacgtatttaagacgtattattttataagattttcgtagttaaccaattctgatgaccgaattcttgttcaaataaataacttgtctaactatatggatttaaacttaaacaactacatagaacaataatatgtcattttaccattaccttatattttcagaccaccaagctacaaaaaaccaacagaagtatagttacaaatttacccttgattttccgaagatttctcttaaaaagaaaaactaaataatttcaacaacttgaaatttaaatatccacatttaaagtttcactacaattgcccctgctgatttgaattaaccaaatcttgaatagatagaacccctcgggctatctctgcgacaattacgaaccgccttatctctgcaaaaaagatccaggtgccgacccattgctccactcgttaagcctaattgtggccagaaactgagtcgcgagtcgttaaactttttc

SEQ ID NO: 20612 - DNA, 1328 bp, DROSOPHILA
tttcattcaactaaatcccttcgaacacaacgacaaaagttaaaattctatcaaaatttcaagaggatttcaattgaagccgatctggtttgccaagcacaatgcctgcggttgaggagacacaaataacaaagtacctatcgaagtataagtacgtggctgccaccaagaaggacgttgtggacgtagtcacatcgttccgcagcttgacctacgacctgcagaggttcgtgttcaacgatggcagttccaaggaattgttcaccatacagggcactattcccgtcgtctacaaaaataacacttactacattcctatttgtatttggttgatggacactcatccccagaatgcacccatgtgttttgtcaaacccactcccaccatgcagataaaggtatcgatgtatgtggatcataatggcaaggtatatctgccttacttgcacgactggcagccgcactcctccgaccttctctccctcatccaggtgatgatcgttaccttcggagatcatccgccggtgtactcaaagcctaaggaacaaatcgcagccccatatcccacgaactcttatatgcctcagcctggtgcacctggtggcagcaactcgtttctgccttatcccacagctggcggagctggtggtagcaactttccaccgtatcccacgggatctaatgtcggaccgtaccccccgacacccgctggtccagctggcggatccggatatccggcctacccgaatttcatacaaccaaccgccggtgggtacccaccagctgcgggatataatccctcaaatcccagttccacgggaactattaccgaggagcacatcaaagcatcaatcattagcgctatcgacgacaagctgcgccgccgagttcaggagaaagttaatcagtatcaggccgagatcgaaactctcaatcgcaccaagcaggagttgctcgagggcagtgccaagatcgatgccattatagagcgcctcgagcgcgaacatattgatatgcaaaagaacataagtatattaaaggacaaggagcaggagctggaaaaagctcttgaagatcttgagagcgccgaggccattaaccccgacgaggcggtgaccaccacagcgccactttaccgacagttactcaatgcctatgccgacgaagcggccaccgaggatgccatatattacttgggcgagggtctccgcggaggtgtcatcgatctggagacctttcttaagcacgtgcgacagctatcccgcaaacaattcatcctacgggccaccatgcagaagtgcagacaaaaggccggtctagcgggctag

SEQ ID NO: 20613 - protein, 331 aa, DROSOPHILA
MDTHPQNAPMCFVKPTPTMQIKVSMYVDHNGKVYLPYLHDWQPHSSDLLSLIQVMIVTFGDHPPVYSKPKEQIAAPYPTNSYMPQPGAPGGSNSFLPYPTAGGAGGSNFPPYPTGSNVGPYPPTPAGPAGGSGYPAYPNFIQPTAGGYPPAAGYNPSNPSSTGTITEEHIKASIISAIDDKLRRRVQEKVNQYQAEIETLNRTKQELLEGSAKIDAIIERLEREHIDMQKNISILKDKEQELEKALEDLESAEAINPDEAVTTTAPLYRQLLNAYADEAATEDAIYYLGEGLRGGVIDLETFLKHVRQLSRKQFILRATMQKCRQKAGLAG

SEQ ID NO: 20614 - DNA, 8785 bp, DROSOPHILA
ttcgactatctttcggacaactttgacacccggttgtttgtgggcaccatcttctttttcagcttcgtgtgtcccacgctgatgatcctttactactactcgcagatcgtgggccatgtcttcagccacgaaaaggccctacgggagcaggccaagaaaatgaacgtggagtcgctgcgctccaatgtggacaagagcaaggagacggcggagatacggattgcgaaggcggctatcaccatctgcttcctgttcttcgtgtcgtggacgccctacggcgtaatgtcgctgatcggggcattcggggataagagtctgcttacaccaggagccacgatgatcccggcctgcacctgcaaactggtggcgtgcatagacccattcgtctatgccataagtcaccccagataccgcttggagctgcagaagcgctgtccctggctgggagtcaacgaaaagtctggggagatctcttcggcgcagtccacgaccacccaggagcagcaacagactaccgctgcatagaaccaaggacaactctactctaagacaactgaccatgtaacatgaaagccaaggaaaaagtataaaatgccgacaacgaaactgtataacattaattttataatttgtagtgtgacattcttgagtttgaaataaataaatagtaacttattgcaaacgaagtagaaaatgagtcccgttttttatttgaaattcggttctttgatgtcattattttgttactatttctacacttacacttaaaaattaaataacaaattcaactcaaatcctaaacacatttacacagttatttggagcctcttcattcctaataaaatcataaaatcgagtttttttttcaaaatagtcagttatgtatttattcggtttttgggtaatatctttaagatacccattgtgaaatctgttggcatttgttaaacaaaatgaaggtgacccaccaggaaataaattccatgaccctggctaatcctcagttgcacatcagggaatgcagtcgaatgaccgctcggtaatcgttgtgcgacagcagaccacgctgcgatcgctgtagcactcgtttcagccgctctacggtctctgtgttggaggtcatcttgaaaagatcatcgaggtactttagcgattcgcgtgaccagaacatggacggtttgttggcgtccttgttgatgctgccaggttgattgtgatccatttcactcaacagacggtcacactccggattgagagtatggcgcagctgaagatcggatcgtgatcgttgctggagattattgtagggcatctggtcgatctgtggacgtcgtagattctgctgatattggttgttgtcttgctgctgatgctgctgctgttgttgcatacgttgctgttgcacacgttgttgctggtgttgctgttgtagactttgctgctgttgcttttgctgctgctgcaagcgttgctgttggttttgatgttgctgctgcagacgttgctgttgctgttgctgctgccgttgttgattttgtgtttgctgatccagggcttgacgttgcttcttctttgacattttaggaggtggtggtggagccatgtcctgccgaactggtgggagaggcgttggcgatggtggccccttactaggcgattgcggctgactctgcgttttcttttgttgcagtcccaacagcacaggatctatgtgcaacgagggcaagcgattcttttgatccaaacgtccatagctgtttagcagagagtcgtaattcggatgcggatatgacgagaagatcattcgccaatgctcctcgatctcattgcgcaactgtggcgtggcgtgttcatctggcgagaagtcatcgatcaggcgacgcaataagactagcaactgatcgagatgtgttttgccattcaggagtcccgcctggccgacgaggatcatgttaagctggcggcgctttttttctgccatcttaaaaccgtttttggtgttcatcccctctagctccttgatgcgcacgtagtggctcttggcgtttcctagattggtgtttagactgttgattccatcccgcagaaagcggatcagcacatcaatacgtttggggggtttctggctctggaactcgatgctcttgcgcttgacttcctgactgcgtcgaagcagtttcacttgcaactcttcctggtgctttttaaggccatatatcaccagtacataaccgtagtccttaaagtccatccgcacgcttacatgacactgtttggcggctgccgccagaaaagttcggccctccgcactgaacaggtactcggattcttcgcgcgccataatgattttgccctcgcttggaacatctggcagttcttcactggagtccggatcgggcgtttcgtcagtgcgtaaactggtgctactggagttaacacacatggaaattccctggacgttagaggatagttcaaaatcgtctttacttaggggtatgacatcgggtagagtccccatggtgcggacgagcggcagttgggtgttgggttgaccatcactggttgtcgagctgggcagttcaaagtgctcggaaaaactgtaattcgaatctgagtccaactcatggggcgccaatggtgttctacttaggccaggttccgttggtggattgtcgaaattggtggtaatctcttcacgctgcacagaggacgatggttcttcttgatcatcatccttcatgggtagctcttcatcgggttggctttgattaggttgtccctccacaagcttctcatcttgagtttgcttcacttccggtgggacctctgggagcggtagtatatctttagatttttcgtcttcacgattcagctttccaattggctcctctgcggttcggttctcagcgattgactcgacaactggcatttgctttgtgagcggtttcttagccgttccagtggatacctcccctcgagctgccttcacctgagcattgggcacatattcgtgggtataaatcttttctggaatctgcgatactgcagtagttgacttccttttgactgactggacttttgccaagttcgcattgacaaggaaccttgaataatagcaatttttcggcatactcggattgttccacttaaagtggaagggagtttcaatagcaaaaaagctttttaaatcgccaagattacctatcgggccaccgcgattcttgtagattttttggtgagacacaatctggcttgtatagttcgtgctacgaaagtcaccaatccgctgtcggcagttctcgaaagaatggcgaccggcacagtagctgcactgtacgctcctatactgtacccggctatccagctcagtatttgaccgagtctgttggcaaagaaaaatgaggattgcattgatttctgcactgaatggttaataggtattaccgttgagtggtagcgacgccacttatccggacagtgatccacgccgtgtcctctcattttgcacagctggcagaccaggcggctgtgaaaggagcacttgttgcactgctgcacgtaaatttcctgctttgatccgcactagaaaattgaaaggacttgtttagtatgttctagttgaagtagttcaattacctaccccaaaacaaatggcattgggacagcggggctcggcatgacccatggttccgcaaatgaaacaaacaagtggcttgcggggacgcgggcactttgatcgaacgtgtcccatctcaaagcagttggagcacttagcatgggagcggggtcgtgctaccggacatctatccgcggtgttgatcctccactcgtggcgatgccctgcaattacagtaggttaatagctgcattcgcttattactaactactaaaggtaacatcacctgtcatcattctttggaccttgtgaacagagaagttttccccattccaactgtcattgtagaagctgcgcatctcttcgttccagccaatgaggtctccgcttttgggcagactttcgtctcttagctcttgcaaattgtgctccacgtgtacgtgctgctcttcgtttgtcacgtctctgtcgttcttatctggattcgtctcctcaagatcgttagaagcatcaatatcctcgtcggaacgcacagtggtgtctgcacttttgtctcgcgagtcttcttcatcggatatatatccactcgcattcacttgttcctcgtcctcttccatttttttggctttggcatcaagacgctcgaagactgcagctaatcgatctgtcatagcatcgcgaaactccgcctctgcatgggaatcttcatcggatccgatagaaatggcatcgtcatcgccatcgcctttttgtacctgcacctttccttgtccttgctgttgattaagaagtcgctcggctatatctctggcacttggtaactcatcctcagacgcagattctgagctagcatgatggactgcagcaactttcggtttttggatacgtgtagccgccttcttcgaattgtcatcagagctatgtctggtactgattctacggattttgcgcttacaacgctccactgccataccacgtgctatgccaggaactccagtagcatgaacgccatcatcgctgtctgaatcatccaacccatcgtcgttgtttggatcagattggctgtgattgtttgttgaacaggagcgtttgcgcagacgcttcgtcttttggacactaggctccactacctcctcgacggaagagctgcccgatgatgagtctacgttgcgtatgatcgttggcgtggtcttgctcttggcttttgagtaaatgccactttccgtgaggtcagactcactttcgtagacgtctaaagctctgaattgctgatcgtcgacgcgatagtttttcttaatttcctccagtcgtgaaggaggaacaaattcatattccgacgaggtatcagccgcatgatcatgttcttgttcctcagatgcattttccacaacttccttatcttttggttcctcgccaatagcttctcttatagccgtctcggttagtaccagcagatcttcatcattggcgttctcacattctgtcaacaagcgagtggtatccttctgcactatgaagtcatcactggacatgacggaacagctcggtgaatgcatgggtggtgtggtactgctagcaacaacactcgtcccctctggttcagtaatacaagacaatcccattttcacgtctgtggcgtccattgcattctcttcgtgaaacaattgagatgaggtgcaggtctgctcgccgtcactcgtgtccaattcgatgataggagctggcggaagtggtacatgaaccacatcatcgtcatcggaagattcgcttgtttctgccaggttgacaaactccaccggcggagactgctgctttcgctgttttttatttaactgagcctgcttggatttctgtttcttatctgccagacgctgaatctgctccaacttgcggttggctttgccaaacggtccaggtcctgattgctgctgctgtttgttatgttgcagcgactgctgttgctttttctgctgctgtttgttttgctgctgctgttgcttgttttgttgtggcttattctgcttcttgggcgggcagttcggtgggatggcgactagaagtctctggtcaaaacgctccgcctcgtaggcttcgtgattcactttggtggatgcgtttggctgcggttttggtttttgtactactggcgccgacttcttttgctgattttggtgctgcttggattgttgattttgttgcttaagactctgctgctgtttctgttgtgaatttttttgctcctgaggctttgcctgttgattttgcaattgttttgcatgaatattttgctgttgcttggcctgtgggatttgctgatgtttcgggggctggctagcagttttcggttgattggacgttcccttttcgggcgacagcaatagactcttgtcttgcggcatatcgacatccatcgattgtgatgaggaactttcttcaacagctaagagacaagaaccataaattaaaatgtgattcttatatttatttgtataggcgatatgaataaatgtgaatagcaaattagcagaaattcttaagaataaaccaaatcttttgatacaacccaacattttcattgacaaattaaaaatgcagtttctgaactatagcaccaattttaataccaaagtgggttaagcatttgactaagacgggaattggacatgtcttccccctcgacgtcgttcagcctgtagccttgaagtgtcagatccgacaactgcgattcgcttatgtggaagaggacaaacgcctctgccagcacatcggatcgattgggccacagtaggactcgcaccgctgtgcgaaactcatcgattgcctccttgatcagctgctgcgcctcgaacagattggcgagtggcgtcatcattctttcgcccaactcagactgcttagcctgcactttgagagcctgctctagttgcctgaccagccgcatgaagacgaatctgcggtaacgatcttcaaaatactgtcgcggcatatcaaaccgactcattttccgctgaaccaaggcagagaagataaagccatccacacacgagcccagcacactaacgctggccatcaatacgactgcagatagcatgtactccactagtcgttggtccagttcctcgcaccaaaaaaacagatctcggccatgccgcgccagttggtaatggagcaggcaaacaatgcagacaaggtcgagagtggccagggccaaggtgcaatggttgaaatggcccatccgcctttcgagcacctgcagaccgcacctgcccaggcccagaaagcgactgaggaagcaggtcatcattggaaggttatggagaattttgaaagcacgccaacgaaatagttttgaaaaggatgaaagcagcctaatgcccaaaagctgggctgatccccactgatggaagtaggaaatgttcttgactactatgaaatggggcggaactaaaagactacaaatgaactagctaagaatacctaagattatgaatcacgtttaattttttttgttttgagttttaaacagttatagctacaaatcgaccgattaaatatgattatatttactatgatttaaattacctaataacttgtgagatattggatcttattggatcctaccttttttgggtacatttttgggtatatttttatgctagcttatggtttttattacttcatatataccatttgccaatggttgccactcacctggcattgttttgtttgtggtggcctgctgttcctccgcctgcaccacctgcccctcccccacagctgccgcaccatcgatccagtagcgtggtttctgcatgctgttgttgatcactcgtgttccgctgacgaaacgctgtccgggaatgggatgcttctgctgaggaggcggtggcatgctcctggcatcctggtcgctggttgactccttcgcaggctgatccatggcagtgtgctcttcgaatccatcgctgtagtggatcgaggcatatagaattgattctagctcgttcagccgttcgctgtccatctcctcaagctgcggattggaatgcattagatcggtaggaataacgggtatttgggccaacactcacatcactcatattgcgcgtctttgttttcctttgcctttgatttatttttcctgcgcattgataaaaagtaatataatgaaagagagcacgttgatggcagtggtgggcaagctggagagagcatgtcaatcgaggcagtgatgacactctggctatcggaaaatgttgctatcgaatagtaaactaaaaaatctgacaacagtacttctactagctggcaaaaaataaataatttacatcaacgaacggttcgaatttggtttaagttttaaaattaacacttaattattcactatggcattataaataaaaatgaataattttccactccgagttttttatctctcaaaatgttaaattaaaatttaaaatttacaaaaaaccaaaaaaaaaaccaaaaaaaccaaaaaaaaccaaaaaaaaatttacaaaaaaaaaaaatttatgatacttctcgtttcgatacgtgtaaactggcagtcaattgtgggtgcctccgataacgataacaagaggagcaaccctagctgccgggccacgtacaattcgcgtcgaaaaataacaagaagtaattaaagctaaaattcaatgtaagagtgccgcaagtgtgttaaactaatagcttaaccggatcatcttatttctagtatggacgtaatgcagcgctacgtatcgcccgtgaacccggccgtttttccccacctcgccaccgtgcttttggtcatcggaaccttcttcaccgcctggttcttcatctttgtggtgtctcgaaagagctctaaggaaagcaccttgataaaggaactgctgattagcctgtgcgcctccattttcctgggattcggcattgttttcctgcttctaaccgtcggtatttacgtatgagataagacaccattccgcatagaaataaactgaagatctgatcgtgggcgttaacatacatgaggcctttgttttatttaggattattgttattataatttcaatttttaagattcaatttgcgcttaaaacttatcgaatatttttgatggtaacatataaatcgtctgcacgtgctcgcactaccccgtcg

SEQ ID NO: 20615 - DNA, 5274 bp, DROSOPHILA
cattatattactttttatcaatgcgcaggaaaaataaatcaaaggcaaaggaaaacaaagacgcgcaatatgagtgatcttgaggagatggacagcgaacggctgaacgagctagaatcaattctatatgcctcgatccactacagcgatggattcgaagagcacactgccatggatcagcctgcgaaggagtcaaccagcgaccaggatgccaggagcatgccaccgcctcctcagcagaagcatcccattcccggacagcgtttcgtcagcggaacacgagtgatcaacaacagcatgcagaaaccacgctactggatcgatggtgcggcagctgtgggggaggggcaggtggtgcaggcggaggaacagcaggccaccacaaacaaaacaatgccagctgttgaagaaagttcctcatcacaatcgatggatgtcgatatgccgcaagacaagagtctattgctgtcgcccgaaaagggaacgtccaatcaaccgaaaactgctagccagcccccgaaacatcagcaaatcccacaggccaagcaacagcaaaatattcatgcaaaacaattgcaaaatcaacaggcaaagcctcaggagcaaaaaaattcacaacagaaacagcagcagagtcttaagcaacaaaatcaacaatccaagcagcaccaaaatcagcaaaagaagtcggcgccagtagtacaaaaaccaaaaccgcagccaaacgcatccaccaaagtgaatcacgaagcctacgaggcggagcgttttgaccagagacttctagtcgccatcccaccgaactgcccgcccaagaagcagaataagccacaacaaaacaagcaacagcagcagcaaaacaaacagcagcagaaaaagcaacagcagtcgctgcaacataacaaacagcagcagcaatcaggacctggaccgtttggcaaagccaaccgcaagttggagcagattcagcgtctggcagataagaaacagaaatccaagcaggctcagttaaataaaaaacagcgaaagcagcagtctccgccggtggagtttgtcaacctggcagaaacaagcgaatcttccgatgacgatgatgtggttcatgtaccacttccgccagctcctatcatcgaattggacacgagtgacggcgagcagacctgcacctcatctcaattgtttcacgaagagaatgcaatggacgccacagacgtgaaaatgggattgtcttgtattactgaaccagaggggacgagtgttgttgctagcagtaccacaccacccatgcattcaccgagctgttccgtcatgtccagtgatgacttcatagtgcagaaggataccactcgcttgttgacagaatgtgagaacgccaatgatgaagatctgctggtactaaccgagacggctataagagaagctattggcgaggaaccaaaagataaggaagttgtggaaaatgcatctgaggaacaagaacatgatcatgcggctgatacctcgtcggaatatgaatttgttcctccttcacgactggaggaaattaagaaaaactatcgcgtcgacgatcagcaattcagagctttagacgtctacgaaagtgagtctgacctcacggaaagtggcatttactcaaaagccaagagcaagaccacgccaacgatcatacgcaacgtagactcatcatcgggcagctcttccgtcgaggaggtagtggagcctagtgtccaaaagacgaagcgtctgcgcaaacgctcctgttcaacaaacaatcacagccaatctgatccaaacaacgacgatgggttggatgattcagacagcgatgatggcgttcatgctactggagttcctggcatagcacgtggtatggcagtggagcgttgtaagcgcaaaatccgtagaatcagtaccagacatagctctgatgacaattcgaagaaggcggctacacgtatccaaaaaccgaaagttgctgcagtccatcatgctagctcagaatctgcgtctgaggatgagttaccaagtgccagagatatagccgagcgacttcttaatcaacagcaaggacaaggaaaggtgcaggtacaaaaaggcgatggcgatgacgatgccatttctatcggatccgatgaagattcccatgcagaggcggagtttcgcgatgctatgacagatcgattagctgcagtcttcgagcgtcttgatgccaaagccaaaaaaatggaagaggacgaggaacaagtgaatgcgagtggatatatatccgatgaagaagactcgcgagacaaaagtgcagacaccactgtgcgttccgacgaggatattgatgcttctaacgatcttgaggagacgaatccagataagaacgacagagacgtgacaaacgaagagcagcacgtacacgtggagcacaatttgcaagagctaagagacgaaagtctgcccaaaagcggagacctcattggctggaacgaagagatgcgcagcttctacaatgacagttggaatggggaaaacttctctgttcacaaggtccaaagaatgatgacagggcatcgccacgagtggaggatcaacaccgcggatagatgtccggtagcacgaccccgctcccatgctaagtgctccaactgctttgagatgggacacgttcgatcaaagtgcccgcgtccccgcaagccacttgtttgtttcatttgcggaaccatgggtcatgccgagccccgctgtcccaatgccatttgttttgggtgcggatcaaagcaggaaatttacgtgcagcagtgcaacaagtgctcctttcacagccgcctggtctgccagctgtgcaaaatgagaggacacggcgtggatcactgtccggataagtggcgtcgctaccactcaacgactcggtcaaatactgagctggatagccgggtacagtataggagcgtacagtgcagctactgtgccggtcgccattctttcgagaactgccgacagcggattggtgactttcgtagcacgaactatacaagccagattgtgtctcaccaaaaaatctacaagaatcgcggtggcccgataggtaatcttggcgatttaaaaagcttttttgctattgaaactcccttccactttaagtggaacaatccgagtatgccgaaaaattgctattattcaaggttccttgtcaatgcgaacttggcaaaagtccagtcagtcaaaaggaagtcaactactgcagtatcgcagattccagaaaagatttatacccacgaatatgtgcccaatgctcaggtgaaggcagctcgaggggaggtatccactggaacggctaagaaaccgctcacaaagcaaatgccagttgtcgagtcaatcgctgagaaccgaaccgcagaggagccaattggaaagctgaatcgtgaagacgaaaaatctaaagatatactaccgctcccagaggtcccaccggaagtgaagcaaactcaagatgagaagcttgtggagggacaacctaatcaaagccaacccgatgaagagctacccatgaaggatgatgatcaagaagaaccatcgtcctctgtgcagcgtgaagagattaccaccaatttcgacaatccaccaacggaacctggcctaagtagaacaccattggcgccccatgagttggactcagattcgaattacagtttttccgagcactttgaactgcccagctcgacaaccagtgatggtcaacccaacacccaactgccgctcgtccgcaccatggggactctacccgatgtcatacccctaagtaaagacgattttgaactatcctctaacgtccagggaatttccatgtgtgttaactccagtagcaccagtttacgcactgacgaaacgcccgatccggactccagtgaagaactgccagatgttccaagcgagggcaaaatcattatggcgcgcgaagaatccgagtacctgttcagtgcggagggccgaacttttctggcggcagccgccaaacagtgtcatgtaagcgtgcggatggactttaaggactacggttatgtactggtgatatatggccttaaaaagcaccaggaagagttgcaagtgaaactgcttcgacgcagtcaggaagtcaagcgcaagagcatcgagttccagagccagaaaccccccaaacgtattgatgtgctgatccgctttctgcgggatggaatcaacagtctaaacaccaatctaggaaacgccaagagccactacgtgcgcatcaaggagctagaggggatgaacaccaaaaacggttttaagatggcagaaaaaaagcgccgccagcttaacatgatcctcgtcggccaggcgggactcctgaatggcaaaacacatctcgatcagttgctagtcttattgcgtcgcctgatcgatgacttctcgccagatgaacacgccacgccacagttgcgcaatgagatcgaggagcattggcgaatgatcttctcgtcatatccgcatccgaattacgactctctgctaaacagctatggacgtttggatcaaaagaatcgcttgccctcgttgcacatagatcctgtgctgttgggactgcaacaaaagaaaacgcagagtcagccgcaatcgcctagtaaggggccaccatcgccaacgcctctcccaccagttcggcaggacatggctccaccaccacctcctaaaatgtcaaagaagaagcaacgtcaagccctggatcagcaaacacaaaatcaacaacggcagcagcaacagcaacagcaacgtctgcagcagcaacatcaaaaccaacagcaacgcttgcagcagcagcaaaagcaacagcagcaaagtctacaacagcaacaccagcaacaacgtgtgcaacagcaacgtatgcaacaacagcagcagcatcagcagcaagacaacaaccaatatcagcagaatctacgacgtccacagatcgaccagatgccctacaataatctccagcaacgatcacgatccgatcttcagctgcgccatactctcaatccggagtgtgaccgtctgttgagtgaaatggatcacaatcaacctggcagcatcaacaaggacgccaacaaaccgtccatgttctggtcacgcgaatcgctaaagtacctcgatgatcttttcaagatgacctccaacacagagaccgtagagcggctgaaacgagtgctacagcgatcgcagcgtggtctgctgtcgcacaacgattaccgagcggtcattcgactgcattccctgatgtgcaactga

SEQ ID NO: 20616 - protein, 1700 aa, DROSOPHILA
MDQPAKESTSDQDARSMPPPPQQKHPIPGQRFVSGTRVINNSMQKPRYWIDGAAAVGEGQVVQAEEQQATTNKTMPAVEESSSSQSMDVDMPQDKSLLLSPEKGTSNQPKTASQPPKHQQIPQAKQQQNIHAKQLQNQQAKPQEQKNSQQKQQQSLKQQNQQSKQHQNQQKKSAPVVQKPKPQPNASTKVNHEAYEAERFDQRLLVAIPPNCPPKKQNKPQQNKQQQQQNKQQQKKQQQSLQHNKQQQQSGPGPFGKANRKLEQIQRLADKKQKSKQAQLNKKQRKQQSPPVEFVNLAETSESSDDDDVVHVPLPPAPIIELDTSDGEQTCTSSQLFHEENAMDATDVKMGLSCITEPEGTSVVASSTTPPMHSPSCSVMSSDDFIVQKDTTRLLTECENANDEDLLVLTETAIREAIGEEPKDKEVVENASEEQEHDHAADTSSEYEFVPPSRLEEIKKNYRVDDQQFRALDVYESESDLTESGIYSKAKSKTTPTIIRNVDSSSGSSSVEEVVEPSVQKTKRLRKRSCSTNNHSQSDPNNDDGLDDSDSDDGVHATGVPGIARGMAVERCKRKIRRISTRHSSDDNSKKAATRIQKPKVAAVHHASSESASEDELPSARDIAERLLNQQQGQGKVQVQKGDGDDDAISIGSDEDSHAEAEFRDAMTDRLAAVFERLDAKAKKMEEDEEQVNASGYISDEEDSRDKSADTTVRSDEDIDASNDLEETNPDKNDRDVTNEEQHVHVEHNLQELRDESLPKSGDLIGWNEEMRSFYNDSWNGENFSVHKVQRMMTGHRHEWRINTADRCPVARPRSHAKCSNCFEMGHVRSKCPRPRKPLVCFICGTMGHAEPRCPNAICFGCGSKQEIYVQQCNKCSFHSRLVCQLCKMRGHGVDHCPDKWRRYHSTTRSNTELDSRVQYRSVQCSYCAGRHSFENCRQRIGDFRSTNYTSQIVSHQKIYKNRGGPIGNLGDLKSFFAIETPFHFKWNNPSMPKNCYYSRFLVNANLAKVQSVKRKSTTAVSQIPEKIYTHEYVPNAQVKAARGEVSTGTAKKPLTKQMPVVESIAENRTAEEPIGKLNREDEKSKDILPLPEVPPEVKQTQDEKLVEGQPNQSQPDEELPMKDDDQEEPSSSVQREEITTNFDNPPTEPGLSRTPLAPHELDSDSNYSFSEHFELPSSTTSDGQPNTQLPLVRTMGTLPDVIPLSKDDFELSSNVQGISMCVNSSSTSLRTDETPDPDSSEELPDVPSEGKIIMAREESEYLFSAEGRTFLAAAAKQCHVSVRMDFKDYGYVLVIYGLKKHQEELQVKLLRRSQEVKRKSIEFQSQKPPKRIDVLIRFLRDGINSLNTNLGNAKSHYVRIKELEGMNTKNGFKMAEKKRRQLNMILVGQAGLLNGKTHLDQLLVLLRRLIDDFSPDEHATPQLRNEIEEHWRMIFSSYPHPNYDSLLNSYGRLDQKNRLPSLHIDPVLLGLQQKKTQSQPQSPSKGPPSPTPLPPVRQDMAPPPPPKMSKKKQRQALDQQTQNQQRQQQQQQQRLQQQHQNQQQRLQQQQKQQQQSLQQQHQQQRVQQQRMQQQQQHQQQDNNQYQQNLRRPQIDQMPYNNLQQRSRSDLQLRHTLNPECDRLLSEMDHNQPGSINKDANKPSMFWSRESLKYLDDLFKMTSNTETVERLKRVLQRSQRGLLSHNDYRAVIRLHSLMCN

SEQ ID NO: 20617 - DNA, 3783 bp, DROSOPHILA
gattaaaatagttgctaacttaaattaaatacatattttatttcgtttaatggtatccattcgtttttaaagtaattactaaatttaaaaaaaaaattaaaaataacaaaaaatccttcgagccggatttgaaccagcgacctatggatttctattgcttgttttccaactacagtccaccgctctaccaactgagctatcgaaggtttgaatctcgggtggccaatgtaagttttgtacatatgtgcgagcgagagaaatgtctgaagaaaccacttcgatctcaactaatgacgtaatatcttgataagcaacaagtttataaataaggcgcaccacaaccgggaattaatttaattggatcagtaaattactttatctttgtgtaattttttaatgtacttctaaagaaatgctttttaatccgttaaaatcccgttttcatcaatttttgccacacattttagaaagattgtatatttctgacttgctttaactctttttaaagctttgaatgatatttaatgtcttaatgaaaccaacaaacgctaacaatacccttaaaggggaatttctccataaagaaatgtgatagtttttcaattgagtaatgaaaagcgatgaattggcaggtcggctccaccaccttcaaattcacctcctcaatttcatcgggtgcaagaactttgaccagccctcaactgcgagagatagcccagttgcagcagccaatcttcgaaggaatttaatcaattatgttccgtatacgcaacgtgtgctgcaaagttgtgggtgagctggaacaagtgcaaactgaaatccattatagccatttgcaagctggcaatttgcgcaaggaaagaggggctggtcatcgttaacgaggtcaacagcaaaagatgaaacaaactcaatttcctacgatgggaaaatgcaacaaaaatggcacttttaattgaaaaattacaccaaccggttgtggggcatatgaccctttcagttatctccgctccacgcggcacagcgggtaatccttaagcttcagggagatattacccttgaccagcagctcctccaagcgggcctccgtgctgattcgatagctgcgaaagatcctggccagcagcaatttcatcagcatttgggcatatcggtagcctatgcacatgcgcaatcccttggtgaagggaacgaaggcgaaggcgtgcctctgaggcgaatccaatccgaaatgcgcatccggattgtaggtacgcgaaagtggtccccacacccgttcatcccgctgcatgttgtagatatcgatgccgatctgagtgccacgcggaataaggaactccccgtcgccgcgcttcagctggatgtcctgatccgctgatcgcagcaccatgggcaccggagcaaacagccgcatggcctcgttgatcaccatttcggtgtactcgagtcgttggagctgctccaagtttatgtcgccagacggcggcagctctgtgaccagttccttgtgcagcttctcctggtagcagggatgcattgccaggcagaggatggtaaagtacaatgccgtcgatgtggtctcgaaagtctgtgaaatgagtcatggtacaatatcttcactggatgtttgaaacctaccgctgcaatggtcacattcgcctcatccctcacatcctgccaactcagctgaccgcgctccacatgctccctcacctgctcaatgaaaatggctttggacttgcccctcatctccatttcggatcgctgctgatccggattggaattggcggccactaccgagactatgggttcgagaagctgtcggaagatggagctcaccatttttagtgggtgcaactttgatcggatccagtagcttacctgttctataaacccaaacagtatgccgacgaccttttgctgcaggcggaaaagtccggaacgacgatatattaagtcaggatagagccacggcgatagcattcgttttacacacacttcggtcaagctaaaggcaaatgttattaaccattattaaatgcctgagcatttgaactaacccattataagctttaaatatgcataaagatccatcgtgctggaagttcattttcttgcccatcgttgtctctgcaagtaattcctatgaaatataggcgattgaggacctatgtaaatacctacggcaagctgcttccaaaacgattttcttaaggatttggtagatttccagccgcttaccgtgctgcacaccctcgagctccagcttctgcagaaggacctctgcttcggcattgaaaatgggcaggaagttgctgagaatctggcgaccaaaggcgggattaatgaggcgacgatgtttgtgccaacgtggcgaactagacgtaaacagtccgtcaccaatggccgagctcatgaaccgatagaaatcgcccttattggtgcagtgcgtcgagttcaatatctgctccacgctgtgcggatcgttgatgtagaggaaacaactggtgcccatccaggagatgaaaggcgctttaaactgtcgcgacagaccatccatgtactgcaaaaacgctggtaaaaatgcccaattaaccatagcctctcacaaatcctgtccagctcttactctccgggttcatcatttgtaagcccatgcctattagtggccagccaatgggtccgcgcaactgccatgcgactttataataccttcgccggctccacaggaagtataaccaagccaaaagcagccagccgcttaaaatgatgctggccagcatgtcgatgaacctggccgactggcggacgacccacgaatccgtactccaaaatttaattgctccacgcacaacgttcgacggcagactgagctacggatttcgagctttaagatccattcaggtttctatatgcatgtacgaaacaaagtcacgattgtcaattaatatgcaaaatagaagaagaaaaaaacgtaagccatactaattgacagattttatggaattatcagagaacccaccttaaaaaacaaccttttcgattggcttttcgaactgaactcatctgcttttcctgctcgccgcctcgtattctgccaaaagtcggtcaaaaaagggaggtttgtacctgtgtacacctatgtttgtctagctgcggattacgcatttgcggctttaatgactcactttccatgctagccgtgttgtgggtcgattctcgtttgggtggcgatttttattcacgtcgcgtgcctttcaaaattatgccagccaataatattgtgcatcgggtaaaagataaaaagatactcaaatactcttactggtaaaaaaaaaaaaatttttaaaaaagccaacaatgagcgtaaataaaatatgtttttggaatgtgagaaatatttttgccattattatttagatttaagttaatgaagagcgctgacacttcgtcactaaacttccactcttgctcgctgaatttgtgacgaattccacccactgatgcgtcaattaagtgaccgtctgcggccataagttccaaagcccaatcgcagcccccacttacacagctattacgcattaattgagtttttgaaatataatttttatttgctattaatatttttacaaattgttttatttgtggtgttttgccttttcaattttgtttaacagttctatgctatttatctctgtgtgtatttgccatgacattgagagtagctccctttcggtatttggttatccttgtgtagttatagttcgggccgacttgacggga

SEQ ID NO: 20618 - DNA, 1494 bp, DROSOPHILA
atgctggccagcatcattttaagcggctggctgcttttggcttggttatacttcctgtggagccggcgaaggtattataaagtcgcatggcagttgcgcggacccattggctggccactaataggcatgggcttacaaatgatgaacccggagagtaagagctggacaggattttttaaagcgcctttcatctcctggatgggcaccagttgtttcctctacatcaacgatccgcacagcgtggagcagatattgaactcgacgcactgcaccaataagggcgatttctatcggttcatgagctcggccattggtgacggactgtttacgtctagttcgccacgttggcacaaacatcgtcgcctcattaatcccgcctttggtcgccagattctcagcaacttcctgcccattttcaatgccgaagcagaggtccttctgcagaagctggagctcgagggtgtgcagcacggtaagcggctggaaatctaccaaatccttaagaaaatcgttttggaagcagcttgccagacaacgatgggcaagaaaatgaacttccagcacgatggatctttatgcatatttaaagcttataatggcttgaccgaagtgtgtgtaaaacgaatgctatcgccgtggctctatcctgacttaatatatcgtcgttccggacttttccgcctgcagcaaaaggtcgtcggcatactgtttgggtttatagaacagcttctcgaacccatagtctcggtagtggccgccaattccaatccggatcagcagcgatccgaaatggagatgaggggcaagtccaaagccattttcattgagcaggtgagggagcatgtggagcgcggtcagctgagttggcaggatgtgagggatgaggcgaatgtgaccattgcagcgactttcgagaccacatcgacggcattgtactttaccatcctctgcctggcaatgcatccctgctaccaggagaagctgcacaaggaactggtcacagagctgccgccgtctggcgacataaacttggagcagctccaacgactcgagtacaccgaaatggtgatcaacgaggccatgcggctgtttgctccggtgcccatggtgctgcgatcagcggatcaggacatccagctgaagcgcggcgacggggagttccttattccgcgtggcactcagatcggcatcgatatctacaacatgcagcgggatgaacgggtgtggggaccactttcgcgtacctacaatccggatgcgcatttcggattggattcgcctcagaggcacgccttcgccttcgttcccttcaccaagggattgcgcatgtgcataggctaccgatatgcccaaatgctgatgaaattgctgctggccaggatctttcgcagctatcgaatcagcacggaggcccgcttggaggagctgctggtcaagggtaatatctccctgaagcttaaggattacccgctgtgccgcgtggagcggagataa

SEQ ID NO: 20619 - protein, 497 aa, DROSOPHILA
MLASIILSGWLLLAWLYFLWSRRRYYKVAWQLRGPIGWPLIGMGLQMMNPESKSWTGFFKAPFISWMGTSCFLYINDPHSVEQILNSTHCTNKGDFYRFMSSAIGDGLFTSSSPRWHKHRRLINPAFGRQILSNFLPIFNAEAEVLLQKLELEGVQHGKRLEIYQILKKIVLEAACQTTMGKKMNFQHDGSLCIFKAYNGLTEVCVKRMLSPWLYPDLIYRRSGLFRLQQKVVGILFGFIEQLLEPIVSVVAANSNPDQQRSEMEMRGKSKAIFIEQVREHVERGQLSWQDVRDEANVTIAATFETTSTALYFTILCLAMHPCYQEKLHKELVTELPPSGDINLEQLQRLEYTEMVINEAMRLFAPVPMVLRSADQDIQLKRGDGEFLIPRGTQIGIDIYNMQRDERVWGPLSRTYNPDAHFGLDSPQRHAFAFVPFTKGLRMCIGYRYAQMLMKLLLARIFRSYRISTEARLEELLVKGNISLKLKDYPLCRVERR

SEQ ID NO: 20620 - DNA, 4521 bp, DROSOPHILA
gaaaaaaaaatcacttcaaaaaaggctagctagtaatttattacgttgaactgcaaattgttatttctttccttgtatagcgctcaacaacttcccgagctattgatataattttgcttatttttttgaacgaactgaatccggctgatgagacgacagtttttacgcagtgctgggaaattttgacaagttagggatggaaacttcatttcacactttaacttaagggttcttgaacagactaaaaattttaagataagtcgtattattgccacacgtttcgtaaatattattttattataggtgtcaaacatattcattcaatcttatctcgagtaatgctttcttgttattgatgccttcgaaccaaaaaatttacttcccacacgaagcaccaaataaaatcacagcatagtttgagattaaagacacccagaaatcatgatgttgtttagatataaagtctatcaatcttggaataaatctttaataaagccagtagttggtaacaacgtataatacctaatgagagtgttttatttccactttcttggccaatcaagtaaaactcttaacgccacttaactattttatatttacttgatttatttaagtacttatgctaaaactcgccgttcgctacccgaaaataatactatgttcagcggcaaaatcgcgggtgggaggagccctgactctggaattcacagcgtttcgccgttagaggccaaataaataatattgtgcagatatctgcgaagattgccacatcttaaatgctaattaaggtgagctgggctagccgtggaatggtaatggtaccttcaactaaggcgatgagcgtgggcagcccacatctagatttagtcgctggcctcggtggcaagactaagctagtactaggtctaggacagagactaagctacgaactagacttgggctaagactatcgcataacgaggttgcagcgttgttcccccttcggacttctttggatccctcagatcgggggcgacttctccgccagcttggcgtgcagggtgttaatatcgtatatgaccaccagatccttgttcagaccctcgaagacctgcgccactcgcggctgcaggttgtagaagaacagcggctgctcccgcagcttaaagtccatcaccatggtggatatcaccttggcggccgtgaagtccgctccatagatgtgggtgcaatcgatgaccaccggcagtgtggacttctgaccctgcttgttgatcaccttgcgcacaaactccatcgaggggaagatcagacagcgatcgggagttagcattaggtatttcagaccagtagttgtctataaagataggtcggcttattaatatcataggaatcatctatggcatatcaactagcagtatattaattcctacagtaagatgaacatgagataaaaatgccatccgaatcttaagaatctgtagcatactttcagccactgaagctattctaggtatagattgagatacttcggatggaatgactcaccgccagcgtttcgatgcgcaactttggccgggctgcctggtagaggatgaagaccacattgatgccgatgcccacgaggatgcccagttgcaggggcagaaccagacaggcgaaaaaggcacccaggccgggaatgagatcggtttctgtggcaggagaaatacacacgtatggtaacaaacatgtgagtgtggtttatttattttcaactcacttttactgtgccacatgggcttgatcactcggtactggaccatgaaaataaccgccgcaataataatggaggccagagccgccttaggaatgtagtaaaagcagggcgtgaggtacaacagggcaataatcactatcacgctggtgtagagattggacagctgggtcctcactccactggcatttaagatggctcccctggcgatgccgccattgctccgaagaccctggacaaaggagttggccacgttgcacactccagaggctatcagctcctgcgtggcatctgtgggtttgccatcagctaaaaggaaaaaaccaaacggggaaaatattacaatccagtcaaatgaaattcgaaagcaaaacaatatgttcttccccaaggaataaagcgactgacctattttaatatttgcacgtgtcattcaaaagttgacactaatttgggacaacaagggttataagggtataagggttataaacaaaaactcgttgctttcgtcaatccgatttaaaattagctttaaatataaaccaattactgatgattcatatcctacttgaattttgaagattcttgaactcgttggggaagaacgagatccaactcatgaaaatgacgatatcaaataagcggacaactcaccgaaagcctgaacaacggccatagtttccagaagagcaatcaatggaaccacaatgagcccagatcccagggtgctgaccatgtcccagaagctctgggcctcctgaaggacttctcctgtggtttcgttgacaacggcatccatgtggaagggtggtggctgaaaggagggcaatcccttgggcacaaagccaactgtcttcacgagattctccttgccgttgacaaacaaccagtaacccaggccagcagttccacagaccagcagggcattgcgggcagttccgatggtccagaaaatgccggtcagaagcttttgcgctgtggtttttccctccttgggacccagggtacaactggccagggctctcaggctcaggagcagagtaatgcagacgattcccaagatgaagtccggccagctgatgttgtgtatatcgttcacaatgctaatccacacttgcaggaaggtgttgccacttgttttgatgcccaagaagtccttcatctgggagctgaagatgatcaaggacacggcactcgtgaatcccgctcccacgggaccagaaacgaaatcgatgagaaatcccagccggaaaactcccatcaggatctcaatgagacctgtgaggaaggttagcaaggtggctatctgccaactgcctccagcgatttgaaaggacagcagtgctgatatggccgtaggtccaataggcacatccttactggacccaataaatatgtatatgaagcagcccaggaagcaggcgtacaggccgtactgcagatccagtcctgctattccggcataggccagggcctggggtatcaccgtcagggccaccgaaatgcccgccactatgtcaccgaaaatataatcctttttgtactggggcagccacaccaggatggggaatcgcttgtacagcgttttcttcctgaagatgttggaccagaggtttgagcaacagctttgagttccctccaggcagctctcatcgggaccctgctcctcctgcacaatgcagtcgcgcgaggtgtggtacagcgtgttggtgggtatgtccaaggacacctcggatccaccattgaagccactattcgtgtgaccgctgtcagctctttggctcattttgcgtggattatttacactgtatactgaacgtgtgggatttgtgctttctcgtgggacttagtttccttattttctagggcttcatggcactctcactcgagcagcgaacactctccgggaaaccgataccctgatctgatctgataccaaagaccgaaacgaaacgaaccgatcgcggggccatccactgcgggaatgatttggagccgcggaaagagcagcactaacaaccgcccgcctgctgggacccgattatatagtaaataggcatcgctcgcgaatcgctggcagcgcattcgagactatccgccggctttcgttatgctatctgcacctctctcctctcgagacccgagaaatcttcgcgagaccccactaatcttcgcggccaattctccacctctatctctatctccatctcccgctctcgatcgaaaccggctctccgtctccagtgatcaccacctcggatctgggcttttcatcttcgcgggcacgtcgtgtggcagcccgaagaaatggaaatgacgcagcccatcggttggccaccgagtgggagcatgctccatgtaacatgggacaggcccagttgatacgggtaagaaaatacgtagtgggcagataccaatgttgctccaaccattgggagtttaggtgtacataatgtataatgtgtttctcaattttgtggggacactttcaattatgggaatctatccatgtttatattttatctacatcgttcttaccttttaattaccctttgatttaattggcaaatttcccacaatagtagtgcagttatctacacccaattcgctccgttatcttattatatacaatatcacttaggcttctttggcaattaaccatttataatatgtactaagtgcaggatagcatcacggattttgtgaatttctaaagcttgttagatcgggcagcttgtcaatatttttagtggctgtttatatagttagaggtaatccttggatga

SEQ ID NO: 20621 - DNA, 1917 bp, DROSOPHILA
atgagccaaagagctgacagcggtcacacgaatagtggcttcaatggtggatccgaggtgtccttggacatacccaccaacacgctgtaccacacctcgcgcgactgcattgtgcaggaggagcagggtcccgatgagagctgcctggagggaactcaaagctgttgctcaaacctctggtccaacatcttcaggaagaaaacgctgtacaagcgattccccatcctggtgtggctgccccagtacaaaaaggattatattttcggtgacatagtggcgggcatttcggtggccctgacggtgataccccaggccctggcctatgccggaatagcaggactggatctgcagtacggcctgtacgcctgcttcctgggctgcttcatatacatatttattgggtccagtaaggatgtgcctattggacctacggccatatcagcactgctgtcctttcaaatcgctggaggcagttggcagatagccaccttgctaaccttcctcacaggtctcattgagatcctgatgggagttttccggctgggatttctcatcgatttcgtttctggtcccgtgggagcgggattcacgagtgccgtgtccttgatcatcttcagctcccagatgaaggacttcttgggcatcaaaacaagtggcaacaccttcctgcaagtgtggattagcattgtgaacgatatacacaacatcagctggccggacttcatcttgggaatcgtctgcattactctgctcctgagcctgagagccctggccagttgtaccctgggtcccaaggagggaaaaaccacagcgcaaaagcttctgaccggcattttctggaccatcggaactgcccgcaatgccctgctggtctgtggaactgctggcctgggttactggttgtttgtcaacggcaaggagaatctcgtgaagacagttggctttgtgcccaagggattgccctcctttcagccaccacccttccacatggatgccgttgtcaacgaaaccacaggagaagtccttcaggaggcccagagcttctgggacatggtcagcaccctgggatctgggctcattgtggttccattgattgctcttctggaaactatggccgttgttcaggctttcgctgatggcaaacccacagatgccacgcaggagctgatagcctctggagtgtgcaacgtggccaactcctttgtccagggtcttcggagcaatggcggcatcgccaggggagccatcttaaatgccagtggagtgaggacccagctgtccaatctctacaccagcgtgatagtgattattgccctgttgtacctcacgccctgcttttactacattcctaaggcggctctggcctccattattattgcggcggttattttcatggtccagtaccgagtgatcaagcccatgtggcacagtaaaaaaaccgatctcattcccggcctgggtgcctttttcgcctgtctggttctgcccctgcaactgggcatcctcgtgggcatcggcatcaatgtggtcttcatcctctaccaggcagcccggccaaagttgcgcatcgaaacgctggcgacaactactggtctgaaatacctaatgctaactcccgatcgctgtctgatcttcccctcgatggagtttgtgcgcaaggtgatcaacaagcagggtcagaagtccacactgccggtggtcatcgattgcacccacatctatggagcggacttcacggccgccaaggtgatatccaccatggtgatggactttaagctgcgggagcagccgctgttcttctacaacctgcagccgcgagtggcgcaggtcttcgagggtctgaacaaggatctggtggtcatatacgatattaacaccctgcacgccaagctggcggagaagtcgcccccgatctga

SEQ ID NO: 20622 - protein, 638 aa, DROSOPHILA
MSQRADSGHTNSGFNGGSEVSLDIPTNTLYHTSRDCIVQEEQGPDESCLEGTQSCCSNLWSNIFRKKTLYKRFPILVWLPQYKKDYIFGDIVAGISVALTVIPQALAYAGIAGLDLQYGLYACFLGCFIYIFIGSSKDVPIGPTAISALLSFQIAGGSWQIATLLTFLTGLIEILMGVFRLGFLIDFVSGPVGAGFTSAVSLIIFSSQMKDFLGIKTSGNTFLQVWISIVNDIHNISWPDFILGIVCITLLLSLRALASCTLGPKEGKTTAQKLLTGIFWTIGTARNALLVCGTAGLGYWLFVNGKENLVKTVGFVPKGLPSFQPPPFHMDAVVNETTGEVLQEAQSFWDMVSTLGSGLIVVPLIALLETMAVVQAFADGKPTDATQELIASGVCNVANSFVQGLRSNGGIARGAILNASGVRTQLSNLYTSVIVIIALLYLTPCFYYIPKAALASIIIAAVIFMVQYRVIKPMWHSKKTDLIPGLGAFFACLVLPLQLGILVGIGINVVFILYQAARPKLRIETLATTTGLKYLMLTPDRCLIFPSMEFVRKVINKQGQKSTLPVVIDCTHIYGADFTAAKVISTMVMDFKLREQPLFFYNLQPRVAQVFEGLNKDLVVIYDINTLHAKLAEKSPPI

SEQ ID NO: 20623 - DNA, 3821 bp, DROSOPHILA
tgttaaacgcctttaagttgaacactattgcagatgaactggcatctctaatgtctattaagaagtacttgcctaccaaaaatgatatctcagaagtatgccatggcatttccaaaatgttaaacgcctatctaatgactgcgcaagatatcgccaatggtgtaatcttaggcactcagactaagtatatttcgagtgctttaaaattagaatatttatacatggaaattatttgcaacaggcacttgatgtctctccgcgattgcgttgcgttgtcggatcacagtatggaaatgaaagactataacaagtccaaggagtggcttaatgtggctatatccatgttagaaagttcagcttattgggatccaattgttccgtctgctgatttatacttgaaactagcagaagtctatgtgaaacagcgtaagttggttcatctgtaatgagtaatttaatttttaatcgctcctcagaaaattggactctggcgcttgaaactgttgagtttgctctgaagtcaaatccacgcaatgcacagttgatcaggatgcaaaagcgtttaagctatcatattctgctcggtccgcccaaaagcccgaaattaaatattgaaaacaatgattataggctcagaaaaaacggaagtctctactgcttctatgataccaagataagaactttctattctctgctcgcaccaatcaaagcagaagtgctctttattgatccattggttatactttaccacgaataatgcacatcaatagtatatacttcctttttttttacctacttattgttatattatgggaaaaaaatgaagaaataaatcctttaagtcaaattataagccgctcagctgataacacctcatttgagcttaaacttgactcgacacagggccttgtaaactcctgtcccatatcatttatccacttgctcataactgtagagggaaatgtgttcatggatacccaaatcaatctgagctccaagtctacgaaccccatttggaacccacgatgaccgggcagccggtgtgcagggaacccatatgatcgttacccttcgtgtccaagttataccaaaagagggccgatcctggctgtgggaataccgtgagatttagtcgagggaagtacgtgccgccgccctggcgaacttcattaagctgacggagaagaaattaatctttacaagccacttttcaaaactcaggatacaaacatagaagagtgtggtggcaatacgatcactggttccattgaacctgtttttttccgacagcaacatgtccaaatgcgtctcgaagaaaccccctagcccgtagttaatgacctgatagaactccgtagagttcatgtccagcccagtcgcatctcccaagcgctcggttatcttcttggtcgtatcgttgaagtcactgctataccaaacagactttgaggtgcggtatgtgtcgacttgtgtttcgtcatcggatgcatctgggtcagttgtggcagacggcaacatgtgttccttgctcgaagttctaatgagagtactctccttttgggagatcatgtcatggaggagcactacgaagggatcaatcgatagaatctccgttttgatgggggccagttgcagaaatggggaggtaacatggttatatacacaatatagattactcagatttcggggaacttgacagcgaccactgcaacagggcggaagaaccaatctttcgtgggagttgtccttatcctgttcaatcggttcgatatctgacaacgtaagatctcttttttccaggatccgatactcctcatatatttctgggtcatgaggcgaaagctttagcgcaacctgataggcttgaagagcaccctcatgatttcctgcaatcaatagaagtctcatgcccaacccaaataaccttttgaatgcacttcctacttactctgcttcatttgtacttgacccagtattctgcacaggtcagccagttttggtcccctcaataactccatatcggtctgagaacttttctgatcataggcttcaatgctagcacttatccattgctcggcagcataccaacgcgagttattcatcagatgaagaccaattgcgagacaatcgatgggttttagagaagagctttaagtaattacattaattaaaaactccctcttgattaggatgacatcatcacctacttgtattgcactccatctagtaagcctttggctatatctgaggaaaacatctggtatgtggcctgcatttttctaatgccttcagcggcatctataaagtcaaagtactttggcaataggggcatccttgagtccacaaaaaacaattcctctgtgcaaagagactcttaagtaataagaaatatctcaaaccatttatctaaccttggccaacaggcgtttccaagtacaatagccacatcaaccagttcgactgcatgtgacgaatgagggaaaaggtgtcaatcggattggcaaaaatttccatagacgacttatactcctgtcgccttttcatcatcttgaagacgccccttcaaagcttgcattgcattaagaaatccttgtgattgtttggacctacgcattactcaccatttaatggttttggcttttcgtgcaagcgcttccgccagcttttccacatttgagacaagatcgtcctctaagttcagcatatcatccatattcaccacagatcttgcaaagcgctgttgggcattgttctctcgcaactggccaaaactcagggacagatagagcattcccaggagcaccaatctccagaacagcattctgaaacccactgtgcatccagctagagaaaaaaagcattctgtaccgttctgtacataatcatattgatacacccattagtttcaccttattccatagttcgtctggggtttgtttcgcttcaactttaatgtttccccatatatgttttttccttatacttattaattattattggcaaaggctagataataatcttctctattgatgacaaatattttgagtctaagcgcgatcttaagcagggccttctgaactcttgacctttgtcgtctatccacttgctgacaactgtgaagggtaatgaagcctataaaacacaagaagatccagaaatgcaagctctactaaccccatttggaccccacaataactgggcagccggtgtgcattgttcgcacatgcagcataccctccgtgtgcagattgtaccacatgagaacagttccaaactttggaaagacagtgatatttagacccggaaaatgggtggcaccgccttgtggaacatcatttagctggaattggaagagtcgctaagattataagaaaactgttagcgtcaaacgaaggactgacataaaaaagtgttgtggcgagtctatcaatatatccgttaacgaatcgatcctcgtccgcaagcgacgtgtcaaaatggctttcaaagacgcctccaattccatagttgatgacctgaaaaggctcggaatgtttcatatccaagccagttgcttcacccaaacgttgagtaagctttaaagtcgcctcgttggcatcactgtcaaaccaaactgactttgaagtgcggaacttggcaatttcaaactcatttgcggcgttgactgtttcggaaggaaggatctgatttttactggaagatcttataagagcaccctccttgtgagagaccatgtcgtgtagaagaatcacgaaggggtcaaccgagagaatctccgttttgatgggggccagtcgcagaaaaggagcagttacacaatt

SEQ ID NO: 20624 - DNA, 1530 bp, DROSOPHILA
atgctgttctggagattggtgctcctgggaatgctctatctgtccctgagttttggccagttgcgagagaacaatgcccaacagcgctttgcaagatctgtggtgaatatggatgatatgctgaacttagaggacgatcttgtctcaaatgtggaaaagctggcggaagcgcttgcacgaaaagccaaaaccattaaatggggcgtcttcaagatgatgaaaaggcgacaggagtataagtcgtctatggaaatttttgccaatccgattgacaccttttccctcattcgtcacatgcagtcgaactggttgatgtggctattgtacttggaaacgcctgttggccaagaggaattgttttttgtggactcaaggatgcccctattgccaaagtactttgactttatagatgccgctgaaggcattagaaaaatgcaggccacataccagatgttttcctcagatatagccaaaggcttactagatggagtgcaatacaactcttctctaaaacccatcgattgtctcgcaattggtcttcatctgatgaataactcgcgttggtatgctgccgagcaatggataagtgctagcattgaagcctatgatcagaaaagttctcagaccgatatggagttattgaggggaccaaaactggctgacctgtgcagaatactgggtcaagtacaaatgaagcagagaaatcatgagggtgctcttcaagcctatcaggttgcgctaaagctttcgcctcatgacccagaaatatatgaggagtatcggatcctggaaaaaagagatcttacgttgtcagatatcgaaccgattgaacaggataaggacaactcccacgaaagattggttcttccgccctgttgcagtggtcgctgtcaagttccccgaaatctgagtaatctatattgtgtatataaccatgttacctccccatttctgcaactggcccccatcaaaacggagattctatcgattgatcccttcgtagtgctcctccatgacatgatctcccaaaaggagagtactctcattagaacttcgagcaaggaacacatgttgccgtctgccacaactgacccagatgcatccgatgacgaaacacaagtcgacacataccgcacctcaaagtctgtttggtatagcagtgacttcaacgatacgaccaagaagataaccgagcgcttgggagatgcgactgggctggacatgaactctacggagttctatcaggtcattaactacgggctagggggtttcttcgagacgcatttggacatgttgctgtcggaaaaaaacaggttcaatggaaccagtgatcgtattgccaccacactcttctatcttaatgaagttcgccagggcggcggcacgtacttccctcgactaaatctcacggtattcccacagccaggatcggccctcttttggtataacttggacacgaagggtaacgatcatatgggttccctgcacaccggctgcccggtcatcgtgggttccaaatggggttcgtag

SEQ ID NO: 20625 - protein, 509 aa, DROSOPHILA
MLFWRLVLLGMLYLSLSFGQLRENNAQQRFARSVVNMDDMLNLEDDLVSNVEKLAEALARKAKTIKWGVFKMMKRRQEYKSSMEIFANPIDTFSLIRHMQSNWLMWLLYLETPVGQEELFFVDSRMPLLPKYFDFIDAAEGIRKMQATYQMFSSDIAKGLLDGVQYNSSLKPIDCLAIGLHLMNNSRWYAAEQWISASIEAYDQKSSQTDMELLRGPKLADLCRILGQVQMKQRNHEGALQAYQVALKLSPHDPEIYEEYRILEKRDLTLSDIEPIEQDKDNSHERLVLPPCCSGRCQVPRNLSNLYCVYNHVTSPFLQLAPIKTEILSIDPFVVLLHDMISQKESTLIRTSSKEHMLPSATTDPDASDDETQVDTYRTSKSVWYSSDFNDTTKKITERLGDATGLDMNSTEFYQVINYGLGGFFETHLDMLLSEKNRFNGTSDRIATTLFYLNEVRQGGGTYFPRLNLTVFPQPGSALFWYNLDTKGNDHMGSLHTGCPVIVGSKWGS

SEQ ID NO: 20626 - DNA, 2784 bp, DROSOPHILA
ccaatgcgatagcagatctgtagaataatcgaggcaattagctggggttatctaatcaaaagggaatatcaagtgactacgcaccaggaacgagatcagtccggtgatcaccagatagcccagcacatggtcgcggtaggtgatcagaatcaaacgcagattgtccgccagctgtttgatcacatagaagccaatggtccagccgccaattaggacgccatacatcatggtacgtcgcggaaagagtttggcggccaaatagatgaccaccagcagggaggcgcatatgccgatgacaatgccgaccagatagtagaacacactgttctttgctagccgccgggcgctgaagaggatcagtatgccgacggcgaactgtgcgagacgccacagatccagcggaatgctattcagaatgacggtgtacgcctggcgggaggaaatcccgatgcactgctgctcgaagggcgagagctgcagcagctggcgcttctgcgcgaacagggtgatgctgaacagcgattgcttgtccttgtagtgctgcaacacctcctccggcgtcttcccaccgtactgggaataatcatcgctcccgatggccaggacgaactccacagtctcgaagagacttgacaccgtcagccgtttacccggatagcagaacgtgcgcagagtctgcagtcccaagatgttctccgacaaattgatgtatgtgcccggcgtcaggtaggcgacgtccgaggaagccgtattgccaggaatacccgatgtgaaatatccagccacggttagcatcagtagtccagccgaatgcattatgaacggttgcaatggcgttaatcttatcaatcagtgcgctttcagtctgttgctctcgcaggacgttcgcttgttaaatgctgacttgcttatgcttgatgttttgatgtttaatctgctatcgcattggtccgcccaagaatcctcgatcgcaaaccatcgtcatgtgggtgctgcaggccattggcgccgttatggcttacttcagcagctggcacaccagcgccgtgatcttcatcatggtgctggtctttgtggcccactacttccccatttcgtggacgaaccagatcaagttcatgtatcgccgccgttttccgctaaagaggcgcatgctcacccaggaggagtacgaacagcagacggccgtggagacctcgaaatcgctggcggacctgcgcaagtacgtcaacagtccggagtgcaagcagtgggcggtgatgggcaaactgcgtgatcctttgcgcttcgcctcgttcgccaatggagcaccgcatctggacgacgaagagatcgaggaccactcgcgcaccatcgaggagtccatggatgcggcgcccgaggaggaatcagtggaggaacctgaggaggataaaccagcggagttactgccgctgcccaactcgcagttccgctatcaacaggccgcccgcaactcggagccggagccggagtcggagtccgatgacagcgaggaggaggagttcttcgagcaggaggtggaccttcggcaagtagtacaataacggacgaacagctcaaccacaaggggaaccactgattaggcttaattgaaaccattgaccaccacgttctatgctgtaccgttctgtaaaatttgtttgtttggttaccctttctaatatttgtataatcacttgcagactgaacggaaacacacatattaatacaaattatatatttaattattcatgactggctaggaataaaaacacttatacactaatgcataagtttatttgttgcaaacattccagggtacagccatcccgctcattttggcggagcacaggcgatcggtagccactggcaagcctccgatggcggcgtgtgcatctggccgggcagcatcttcaccagacgacgatcgtcgtcgaacttttcggcagcacagagcgtgagttcgcgctgccggaagatgagtgcgtcgcccgcgtaggcgatggtccaggtgctggtcgaggagctgggactgccggagcgcagggcggccaagcgattgccctggctgggatcgacgaagtagtaccacttgaagagctcgctacgcagcgtgaagagcggcgtggagtgctgctcctggacgaaggcgcgtgtcaggcccgcggtatcggtgaagttcttctcgcgccaggagaacatctgccgcccattcagaccgtagttccactcgtccgttatggtcgtgtagatgtactcgcgatcggagcgactcagcaggcagaatccctgcggatcgaagagcaagtctagaacgggcggcagacgttggctcagtgcctccactcgcttctggagatccgcatcgacgctggcgtacatgtgatggctccggatcttgctgaccatgtgcgcgacgttgaacaggtacgcctcgctgctgtcctgcatggcctgatagcgccagaagagcgccaattgcgcctcgatcatcgtgcgaaagctgacctcgtcgcgatccgcgtacagttgctccagctgctgcaccagcttctccagcggtcgatggaagtacacgtcctcgatggcgtgcaccagaatgtccctgaccagggcgggctccacactggccgctatgtacataccgtatgtctgaatgctctcctcggcgttcaacagattggccagccgctgggccatgagggtccgcaggtggcgtcgcacctcctgctgcagctcgcaggcagatcgacccgtggagccgctactgcactgcacatcgtc

SEQ ID NO: 20627 - DNA, 1700 bp, DROSOPHILA
taaacatcaaaacatcaagcataagcaagtcagcatttaacaagcgaacgtcctgcgagagcaacagactgaaagcgcactgattgataagattaacgccattgcaaccgttcataatgcattcggctggactactgatgctaaccgtggctggatatttcacatcgggtattcctggcaatacggcttcctcggacgtcgcctacctgacgccgggcacatacatcaatttgtcggagaacatcttgggactgcagactctgcgcacgttctgctatccgggtaaacggctgacggtgtcaagtctcttcgagactgtggagttcgtcctggccatcgggagcgatgattattcccagtacggtgggaagacgccggaggaggtgttgcagcactacaaggacaagcaatcgctgttcagcatcaccctgttcgcgcagaagcgccagctgctgcagctctcgcccttcgagcagcagtgcatcgggatttcctcccgccaggcgtacaccgtcattctgaatagcattccgctggatctgtggcgtctcgcacagttcgccgtcggcatactgatcctcttcagcgcccggcggctagcaaagaacagtgtgttctactatctggtcggcattgtcatcggcatatgcgcctccctgctggtggtcatctatttggccgccaaactctttccgcgacgtaccatgatgtatggcgtcctaattggcggctggaccattggcttctatgtgatcaaacagctggcggacaatctgcgtttgattctgatcacctaccgcgaccatgtgctgggctatctggtgatcaccggactgatctcgttcctgatctgctatcgcattggtccgcccaagaatcctcgatcgcaaaccatcgtcatgtgggtgctgcaggccattggcgccgttatggcttacttcagcagctggcacaccagcgccgtgatcttcatcatggtgctggtctttgtggcccactacttccccatttcgtggacgaaccagatcaagttcatgtatcgccgccgttttccgctaaagaggcgcatgctcacccaggaggagtacgaacagcagacggccgtggagacctcgaaatcgctggcggacctgcgcaagtacgtcaacagtccggagtgcaagcagtgggcggtgatgggcaaactgcgtgatcctttgcgcttcgcctcgttcgccaatggagcaccgcatctggacgacgaagagatcgaggaccactcgcgcaccatcgaggagtccatggatgcggcgcccgaggaggaatcagtggaggaacctgaggaggataaaccagcggagttactgccgctgcccaactcgcagttccgctatcaacaggccgcccgcaactcggagccggagccggagtcggagtccgatgacagcgaggaggaggagttcttcgagcaggaggtggaccttcggcaagtagtacaataacggacgaacagctcaaccacaaggggaaccactgattaggcttaattgaaaccattgaccaccacgttctatgctgtaccgttctgtaaaatttgtttgtttggttaccctttctaatatttgtataatcacttgcagactgaacggaaacacacatattaatacaaattatatatttaattattcatgactggctaggaataaaaacacttatacact

SEQ ID NO: 20628 - protein, 454 aa, DROSOPHILA
MHSAGLLMLTVAGYFTSGIPGNTASSDVAYLTPGTYINLSENILGLQTLRTFCYPGKRLTVSSLFETVEFVLAIGSDDYSQYGGKTPEEVLQHYKDKQSLFSITLFAQKRQLLQLSPFEQQCIGISSRQAYTVILNSIPLDLWRLAQFAVGILILFSARRLAKNSVFYYLVGIVIGICASLLVVIYLAAKLFPRRTMMYGVLIGGWTIGFYVIKQLADNLRLILITYRDHVLGYLVITGLISFLICYRIGPPKNPRSQTIVMWVLQAIGAVMAYFSSWHTSAVIFIMVLVFVAHYFPISWTNQIKFMYRRRFPLKRRMLTQEEYEQQTAVETSKSLADLRKYVNSPECKQWAVMGKLRDPLRFASFANGAPHLDDEEIEDHSRTIEESMDAAPEEESVEEPEEDKPAELLPLPNSQFRYQQAARNSEPEPESESDDSEEEEFFEQEVDLRQVVQ
